United States Patent Application Publication US 2024/0084332 A1 - sequence listing, part 9

SEQ ID NO: 37174 - protein, 645 aa, Streptomyces sp.
MACARGLLRSGVVEKSGEVLSAAVLAERVGWAADLVAGMAAGLLSGHWNAADVDSLASGVDAEGRGLPSNAWMALRRLGWTTAPAGGVRVNDRIVRMAQEQAGRLLRSATWRADLTTGVLATWPAEPDRRTPGEWDAVRAAVPDGKHLPSGVIRSRTRQIAAFAGRYGRLPVDVFELEAAPRAARMLLLSACDGQQATLTHGDDPGRALLRVQLPTRPDPRSYTDWSWVACPITRPPTVPPGAVLHLPTLRVHQGRVHADLAYTHAVPVARRSGHTIALGVDWGLNTLLSAGVVHLHDDGTITAPGSGAQFRAAGVLARQHRLRRELEYLHAKTGHYERLIAGDGTHPLTDRQQVLAEEIRYVCDRRSHLNDALARSAARWTVDQALTAGASVIYVEDLRSLEAQGMGRTLNTRLSQQVRGRIVERMRHVAAEAGIAVVTLPARDTSRRCPRCLVPLRHRKAPDRPTTPGWKWAVCPNPECGWQGDRDTGAWQRIAARGLAHQTKTVTDRATGTMGIRSVVDKLEATAVVTPATKTSRADRSKTGPSRRRRTTRPAPRRRGAPSLVGPTGPAGKRPEGHAPPGRMRLPRAAHRHQGVTTISTPTTRRHRPRGAALGAGFHLHAHATPPRWAEPTPNPTVHMGSLS

SEQ ID NO: 37175 - protein, 645 aa, unknown
  TnpB Polypeptide
MIEIKKPPDDFFKCVKVPIKHVLKHFNINSPKITNTVVKCNKIVIHCLQFMKLYLLDYYEKNSKLPIIDKTFINSCMKILCNKNGNGRPPKQETKKIKDTLITFYDKHYKELMQPEELDYTHSNTILDYLTIDIITMYENNIKQHYIEYIERYVNVIWNKKMMIEKIRKIKKTKKERDSTISQLCTELRKIKNDILNVENSTFKSKSFYHEWIAEQKKFIIPVKDKFNKNNLYYDLQCSPQDYFQCMIYMMTRIESDNYPINNVFPMRTEIIPKHIRLDTTTLIHLLITKKQGNKTDYLFKGNLKRNEDKIWSFFFRTELQCFKKKFYTFHHMVETDGISCSILLLRNDKIGKKVRVNKIPNKEKYIDELEDYSSLQNKTIVAIDPGKSDILYCVNGDTNEATKFRYSQDSKRKETKSKKYSKIILELKKEQINNKTIIEYETELSKFNHKTLQINEFKQYIQKKNEINSRLFEFYEKYLFRKLKLNGYINRHKNEQKMINKFTEIFGDNKQTIVCFGDFEQKKHMKFKEPIKGKGMRTLFRRNGYQTYLVDEFRTSCKCSKCEGGNCENFMVRENPKPFKNDLKLVWGLLKCKTCGCVWNRDCNGATNIYKISRNIINGKKRSSYLCRNNLSVVLDDTTNSKFT

SEQ ID NO: 37176 - protein, 337 aa, Bacterium sp.
MIRTYKCRVKLSKSGHETLSQIFGMSAELYNAGLESRIDCYRKTGESRSLYDQYKELVQVRAELPEFEAVSSIVFRGVLSRLDKAYKRFFKHGGFPRWKSGRRWRTIEINDQCWRMLKKQGDKLVLKVKGLPRIEVRPSRELPPNNLLKAIRITRKPLRTEVCLSYDLPTPETKPLSNPVGIDMGISKRLTLSDGETVEKREIDRKKIIRLQRSVSRKVKGSNNRSKAVSLLAKEWQRLTDKERDYLHRLTSEIARMYDFIAVEKLKTKNMLRNTNLAKSIQEQTWGKFITLLDEKAESAGVKMTEVDPGGTAGMLELRSNGKEVSVCACSQMFMWL

SEQ ID NO: 37177 - protein, 382 aa, Singulisphaera sp.
MDTVRTIVCKLTPTPEQRVEIDATLKAFALACDFTAESARSLGFTNKVKVQHACYRKIRETFGLSSNLAIRAIARACAALKVSAKMHSAFAPTSIDYDARIFSFHEWNWTCGLTLLSGRVKLTTKLGERQKTALKGRKPTSAVLLKRRDGAYFLHVQLTDEAPESIETKGTIGVDMGVKNLATTDDGENFSGADVDACRRKYSQARKTCQRKGTKSAKRKLKKISKREARFRANENHVISKRIVAKAKDTASAIAVEDLGGIGQRTTARKADRSRMKGWAFYQLRQFIAYKALAEGIPVIPVDPRNTSRTCSECGHCEKANRKSRDEFVCKHCGFELAADWNAARNIRDRGKVMCPNVGVVDTGGRNPVETTGKPVLASPRL

SEQ ID NO: 37178 - protein, 308 aa, Mycobacterium sp.
VQRHLVSGRAQILNMTLSQRWGRLFVAVCYALRTPTTRSPLTQPTVRAGMDLGVRTLATVATLDTATGEQTIIEYPNPAPLKATLVARRRAGRELSRRIPGSHGHRAVKAKLARLDRRCVHLRREAAHQLTTELAGTYGQVVIEDLDVAAMKRSMRRRAFRRSVSDAAMGLVAPQLAYKTAKCSGVLTVADRWFASSQIHHGCTSPDGTPCRLQGKGRIDKHLLCPVTGEVVDRDRNAALNLRDWPDNASRGPVGTTAPSAPGPTTTVGTGHGADTGSSGAGGASVRPRPRRAGRGEAKTQTPQGDAA

SEQ ID NO: 37179 - protein, 443 aa, unknown
  TnpB Polypeptide
MYKIGGEMMFKTISYHYKINDKNILKILQFLCHVSKNVYNTALYELRKEFFDNDKIMSYYDLNKLVLKNINSHIINTYQTLCIDRCAYNSMNTFARFNKYKSNVKLPKYLDKKGYYPLITDQIRIIDNNGKKSIKLPVSNLFRTKNMFNLDLNNDSLLKEFINEIKDIEIRDIYFNIPKKIYNNKIHQLRIIPNKNGNYFKIEFSYSYELNNKYKGIEDRILGIDIGISNLAACVTNYGESFIIDGKYLKSINVLYNKKIAKCQSKLTDGIYSSKMINKLRLRRDNKIEDYINKSVATIIKEAKINKISKIIIGWNKGIKTFGIKNDSMKKKDKRIINQQFVGLPLARFKNKLVMKCKNEGIEAEIINEAYTSKASSLDKDEIKEGNYSGKRIKRGLYQTKNGFIINADINGALNIIRKCNSNELNIQMSRGLTSPCRIHVRL

SEQ ID NO: 37180 - protein, 383 aa, Nonomuraea sp.
MVVCSIVKLVVQVKLLPTPQQAAALEATLHAANRAANLVAALAFEQRCFRTFDLRKHTYDQIKAEFALAAQAAQHVIKKVCDAYRTLHANLAAGNLGKLGSPRRVKAEAKPISFRPLAAQPFDDRCLSWQHDARTVSIWTTAGRLKGVAFTGSAGQLAAHRRGESDLVCRDGMWFLHATVEVADAPIAVPDGFLGIDLGIANIATTSDGVRHSGKALKAVRHRHRQLRRRLQAKQTKSARRLLKRRRRKEARFAADTNHVIAKQIVTEAERTGRGIALEDLQGIRDRVRLRKPQRVTLHSWSFHQLGGFIGYKAHRAGVAVIHVDPAYTSQQCSSCGHVDRQNRLDQASFLCTSCGFAEHADVNAARNIASRGETGWAVSHAA

SEQ ID NO: 37181 - protein, 552 aa, Nonomuraea sp.
VLRINVRQSLSGFLQRDCGLSRVIGVGSVVCALVDGMMKRWRGLRFGAASDWRSLPYLFPVTMCMQNITQRAVMLVGSFAQALEYAREGRVMRVVQAYRFALDPTARQGAALASHCGAVRVAFNWGLAQVKANLALREAERSYGIADDRLTPALSWSMYSLRKRWNQVKDEVAPWWADNSKEAYACGLARLADALANWRGSQQGKRKGPKMGFPRFKTKRRAARSVRFTTGTIRPDGHTHVILPVLGRIKTHEPVGKLARLLADGGARMASATVRCQEGRWHVSFTVHTERPPGKPARPDAVIGVDLGIKTLAVFSDGRPPVANPRHLTTALRKLRRLSRAVSRRHGPDRRTRQQPSQRWLRANAARNRAEYRVAALRRDGIHQLTTSLARTYGTIVVEDLNVAGMIRNRRLAHAISDVGFGEILRQLAYKTGWHGGRLVVADRWFPSSKTCSSCGAVKAKLPLRVRTYVCEGCGLSLDRDVNAALNLASLVERTVAGSGPETRNGRGADHKTPPGGAGGCEASTPHRASVARIRRGPSPTTGESLTILETQ

SEQ ID NO: 37182 - protein, 436 aa, unknown
  TnpB Polypeptide
MLLTTKVHIDNSHKDFQVLGRMCYHCARMYNVGLYSVRQHFFNTGEFLSYYDNYHLCKTNENYSLLLTDTGQQILRLVDRDMHSFFGLLKLKKLGKYSNPIHLPKYKDKEGMMTCSIQGRSVRIRDGKARIGLTKEFRELYNLKEKCVEFTIPTNILSVGKFNELRIIPQYGGKHFSVEFIYDSSQLPSYAQAQGDGFMSIDIGMDNLMACTVFSNGQSCQFLIDGKPLKSINAYYNKTIARLKSEYSKNKGIASQNTKRMLRLYDGRANRINDYFNKAVSLLVRKCIDMNVTHIVIGYNKEMKQEINTGKVNNQNFVSVPFYKLRQKLQCKCELHGIEYVSQEESYTSKASSLDMDSLPKYGVETAPQFSGKRIKRGLYRSSDGSLINADINGSVNILRKYFNERKWNWIFQDHVRAFVNRPCQRINPLCKSSFL

SEQ ID NO: 37183 - protein, 227 aa, Bacillus sp.
VSNNITKQAVKDLCDAYKKFFKGLAKKPRLKSRKGSKVSFYNDNVKLKIKEMSVLLEKVGWLETSEQIPVGVTYTNPRVSFDGKYWYLSVGTEQEQEKETLTDEVVGIDVGIKDLAICSDGMVFKNINKVVVVKKIEKRLRRLQRRVSRKYEMNKEGSRFVKTCNIIKIEKQIRRLHRRLTNIRDNHVHQATNTIAKTKPCKVVMEDLSVSGIVTWLKLSRSRNCMN

SEQ ID NO: 37184 - protein, 397 aa, Streptomyces sp.
VALQVKRAFKYRFYPTDMQAAELSCTFGCVRLVYNKALQERTRAWYGEQRRISCAQSSAALTEWKKTGEPAFLTEVSSVPLQQALRHLQAAFGNFFARRAKYPRYKSRKKSRASAEYTRSAFTWREGELTLARMAEPLDIRWSRPLPAGAEPSTVTVSRDSAGRWFVSLLCQDAIAPAPATDAAVGIDAGLTSLVTLSTGEKIANPRHERRDRARMTRAQRELSRKVKGSANRDKARRKVARVHARIADPRRDFLHKLSTRLVRENQTVVIEDLTVRNLLRNGKLARAISDASWTELRSMLEYKCAWYGRELVTVDRWFPSSKLCGNCGTVRERLPLHVREWMCDCGAVHDGDVNAARNIKAAGLAASACGAGVRPQRESSRTGQSAMKQEPPRREP

SEQ ID NO: 37185 - protein, 369 aa, unknown
  TnpB Polypeptide
MDLTMQKGIKFRIYPNKEQQLLINRTLGCCRLIYNKGLAMRNEAYKKNERTSYTQTSAMLTELKRHDEYAFLKEADSVALQQSLRDLDRAFINFFQKRAGYPSFKSKHNHWQSYRTLNQNDKIHIAGKYIRLPKLGYVKLRQSIEVGRIHNVTVERVPSGKYFAVINAEFTPKELPVADKVIGIDVGIKAFYTDSNGKTVENPKYLETSMKKLIREQRRLSRKQKGSRNRQKQRRKVAVVHEKIFNQRNDFLQKQSTMLIRENQTICIEDLHVKAMVKNHKLAKAVSSVSWSKFFTMLEYKAAWYGRTVQRIPVMYPSSQTCSVCGYKNPKVKDLSVRAWMCPSCHTLHDRDINAAVNIRNKGLELLSA

SEQ ID NO: 37186 - protein, 358 aa, Haloferacaceae sp.
VTNSPTSNSGGTTFPPSTRRCFRRPSCVLLITSTHSESSNRTATASANSRGNRHESSAVSRTVNPASSSTRRAVGRDCASQNPATFRYGFTAPSPTTRNSSRSRSRRNRPASGTLPSASNSTVNRRRGPGIPCGVLVSTWGFSRTPTIPTGQQSSRSTCLPNVSGWSAQRKLSRKQHGSANCEKQRHRVAKCHADLRRKRRDFLHKLSNYYAREYDLVAVEDLNVAGMMQFNSNSRNRASAAWGTFLRMLEYKCEREGTHFIPVDPRNTTKECAACGVKTDKPLWVRKHSCPACGFTADRDWNASWNILRRGITKVGAGRSESPPVETALPTGTTVVPAKRVVETGSPTLTERAKASE

SEQ ID NO: 37187 - protein, 430 aa, Haloferacaceae sp.
MRRVNSFTVVPRSDADEELLRRLLDASASLWNQLTYERRQNFTDPDIDKSVWDTEDYRKQYVGVLGSATAQQVIRKNTEAWRSFFALKEKGEANGLPGYWGNEEEGRELRTYIRNDQYTLRWGDRSTIEITVGSDLKDEYGMGYRERLTLDVRGKPKWSGDQGRLELYYDELSDQYRAIQPVTTDDSRQDSPLADETAALDIGANNIVACTTTTGQQYLYEGRDLFKRFRETTRRIAEQQSKVKREEGRYTSKRIRRLYRRRTRRRDHAMDALARDLFERLYDEGVSTVYVGDLTDVLDTHWSVRANQKTHNFWAFRAFIDRLACTAEEFGITVEVRPEAWTSQECPQCGSTDRTTRHQDTLTCPCGFEGHADLTASETFLRRHETDVPRPMARPVCLKWDDHTWSESPRSHESLNEEHTNPQVTAGNSA

SEQ ID NO: 37188 - protein, 256 aa, Moorea sp.
MIVREAKLLNGSLAQYQALDEAIRTAQFIRNKAVRLWRDEPKVDKARLSLLCKELARAYPFAKNLNSMVALASAERAWNSISNFYRRCREGAKNKGYPQFKKHSRSVEYKTTGWKLSPECMTINFTDGFKAGKFFLFCNSETREDLFRLKINRVRVVRRADGYYAQFCFDANRKEVGNYTGEVIGIDLGLKYFYKDQKDNAAIYPQYLRRAEKRIKKLQRRNQRKFVKGQRPQSNNYHKARIRLGKCHLLALACRR

SEQ ID NO: 37189 - protein, 370 aa, unknown
  TnpB Polypeptide
MEYSYRFRLYPNRVQEDLIQRTFGCCRFVYNHYLDMRIEAYKGRGETMNYAACSRNMTILKKEQTWLREADATALQSSLRDLDTAFQNFFRGIREGKHVGYPQFKSKRSSRKSYKSKRTGGNIAVEGNKVKLPKLGLVKCAVSKEVSGRILSAAVSQAPSGKYFVSICCTDVEIEALAPTGAAVGVDLGIKTLAATSDGGTYANNRRLYDADKRLRRLARRVSRKKKGSNNYEKARIRKARLEERIANQRRDDIQKATTDLIRKYDVICLEDLKTKGMMQNHHLARSVSDASFSEFRRELEYKAAWYGRKISVIDTFYPSSQLCSCCGYKNPDVRELKVREWTCPQCGARHDRDRNAAVNILQEGLRLIS

SEQ ID NO: 37190 - protein, 406 aa, Lactobacillus sp.
MEQIITAKVRLYPTHEQIQQFEAITREYRDICNIVSQWYFDNHFVAKRKQFNKEMYHPLRSKFPRVNSAMIQSTYRTVEARYKTVETQLYQHPYKYKDINTNEWHREFRDLNWLQHPIKFSRPQADYVRNINYSFVQKGTKISLNVLDERIKVSFNGDYLNFFDPSYKLGTAKLVKLKEHWFLHIPVTIETEEWQKDDNQHVVGIDRGLRFLTTSYDEKGKTNFVSGKSIAYKRKKYAYLRSKLQAKGTKSAKRKLKRLEHQENRWMSNVNHCLSKTLVKQYGQNTLFVLENLADVTFEKSNANKNLTRELHSWSFYDLQTKLIYKAQKSKSQVLIVSAKYTSQRCPKCGQIRKENRNHSLHEYKCVNCGFRTNDDRVGAMNLQELGKQYISGIEKPKFELNNVTD

SEQ ID NO: 37191 - protein, 379 aa, unknown
  TnpB Polypeptide
MMIRGIRIRVYPTKEQEIKFWQHIGACRYIWNYMLEIQEQRYQNKEIRLFSVDMIRLITPLKKDGVHGWLCNVSNASLQHVCKDLDRSYRLFFEKKKGYPKMKSRKRSKPMYPVRSDDMYFQDKVVNIAKIGKLKYKTDFNLPKGKGHKFKNPHIGYNLGKWYLSFGIECENQALELTDKSIGIDLGIKELATIAYGEEKLVFHNINKSKRMREITKKLKHTQRSVSRKYEANRNGREYVKTKNIEREEEKIRKMYAKLTNIRDNYIHQVTHKIISLRPNCVVMEDLSVSNMMKNKHMCRLIMEQKFFEFSRQMQYKCEWNGIPFIKADRFYPSSKTCSCCGSIKPILKLNERVFRCPSCGLKIDRDFNAAINLSRYKA

SEQ ID NO: 37192 - protein, 426 aa, Streptomyces sp.
MSQGTLVKRQFGHRARLVLSHAEVSAADAQAHAARTMWNLLHAWWQMMPKDKRTLAHADAAVRRARKDLDFLAVLPAQAAQAVLKTYVQAWKNCWQGRADAPNFKGRIRSVMSVDIPQGRDLNIKRVHRRWGMVNLPRIGRIRFRWTKDLPVGKRAGIENWITGARLIQDALGWHIAFRVTTLEPKPEPHRGGEAGIDVGVTVPLALSDGTTYEHGAWLTEKETAKLRRLEQRAAQRKAHRKSGDHTSRRLRRTYDQIAQLRAKAKRRATDWQQQTTTTIARIYGTVVVEALSITNMVKSARGTVEEPGRNVAQKAGLNRTIAAEAWGRTVTMLTYKTARYGGSLVKVPAPGTSQRCSACGVTTAGSRESQAVFVCKNPDCGWSGNADHNAARNILHLYRIGLVAIPAAGRAVVRRARRVKPPTAR

SEQ ID NO: 37193 - protein, 214 aa, Ventosimonas sp.
LEESQTQGSAPACSHRPRPPRYLHKATTAISQNHAMVCIEDLQVRNMSKSAAGTSEAPGRNVKAKSGLNKAILDQGWFEFRRQLQYKLDWNGGMLIAVPPQNTSRTCPACGHVSKDNRRTQAHFACVECSYENNADIVGAINVLRAGHARFACEVNPDVGDQQQEPAEVIQPGKCLAGRGRNLTCLARGGCQLLPEFLQTFGGNRTARAQGLRK

SEQ ID NO: 37194 - protein, 408 aa, unknown
  TnpB Polypeptide
MNPDTICIMQRLQAFKYELMPTGEQTRDMRRFAGSCRFVYNKALAFQKERYEQGEKRLGYAGLCKVLTGWRNSTDTAWLSDSPAHPLQQTLKDLERAYVNFFAKRADFPKFKKRGQRDSFRYPDPKQIKLDQANSRIFLPKLGWLRYRNSRFILGEVRNATVSLSAGKWFVSVQTSREVERPMPQATGAAGIDVGICRFATMSDGSFLAPLNSFKRHEARLRRAQRAMSRKTKFSSNWKKAKARIQRIHARISNARRDYLHKATTTISKNHAMVCIEDLQVRNMSKSVSGTAESPGKNVRAKSGLNKSILDQGWFEFRRQLDYKLAWNGGWLITVPPANTSRTCPTCGFVSADNRTTQARFHCIECGHEANADVVGAINILARGHRVAACGEPVQLGRSAKQEPTEAI

SEQ ID NO: 37195 - protein, 289 aa, Rhodococcus sp.
VSFSVEITLPARALPPTTAGTDSAVGDRGVGGSVVGVDVGVKHLAVLSTGEMIENPKHARKHAKRLRRLGRRASRQVGPDRSSGQKPSRRWLRTQEQIRAVHTRIADARRDHLHKLTTRLVRDFDTVVVEDLNIAAMTRSGGVYKRGLNRALHDAGLAEIRRQLLYKTEWTGTGLHVADRWYPSSKTCSNCQVVKAKLPLNVRVFTCDACGFRADRDHNAAVNLTALAAGDGGASSASCGRDVKDARQKPTIRPAARRADGTAAGTPPGGERDRGNPATHAECTRRHSA

SEQ ID NO: 37196 - protein, 352 aa, unknown
  TnpB Polypeptide
MIRSSEHILKYQTKSKSTLLSKLFFDYKQDLQFFIDLLWNKQLPLKKNLSSKILPSNILKHSQYKQILYKQASEIIRSNNLKNKTSKPIIKNISINIDSRLFDIKTDSKEFDEFIHLRLPYFFENKKKALYIRLPINYHKHSLKFKDWNRDNSIKLKEVNGHYFVIFSYEKKEPEKKIIGKDIGIDQGYKKLIVMSDGQFIGKEFEELYEKISNKKQGSKNFKDLLTERDKKINETINKINFKDVKQIIIENLKNVKRNSKNRIYKKFMNKLQRWCYQKVTNKLERYCEENGILLTRVDPAYTSQTCSKCGAIHKENRLLEFFKCIVCGYEIDADYNAAMNILHRGVYNPSI

SEQ ID NO: 37197 - protein, 443 aa, unknown
  TnpB Polypeptide
MKQHQHRHTGPYDPQTLTRAVTHIRLEVANAGKLTALDDLAQVYLALCQQYVTLFCTEARPNKLRAPLFATPLSERWHRVAIQQAAGIAQSWRTNRAQAYQDYADDLLDYHEQQTEGTLDAKTQEPAWKEWNIPTLRQTCIQANANVVELEPSEDSTFDYWLTISTLEFRKQLLIPVKLAAYHREALKGKTINTSVTLNKRGDGWWLTLSYDKEVPVHTAPSAPVVGVDVGIANFVTTSTGKHYGTFHGKLRERQKRDREKRRRKAKLRKCLEKKGVKKLPSTSSRTGQRLARHVRQEINRAVNQCFTEHPDAQIAYEHLSVATMKYKVRAMNAYLYASNLAHIPKQIAWNAVKRGRAAIRVRSAYSSQECSVCHYPDRANRPNQQTFCCVVCGYSTHADLNAATNIEHRWGDSELRACKDRKAVKALLLQRHEVWKTQNGWP

SEQ ID NO: 37198 - protein, 253 aa, Pseudomonas sp.
LAAIQGPRRDLSKRPGALQRHQYRTMGFLRTVQIHAQGGQLQRGFARALVLERGGQSRGGAKTRPVGSTVVGIDLGLKAMATYCHGGTFEPKRWYRDSQAALGIAQRARKKQRVKAIHARIANQRKNALHQESSALVKQHAAIFVGNVNAKALAKTSMAKSVLDAAWSTFRTQLQYKAMRQGVVFAEVNEAFSTQTCSCCGAKPPSSPKGRAGLGIRQWTCSDCGSVHDRDVNAARNIARLGLQTLEEGIPAL

SEQ ID NO: 37199 - protein, 440 aa, Streptomyces sp.
VTSELGLEKRQFGHRARLALSPAEIRLIDDQAHAARTMWNCLHAWWTMLPKAKRTLAAADAAIRQARKEIDWLGALPAQAAQAVLKTYFQAWKNCWEGRAEEPNFKARFRSAMSVDVPQGRDLQVTRVHRRWGMVNIPKVGRVRFRWTRDLPVGKTANADNRITGARLIKDALGWHVAFRITTLEAKPEPHQGPQAGIDAGVTIPLALSDDNHQDHGRPARLPNGTSDRDKWLKADEKAKLLRLERQAARLKQHRKPGQRSSNRLRAVYDQIGKLRAKAKRRATDWQHQTTTYLARTYSVLVVEHLDIPNMTKSARGTIEEPGKNVKQKAGLNRSISQEAWGRTVTMLTYKTARYGGTLHKVPAPGTSQRCSACGFTTPGSRESQAVFVCKNPGCGWSGNADHNAARNVLHLYRMGLALVPAAGRAVVRRPRRVKPATAR

SEQ ID NO: 37200 - protein, 345 aa, unknown
  TnpB Polypeptide
MVRGGEEIRATVLGKLDFENGENRALLLYTMRLFRDAVEFAHNLLKKGLSKNQIVKLVTSRVLNNKWYSMSAYVRAKLYEEQQFLKLRKPQLYSVGSSDEGGNRNIKLVSSSIVEIKNPSANGRHRWISCKVGFGRKHIPVIRRVIGEGISYGAGISLKDGKFFLYVNVPVEIYAEEMRNEIRSNAKPKYFAGFDLNSDRINMVIVDGRGEIRDVKSEHFPEVTSHGFPKEKAKTIRQHALAKLVKYAREHGAKYFVIEILKRTKTKTMSKTANRKISKFALREYLNQMRILAKKIDGTLIEVDPAYTSIDAIPLAKKLGIDRHTASAYLIALRGLMLLKNHKNI

SEQ ID NO: 37201 - protein, 343 aa, unknown
  TnpB Polypeptide
MVHRGGQSSSEEKECITIKGRLEFPDIVAKAKIFYTMRLFREAVERTFILFKKGLKDREAVKRVTRYMNNAHYSYSALQRAKMYANQNRLRLRKPQLYSIGKACEKGNRNIRLVSKDTVLIKMPHADGRHEWVECKVKFGKKHLPIIEELINAEFPYSVAVTLNNSKFYLHVAVPLEIVAKYDHHPKVSERSGYIAGFDLNSDRINMVIINEHGEMVDIKNKHFPEITQHGYSTNKTRDAVLKALSELIDYAAHHNVRYFTFEKLGNIKRKKTRNKNANRKISRFPYRTLLTHAKIMVKKRNGVFATVSPAYTSIDAIPLSRKLGLDIHTTSAYLLALRYLNL

SEQ ID NO: 37202 - protein, 203 aa, Oceanobacillus sp.
LTEYENEIKSKEVHQVAGLDFAMDGLFVDSETGKKANYPRFYRQMLEKLAIEQRKLSRKEKGSSNWNKQRIRLAKIGEKVANQRKNFLQHKSKVLVTKFDAIIMEDLNMKGMSQALQFGKSVMDNGWGMFTFFLQYKLKEQGKQLIKIDKWFPSTKMCSSCSLVKEITLSERTYLCSCGLNMDRDYNAAINIKNEGIHLLGIS

SEQ ID NO: 37203 - protein, 404 aa, unknown
  TnpB Polypeptide
MQSFKTELDLNNQQKTRAAQHAGTSRHAYNWGLALCKQLLTYNKENPTDKIKFPTAIDLHKLLVASVKNENPWYYESSKCAPQEALRNLTKAFKRMHRVKKSGFPRFKKKNVSDSFYLEGSIRIRGNKIKLPIIGWVKCHEQLPSVMPKNVTISKRAGRWFIAFKLEKTPVNNQILGEPIGVDIGINTLATCSNGFVANNPKAYRKTKRKLAKLQKELCRRTKGGSNREKTKLFLARCHYRISSIRSDTLHKLTTHLAKNHSEIWIEDLNISGMLKNHKLASAISDCGFYEFKRQLEYKTSWYGSKLCLVSRWFPSSQLCSSCGARQPMPLSQRQYDCGSCNLSIDRDLNASINLRHLSGGILPPENAVLNYRRIAKPSKPSDGSPLPCSKLGTELQGYVGRIE

SEQ ID NO: 37204 - protein, 354 aa, Alkalibacterium sp.
VIEVKRVKKEQTQSCVKVLKVKLKPTKEQAAELTRLSKEYIYHANQLVQKAVSDGRFPTVTSRHIETSIPSVVKNELIRYAKSKYAEHGNCVFKKRTVSWNNQNYTVTPNHLAFPIMQKGKSMKTAIKAVLTSDQFDLLSQSKRGAMRITKKGYHWIAQIAYHVLPSETTGTDILGIDLGILCPAVGVVASSGQTAFFGNGRANKVIRRKYKKLRRELGQKKKLNAIRTLNDKEARIMQDINHKIARHIVRFARDTNCGTIHLENLSGIRRTSRQRGKHTAILHNWTFAQLTDFIEYKAREIGIVVKKVNPEYTSQTCPTCKARNKVTDRMYQCGCGYRGHRDRVGALNIAQTT

SEQ ID NO: 37205 - protein, 375 aa, Kutzneria sp.
VKQVLQVRLLPTPEQASALLATLHTCNTAANWVSERANAQQIFGKFRMQKAYYRELRSEFGLAAQPAILVIRKVAAAYARDRTRRHRWRRDSAQAYDVRCLSLRFVASGASSSATASIWTVRGRLTGIRVLGEQARGDQLRGITFGESDLIHRRGVWLLALTREVEAVTCRPPADFLGVDMGVVNIATTSDGVRYSGSRLNRYRRRQVRLRQRLQTKGTRSARRLLKRRNRKERRFATDVNHVISKSIVAEAERTGRGIAVEQLAGIRERVRLRKPQRAALHQWAFHQLGRFLGYKAAGAGVVLVEVDPAFTSQTCRTCRYVSSRNRRSQAVFMCGGCGFVGHADHNAAGNIADRGIARWGEVMRPHAAPTLAAS

SEQ ID NO: 37206 - protein, 388 aa, unknown
  TnpB Polypeptide
MKRAYKYRFYPTPDQAELLAQTFGCVRFVYNSILRWRTAAWYERQEKIGYMQASARLTALKKEPEFAWLNDVSSVPLQQALRHQQTGFSNFFAGRARYPKFKSKRHKQAATFMNTAFKYRDGALYMAKSTAPLDVRWSRTLPSAPSSINITRDVAGRYFVSCLCEFEPASLPFSPKTTGIDVGLKDLFVTDSGFKSGNPRHTAKYAARLALLQRRLSKKARGSKNRAKARMKVARLHAKIADCRLDALHKATRKLINENQVVCVESLKVKNMIRNPTLSKAIADAGWGEFMRQLKYKAEWAGRSVVAIDPFFPSSKRCSCCGFTLQKMPLDVKKWSCPECGAYHDRDVNAARNIKAAGLAVLAHGEPVNPEPHKAAQVRLGEVGILSL

SEQ ID NO: 37207 - protein, 316 aa, Beggiatoa sp.
MDIKKDLLKQLPKWCGPVPYQIKAIAVKEAHQAYWKAKGHPKFRSRKAPTQSCYIPKSAINKDEGIYPTISGQGLRYSEPLPEVPLDSRLVYQYHEWFLSIPHKKKAHVAENQGRVVALDPGVRTFQSFYSEHLAGQIGYDDFGRIQRLCHHLDKLISRTCQATGKAKREMKRAAARLRKKIKNIIKEIHFKTARFLVDNFDVILLPTFETSQMTGKSSRKLRSKTVRAMLTWAHYQFKVRLKNKALEFCKKVIDVCEAYTSKTVSWTGEIKNVGGSRVISSGGITLDRDLNGARGIFIRSLVDSPSLTGAIVNVC

SEQ ID NO: 37208 - protein, 358 aa, Psychrobacter sp.
MKTLKLRIKDKHATQLNILAGSVNFVWNYVNELSFKHLKRTGKFFSAYDLAAYTKGAGEYLNLHSQTLQAISEVHSKSRKQFKKAKLNWRTNNPKAKRRSLGWIPFKKTAVKHLSTRQSGKTSLKSTIQLSLAKGKKLTIDLWDSYNLALYRINTCELVQDNRGHWYACITVKEFPKIKCGTGQVGIDLGCKDSAVSSDGDQLQIKVTHQYAEKLATAQRAKNKKRVKAIHAKIKNTRQDLIHKFTSKLVKSNSLIVVGQIKSTSFTSSKLAKSVYDAGWFEIKRQLDYKCANAGCHYIEVNEAYSTQVCSCCGSRQDSPKGREGLGIREWFCRSCKTTHNRDVNGAKNILAVGLDRL

SEQ ID NO: 37209 - protein, 358 aa, Psychrobacter sp.
MKTLKLRIKDKHAAQLNILAGSVNFVWNYVNELSFKHLKRTGKFFSAYDLAAYTKGSGEYLNLHSQTLQAISEVHAKSRKQFKKAKLNWRTNNPKAKRRSLGWIPFKKTAVKHLSTRQSGKKSLKSTIQLSLAKGKKLTIDLWDSYNLALYSINTCELVQDNRGHWYACITVKEFPKTNCGDGQVGIDLGCKDSAVSSNGDVLTTKLTDQYAEKLAIAQRAKNKKRVRAIHAKIKNTRQDLIHKFTSKLVKANSLIVVGTIKSNSFTSSKLAKSVYDAGWFEIKRQLDYKCANAGCHYTEVNEAYSTQTCSCCGSRQDSPKGREGLGISEWFCRSCKTTHNRDVNGAKNILAVGLDRL

SEQ ID NO: 37210 - protein, 432 aa, Moorea sp.
MNRWLDMLLAQYNYLLRDRNESYDQVRSPRLGNYCDFKSKGEACPLTCSVNKSHSIGYPWKKSQKNPRRNAYEAQSSSLPTLKKERPWYKTINSTVLQQTLRQLDVAFSKFFKGETEHPKPKRRSRFRSFKYAPGQVKLDGNQIYLPGIGWMRFHKSRPIPDGFTVKSVTVRRKARGWFVSLQIEDKSVPDPSVKTKGEIDASRVKGCDLGIKKLVSISNGEIISNPANDKKSKRQARRLRLRQRSASRKKKGSKNRKKSFSRVASLHDRITDKRRAYHWETAKTLTNEADALIFEDLNIKGMKSRCKPKPNENGGYERNGQSAKRGLNRAISNAAWGELVKKVEVVAAKSGIPVIKINPKHTSQRCPKCHHTSGSNRKKEKFVCTECGYHDDADVNGAVNIKMRGLKKLGIDPTQLPSVRGKVTPTELTAI

SEQ ID NO: 37211 - protein, 381 aa, unknown
  TnpB Polypeptide
MKKIKRAYKFRIYPDLEQSRFFIKSFGCVRKVYNLMLDDREKAYEEYKSTGTKTKYPTPAKYKEKYPYLKEVDSLALANAQLNLEKAYKNFLKNKDFGFPKYKCKSNPVQSYTTNNQNTIYIKDKHIKIPKLKSLVKIRMHREIKSLIKSVTISKNSLDYYFISILCEEEIEELPKTNKNIGIDLGIKEFATMSDGTKAANLKFTKEYEKRLKREQRKLSRRGRLAKSSNRKLSESKNYQKQKKRVAKIHNKIRSKRKDFINKLSTEIINSHDIICIEDLNIKGMLKNHKLARSISDVSWSEFGRQLEYKADWYGRTIVKVPTFYPSSKTCSSCGNVKKELLLSERTYHCECCGIKIDRDYNASINILRKGLEMLKEEKAS

SEQ ID NO: 37212 - protein, 386 aa, unknown
  TnpB Polypeptide
VGFRGKGSGMVANRAYKFRIYPNDEQKILFAKTFGCVRMVYNHWLDRKIRQYEENKTNVTYTICAKEMAAMKKTEEYGFLKEADSIALQQSLRHLDTAFQNFFKQPKTGFPRFKSKKRNKNSYSTVCINGNITLSNGYLRLPKIGQIRLKQHRIIPDEYRLKSVTVSQTPSGKYYASILFEYEDQVQEKEMQKFLGLDFSMHELYRDSNGKEPAYPGYYRNVEKKLAREQRKLSRMQKGSNNRNKQRFKVAKLHEKISNQRKNFLHKQSRQITNAYDCVCIEDLDMKAMSRSLNFGKSVSDNGWGMFTDMLEYKAERKGKTVVKIDKWFPSSKTCIACGHIHKELQLSDRTYICPKCGHMLERDVQAAQNILDEALRMLNADATAD

SEQ ID NO: 37213 - protein, 438 aa, unknown
  TnpB Polypeptide
MLEAVKVALDPTPRQERLLESHAGAARFAYNTGLAHVKAMLERHETPEWSYYALRRWWNQAKGTLAVNTVTGETWWRENSKEAYNAGLKSLADALSNWSKSRKGLRKGRRVGFPRFKSKDRATPRFAYTTGSFGLIDGDPHALRLPRIGRVHCMENVSKRVDGAKILRMSVSRHAGRWMASLTVERKDGPMPTPLKGGSVGIDLGVKQLATLSDGTIIRNPRALDSNLRRLRREQKNLSRKAKGSNRRRKARTRIARLHARVAGLRRDLLDKTTTMLARTYADISIEDLNVAGMVRNHRLARSVEDAAFAEFRRQLEYKTARTGARLHVIDRWYPSSKTCSNCGTVKAKLPLSERVYHCEKCDFAIDRDLNAAINIQVAGSAPETLNARGGSGRRTDASRRATRHPVKREPSGDESRVSLGAGLDNEAMQTTSFLMTI

SEQ ID NO: 37214 - protein, 411 aa, Actinobacteria sp.
MRTAYRCRAYPDQGQRAALNRTFGCVRVVWNHSLAERHRRWHTDHTGMTYAQSDRALTTMKQDPGLAFLSEVSSVPLQQTLRHQHQAFSAFFAKRARYPRFKSRRSRQSAHYTRSASSLRSGVLRLAKMSTPLPFVWSWPDVDVTGLDPTMVIVSREEDGRWYVTFTIDTDDPEPLPAAGRAVGIDLGVTDFAATSHGDKIANPRHLDRKSRNLARYQRRLARCQNGSANRAKAAAKLARAHRKVRNARRDFLHRVSTRLVRQNDVVAIEDLNVAGMVRNRHLARAISGCGWGEFRRQLEYKCQRYGRRLVVINRWYPSSKTCSACGHLLADLRLSTRQWTCPSCGTRHDRDINAAKNILAAGLAVAPGSPGDACGAGIRHPGTSWVRPAMKQEPQPVTAGIPVLQLQGEE

SEQ ID NO: 37215 - protein, 325 aa, Phormidium sp.
MLKAVKIRLYPNNQQKQLLEQSFGNCRWLCNSCLDLMNKTYKDTDKGLSGYDLKQQIPALKKEYEWLGLTYSQCLQQVCLNLGVAFNNFFERRVGYPRFKSKHNKQSIHYPQNVKVQNNCLRLPKIGEVKAVIHRPVEGKVKTVTISKNCCNQYQTSILVDDGKEKPEPSTEGNAIGIDLGLTHFAIASDGSKFGNPRWLAKHEKNLKRKQQQLSRKQKGSRNRNKARQKVAKAHHKISRCRGDFHHKLSPRIVDENQVIVVEDLAVKNMVKNHGLAKTIRPVGWGQFCTMLKYKDEQKGKIYQEVDRFFPSSKTCHVCLNQVGS

SEQ ID NO: 37216 - protein, 441 aa, unknown
  TnpB Polypeptide
MKTVITAKLKLHTTPEQFQALRTTQLAYRDALNYVSRYAYEHGKMSNRVALQDGTYDEVRARFHLPSQMTCSVPRQVGATYKTLWTKVKQNAAHREAGRTKKRYKGLDKPPTYVSPTLTYQHRKDYSFKREQHVSILTLSGRVIVPYTGYDAHVAEISHGAELGAAKLWYDKPHKQFYLLVSLEIEVAEPTPQTQRSVVGVDVGMRYLAVTSTTKGECTFHTGKSIVPKANHYARLRKRLQKKGTRSATRRLVVISGRERRLKQDANHVVSKRIVTEHPHSLIGLENLTDIRERTKRKKGKKATSKQRKAQAAYSKWSFAELQSMIAYKALLHESLAIKVDAHYTSQACPMCGHTSDANRPNKGLLFICQNCHYVLHADLVGARNITMRTLLVRQDWASTGQLSVAPDVSCEEIKAARLLRYAELRWSTDTSPSRSTGRGD

SEQ ID NO: 37217 - protein, 374 aa, unknown
  TnpB Polypeptide
VVLTYRYRLLPLKSQHRALERLMHSQRELYNAALEERIDCYRKISKSRTYVDQCRALTQCRHDLSEMGELPVNVQRWTLKRLDEAFQGFFRRLKARNGKAGFPRFRGKGRWEAFGFNEFSGIRFDGKRLRFAGMPGGLKVHLHRELPERADIRSCVFRQDGSGWFVCLQIAVPTPEKRPIESVIGVDLGLTVFAYCSDTGEIPNPRIARRSEKELRRRQRALSRCQRGSHRRHKVRAQVVKVHRTITNTCNSWLHKESAGLVKRADLIVVEDLKVANMIRHPTLARSIADASWSRFVSMLDYKVEKTGGHLIRVDPRNTTLECSRCHELVPKSLATRTHKCPSCGLVIGRDYNASLNIRCAGIGAGALNVIGLR

SEQ ID NO: 37218 - protein, 309 aa, unknown
  TnpB Polypeptide
LWLSRWWFNRTINYLRQEGTKASLYEVRKIVQKGDDIPDWAMDCPQRIREHAMSDACNAVKNAKAKYLKMGKVQQVSFRAKRDPIQSFGFDKSALNQDVVFGSKKFKLEFEVSEPFHTDLEGTRIVREGSRYFVIIPQKLLYQVPENQRIDAVALDPGVRTFMSFYSEVLHGKIGEGSFQRIYRLCLWLRLMSRISKVKCRQKRRLKQAAERMRWRIWDLINEFAQEGCKFFGTHFQPNFHSNSHFHGNRLFETSQMVTKLASSTSRNMLTFAHYRFKQYLKAVTVTQLLIWMDEHEHFLAIAKMLFGV

SEQ ID NO: 37219 - protein, 446 aa, Archaeon sp.
MQRANIFIVEDNRSLKELADNCSRLYNELNYERRQSYIHCKRFEWYPKHLYKKYASMIGSATAQQIIKKNNEAWRSFLALKRLEREGKLPKHISRISMPRYWKLKGRRELRVIVRNDCYRIDDDEEYIYLPKGLKLKYKGKLRYKGNQGRLEILYDTIDKVWRGFMSVKVEKHLLRGGSNSNDNNNNNDKPLYIDLGVVNLATVWFNGLRQPIAYSGRAILADWWYLSNRIAREQSRVAKVNNKAKTSRSISRLYRIRQRRFRHSINAMVKKIVEDAYMLGISRIVIGDIKGIRSNHTSNNSKANSMINNFWSFNYILRRFKDKAEEYGIKVEEVSEYNTSSICPFCKSNGIRKHRGLFYCPTCNKAMNADVVGVLNIANRDNNSKDGSKTNQIHIIPSSWRSSRSRDNRLVAQPLLLRWDGMKWDTKRYMNNRLMNTLEARISRL

SEQ ID NO: 37220 - protein, 404 aa, Nonomuraea sp.
MALGRSEIKRAGLPSVVQVRLSPTAEQGAALAGAVAACNAAATLISRIAWHHRIFAIGALHRLAYYSARAQITGLGAQAACRAIARVAAAYANRRATKKRPHVFRGQGAVPFDARMLSWNRDARTVSLWTPTGRVAVGYTGRESDVTAVQTLPLGEVDLVCRDGVWLLQVAVTLPRPDVADPVNGFLGVDQGIANLAVTSDGVVLPGAALRGTIAGTGHVRALRERRHRQRRRLQAKGTTAARRVLRRLSGREHRMMTDINHQISKYVVREAERTGRGIALEDLQGIRFRTRAHRSQRRTLHGWAFAQQSAFTRYKAARAGIAFSWVDPRYTSQVCPDCGCVGRQNRPARGRFVCQGCDLAGHADHIAARNIAIRAVAVWGSVNTPHATGLPSPRRDRESKPPA

SEQ ID NO: 37221 - protein, 203 aa, Salmonella sp.
MRESRDSPRFLMARYTSPSTALKQTSANWQKQKRKIQHLHSHMANIRRDYLHKVTSEISKNHAMIVIEDLKVGNMSKSAKGTAEQHGRNIRAKSGLNRSILDQGWYEMRRQPEYKQLWRGGQVLAVPPAYTSQRCACCGHTAKENRLSQSKFRCQACGYTANADVNGARNILAAGHAVLACGGRVQSGRPLNQEPTEMIQATA

SEQ ID NO: 37222 - protein, 399 aa, Cupriavidus sp.
MLIAHKIALEPNDIQATYFARAAGVARFAYNWALAEWKRQYDAHKAGSTQPKPSQAALRRQLNAVKREQFPWMLEVTKNAPQMAIIQLGDAFKNFFAGRARYPQFRRKGVHDRFTLTNNQFSVDGSRIRIPNLGWVRMRETLRFAGKILSATVSRVADRWFVSLTVDTQDDSHLPKAENQGAVGVDLGVSALATLSTGEPPIPGPKPHKALLGRLRRLSRSLSRKQKGSTNRKKAKGKLARLHARISCLRSDALHKLTSDLTRRFHTIGIEDLNVRGMTKNRHLARSVADMGFFAFRRQLEYKAATRGGVVVVADRWFASSKTCSCCGHKLAVLPLSVREWACPACGARHDRDVNAAINLRSYAVSSTVPACGEEGSGPGGNAGTKPASTKQEVSFVPD

SEQ ID NO: 37223 - protein, 409 aa, Streptomyces sp.
VLIMQLRYSFRVYPNGPQRSALARAFGCSRVVYNDALRARETARAEGAPFPKTGDLSKLLITDAKKTDERGWLGEVSAVVLQQSLRDLDTAYRNFFDGLKGKRPLMGAPRFKSRKDNRQAVRFTANARWKITTGGRLSLPKIGDVRVKWSRALPSVPSTVTVVKDAANRYFASFVVETDPDEALPETDAQVGIDLGLSHFAILSDGTKIDAPRFLRRAEKKLKKEQRRLSRKTKGSNNRTKARLKVARAHARVADARREFHHQLSTTIIRENQAVAVEDLAVKGLARTRLAKSVHDAGWSAFVGMLEYKAARYGRTFVRIGRFEPTSQVCSQCGVKDGPKPLHIRVWVCRACGAVLDRDINAAVNVAKAAGLAVSACGARIRPVLVPAQRGEAGTHRDGQTTVAGIPAL

SEQ ID NO: 37224 - protein, 482 aa, unknown
  TnpB Polypeptide
MTGKSARNTNMKQKSRKKRPKSGEPQRITRAVTHIRLLEANSGKLAALDALAPVYLSLCQQYVAVFCTDEQPNKLRDPLYHTPLSERWHRVAIMQAAGIAQSWRSNRAIAYQQYQDDLLRYQKQQADGTSRAKAKEPVWREWNVPVLRTPCIQANVNVVKLEPSHDSTYDYWLTISTLEKSHPIAVPVKLAAYHKAALTDPKTHQVRKLNSSVQLNKRDGVWWLTLSYDEVVTSQTVPGAPVVGIDVGIANFVTTSTGKHYGAFHKNLRARHKRDRAKRRRKAKLRACLKKKGVKQLPSTSSRTGQKLIRHVKQAINHAVNQCFADPEHEGVQFAYEQLSVASMRFKAKAQNAYLRASHLGHIPRQIAWNSQKRGVQATPVISAYSSQECSVCHYTDRKNRPDQRTFRCQVCGFAAHADYNASVNLSRRVGDRQLRACRDRTAIKAVLLQRHKAWLKQQGKDNTSPVRRRKRGTPSATASAL

SEQ ID NO: 37225 - protein, 376 aa, unknown
  TnpB Polypeptide
MKLTVKVKLLPTQEQKDSLVKTIEVFNEACNYISQIAFEKKTFGQVGLHHLCYREVRNKYKLSAQLTVRAIGKVSESYRAERKTLHIFKKHSALVYDQRILSFKGLDTVSILSLDGRFKIPIVFGKYAKLDQRRVRGQADLIYKKNNLFLYLCVELPDGIPIDPKGTLGVDFGIVNLATTSDGKTFSGKQVNTVRERMAKIKKSLQKRNSKSAKRHLKKLSGKERRFKKHVNHIISKRIVQIAKDTSRAIILENLKGFNGRKTVRKEQREQFGKWAFNELRRFIEYKAQIAGVPVIAVDPRNTSLTCSQCGYISKSNRRSQSKFVCKQCGFSLNADINGAINISQRAVVNQPIAVHADVAIAPVPGTAMPRQLTTG

SEQ ID NO: 37226 - protein, 430 aa, Mycobacterium sp.
VGTDLVGPKGYGAGVKQVVQVRLQANVAQLDVLARTVSACNETANLVSTIAHAERVFRGRDLRAITYAQAREHAGLGSQVAQSCIRKVTDSYTALRANLRAGRYGKPGSARRAKVEANPIRFRALAAQPFDDRCLSWVHDTDTDDGGVVSIWTVDGRVKDLRFVGEAGQVALLRQYRSGETDLVIRRRRGGSLVAYLIATVDLPGPPVRTGAHLDRPDGWIGVDLGIENIAVTSDRTLAAELMGAYGAGAPDGATGRGSVKDRRTGNRELRQKLQAKNTKSAKRLLRKRARREARFAADVNHQISKRIVAEAERTGRGIAVEELTGIRERVRLRKPQRATHSSWAFAQLGVFLTYKAARAGVPIIAVDPAYTSQRCTACGHTDRRNRTSQAQFVCRDCGYIAEHADILGADNIAHRAPTTWAQSTVPSAA

SEQ ID NO: 37227 - protein, 409 aa, Halogeometricum sp.
MHYNYKYRLDPPEALTETLLHHIDTCRQLYNHVLYKLNEADDIPARYEVQGRLPDLKSWWDDLGDVHSKVLQMVVKRVYDNLSTLKAQKENGRAVGMLKWKPPREYRSLTYNQSGFELKNTSGRPVLWLSKIGEIPIHLHREIPENATIKQVTVKREPTGKWFATFGLDVDEAPPEKPETPEKVVGIDLGIPKYAHDTDGYAIESPDFSEERERLECAQHSLSRKEHGSNNWEKQRRVVAERHAELKRKRRDFLHKLSSYYAREYDLVAVEDLDAKGLVELPGNSRNRAGASWGTFLRMLEYKCERKGTHFIAVNPRGTTKECASCGTETDKPLWVRDHSCPACGFEADRDANAAWNILSRGINDVGVVHSESTPVETALPVDTSVSAKRVVKTGSPTLKERTASVVSE

SEQ ID NO: 37228 - protein, 413 aa, Oceanobacillus sp.
MPIINDNQFVVYQKKVVKEHSKPARERKEIKCHVFKEPSRENPYVDYNFLDALFKSMAQDDYRSLPTQSSQGVMKTVFQNWKAFYGSLREYKTNPSKFKARPKIPGYSRKKEKEVLFSNQDCVIKENKFLKFPKTKERLNIGKLGFTEGRLKQVRLIPKYGHYVVELVFQVPSEQKMKASKKRYMSVDLGMDNLATIVTNTGRKPVVVKGKNIKSINQRYNQLKAHYHGILRQGKNTNEGLFTSKRLKKINYRRFNQIKDLFHKASYRIEKIALEEDIDTIIIGQNKAWKQHAKMGKRNNQSFTTIPHRLLMEMIEYKAQRHGIKVIMTEESYTSKASFLDQDEIPVYGEKTSKKAFSGKRIKRGLYQSKNGVMMNADVNGAGNIMRKIFREAFEEPFACIEMLLRPAAIILK

SEQ ID NO: 37229 - protein, 365 aa, unknown
  TnpB Polypeptide
MSNYLKAYKYRIYPNLEQREYLVKTFGCTRFIYNQMLADRIKSYEENKDLDIKAIKYPTPAQYKKEYEWLKEVDSLALANAQMNLDKAYKNFFRDKSVGFPKFKSKKTNRFSYTTNNQNGTIYIDNGYIKIPKLKSKIKIVLHRQFKGLIKSATISKTPSNQYYISILVDTENIKLPKSNNKIGVDLGLKEFAICSNGDRFDNPKSLRKSEKKLAKLQKGLSRKVKGSNNRYKARLKVAKLHQRIANQRKDFLHKLSTKIISENQTIVLEDLRVKNMMQNHKLAKAISEVSWSEFRTMLEYKANWYGKEIIIAPSNYASSQLCSKCGYKNKEVKNLALRNWTCPSCGANHDRDINASINLLKLAM

SEQ ID NO: 37230 - protein, 379 aa, unknown
  TnpB Polypeptide
MVLKMYLTKKIMLLPTEEQEIKFKKFSGAARFIYNLMIEREKEYYSKNNSYLKENEFRKELTKLKQTEEFSWLKEIGSNVIKIAVKDCNEAFIKFFKKLTKFPKFKTLKNSKMSFYVNYERLKKTQRGFKGEKLGEVKTKEPLPNLEKNEHYINPRVAFDGKYWYLTVSYKIKDNNNINNSKEVIGIDLGIKDFAVLSNGKVYKNINKTVKVKKLKRKLKIKQKQLSKKISIAKKENRFLSKCKNFLKLKNQIRLIHRKLSNIRLNYLHQITSEIVKTKPSKIVIEDLDVSRMLKNRHLSEKISEQNFYKFREILTYKCKLNNIELVIADKFYPSSKTCSCCGHIKQDLKLKDRVFKCPTCGLEIDRDLNAAINLANYK

SEQ ID NO: 37231 - protein, 537 aa, unknown
  TnpB Polypeptide
MPKAKTDSFIVEVPLEITPSEEKRLLARLEAARQVYNACLGESLKRLALLRQSKAYQAAQKMPRGRTGRGATEKQKRMAKARAGAFREANAVVGFREYNLHAYANQFNHCWIGEHLDINTIQKLATRAFKAVQQYGFGKRGRPRFKGKNQMDSVEGKSNASGIRWRETCVEWLGLKLEAIVDWDDPVIAHGLAARVKYARIVRRKIKGRNRFYVQLVCEGKPYQKPKNQLGEGDVGLDLGPSTIATVAEQEAFLAQFCDELVPRQKEIRRLQRQIDRQRRANNPDCYDDKGRAIKGKKPTHKSARQRKTETKLAELHRQQAAHRKSLHGQTVNRVLRMGNVFKLEKLSYLAFQRRYGRSVGMRAPGMFVAHLRRKAASAGAEVIEFPTRTTRLSQTCHGCGTVEKKSLSERWHKCDCGIKAQRDLYSAFLATCVEDGRLNADRAKAAWSGVDALLQAALSQATQRVAAVQTSSDQAASGKTSGQWSPPSSFGLGQRQSGSPVESSAKARETQDVVPPSTQAVGELEGARRIVRTPGL

SEQ ID NO: 37232 - protein, 388 aa, unknown
  TnpB Polypeptide
VYVNWLIAHAVRQPDKYATLPEAEVSTWLSDRWQRCAWQQACGIVQSWYSNEREIPPVLRNLCIQANANVVVIEPSKSPAFDFWLRISTLEAGKPVRVPILLYGRAKDTLNEFPKLCTGVTLNKRAGQWYATLVVERRGPKPKAATVVGADIGMANIVSTSTGGRYGQISPQLRQRVARSTAKRRRKQKLNACLKRKELPPVDLCDHRAEAFARNEIGRALNQMVDDLPAGAAVALERLTVKDMRFKSRQMSRVLRAAQLGYVRDKLKFKLDERSIRYRSVQPAYSSQQCSRCGFTFSMNRRSQDKFVCLWCGYTANADENAAANIAERFSDEELNSLPFREVETALALRFMRRLPDARSASAGLDTSPGQPGGESYKRSISPVQTPV

SEQ ID NO: 37233 - protein, 365 aa, Richelia sp.
MSDYMLLGIKTKLNLTSEQKVLMTKHAGIKRFTFNWGLATWQELYKAGCKFNHRTLRTFFNKHVKKEYSWIKEKGVCQKITEFAFEDLNDAFSRFFKKLGDYPKFKKKGKNDSFTVNCGGKPMPFGGKSIKLPTIGWVKLHEGLPHGTTSKVAISRIADDWYISFTYNQKKPQIFDDRTPVVGVDLGIKTLATLSTGKIFENATYLRKYLTELARLQRRLDRKEKGSKNRLKAKTKLQKMYARIAFLRKDLLHKITTYICKNHATIVLEDLNVSGMMSNGNLALSISDCGLYEFRRQIEYKAKKFGCELIFADRWYPSSKLCSTCGHKHDKLTLKDRVFICPNCGFTLDRDLNAALNLAKLAYSI

SEQ ID NO: 37234 - protein, 471 aa, Bacillus sp.
MATSKDRTPSFVATIRLKTNLKEEKQLLVLSDCARQLYNACLGESLKRLKKVQGTDLYKETIQLSKVTEADVEKRRANFKYLNDLFGFTDASIQSFGIKTKNDSQFIAEHLGTHVCQKISTRAFKATQKYAFKCAKKVRFKRKGEFVSIEGKNNKTFLMYSNGYVFVGKNLTLKCLIDPKDQWMQYALKQKIKYCRMIKKEVKGKKRFYVQLILEGNPYQKYELGKENIGLDIGPSTIAIVGESQSKLKEFCEEVVLIDKEKRRINRKMDRQRRVNNPGNYYANGTVKKGSKKWVHSNRYLHTRSKHRELERKIKEVRKQLHGRDTNQILQLASSIKTEKLSYKAFQKMFGKSVGRKAPSMFLNMLKRKVKARGGSFREFPTSSTKLSQTCHCGMIKKKQLKERWHKCECGLVAQRDLYSAYLARYVTNSNHVDIKKAKMDWIQFSNVLDECVSKLESMKAERKFISTFGI

SEQ ID NO: 37235 - protein, 444 aa, Enterococcus sp.
MTYKRKYTVKTQLHKKNNQEIIDYFEEGVVLYNHIKREAFHVYKRDPDFKKHQFNTYLQEKYNILKRTANSIISDVIGNYNAIKELKEYELKQVDGKIEKLKKDIIPKLSLFIKQNLQKMSLGMKIDLKKHRNLRSKLVAKKKKLHRLTERKKQLLYEMTSGDFKICFGTKHLLKRNLVSFRNQRDSQMSFVGCKSETCQNQMLQLFYNPNNNQFDIRLRKDLGGYKDKKNYAYGRVYFNHHKNELIQILKEGYSPLSFKIQKKKGRYYLICTFEMHVEKAAFLTRNSYGTVGVDFNKGFITITETDAYGNMLSTDKRIYRFKQGNKTVNDFRQLANELVKQCLKSGKDLVIENLNFKKTKSKTESKAGKQYNEMIHSLAYKTFTHILEEITFRNYVWLRKVNPAWTSWIAKHKYCPLMKLNVHTGAAYVIARRGQGFKETKIN

SEQ ID NO: 37236 - protein, 405 aa, unknown
  TnpB Polypeptide
MKLNRQVRLYPNKTMKRVLDSLCDYRRYCWNEAVACWNKQYEARLIGLPEILLDKLRSKTENLTDEEKDLVNQYPSPSHYSVQNELVAQKEDWQYTFSSRVLQQTVKDVAKAWNLFLNHRDTTGKPTFKTRKEPKQGFKTDRASIQNGRLLLDKPQEYWGGWKTIRFKGLSIPDGKLTLCSVTRVNGRYIATFTLEVEPTLLPHTGQKTAVDANVDHFDTTEGRTTLKPEVLNPLYARVRHYQRILARKRHRNPRAVHSKGYQATRTKLQRTYERIANIQKDLLHKFTTDLYQRFDTIVIEDLDVKKMQMSKRAKNLHRSLFGQFRQMMEYKSQKFGKTLIIADRFYPSTQRCSACGFIKTGNDKITLSGNIKHGTRHNEYICYQCGYEDNRDHNAVLNLLALAE

SEQ ID NO: 37237 - protein, 263 aa, unknown
  TnpB Polypeptide
MPQQILTIVCQRNPTAEQIVKLDQILQGFAEACRYINRTICPSLTNKNRIQKEVYRAVQQQFGLTANLTVRACARVAANRKVGRGKEFRATSVDYDARIFDYREKDQSVSLSTLDGRERIPLVVGDDQIEKLKGKKPTSATLCRRKQGVAEPQTGKGVLGVDLGRTDIAHTSEGDHWNGQQLNRRRDHDSKLRALLQQKASRGTRSSRRRCRELVKRLSGREKRFQLWLNHCISKAIVSRAKATNSLGRPDGDSGAYSSTASP

SEQ ID NO: 37238 - protein, 236 aa, Okeania sp.
LQDCIKRVISVISYQLSVISTSTIRRLKIGDFIFFIPLKREAHTYNCSVKLTFERWLKADKNGQKLGKPRFNGIGRYRSLIYPQIKQECFEVNKMNLPTFGKVKLIQHRPLPSGFKIKTVTISRKADGYYLTLSLEYKSVPKFNSDVEPTTENTLLIDMGLKDFLVTSDGDTILIPQYYRSPQKRLKTLKKRLSRKKKGSKRWLKAVKAVAKQHKKVADKRKYFHFKTANELLSLI

SEQ ID NO: 37239 - protein, 371 aa, Clostridium sp.
MILTKKIRIIPTVKQCQQLWKSVGTARFIYNWTLARQEENYKDGKKFIKDGDLRKEVTLMKKTEKHKWLNEVSNNVAKQAVKDGCNAYKRFFKGLADKPRFKSRKKSKPSFYNDTSKLKAKSKMVLIEKVGWVKTAEQVPINVKYNNPRVSFDGKYWCISIGVGKENPKVELTDESIGIDVGIKDLAICSNEMTFKNINKTRLVKKLEKRLRRLQRRISKKYELNKEGRKFVKTSNIIKLEKQIRLLHRRLSNIRNNHLHQATTKIVKTKPSRVVIETLNIKVMMKNKHLSKAIAQQGLYEFKRQLQYKCELYGIKFVEADKWYPSSKTCSKCGHVKAKLSLSERTYICEECGSIIDRDLNASINLSRYSA

SEQ ID NO: 37240 - protein, 588 aa, Moorea sp.
MKARYKVSEPLEVKDDTTWTRSSLFLAQKQEQTTGRQFYMQEFQVALKKMTLNNKYSFLSLVTQTQKSFEISEVDSTNGEKVFTPYWTEFSTVLANILSLPTKIGFAVLGSILSHGCALNSKLKYWFSTKRISAQNRRWLKMFWQSSTSSVADCTESGSTNKRFLKTVSYQVYPSKELESIWKKWVAAVRKVYNISIEELNKNQGYTKLGKKGGKYGFRTWLKQSGLYPQWCKDLKVSKILDNASMEAYMAWKETDKQPLFIGKGKKRKPNPQAGLKIAKFRSVRQYRQTIQFDPTAYKAGRWMVSTTKHLPKPEFKGHDFCILTDGSTELTYNKGRWFAHFPVEFNLEPIETKKVITLDPGVRTFMTGFDGSEFLEFGNNDFQRIAKLCSHLDKLKSQHDQSRGHIHKHRRYKLKKAMDQLRTRIKNLRAELHKQVASYLARNYDVIILPTFNTSQMVPRKKRKLKNKTARAMMTWAFYQFSQILEHLCNRYGSKLVRITEEYTSKTCTKCGHIHRKLGSSKNFLCPHCGYEIPRDFNGAVGIFLKAMWDNTFLNAVGDVVLSFSDSEDMPDLEDVRICPGSKYQYI

SEQ ID NO: 37241 - protein, 374 aa, unknown
  TnpB Polypeptide
MKKTFLYRAKINRQTESNCCRWIEICRDVYNSALGQRINTYKEAGKSITKNNQVTQLPLIKKDFPSIKIVSSQTLQDVIERLDKAYKAFFRRVKFGEKAGFPRFKNRNSYNSFTLKQHGYKLDGRYLYIKNIGRFKLFLSRPIEGNVKTVTIRKMPTGKWYVSFSCDDVSAKQVSITDKIIGIDVGIKNFCVDSEGTCVKNPKFLFDSEKELRRKQRKLSRRKKCSSHWNKAKILVAKVHEKITNQRKDFLHKITNKYINNFQTIYIEDLKIKNMVKNRYLSKSISDSSWGTFFRFLSYKAENAGRKVIKVNPANTSQKCSTCGEKVQKSLSVRIHSCSFCGLKIDRDLNAAINISQDGQSCQALTNDMLELVA

SEQ ID NO: 37242 - protein, 438 aa, Cyanobacteria sp.
MPIRRVTFRLYPNKKQAQTLRYHRKLHKELYNAAVYNRFTQYQKFGHKVDYFEQQNCLPAFKEVWMEYKECNCMTLQATLKRVDYAFQRWLKGLGKRPRYKSIRHYSGWTYPSKTGWKAHTSGDNGYLELAQIGSIQMRGKARVWGKPTTCTIVYRNGKWLASITVEVEEIKRATDIGAVGIDLGCKSALAVTDGENHDFVEAPRFLRKAEAKIKKLSKAKRRKTAPNRRKKQKASSRWKKAQAKISKITRKIASQRQNWVHQVASDIVRRNSFVATEKLEVAKMTARAKKGKRKKQKAGLNKSILDVGLGMLRSAIQSKITEAGGVFIEVPTKKVKPSQTCPKCGHQRKKSLDERVHQCQVCGLTMDRDLAAALVMLLWGQGKLPGFETNLVDADVSSSTSDTSKRKFAGSQKQLGQKKRQKSALTGLDAKTSPSTK

SEQ ID NO: 37243 - protein, 504 aa, unknown
  TnpB Polypeptide
VQVRWNYKLKQNMGQSALMAEWLVTLRKHKNYCLRERENGWNDNNRDSDQPISYTDGSYCELHTRNEWGSYSPLTCPVVKHGVMSAELTKHSKNGLKWGNASDIQMKRTTQLRHENVYYSRIDSDVLQRNIARLDAAFQGFWQDGRGFPKYARCATFKSFEYKPKRCKFKVNRIVGTKHRFSRVYLPLIGWMSYFDSRPMPKNAETRTVTITRKSDGWYISVLLNLPESLPTEMQLADVAGIVGIDVGINQLVALSDGSFVKNLKPGTNKRVRRRLLIRQRRVNRKQQGFKNRAKAGRAVARLHQKVSAKRDAHQWKAAKIVVNTADAVAHEDLNILGMKKRCKPKKANGRFMPNGQSAKRGLNRSISDAAWGGIFQKIAWLALKTGKPVVKYNPKNTSRECSECGHTSSDNRDGEKFVCANCGYIAHADTQASRTGLKRVGLKFVSTRRKNLPGDSRKVTPTRHDSASNGKRNQGRNPKSKAMPEPGIIEQLSIFDLIALSTG

SEQ ID NO: 37244 - protein, 275 aa, Cyanobacteria sp.
MFILEYKVQPAKAQTQAIEEAIRTTQFVRNKVLRYWMDNRGVGKTELFRHNTQLREEFDFVKALNSHACQSAVERVLRAINRFYDNCKKQVKGSSGYPKFSKTTRSVEYKGSGWKLSECKKYIAFTDKKHIGRLKLIGSRDLNFFCPEQIKRVRIVRKADGYYVQFCINLDPRVTIKPLTPSQKAVGIDVGLKVFLADSQGNTVPIPQFYRKTEKQLNRLNRKKSKKFRKGQPQSQNYRKARSRYARKHLRVSRQREEFAKRIALRYIQSNDLVA

SEQ ID NO: 37245 - protein, 438 aa, Frankia sp.
VKTMQAYRFALDPNDAQLAGLRRHAGAARFAYNWGLALVKAALAQRDAEKSYGIDSDQLTPVPWTLPVLRRAWNAAKDDAASWWAECSKEAYSAGLDQLARALKNFGDSRNGKRKGRRVGFARFKKRGRARDSFRYTTGAYGPADDLHVKLPRIGRVKVHEPMGALTGRLADGRARLLGATVSRTAGRWYVSFTVDADREIPAQPGRGGVVGVDLGVRHLAVLSTGERIANPKHARRSERRLRRASRAYARAKPGSAGRRKRAAALGRIHARVANQRRDGLHTLTTRLAKNHDVIVVEDLHVAGMVRNRRLARAVSDVAMAEVRRQLDYKTRWYGSTLVVADRWYPSSKTCSGCGWRNPSLPLSDRTFTCQSCGLVADRDRNAAVNLANLVAASTSETENARGVDQRTPLAGQVAVKQEPGTATAGQTRGAPPLGEAA

SEQ ID NO: 37246 - protein, 448 aa, unknown
  TnpB Polypeptide
MPQRQQTSAAETTQAHQRTPTFLLELPLQVTAGQAKRLRAHLEAARQVYNAILSEGQRRLRRMRADPAWQAARAIPRTKPQERKRAFGALRRQEGFSDYALHAAAKGLNCTWIVTHVDAVLAQTLATRAYRALNRVCLGQARRVRFKSRGRGLSSVENKRNDTGLRFVLEQPPEAGSAGYLLWQNDRWPAIIDWKDPVVTHGLRHPIKYARLVRRQASSARAAGADAAGQRYFVQLALAGVPYHKPKHVVGSDTVGLDLGPSTIAIVPREGEPHLEVLCAELAPDDQAIRRLQRQMDRQRRANNPDNYDERGRVKKRGTGRLSWKHSKRYLATRRRKATRERKLATHCRSLHGRLVHEIVAVGNTIITEKLSYRARPQRFGKSVGLRAPGMFIESLRRTGASHGRHPGGSPHAQHQTLAVLSRLRPVHSQTVVAALARVSLWHRAHPA

SEQ ID NO: 37247 - protein, 202 aa, Microcoleaceae sp.
  misc_feature (154)..(177): Xaa can be any naturally occurring amino acid
  misc_feature (202)..(202): Xaa can be any naturally occurring amino acid
RCRNQKIENYLHQASRSIINLLRSGKIGTLVIGKNVQGQNQINLGKQTNQNFVTVPHARFIEMLEYKAALVGIRVMVQEESYTSQSSFLNLDPIPVYGSIGALDVTFSGQRIKRGLYKTSCGQLINADVNGSYNIMRKAIPNALCNGIESCVVXXXXXXXXXXXXXXXXXXXXXXXXLRSSAEAVESARSESERGGIQRLPX

SEQ ID NO: 37248 - protein, 206 aa, unknown
  TnpB Polypeptide
VRPRPIEVEPSRNPPVGIDLGLKSFYVTSDGEALDPPQYYRKAQKRLRRLQRIASRRTKGSNRWRKACRDVAHLHWHVANQRRDFHFKAANALVSRYGAVYAEDLNIKGIARTRLAKSTYDVGWGSFLSILEYKAESAGVRFETVDPAYTTQMCSRFGAIPDKKMTLRDRTYSCKSCGFTADRDENAALNVLAKGLGCSPQSISAA

SEQ ID NO: 37249 - protein, 291 aa, unknown
  TnpB Polypeptide
VKAAGRGSLGREVSAAQCTGAGGDGSASADPAKYGPGHRCFACQRWRSRLGNWCRACRRHAFEAVDMPRDSHHVGMFTGRSKCWASPLNWASFADGTKVSNPRFLRRAEKKLGRLQRAHSRKQKGSRNREKSRARLARAHAAVASRRADFCHKASTMIIRENQAVYVEDLCVAGLGRSRLAKSVHDAGWSGFVAMLEYKAARYGRTFARIGRFEPTSQVCSACGVKDGPKPLNVRTWICAACRTVHDRDVNAAINVLALGRRESLNACGGGVRPGETLAAASEPGSHSGAE

SEQ ID NO: 37250 - protein, 231 aa, unknown
  TnpB Polypeptide
LPCKPSTINISKDCAGRYFVSCLCEFENQILPKTDKTVGIDVGIKHLFVTDNGIKIDNPCHTVNYAIRLTKAQRRLSKKKLGSANRAKAKLKVAKLHTKISDCRLDNLHKLTRELINDNQVVCVESLRVKNMIKNPKLSKHIADASWGKFVTQLEYKADWAGRKLVKIDQFFPSSKRCSCCGYTLSRLDLSVREWVCPECNTAHDRDINAAKNIRTAGLAGLAFGESVNLV

SEQ ID NO: 37251 - protein, 368 aa, unknown
  TnpB Polypeptide
MEKAYKFRIYPNKTQENLIQKTFGCVRFVFNFFLDKRIKAYEADNMTLSYSKCSSELTKLKQELVWLKEPDKCSLQNSLKQLDRAYQNFFQRKEAGYPRFKSKKNRHRSYQTNRTGNNIAFLGNGIKLPKLDKVRIRDKQIPQGRILNATISQTPSGKYFVSLCCTEVEKPAYHRTDRYVGVDLGLKEFAITSEGKKHENPKYLAKSLKKLKYLQRKLSRKTKGSRNWNKARMKVARLQESIVNQRRNTLHKISTELVRNYDVICIEDLQIMNMVRNHKLARSIADVSWGEFVRQLTYKAQWYGKELVKVDTFYPSSQTCHVCGYRTKETKDLSVREWNCPTCHTKHDRDVNAAINILNEGKRILGIA

SEQ ID NO: 37252 - protein, 383 aa, Escherichia sp.
  misc_feature (250)..(355): Xaa can be any naturally occurring amino acid
VERLQAFKFQLRPGGQQEREMRRFAGACRFVFNRALARQNENHEAGNKYIPYGKMASWLVEWKNATETQWLKDSPSQPLQQSLKDLERAYKNFFQNRAAFPRFKKRGQNDAFRYPQGVKLDQENSRIFLPKLGWMRYRNSRQVTGVVKNVTVSQSCGKWYISIQTESEVSTPVHPSASMVGLDAGVAKLATLSDGTVFEPVNSFQKNQKTLARLQRQLSRRVKFSNNWQKQKRKIQRLHSRIANIRRDYXXXXXXXXXXXXXXXXXXXXXXXXXXXXXXXXXXXXXXXXXXXXXXXXXXXXXXXXXXXXXXXXXXXXXXXXXXXXXXXXXXXXXXXXXXXXXXXXXXXXXXXXXXYSDCIPVSQISAGTTFIKSQRPSAKTTQ

SEQ ID NO: 37253 - protein, 435 aa, unknown
  TnpB Polypeptide
MAVHQAYRFALEPTPAQERALRSHAGAARFAWNWGLAKCKERYEAEGGWYSSIDLHKLWNAQKKADPALAWWGENSKCAYQEAFRDLDRALKDFIKSRKGERKGRRLGFPRFKKRGKCRDSFRFGAGAMRCGGTTVTLPRLGAICTHESTRKLARRLENGTARILSTTVSRTAQRWFVSFTVEVERAMPERHARPGSVVGIDLGVKTLLTGIDDAGNVISVEGPKPYRRALRKLRRESRAHSRKAPGSANRRKQAGRLARIHAQVANIRADVVRKATSDLASRYETVVAEDLNVAGMTRNRRLARAICDQGFGESRRMLGYKTQWNGGRLIVADRFYPSSKTCSGCGAVKAKLPLHVRVYECEHCGLVLDRDVNAARNLLHLGTASGAGTGLTEANACGAQVRPSPAGHRAMNQEPGTAPTGKTGTAARQQAAAA

SEQ ID NO: 37254 - protein, 450 aa, unknown
  TnpB Polypeptide
LENCKIVEMQVRKTTHGEVWFNDSDAIKVARIVKHYSSAVRSAYQAIHKHGLRGNEIRKYVKRNYMEPLNQRYVNDACMMAQMVNQDHSVFGGKHNWKRLQIKEISKNEWLNVRNSQLYSRGDNTKNGNPNIRVVGNELWINNPLERGEWIKGKLFLQSERPFDDSCYGVRVLRKDGNKFSVVVSSENKSVQPRFDDSNGVIGIDTNPDGVAVVETDSDGNILCHHYIKKDRIQCAKKGKRDNDIRLMAKEVVTIAKSKNKPIVVEKLSFKAGGSYRKFNRIKSNFLYRKIFDAIQSRASKEGVAVKEVHSAFTSVLGQLKYQKMYSLNQHTSAALVIGRRGMGIQERQTFSVKEKTDKQEKSDKDKLNLEGRGLTIDLTRKAWSWLQTGFLKPKPSTLTGSCLVPPKEAYGTSMGETPIGEPATTTDRCGIANNNQDYERSPCKILQPC

SEQ ID NO: 37255 - protein, 505 aa, Pseudaletia sp.
LYEIRRDVRDLSRVYIELGIVMNYYMKRCDVLPDKPDVLNFFYAMKGKGPYAACYKHLAGDRVYDGKLRSFVVQELAKQYETLIHTNIETHAYSRLAKYFGVKKNNDGLFQAYYKKDFSHATEEMKQICQVINAESCKKDWWNTIPLWLKIQQELFDRDKVESFRLFPQPSYGLKHLTYTSRGWHELLRRVKPDTTPSSWMSIDDHIKELWEPWLKSTKNFGCCLQTDGISVSLSMNRWVKKVTKNGETKEVVIKKWKPSYDKLIAVDPGSRIPVAAYNSNGVYQRITSKYVKSHSLEWKRDRVRNKLTKSSEMAEAKDRERVQAACSIVLSSKNTSHVVEYTVFRLKWFNVRQQPYEIHSKLTRLKFDKYINTGKVQEKIVKQVFDGGGVEKTLVLYGAGSNFMNTAQFSGRKFKHNALLKKLRQKRNIHVEIVDESYTSQACSACNHKSGVFSKISMDHKRRRGVCPNCSSSFDRDQNAAKNILINYLRSAVCRPRCSIRRVS

SEQ ID NO: 37256 - protein, 280 aa, unknown
  TnpB Polypeptide
MLKSFEENRKEDSALRLKRVSIRFDKRCYEFSKTTNVLTPYWLTLSLSRREKVSLPIVFGERQRQRIEEALRGEWQFATVDMVKRNGEWYAHFVLKKTVEVPDEPKSVIGIDRGERNLAVAVVISKSNPDKPMKGQFWRGEEIKRVRGLYNHVRRRLLKKKLLKKVKELKGKEKRKVSQQLHIIANQIIAYAKQFPKPVIVMEDLTGIRDNFHKPRELNRRFRSLPFRKLQAYIEYKARLEGIEVRYLTKGETRTPQRPAIGAGMLPRSREEYISARSAE

SEQ ID NO: 37257 - protein, 158 aa, Okeania sp.
MTIIKDSANRYYASFVVEINPESLPKTDNSIGIDLGISTFATLSNGEKILAPKPLKKNLKKLAKFQRKFAKTEPGSKRRERQRLKIARLHAKIKDISFPSECFPTGCYANANGMLRKRTDFLHKLSTNLVKKYDTIVLEDLNIPRCRCRSTSGGCQNS

SEQ ID NO: 37258 - protein, 470 aa, Bifidobacterium sp.
VRLVSLPASFRNLSHQNRVNQCETARLVLAWRKREQVADALDELGWGTASCEDVSDRLGVKVDPQLFANVSAHGGHSDLPTVTRARFPYDQSNNNSCRQGEPDAREGLVTYRRMAVAGRFLDVTLSFPRLRERYPGMVRISRPTMRRMRDGRIVFDVTVFTARRETGDVSKTPHVVGFDFNADWHGGISGARLSYNGLVGRELVAGVDTIRQQRSLERLYVEYRRCLGKLKRLMPWQRPSDPDDPAQVEAHPRWRRLYEQSLLLRDKMYRIKNLLDWRYAHDIIDHARPGELIAVERLDMFDASGRYEFRHGRQLDRLDHVAAKKGRRVVKVNPAHTSDTCPWCGTRIPDLGKAREYRCPGCCRLVRRDYGAAVNIASRGCRYLGHRKTEPTPPKGRPTRKRPKLTRKRHSGVDHEHSSGTGKGPASFHTIGQPGVVTAIIRNTRKRTTTRTSSGVATRLRQEPQLPHSR

SEQ ID NO: 37259 - protein, 442 aa, unknown
  TnpB Polypeptide
MDMRSGSRPTPAIPGVGTKRTVVVRLLPNGGQHRKLLRLAELSSKLYNEVNYERRQQFFKEEKVDFKAAWNRYYQKYEDRLGVGAQAVLQKNNEAWSSFFTILKLKKEGRLPSHVVHISPPRCWKENGKRKKILVVRQDRFEVDEERKKIILKDFKIEIDFVGRLKWGGKQGRLEVIYDDDTNRWYTHIPIEVGVETTKTGKKSEYLVYGERNSIQIAKPKGDKTASIDLGINILASVVVDDGTWLLFRGTRIKEDYFYFEKRIAEVQSLADKTKDMSELEAFEELQREKRRLFKKLQRRFHHLYRRLASSLVKKLHELGVSTIYLGYPYNITQDKGNKFSVNVWSYRKLMNAIEMKAQEYGIKVYVVVEYNTSRFCAYHDVEVQRKPRGVITCPAGHKLHSDLNGALNIMKKAVGKMVNTVKKPLSYFVFHSGVAPVRGGV

SEQ ID NO: 37260 - protein, 312 aa, Sulfobacillus sp.
LPREGPFTRNPARGPRPSGRGGSASICEMFASLIILCCTPLVKLTLMIKLQPTPDQAQALLQTMERFNAACNTIAVTAFREHTANEIRLQKLVYADIRATFGLSLQMTVRAISKVAEAYKRDKRVQPTFHPHGAMVYDQRLFSWKGVDRVSILTLDGRQIIPVVLDGYHQARTDRMRGQADLLYRDGTFYLAVVVDVPEPPPVQPDDWLGVDRDIVNIAADSDGQTYSGGHLNGPRKRYAKLRQRLQQQGTKSAKRLLKKRRCKEQRVATNKNHRIAKQVVATAQGTRRGIALEDLTGIRDRTTVQKAPHRL

SEQ ID NO: 37261 - protein, 332 aa, Planomonospora sp.
VRRSYTFLLRPTARQAAALAACLEDHRQLYNAALEHRRTAYAKAGATIRYGDQSAELKHIRADDPGGQGRWSFSSQQATLRRLDKAFRAFFTRVKAGRTPGFPRFKGRGRFGTVIWPKDGDGCRWDSQPEHPTATYVRLQGVGHVRVHRHRPVRGKVKTISVKREGSRWYVVLSCDEVPAQSLPATGAAAGIDLGVASLVTTSDGGHLGNPRHLAASADRLAAAQRDLARKKRGSKRRRKAVARVAALHATVRRQRLDHAHKAESAGRELIAVNPADTSRTCARCGHCAKENRLTQAAFRCTACGHEAHADVNAAINILRAGLALREAAQAA

SEQ ID NO: 37262 - protein, 399 aa, unknown
  TnpB Polypeptide
MRTHRFRIYPNKATEQKLQRTLDICRFTYNQLLDEFSSWDNISKYELQSRIVDYQICYPELKEVYSKTLQYENYRLFSNLRALGEIKKKGRKVGRLRFKGSGWFKTIHYNQSGYKLIITGKRCQILKLSKIGQIPIRCHRIFNGIIKQVVVKREPSGKWFASLITDEQKQVPKKIIKKVIGIDLGLTDSVWDSDNNKIENPKFLKKYSEQLAKCQRSMSKKKLGSNNREQFRIRLAKRYEKLTNTRKDFIHKLTRYYADNYDVIGMEDMVISNMVKGKKNRYSKSLLDACFGLIRSEMQRKAENAGGVFIPVNYRGTTSRCSQCGNNVKKDIWEREHICYECGFVAPRDYNSALEIKRLAIEEIRQELPESTLGEMEALHCKVQLPSMSQEAPTSTSQC

SEQ ID NO: 37263 - protein, 402 aa, Escherichia sp.
VKRLQAFKFQLRPGGQQECEMRRFAGACRFVFNRALARQNENHEAGNKYIPYGKMASWLVEWKNATETQWLKDSPSQPLQQSLKGLERAYKNFFQKRAAFPRFKKRGQNDAFRYPQGVKLDQENSRIFLPKLGWMRYRNSRQVTGVVKNVTVSQSCGKWYISIQTESEVSTPVHPSASMIGLDAGVAKLATLSDGTVFGPVNSFQKNQKTLARLQRQLSRKVKFSNNWQKQKRKIQRLHSRIANIRRDYLHKVTTTVSKNHAMIVIEDLKVSNMSKSAAGTVSQPGRNVRAKSGLNRSILDQGWYEMRRQLEYKQLWSGGQVLAVPPAYTSQRCACCGHTAKENRLSQSQFRCQVCGYTANADVNGARNILAAGHAVLACGEMVQSGRSLKQEPTEMIQATA

SEQ ID NO: 37264 - protein, 341 aa, unknown
  TnpB Polypeptide
MFKANKAYQKNPGKFTGKPRMPKYLRKKERHTFFVTNQNAKVKDGYLTIPKLKIKVELALQVKKIQRVAFKPVYGGYKLIVQYKINKEINYLPDNGRYIGIDPGVDNAFACVSNTENMPLLINGRNLKSVNQYYNKERARLKKLQAQYHQLESIINTKQGPKPVYQETKAMKRLTVWRNDKIRQFAHKASKRIVNYALSCEANTIVIGNNKSWKRSSNMGKKNNQNFIGIPHKVMIEMIQYKANLAGISVIRTNESYTSQTSALDNEKPCWENGNKNRQRQGKSPVNRRIKRGLFKTNNGTLINADINGAMQIIRKVFPKTSFVNGIAGVVLRPVKWTALI

SEQ ID NO: 37265 - protein, 410 aa, unknown
  TnpB Polypeptide
MIKTFKTRIRPTKEQEIYLNKCFGYRRFIYNNALEYFNTLLEHNGNIIDKTLKKFFDKFDYITHIYSKKEKEPGFEWTQEYNKSIKNEVASDFNIAINKFFKDIKDKKRCKLHFKRKIHGNGSFRIYKTNKGNVKIIDKKLFSFIINREYGHMPLKTFEDISFLYHYDIKTMTISMKNFKYYVSFTYEIDIPKHKHKKNMVGIDLGIHNPVVCFDGNDIINPKFPKGIIKKLEKKVDKLSVIVSKKKYDKRNPSKNYIKARTKLNDIHVKIVNIRMDYIQKVSTFLAKTYRNVIVDEFSFKELLTESDGNTRINRGIHRVGDFMFTQVLKYKCHFYGSEYILALPNSTITCSECNHKLKTKLKLSQRIFNCPICGHIDGRDNNASINIYKSFKGSLLTNVNRDFAVGRTV

SEQ ID NO: 37266 - protein, 410 aa, unknown
  TnpB Polypeptide
MIKTFKTRIRPTKEQEVYLNKCFGYRRFIYNNTLEYFNKILEFNGNIIDKDLKKFFDKFDFITHIYSKKEKEPGFEWTKEYNKTVKNEVASDFNITVNKFFKDIKNKKRCKLHFKRKIHGNGSFRIYNKNKGNVKIIDKNKFSFIINREYGHMSLKTFEDISFLYQYEIKTMTISMKNFKYYVSFTYELDVPKHTHTKNIVGVDLGILNPVVCFDGKDIINPKFPKGIIKKLEKKTDKLSTIVSKKKYDKYDPSKNYIKARTKLNDIYIKIVNIRMDYIQKVSTFLAKTYRNVVVDEFSFKELLTESDGIKRINRGIHRVGAFTFTQVLKYKCYFYGSEYILALPNTTNTCSECNHKLKTKLKLSQRIFNCPICGHIDDRDNNAAINIYKSFKGSLLTNVNKDFAVGRTV

SEQ ID NO: 37267 - protein, 413 aa, unknown
  TnpB Polypeptide
LIKTFKTRIRPTKEQEVYLNKCFGYRRFIYNNALEYFNTILEFNGNNLDKTLKKFFNKFDYITNIYSKKEKEPELEWTREYNKNIKDQVSSDFNIAVNRFFNDIKNKKRCKLHFKRKIHGNGSFRIYNKNKGNVKILDKNIFSFIINREYGHMSLKTYEDISFLYHHDIKTMSIRMKNFKYYVSFTYELDIPKHDHEKDIIGIDLGIHNPVVCFDGKDVIAPKFPKGIIKRLEKKVDKFSTIVSKKKYDKRNPSKNYIKARTKLNDIYIKITNIRMDYIQKVSTFLAKTYKNVIVDEFSFKDVLTESDGIERINRGIHRVGAFTFTTVLKYKCHFYGSEYILALPNSTNTCSVCNHKVKTKMKLSQRVFNCPQCGHIDDRDNNAAINIYNTFKRSLLTNVNKDFAVGRTVQRT

SEQ ID NO: 37268 - protein, 382 aa, Candidate divison MSBL1 archaeon
MKYTYKFRLYPTQEQRVKLGETLELCRRTYNRFLSQINETDEIPKRTNLQFQLPEMKKRDSDLKQVYSKVLQMVLYQLYSNLRSLSKLKKNGRKIGRLRYKDKGWFKTFTYNQSGFKIIKTNNRLDKLHLSKIGDIPIRVHREIEGKIKQITIKRTNSGKWFACICVEKRPQQEKSIKSAIGIDVGITYFATDSDGRQIENPHNLEKSLGRLRKEQQKLSRKRKGSENYEKQRKKVAKLHEKIKNQRDDFLHKLSRHYVDNYDLIAVEDLNVKEMIGNNHLSRYISDASWSKFVRYLSYKAESAGKMVVKVDPKGTSQEHKHGELDRDYNASLNILERGMKEIGMGRAESTLVETEPLLHLSSQDVITGQVQSSKQEAPAKA

SEQ ID NO: 37269 - protein, 481 aa, Pelotomaculum sp.
VKTTVRGVILQLTDVQKIFLNNLMEHYCAAVRWSFKRLLDGWKTQDIRLSVQNKFNLNSRQANDAVHDAQATITSQKELVKLNHANAANKVEFTLKRLEKAKSSGKRAKLKRRLDKEERKLAFWRKHLDAGTFPPVVFGGKKLFHERCKGNITREEWREARSSRYLSRGDKTKGGNLNTRLYTKDGAIYMDIAAEPVETGKVIRYDRITVPVYLAYKPSKKTGLINGRNYRRMVLDYLKTGGAYQVEIIRENGCYYVHVTIEEEVPVPYTAYNGAIGVDTNPDGLGITHADYLGQFKESLWLLQSEWTYARSDRRDNLIGEAATLVVDMAKQLNCALAVEDLRFKNDKSVTAKFNRMSHGFVWSKFLQMVDRRTAREGVPLVKAPPPFTSVIGILKYQQQYGFSNHEAAAYVIARRGLGFSNEKIPNQLEQKYVKKKETFALLTNWKQWSAIKKAAIAAIKKHTKQEVKSLVSWQHYRKQL

SEQ ID NO: 37270 - protein, 448 aa, Candidate divison MSBL1 archaeon
LEAIIMQTTVRGKIFPSEDQAEELDELMRIQSSCMRYSYNRLCEGKSKSRIESDLKEKSPEINSRYRRGGYFRAKANYESALQQVKVGELDSPKKVVFGGRKNLKRRERGEITNEEWKELRNNQLYSRGDKSKNGNLNLRLVEHEERLCLRVNVGDCEWIHIPAYLPSHVNKLLDSEEPYGVRILREDGEYELRVSFEENHEPKMGFAKGAVGIDFNHDSIDLAVINSQGQLKDSKSIKCHDLTCAKKGKREWLIGNLAKRVVDYAKYWQRGLVVEKLEDVAREQRNQHEFTHRKFLEAVKRRAEREGVEVREVNPSHTSVIGRHKYSPYYHITIHQAAALVVARRGQGYREQLHGLKSTVFEPLEGGEGVENAPSRRVHSWSLWSLIGSLGSRKGAVHTHPSQSPETIGMESSRTSAPTERSPTGGGTVGAETVNPGSGPPALEAAA

SEQ ID NO: 37271 - protein, 402 aa, Hassallia sp.
MKNVVKVRIYPTTEQKETLSKAFGCARWYWNNSLNATNELYKETGKGLSQIGMNSRLPALKKEYEWLGETYSQVLQSVSLNLSRAFINFFEGRASFPKFKSKHDKQSIQYPQKVQIVDGHHLKFPGKLGVVSASIHRTFDGKIKTVTVSMNHAGKYYASLLFDDELPDTEISSNGKAVGIDVGLTHFAITSDGSKFDNPKHLKKRTKNLKRKQQKLSRKQKGSNRRKKARRIVARVHERIANSRKDFQHKLSRKLVNENQVIVVENLAVKNMVKNHTLAKAISDCGWSEFTRQLKYKAERDGKTYLEIGRFFPSSKTCHVCLNQVGSLSLEVRSWTCSNCQTKHDRDVNAAINIRDEGLRILALGTSATANGRNVRPKAGRKSSVSKAVPVEVGSPIRHAVG

SEQ ID NO: 37272 - protein, 347 aa, Hassallia sp.
VPYNPKGEAVIDAYDAFVKSRKQGTKQSEAGRFRSWKDAKRAIKFQPENYSNATWYSTFVKGLSFEASEPLPSKDIEYQAKHKDKSFKLRVRKQTWEQSTQLVYDKKRWFAVFPVEFIPQLSDKQTMIALDPGVRSFLTGFDGDKFIDIGNNDIAKIYRLCRFIDGLISQKSKLKGRANKRQRQRTQSKIDSLFIRVRNLIDECHKKVAKWLTTEYRLIFLPTFETSQMVAKTGNKKRKINCKTVRQMLRWSHFRFKQTLKFQALKRGCTVMDVTEEYTSKTCTSCGHVHLLLGSSKKFKCPKCGHKLPRDWNGALGIFLKALRDIAELGASVSSTLCPEKSADYRA

SEQ ID NO: 37273 - protein, 456 aa, unknown
  TnpB Polypeptide
MQFIKTFQYRLLPTDEQNEILHRHAGNVRFVWNKLLEFANDKTQLTDINRGTLSKQVVDLKNSNEFLKSTYSQPLQVQADRLYQTFKKSRSKEIIARRKTKISIVSKIEDPKLREIKMRKAERFGFPHFKSKFRHEDSIFYPQNFKIGKYEIYLPKIGNLKFIRHIPLEGTPKNVTIKQDGKFWNCSICCEVEIPDVALVPLEQANIVGIDMGIKTFASLSDGSVVENPKFLQKFEKRIKIHQKRLSKKELNVKIENGKEIKISSNNRNKEVCKLQKEYRKLRNNRKNFLHQETHRMITKYDGFCVETLDIRNMIRDAMKKHKICLIRSIYDVSWYEFIRLLEYKSLWNSKYFIKMDKFYPSTQTCPFCGHVDKEITLDDRILLCPKCKVLMERDLRASQTILHEGMIKLRDNYNIPQEPWEFKTVGESVENAFDESVTSFSECQSFAKTLVFAKD

SEQ ID NO: 37274 - protein, 402 aa, unknown
  TnpB Polypeptide
MYLIESTIIKPSQKALYRACDELCFLSKNLYNSVLFIQRQNYINRKPYISHFDMGKLMRKEKHPDFYALPSGPADYVIQQLDANYKSYFALCKLKAAGKYRGKVKSPRYKDKVHGRNIATFHKTAIYKRTYKKEGLIHLSKTDIKFKSQIPLELIQEVKVVPKNGYYELQVVYHANEALKLENSNYAAIDLGLNNLAMVATNVSSPFIINGKPLKSINQRWNKQKAKLQSKLKKGRRTSKQIQTITNKRNRRVKNYLHQASRALVNELRRLSISKVVIGSNKEWKQDINLGKRNNQNFVQIPHTRLIEMIAYKARLAGIEVIAKEESYTSKCSFLDDEPIEKHKEYAGRRVKRGLFRASTGSIINADVNAAYNIMKKHLGIGIQSLDSVQVLSTPNVLVFGS

SEQ ID NO: 37275 - protein, 412 aa, unknown
  TnpB Polypeptide
MGVVCLRFKFRPTREMEEVLRKVKVMEQRAVNWLVANKKTALNSVHHALYFPLRQQFPELHSHWVTSALKTATSVVHAFNKRKRKGQAKRPKLKKPFVTLSPHLFKVSFEGKWLKVTIFKSANDLEPIVRWFKPHHKYRRLLDEWKAGECTLGQITLTESSVSIPLKFPDVPVYQPKSVIGIDSNENSLDYCVVEAKGDGQVEGNLGTIDTSEVARINRDYDRRVQKATKGKRNPKAKKKVQAKYGRLRRERTKNLWHLIALMLVRMAVRQQGALVLERLSGMKGRLREASRRLRRRLLNHWSIVRFHRILGVKARAYGVPLVFVDPQGTSKTCPICGGNLRGQERVCPSCGLSRHYVAAINIARRGMEKFPSLSWLGQGFVGNPCCPSSDGTVMGLAVRHHDGNLRSLSTA

SEQ ID NO: 37276 - protein, 410 aa, Moorea sp.
MIIIEFKAYGKPLQYQAIDEAIRTVKFIRNSCIRLWMDNKGTGKYDLSKYCKILAKEFPFANELNSTARQAAAERAWSSISRFFENCKKKVPGKKGFPGFQKHCRSVEYKQSGWKLSPDKKSITFSDKKEIGKLKLKGTWDLWRFDKKQIKRVRIVKRADGYYVQFCVSVDIKEELEPSRTTIGLDVGLKYFYTDSDGNTEPNPRFYRKGENRLKFYQRRVSRKKKGSSNRKKAVNRLGRQHLKISRQREEHAKRLARCVIRSNDLVAYEDLRVKNLVKNHCLSKSINDAGWYQLRKWLEHFGKKFGRVTVAVNPAYTSQHCSECGEVVKKSLSTRTHVCKCGCRLDRDHNAAINILKRALGTVGHTGTWIIDPNASGDLASTVLDSGQEQQAGSLSEESPRLMTGECQR

SEQ ID NO: 37277 - protein, 434 aa, unknown
  TnpB Polypeptide
MLKAVKYRLYPTKEQEALFMRYFAACRYVYNIALEVKIYAYRAHGVSISEYDLVKQLQEAKKENEWLKEFASQTLNYEMTCLDLAYKAFFRTKKGFPKFKSRYDKQSCTFLQNSFIPDDQHIDLPKVGLVKGSIHRRLDGVVKRITISRSGSGKFYASAIVEMADNTLQMPHTGKSVGVDMGVRNLVSVADNISQNDVRIGNVINAGKSEGMRERLEHIQRRIRRVQRHLSRKNEHRKRDKNERSNRQEKCRIRLARLKEKEAFIRSNLLHEISCGLTNEYDTICIEDLAVKNMSRTAKGTIEEPGKNVKAKQGLNRVIVNSGLAMLRTQIEYKAAQKGRRVVVVDRCLVRRKNCSKGGTDHDLNAAKNILDAGIKASSDVYTEYTHGAERKGRTKKSDGGVSVEVSTPVNSSWKKLLKPTVKTITKEYGVTDG

SEQ ID NO: 37278 - protein, 434 aa, unknown; identical to SEQ ID NO: 37277
  TnpB Polypeptide

SEQ ID NO: 37279 - protein, 355 aa, unknown
  TnpB Polypeptide
LYNAALQERRDANRMAGKHITYYAQANQLPDIKEIREEYRDIHSQVLQDVLRKADKAFKAFFARCKRGTTPGYPRYKGRNQFDSFTYPQGGYSLTHDHRVCLSKIGSIKVKFHRKLQGAIKTCTIKREGECWYVVFACEVGCEPLEVCEEAIGIDVGLLHFATLSDGRTIENPRYYHKAEKKLERLQQALARKKRGSTRRRKAVKHVTKAHRKVKNQRKDFLHKASHALVRSYGLIVFEKLQTANMSKRPKPKQDRQGNYVPNGAAAKGGLNKSIVDAGWAMFQQFCTYKAANAGRDVLFVNPRYTSQICSGCGTVRKKELSERWHSCECGTELDRDHNAAINILVLGRSIQARA

SEQ ID NO: 37280 - protein, 502 aa, unknown
  TnpB Polypeptide
MRRVLLIRLSSRYKSKVKQFVYDLAQFQNLLRLFVLEWNRKTGDIFKLFNQSLLYSLLADRIQSNKSELQRKELDEVKGIIEQNEELKKWIVLLKEQKKKVRNAFACQHIIIQEVNNLKSWIQLLKEYKRNSERFRGRPGLPKPRKLRDLVKFSVPIRFERKGRRLVLMLRGGDKEHKAERVEVLLPDWFDYQAREVKLIYDMNWIEAQVVYEKELGIECSGSYQAGIDVGLDNLLSVVSDNPELKSFIVSGKELKSFNRWFNKKRAEIQSHVDLVRNMINEEKDEERKKDLEKHYWWLKKYFWNLYKVRDRKLNTWIHQITRRVADLLYETGHRRVYIGKEGIDKNEISLGRVVNQNYVSIPHRKLVNMLKYKCEELGIEVVEVNERYTSKSSPVSDDVVEIQSKRKNGEEVQFSGKRVSRGLYRDLVLGKVFNADLVGAMNILKVGAKLRELMLGVKTLFVKLCNPIRFKLFDLIYKSNPESLLGIGDSMPVFRREALAL

SEQ ID NO: 37281 - protein, 414 aa, Halobacterium sp.
MEKRRTVPVKLAVDSDDAALLEDTVDEFLWAANYVTRHAFEGEYVTTSKTTLNDETYDDVRDETALHSNHVQAARNKAAEACKSVVEKWKQGKKASMPHFTSPHIVYDHRTATFHDDHVSLATTDGRIEADYVLPDNERDTPHAEYVFSDEYETTGAELHYTNDNWMLHIHCKRDVEPDTLERDTTENRTVLGVDLGVNNLAVASTGTFWTGDEFDHWRREYEKRRGDLQQCGTRWAHKTMQAVGRKEEGRFKITLHRISNELVAEARDHECSVIVFEDLTNIRERTGASWGHKWAFDRLYEYVEYKAAEYGIDVEQVDPENTSRRCSHCGFTHPDNRDSEKFECLKCDYENHADYNAAKNIGLRYLRRNQTGSGGGAPVGVRLNSGMLNANGEYEPPASTEARAGVHAESPRL

SEQ ID NO: 37282 - protein, 463 aa, unknown
  TnpB Polypeptide
MSEELIKTVKQYSFPLSDEETEMLERTGKAFRNCRNYFFSRFYGIRSITRLENGRKLRDSLMKENLKNIAGMPARYWKIALVQVLGNLKTLLENVKLKIRKASHNNINLSDADRHYINNILKYENCLSDVLNFKKLDQYIYKNHNVNFKRLNSLIRRYYRRYRGKIPYSHKTNFFLLDADMYRYEKGLIAISTVNKGRRLPIKLKDERIFKGNLTLKWDTRLIIYGTAKTEIKINVNPKNVVAIDKGRRKLVTSTSGNSYGTGYSELTKDLIEKQERKMKERQFYWNLYRNFLKSEKTLKAENVLANNLGKKKFNKFSERIREKSRSYINHELDLFFETEKPTEIIKEDLTWENLNGKSKGKNFNRIISRWEKGYLDSQIEWKSEQRGIKITNVNPAYTSQICHICKNFGNRDGETFACPHCGNKMDADVNATHNIMKRKEIKKINIYTSASKVKEHYLMLNS

SEQ ID NO: 37283 - protein, 441 aa, unknown
  TnpB Polypeptide
MNKNELIKASLKKTKERRKIQSPKVYQLKLQNLSEADIELLDKLFLEAKWFYNYIIADIQNRLTTNTYKLKEVEVKVKDSFEKREITHLGSQIKQSIIERIKDDLLNLHKAKKKGIQVGALHFKSEANSIQLNQYGNTYKIDFKTNKIQIQKVKKDFRVLGLHQILEDAEITKGELIKKSSGYYLFVTAYLNEEPHKIKTKKDKIKEKQIDHFNKPLGIDFGIKEQLTLSNGIKISFSIPESNRLKKLQKQLSKKKGYKKGETKSRNFFKILSKVKREYENLSSIKKDIENRVFAFVKSYEKVYMQDDNVKGWKSGLFGRKIQHTSIGRIKARLSNNLETLVLVDRFLPTTQTCSNCGHKQRMSLSDRVFKCEACGFEIDRDINSARDMIIFGGETPLKNLPEDFWEATPVEREATARILESNPHIRVSYTSVNQEALSFN

SEQ ID NO: 37284 - protein, 376 aa, unknown
  TnpB Polypeptide
MADNKRYTTLKVRLYPNEAQADLFEKTFGCCRYIWNQMLADQERFYLETGKFFIPTPAKYKAGAPFLKEVDNQALIQEHNRLNQAFRLFFKHPENFGYPKFKRKKEDRDSFTACNHDFPSGPTIYTTKDGIRMTKAGIVRAKFHRRPQAWWKLRRITVDKTRTGKYYACILYECPAAEREPVPPTPEKTVGLKYSIPHFYVTDGGETADPPHWVKRSQEKLANIQRSLGRMQPGSKRYRETVQKLRLTHEHIANQRRDFIHKESRQFLLLAEKEPNTEPSRFGFLMTVRSNSSVSRGALVAHLEEHNIQTCPLFAGNLIRHPCFQTMKEGTDYRVIGDLQATNRTMNQSFWVGVYPGMEQAMLDEIVGRAQEAFDL

SEQ ID NO: 37285 - protein, 394 aa, unknown
  TnpB Polypeptide
MSRYRLEPTAEQESVLLRHCSDARYVWNLCVEQESWWRRGRGAMPGFAERCRQLTGAREGFPWLAEGSVIVQQQAVKDYGQAMARFFDGTARRPRWRRKGRDEGFRIVHVKPGDVRRLNRNWAQVRVPKAGWVRFRWSRPVPADVKSYRVTLDRAGRWHVAFAVIPEPVPGPGTGEVVGIDRGVKVSAALSTGEMLTVPGHSGPEATRLPRLQRKLARARRGSKRRGRVKAQAARLKAREADRRRDWAEKASTDLARRFDVIRVEDLNIKNMTRSARGTAEAPGRNVAQKAGLNREIGRSGWGALVRRLEDKAPGRVQKVPPAYTSQRCSACGHVDARSRESQARFACTACGYACNADVNAARNIAAGHAVKARGADRDTGALNREPQLALLPA

SEQ ID NO: 37286 - protein, 497 aa, Nostoc sp.
VVVKTSSFVTEIPLRTTSKDLAVLAARLESARQLYNAVLSEGKNRLQLVRDSELYQQARLMNKNDKKAKSTAFQKAREAKRFSDYDLQAFANKTAIASVWIKSNLDAQTIQKVATRAFKAIERMAFGKAKKVRFKQKGQFASLEGKTNKQGIRWTGNGVEWSKLKLSAIITNDPVILHGLSSKVKYVRLVRRILNQKTYWFAQLICEGEPYQKPKNIIGDCTVGIDLGVSTVAIVGDEKTIWTTFAVELASPQKKIRKLQRQMDRQRRANNPDNFNPNGTVKKGSKRWNKSNHYKKTAAKKGEIERKQAAHRKSLHGKLVNQTLALGKHIKTEKISVKAWQKNCGKSIGFKSPSSFQSEIKRKAENAGGTVLMFSTHKTALSQTCLCGNKQKKSLSQRVHHCSVCGLKMQRDILSAYLSRYVDPKTETLSIQLARNGWLGMEKSLLDGWQNGSNQPARTATCSKSPVSNNGLERVSSNLIAREESEPVRVNETRSVS

SEQ ID NO: 37287 - protein, 357 aa, Streptomyces sp.
LKRQRGHKARLYLTPSQLTAAEDQGHAARVMWNCLHSWWTMLPEGKRTPAAADEAIRQGRKDLDFLGALPAQAAQQVLKTYLRAWVNCWEGRARPPAFKARFCSRMAIDIPQGRDLQIVPLNRRWGRMWAPKIGHVHFRWTKDLPVGKRAGKLDKVTGARLVRESDGWHVVFRVQAEVVDPTPHTGPTVGIDRGIAKPLAPSDGTFREHSPWLTPGETKRLRRLEKASARKRHARKKGERTSRRLARVCNQIAQLRAKAKRRAADWQHKTTTGIAETFSRAGVEGLAITGMVKSVKGTMEAPGRNVRQKAGLDRSIAGEAWGRTVTLLEYKMAEREGGEVKYVGIKSLYGTATRVGP

SEQ ID NO: 37288 - protein, 413 aa, unknown
  TnpB Polypeptide
MLTMNYTYRLYPDAQQQSLMKEWLETCRRLYNYALRELKDWLASRKCLADKCSLEKEYIIPADAPFPSYQSQQDALPKAKKKYPHLTSVYSQVLQTTIRRLHDTWENFQKREFGFPRFKKFGQFKSFVFPQFKTNPVTGCHLRLPKIGDVRINLHRPIPDGFVLKQVRVLSKARGTEWYAVVTLQLNVSIPDTSPHGRMIGIDLGLERFLTTSDNASVERPKFLKSKHRKLKLLQRRASRKQKRSNNWEKSQIKVAKFHHNIANARKDFHYKTAHQLCDQAQTIFAEDLNTVGLNRGMLRKDCIDASWGQFLSLTQWVCWKRGAFFQRVNPNGTSQTCPQCLATVKKDLSVRLHVCPECKYETHRDHAAAEMVLIRGYEIVGRDSAELKEPDGSRSVGGESLDKRRKSRNVSS

SEQ ID NO: 37289 - protein, 475 aa, Micromonospora sp.
MSYRVVRVPGVGHRERLSVVQAYRFALDLSPAQQRALAAHAGAARMAYNWGLERVKAVLDQRAAERSYGVCEEELTPAIGWSLPALRRSWNAAKDEVAPWWRDYSKEAYNTGLDALARALTNWAASRSGKRCGRRVGFPRFKSRRRSTPSVRFTTGAIRVEPDRQHVVLPRLGRLKLHESARKLARRLEAGTARILSATVRRDGHRWYVSFTCEVERAQRTPARPCATVGVDLGVRHLAVLSTGEPVPNPRQLEAALRKLRRISRGLSRKVAPDRRTRRDASKRWERVRGQLSRVHLRVANLRCDGLHKLTTRLAATYGTIVIEDLNVAGMLRNRRLARRIADAGFAEIRRHLAYKTQWYGSRLMVADRWYPSSKTCSGCGAVRTKLALSERTFTCTPCGLVLDRDVNAARNLAALAATVAGSGPETLNGRGADRKTPLAVPVAVKRQPGTATAGKTGTVPPQGRTSNHALTPAS

SEQ ID NO: 37290 - protein, 346 aa, Ktedonobacter sp.
VLIIKSAEEPYIRRFLLLTHKSPFRRTYQSNDKCLADRLTKSLKRFLARKELALKGGFPRFKKGNQWHSIQLRQYGKDVYLHEDKKHLIIPGKMGKSIKIKVHRSLEGTPKTVHLVLRADGHWYALIVCETPPQTEHLPSTCEHPDIGIDVGLKSFLSDSEGNTVDNPRFYRTSQRTLRRKQRQLCRRKKGSHRRRKAAKNVAQTHVKIDRQRRDHHFKTAKPYAEGYHLLAVEDLQITNMVKNHHLAKSIMDASWSAFLSILSDKAERAGHGVRRVNPRFTSQKCHQCGEIVQKSLSVRTHICPFCGSVPDRDVNAAKNILGKARAWPSGTVSDGSPVELRSPRL

SEQ ID NO: 37291 - protein, 308 aa, Sphaerotilus sp.
MEAVKTLKLRIKDKHAGVQVGSATVQLVCEEYATRRKQFKKSRLNWRVSNPKSAKHSLGWVPFKAGGAKYKAGQIAFLGYKFGLWDSYGLSRFDLRAGSFSQDARGRWYLNVCVKVGVPKSEGVGSVGIDLGLKTAATCSDGEELASGLYRKHEGALGIAQRAGKKNRVRAIHAKIANTRKDAMHKFSTGLVARNAAIFVGNVQAGAMVKTTMAKSTLDAGWSMLKTMLEYKSHQAGIVFEEVNEAYTTQTCSGCGVIPASSPKGRTGLRMRRWTCCECGAEHHRDVNAARNIAARGHARRAGGIPVL

SEQ ID NO: 37292 - protein, 438 aa, unknown
  TnpB Polypeptide
MSAQRSTIGPVSTFRRYFVTRTRCRNRRKTALSFDLKACVCIGTKCHADMVRVYRYRLRPTRAQDAAMREMLYRLRELYNAALQERRDAYQKGGVSISGYSQMAELRGVREVRPEYAAIHVHLLQDAITRLDRSFRAFFRRVKAGEKPGYPRFKGRDRYRTFTFKDAVNNNGVRIVAGGARVRLAGIGNVKLNLHRPIDGLIKQASVTLSGDDHWYVAFACDGVPAKPLPSTGRSVGIDVGITMFAALSDGTLVANPRPYEVAQHGLVRAQRRVARRCRWSGRRRHAVALLAKWHAKVQRVRLDFHHKTALDIVRRFDSIAVEDLNIKGLARMRLAKQVHDAGWAQFTSILASKAESADRDFNRVDPRGTSQMCSACGCEVRKDLSVRIHVCPHCGYVADRDVNAARNVQGRGQRLRGGVANGLAEDPRSPDLAVCGR

SEQ ID NO: 37293 - protein, 392 aa, unknown
  TnpB Polypeptide
VKRRWNFRAYPTPEQEEHLARTFGCCRLIYNGMLAARTLAFQRGERLTYAGSDKKLTALKREPEMAFLNDVSAVPLQQALRHLHTAFVDFFAKRSAYPTFKKKGRVRDSATYQRNAFGFDATTQRLTLAKLGVLRVRLSRTVPSDPSTVTVSRHPSGRYYVSMVVEVPVVKRIKTGHSIGIDFGVSRLATLSTGETIPNPKHLARRTMYLARAQRRLARTQKGSNRRLRQARRVARLHEKIADARRDTLHKMSTMLARRFDIIYVEDLHLRGMVQNHSLARSLSDASIGTAIRMLEAKAESVVKIDRFFPSSKTCSACGYLLNALPLAVRQWACPQCGTAHDRDVNAAKNIMTVGQTVTARGAGVRAVRTLVRKAGRRRSVNHSRMKHRVSS

SEQ ID NO: 37294 - protein, 373 aa, unknown
  TnpB Polypeptide
MRKMFQYRILPTKKQEKKLNETLEECRWLYNHLLATRKDTYEQHGESLSLYEQQATFPILKQERPSLQDVHSQVLQNVAVRVDLAFKAFFRRIRERAEEPGFPRFKGYRRYDSFTFPQSGFSITHDNRICLSKIGSIKMVYHRPIKGKIKTLTIRRSSTGKWYASFSCEVEPLRLPERPEQVGVDVGLKTFATLSTGEEIANPRFFRKEEKALAKVQRRHSKLAKGSPERHKHRKVVARVHERITFRRENFTHQQSRRIVDSFGVICVEDLQVNRMVHNHCLAKSIVDASWSAFFSQLSCKAEEAGRKYVAVNPAYTSQTCNTCGHRQQMPLDIRVFDCPCCSVHIDRDFNAALNIRAVGLHGLGLSLEAPVL

SEQ ID NO: 37295 - protein, 383 aa, unknown
  TnpB Polypeptide
MRTYEYRLYPNKKQYHLLMQCLMESRMLYNEMLKTIKAQYEQDGTFPSKYDLDKLFQGCSGEHVPASTVQMLSDRLSKSLKRFLKARELGIPDVGFPRFKKPNRWHSIQLRQYGDKQRHRNVWLDEEKKRLWVPKKLGTSLKIKLHRKIEGTPKTVHLVLRADGHWYALIVCETEPQTDRLPSTCEHPAIGIDVGLKSFLTDSEGHTIANPRYYRKSQCTLRRKQRTMCRRKKGSHRRRKAAKSTAQTHLKIKRQRRDHHFKVAKQYAESYGHIAVEDLQIFTMVQNHTLAKSIMDAGWGQFLRILEAKAVSAGHQVIRVNPRYTTQACSNCGELVHKSLSVRTHICTSCGYIADRDVNAAQNILQRAGHGLQGRSPLGVRLN

SEQ ID NO: 37296 - protein, 469 aa, Herbidospora sp.
MGRRLRRRGVLLLGLETSSRLHRPGHHPGGGGLSPDTYSVDAPSFRAGRKSGSARHFVPLFMSVGSSKLLSMSRYRLSPTPAQEAALAEHCGHARYVWNLAVEQHSHWRPGRKSAPGFAEQCRQLTEARAEFAWLRSGSIVVQQQALKDFTQAMANFFGETHKRPTWRRRGQGEGFRIVAVKAGDVRRLSRNVGEIRVPKVGRVRFRWSRAIPEGVKSYRVTRDSAGRWFVAFAAIPESLPTPGTGVVVGVDRGVAVSVALSNGEMTSAPTLRETEKARLLRLVRKLARARKGSRRRGEVKAAIARLRARETDRRKDWVEKTSTGLARRFDVIGVEDLKVKNMTRSAKGTVETPGRNVRQKAGLNRGILAAGWGRLVERLEHKAPGRVVKVNPRFTSQTCNACAHIAKENRESQADFLCVACGHQANADVNAARNIRDIAAGHAVNARGGDRVAGPVKREPQHDLLLVG

SEQ ID NO: 37297 - protein, 259 aa, unknown
  TnpB Polypeptide
  misc_feature (164)..(166): Xaa can be any naturally occurring amino acid
MDHKKTTVNISEYRLKSVTVSQTSSGKYYASILFEYEYQVQEKELQKFLGLDFSMHELYRDSNGKEPAYPRYYRNAEKKLAKEQRKLSKMQKGSNNRNKQRLKVAKLHEKVSNQRKGFLHKQSRQIINVYDCVCIEDLDMKAVSRSLNFGKSVSDNGWEMFTTXXXSLNFGKSVSDNGWEMFTTFLKYKLEEQGKKLVKVDRFFASSQTCSVYGYKNAKTKNLALREWDCPQCKTHHDRDVNAAVNIRNEGMRLVNALP

SEQ ID NO: 37298 - protein, 412 aa, unknown
  TnpB Polypeptide
MLRAVKVRLYPTAFQTTQINKLLGSCRVVYNQTLDRKIKQYNEHNISENRNTLSYWFHHVLLTNPDFEYLKEQNTKVLKQVINDMLTAYKNFYERHTGYPKFKSKHNNKQSCRFVKDAISKRNDYTTYKLSLANIKNIKFRCNKKNVEYLQKNKANIRQATLSKLPCGEYYLSILVDGDLTHKGVQDTDNYIGIDLGVKDFVITSEGEVFNNLHFKKNETNKLKRLQKQLSRKQKGSKNRNKARIKLAKLYKKINDKKQYYLHEVSNTLINENQVICMEDLNVKGMLKNHKLAESIAEMNFGEFKRILEYKARWYNRKIVFIDRFYPSSKTCSCCGFKYKDLKLSDRFWVCPQCNTHHDRDINAAVNILNEGMRLVGSSTTEFTLVDYPTMDDRPVMDLKSSDRVKQEVNKE

SEQ ID NO: 37299 - protein, 172 aa, Acinetobacter sp.
MKTLKLRIKDKHCKVLYQLASEVNFVWNYVNDLCFKHLQRKQQFFSAYDIAKYTKGTSKECNLHSQTIQAVTEELVTRRKQFKKAKLKWRVSNKKSARRSLGWIPFKKVAIKYADGYVQYGKHQFKLWDSYGLSQYNIKTGTFVEDSRGRWYVCLVVDAVKIEKTTLKPQLA

SEQ ID NO: 37300 - protein, 310 aa, Xenorhabdus sp.
MKRRQAFKFQLRPNGQQERDMRRFAGACRFVFNRALALQNENHEAGNKYIPYTKMTALLTAWKANADTQWLQEAPSQPLQQSLKDLERAYKHFFQKHTSFPRFKKRGQGDAFRYPQGMKLDQENNRIFLPKLGWIRYRNSRGVEGVVKNVTVSLSCGQWYVSIQTEHEMPEVQHDSTTMVGLDAGITKLATLSDGTVFEPINSFKTSQRKLAILQRQLSRKVKFSAHWQKQKRSIQRLHSHIANIRQDYLHKVTTEISKNHAMIVIEDLKVSNMSKSAQGTAERHGRNVRAKAGLNQAILDQGWYEPAGV

SEQ ID NO: 37301 - protein, 376 aa, Paeniclostridium sp.
MEQMKAYKFRIYPTEVQKELIEKSFGCTRFVYNNMLALQIKEYEEKGKSYSKYDLIKMIPEFKKEYEWLKEVDSTCLQATIEDLDSAYQNFFREIKKGKKQGFPKFKSKRNPKRSFESKCVNNNISIKENLIKLPKLKWVKVKVTKAIDGKILNVTITKTPTGKYFVSLCCKVDIEQLEKVDSNIGIDLGLKEFAICSDGEVFNNPKWLRKANYRLKLEQKRLSKMQKFSNNWNKQRLKVAKIHEKIVNQRKDYLHKISTRIIRENQIICIEDLKVSNLIKNHKLAGAISEVSWYEFRRFLEYKASWYGRTISVIDKTYPSSQLCNVCGYRNKDVKNLGLRKWECPECGTLHDRDVNASKNILKEGLRLVSLGQAC

SEQ ID NO: 37302 - protein, 393 aa, unknown
  TnpB Polypeptide
MKRAYRFRFYPKAGQVEQLEQTLTLCRRLYNAGLEHRIVAYRNGKSVTYRQQQNELPTIRWEMPEYASVYSQVLQDTLRRLDRAYKAFFRRATERRTGKNVKVGFPRFKGENRYDSITYPQSGFKLLPNGHLQLSKVGEVRMFMHRVPKGKVKTLNVKCDRCGCWFVVLTVEKPAVKKKGRPTVGVDLGLRNLVALSNDETLPAPEFLRRSEKKLKRLQHWTSRKLKGSGKRRKAVLCLAKGHRKVERQRTDFLHKLSRDLARCDVVFEKLNVAGMLKNHRLAKSIADASWSRLVQFTVYKAEEAGGRVVLVDPKYTSQECSNCHTRVKMLLKDRVFVCPNCGLVICRDVNSARVVLSRVGRGTAEFTPAENPPILAKAGKRVRGNGKPWPSG

SEQ ID NO: 37303 - protein, 406 aa, unknown
  TnpB Polypeptide
MLCVLDKSKRQNTRRQARERDAAAGLVTRVLRMRIKDKHAPWLRERGTAVNLVWNFCNETSFRILQREQRFVSAYELDALTAGATKEGLQLHSQTVQAVAGEYVTRRKQFKKARLRWRVFDPKRSSYSLGWVPFKKSAIAYRNGQVFLAGHPLSLWDSYGLADYELGAGNLSEDARGRWYLNVAVKVKKQPRAAANLSGSALGIDLGLKELAAGSDGLKVQAQRFYRDLEPKLAIAQRAGKKARVRALHAKIANRRKDHLHKLSTSLVRQHAAIFVGDVNAAGLARTSMAKSVLDAGWSSFRTMLQYKCDDAGVWFKEVNEAHSTPDCHLCRARTGPKGREELGVRRWTCAGCGTAHDRDTNASCNIRARGLEWLEKMFAEAAKARACETVTNKAATLPRPDMVVS

SEQ ID NO: 37304 - protein, 402 aa, Escherichia sp.
VKRLQAFKFQLRPGGQQEREMRRFAGACRFVFNRALARQNENHEAGNKYIPYGKMASWLVEWKNATETQWLKDAPSQPLQQSLKDLEWAYKNFFQKRAAFPRFKKRGQNDAFRYPQGVKLDQENSRIFLPKLGWMRYRNSRQVTGVVKNVTVSQSCGKWYISIQTESEVSTPAHPPASMVGLDAGVAKLATLSDGTVFEPVNSFQKNQKTLARLQRQLSRKVKFSNNWQKQKRKIQRLHSCIANIRRDYLHKVTTAVSKNHAMIVIEDLKVSNMSKSAAGTVSQPGRNVRAKSGLNRSILDQGWYEMHRQLEYKQLWRGGQVLAVPPAYTSQRCAYCGHTAKENRLSQSKFRCQVCGYTANADVNGARNILAAGHAVLACGEMVQSGHPLKQEPTEMIQATA

SEQ ID NO: 37305 - protein, 412 aa, Nodularia sp.
MLVFEAKLEGMNEQYGKLDEAIRTARFIRNSCVRYWMDNKGIGKYELSAYCAVLAANPEFPYAAKLNSMARQASAERAWSAIARFFDNCKKGKPGKKGFPKFKKHQTHGSVEYKTSGWKLSDDRRYITFTDGFKAGTFKLWGTRDLHFYQLKQFKRVRVVRRADGYYCQFCIDHERVERREPTGKTIGIDVGLNHFYTDSNGETIANPRHLRKSEKSLRRLQRRMSKTKKGSQNRIKLRNKLARKHLKVSRQRQDFAVKTARCVVRSNDLVAYEDLMVRNMVKNHRLAKSISDASWSLFREWVEYFGKVFGVVTVAVPPHYTSQNCSNCGEVVKKTLSTRTHVCPHCGHTQDRDWNAARNILEKALSTAGHVGTNASGDIDLCLGGETPSTKSGRGKRKPKERSLESPPSTK

SEQ ID NO: 37306 - protein, 366 aa, Nodularia sp.
LLFGFKTELKINNHQRTQLLQHCGVARHAWNWGLALTKQILEHNKLNPNSKIKFPTAIDLHKWLVALVKSENPWYYECSKSAPQEALRALKTAWDRCFKKISGVPKFKRKGKHDSFTLEGSVKNLESNKIQVPKIGVLQTYERLPQKEIKSVTISRKANRWFISFRFDVEKQDNKNLKVVGVDLGVKNLATLSTGEIIEGAKSYKKYESKLSRLQWLNRNKVINSNNWRKAQLKIAKLHLKIANIRKDTLHKLTTLLAKNHGKVVIEDLNVSGMLANRKLAKAISDMGFHEFRRQLTYKCELYSSELVVVDRWYPSSKTCSNCGTKKENLTLNERVFQCENCGFECDRDLNAAINLSKIDLSKAVS

SEQ ID NO: 37307 - protein, 358 aa, Nodularia sp.
MLLSIKTKLKLTKAQEIIMSKHAGIARFTYNWGLATWRQLYKDGFKPNKYILKKFFNNHVKTEFDWIKEKGICQKITQYAFDDLGDAFSRFFSAKSDYPNFKKKGRNDSFTIDAGGKPIPVGGKSIKLPTIGWIKTYEGLPHTTCKSITISRTADSWFIAFAYEQEHEPTLKKYEVVGVDIGVKELATLSTGVVFPNPKHYKTNLRKLKRLSRKLARKIKGSNNRYKAKITLARHHAKIANLRKNTLHQITTYLCKNHAKIVVENLNVSGMLSNHKLAQVIADCGFYEFKRQLEYKAKKFGCEIIIADRWFPSTKTCSNCGHIQDMPLSERVYNCQNCGHSMDRDLNAAIVLSRLAKP

SEQ ID NO: 37308 - protein, 396 aa, Nodularia sp.
MLVFEFKAYGKSVQLTAVDDAIRTAKFIRNSCIRLWMDVKGTGKNDLQKYCAVLAANFPFANELNSMARQASAERAWSSITRFYENCKQGIPGKKGFPQFRKQCHSVEYKTSGWKLAEDRKSITFTDKKGIGRLKLKGTRNLHFYQINQIKRIRLVKRADGVYVQFGIDVNRSENIKPTGNTIGLDVGLKEFYTDSEGKTAPNPRFLRQGEKVLKRSQRRVSQKVKGSKNRGKARQLLGKRHLKISRQRKDHAVKLARCVVQSNDLVAYEDLRIKNLVKNHGLAKSINDASWYQFRVWIEYFAKVFKRVTVAVNPQYTSQECSSCGAVVKKSLSTRTHICQCGCVMDRDENAARNILSRGLGTVGHTGTFMLDMSNASGEMTSTLAGAILLEQVAS

SEQ ID NO: 37309 - protein, 422 aa, Nodularia sp.
MSNYGCQQVLISPDKELRAILEFVCEQSNKLANCGLYYSRQLFFKTGKIPSKAELHRLLKSNAHFQALYSHVAQQTLTTVFESFRSFIGLLKGVKGGTVEQRPKLPGYKKNALKLVTFPRADVKLKNGQLRFPLGTKVKAWFGIDAFYLPMPSNLKYSDLKEIRICPRNGCFYAEFIYSVEEIKVELDFEKVLGIDPGLNNWLTCVSNTATSFIVDGLHLKSLNQWYNKRVSVLKKNQPQGFWSKQLGGITEKRNRQVRDAVNKAARIVVNHCLEFQIGSIVFGWNKGHRQEINLGSKTNQKFVQIPTARLKDRIAQLCKQYGIKFIETEESYTSKASYVDGDFLPVFGSKPEGWKASGRRVSRGLYQASSGLKINADANGAANILRKVAVKLGFNLSGISSGELIAPLKIRLWTLQESPSL

SEQ ID NO: 37310 - protein, 394 aa, Nodularia sp.
LLVLEYKVKAKKLQYLAIEEAIKTTQFIRNKCLRYWMDAPRELKIDRFALNKYSTELRNEFKFVANLNSMAVQSSAERAWLAISRFYENCKKKVSGKKGYPRFQHDNRSVEYKTSGWKLNQTQRRITITDKKGIGELKLLGKWDIETYPVKSIKRVRLVRRADGYYCQFCIDVEVLDIQPLAGNEIGLDVGIQSFYTDSNGHQEANPKFLRKAESKIKHAQRRIYKKKKGSSGRKKARAIFARKHLRISRQRNEHAKRIARNVCKSNDLVAYEDLRVRNLLKNHCLAKSIADASWYLFRQWIEYFAGKFGKLAIAVAPHYTSQKCSNCDAIVKKSLSTRTHVCNCGCSLHRDENAAINILNLARQARTGHVQSNAVGLVAATLLGESLLEQVTR

SEQ ID NO: 37311 - protein, 221 aa, Nodularia sp.
VLRDIAVTSNGDKWDGKQINDVRDKFSRVRTSLQKKATKGTRSTRRRARQILKRLSGKERRFQQWLNHNISKSIVQDALKNHAIVAIEDLTGIRERTNQKPRNKTERRRSNSWSFYQLRSFLEYKGIQFGVEIIAVPPAWTSQTCHQCLHIGLRSDKRFKCTNEACSWSGDADFNGAKNIAAIGVNLVNSPRGSNCLCCDLSTDSSGLLKAHTVPDSGQCG

SEQ ID NO: 37312 - protein, 244 aa, Nodularia sp.
LSRFYIAEIEGTVKTLTIKRTPLGELFMVVVVDEGGQAEVEVKTGKIAGFDFGLKTFLTCSDGTKVESPQFFKQSLHLIKKAHRHHCAKSKGSANRERARKNLVRRYEDISHKRRDWFWKLAHELTDKFDLLCFETLNLLGMQRLWGRKISDLAFGEFLQILEWVAQKKNKRVIFIDRWYPSSKTCANCGHLLDSLDLSVRQWRCPSCQSVNSRDENAALNIKMVGASTIGLGDVRQAKPAIAV

SEQ ID NO: 37313 - protein, 410 aa, Nodularia sp.
VIIYEFKVKGKDKQYRAIDDAIRTSQFIQNKCLRHWMDNKDKKVDKYALNKYCAVLAAEFPFANELNSMARQSAAERAWSAISRFYDNCKKKIKGKKGFPKFKKHCRSVEYKTTGFKLSTNRKAITFSDKKGIGTLKLKGTYDLNYYNIKQIKRVRLVSRADGYYAQFAIDVQVKVETQPTGQVVGIDLGLKYFIADNKGNVEPSPQFYRKSKKQLNRANRKKSKKFSTAIKKAKVRQSNNYHQARNRYARKHLKVSRQRKEYCKKLAYSVIQSNDLVAYEDLNVKGLVRNRHLAKSISDAGWYTFRLWLEYFGHKYGKVTVAVPPHNTSQNCANCGEKVKKSLSTRTHVCPHCGYVADRDLNASINILKLGLSTVGHTGIYATGDLPSWAVGASLLSNGESVNVESPRL

SEQ ID NO: 37314 - protein, 414 aa, Nodularia sp.
MLTQMIVLEFKLRGKTTQYAAIDEAIRTAQFVRNKAIRFWMDNKGVGQKELYRLSKAIRQEFSFANCLNSSACQAAIERAYSSISRFYDNCKKGIPGKKGYPKFQKNNRSVEYKTSGWKLSETRKQITFTDKKGIGKLKLKGTWDLNFYPIEQVKRVRLVRRADGYYTQFLISVENKVETDPTGKIIGLDMGLKEFYTDSNGHSEPNPRFYRTGEKRLKFYQRRVSRKKKGSANRKKAINKLGRVHLKISRQRQEHAKRVARCVIQSNDLVAYEDLRIKNLVKNHCLAKSINDAGWYQFRKWLEYFGVKFSKITVAVNPAYTSQECSSCGAMVKKSLSTRSHICECGFVLDRDWNAAINILKLALSTVGHTGTWMDADRSRSIDPNALGDSTATHVGEILYEQVGSVNKESPRL

SEQ ID NO: 37315 - protein, 397 aa, unknown
  TnpB Polypeptide
MVVSSYKLRLYPTKNQENKLNDTIEICRILYNDFIFESHLAYKEGYKIKFDELQRMIPAMIPKDKVYSKVAQMVLWQFYNNLKTLSALIQRGKRTGNLRFKSKSRFHSINYNQSGFKFLPDNKIKFSKIGKIKCIIHRKIQGKIKEIHVKKELTGDWYAIVVCENELKSICSLFRKKIVGIDVGINNFVYDSDGHVIKHPQLLRKSKKKLKRSQRKLSKKIKNSNNRWKQKLNLARIHQKIKNQRNDFLHKTSRYYVDNYDTIFVEELKIQNMIKNHHLAKSISDSSWNSFFQKLEYKAARAGILFKKISPYNTSQKCSMCNNIVKKSLAQRTHNCPFCGFKIDRDHNAARNIKQKGLDSLPLEWREVTPLERRPLTITSTRYSQVISRNEEIHHFD

SEQ ID NO: 37316 - protein, 376 aa, unknown
  TnpB Polypeptide
MKQTKCVWQFHDKSKELKEVFDYFRFCTNEMIRVSEQKNLTSRGAMHKEFYKSLREDFIAKYIQSATSVAKARLKLYRTTKKKKPDAKIPYVKRNMISLDNQSFKIQDEILRIPIKPHEYIFIKLHSYVIKKLEDTKVGSITLTPEKLIISYSKEIFQIIPKHHVGIDRNLDNATSFDTTGKFMVYNLKKTNQIKATYKAVKSKFKRNDVRIRKKLYSKYGKKEKNRVHQLIHEVSKKIVSQNQGIILEDLKGIRKLYRKGNGQGKKTRGKMNSWSFYELQRQIEYKALWAGLPIQYVKANSTSSKCSECGSKLVPEENRMMTCNSCKTIVDRDINASRNILNRGMRFVPHAVQNEVMKQFKDAEQIVPSLIDGLK

SEQ ID NO: 37317 - protein, 433 aa, unknown
  TnpB Polypeptide
VPTVCLKFRFNENSKIKTLMDACASIQRQAVEFAIDNNKTATFTIIKALYPSLRTQHPNLHSLWLQSAVRSGAAVVHSFKNRKRKRKGQGTGDKGQGNTNLEKPKIKRPFVYVSKQILKVDWDGSKLTLTFPVSPYDKEPIILTFRPHHRYCRLLDDWKEGRAKMGEPTLTFNSISIPLKFPEVQPYKPKTVIAVDSNELNLTVYDGTGGKAQGAWDMGQGAFEGCLREIDTSYAARISREHARRVRKGTKGKQNPKAKRKIASKHGRIRKEKVKNFWHHVALMLIAWAMATKAAIVLEDLKGMKGKIASKRKSRRIRQRLLNFWSVMTFHRILALKAAFYGVPLIFVEPKNTSRTCPICGRVNERLRGHVFECPCGLKKGRHEVAAINIAHRGLESLGVVMPRQGLVGDPCCLSSDFGLKAQGHDRNTQPTA

SEQ ID NO: 37318 - protein, 304 aa, Clostridium sp.
MNGEKAFKKFFKGESRFPKFKKKKKQDVKAYFPKNNKTDWTIERHRVKVPTLGWIRFKEFGYIPVNSMVKSGTISQKSDRYYVSILVEEGIKVNDKAFSKGIGIDAGLKEFAVSSNGNSKKNINKTAKVKKIEKKLKREQRKLSRKYESLKLRNKKMKGEVTRQNIQKQVVKVQKLHQRLTNIRTDYINKVVSDLINQKPRFITIEDLNIKGMMKNRHLAKSVSQQKFYEFRTKLISKAKQNDIEIRLADRFYASSKICSCCGYIKKDLKLSDRVYKCDNCNASIDRDLNASINLANAKKYKTA

SEQ ID NO: 37319 - protein, 306 aa, Lachnospiraceae sp.
VLKAYKYRIYPNKKQQAQIVKTFDCCRFVYNRTLMYRREMYEKCGVFVSRTDCNNYLNRELKAKHSWLKEVDKFALTNAVYHMDSAYQNFFKNRSGYPRFKSRYSEHKSYTTNFTNGNIAIDFEEGRVKLPKLKMVKAVLHRFFKGQIKTATISQTPDGKYYVSILAETAHEAIPLSFLRTGVVSLSGDTGVLWDEKECKSPESLERKERRLEKLQRQLANKEKGSNNYYKQKRKIALCRERINNISRDYCHQVSHEIISQNQLITLEKRKSAKNSSQTTPAAGIVWYELARQLEYKAKWNGRILL

SEQ ID NO: 37320 - protein, 382 aa, unknown
  TnpB Polypeptide
MFNICNEYCFKSKNLYNFANYMIRQEFINNNKFLTYYDIDKIIKKEEPYKDIGSNSGQMTLKILEQNWKSYFVAIKDWGQNPKKYLGKPKLPSCLDKDKGRFVWVLTNVQSKIIDGYLKFSFKPLHPYSGTIKTKVEGKHMQTRIVPKKGYYVLEIVYQIEIPDISNLQKRVLGIDIGLNNLVTTQNNFGEKPFVINGKPLKAMNTYYNKKASSIQSELMNTNKQRWSKKLNLYLRKRNNKIDHYMHNVSKWIVKYCFAFKVDTVVIGKNDGWKQENRIKNFVQIPFERLIHQLQYKLSHEGINVILTEESYTSKASFLDGDRLSKSEFSGKRVKRGLYKSREGTLINADVNGAGNIIRKVFPKSFEDGIEGVCLHPTIINL

SEQ ID NO: 37321 - protein, 372 aa, unknown
  TnpB Polypeptide
MLRTYKYKLYDSKKLKHIHRTINISGIIYNHCIALHKRYYRLYKKHLNVFQLQKHLTKLKKKDKYSFWKKVPSQAIQDITVRIDNGYKKFFDYTKGKTKLKASPPSFKGVKKYKSYTLKGTVGYKLENNTISLNGYNYKFWLSRAIKGTIKTVIIKRDSIGDIYICISLEQKEPKYNIVTGKNAGVDFGMITFLTLNDNTEIEAPLYHLKNLTQQKRLNRNLSKKKKGSNNRKKAKRQLAKLHIKTANQRRDYFHKLSNKLKKNYDNIFIEDLNMKAMQKLWGRKISDLAFSEFINILSYKTKVIKIDRFYPSSKTCSCCGFVISELSLKIREWQCPACHSHHLRDVNAAINIHRVGTSTLRGETVRLTKVS

SEQ ID NO: 37322 - protein, 379 aa, unknown
  TnpB Polypeptide
MRATVSAKIKINPTKEIVATIKAYTKSLQFCVDYAWKHKINHNFKLHYSIYQIIRRRFKLPSQLAVVCIKQACGMVKKAKSKPIIKRTSVGYNFPRSANIKGDILVLRLLKIRQEFKFTIPACYKDYFSWEVKESLLRMDKKGRCFFIFTFSKEVNATEMNSCSQTTVLGIDLGVNNLAVCSDGRFYNSAKVKQIKRKFKYLRSKLQAKGTRGAKRLLKKLSGRENSFMVWINHNISKDIVSNFNGNKIVMENLKGIRKQHRGRIMNYWISNWSFYQLQFFIQYKAEHRGIEVVRVKPNYTSQICHRCGNLGSRSKGCFSCSHCGLSNFNSDLNASLNLAHPMLVERQGAVNHPHNRSYDSKDSPQTVIADELMVKTIS

SEQ ID NO: 37323 - protein, 257 aa, Microcoleus sp.
MKARYQYRFYPTDQQRQSLAQLFGCVRVVWNDALALCKKSTKKPKSAELQKIVITQAKQTEERAWLADVSCVPLQQSVADLEIAFKNFFESCKGSSQGRKVGYPKFKKRTNSQSARFRIGGFSLKGDEVYLAKIGNVKPIWSRMLPSAPSSVTVIKDCANRYFLSFVVEIEPVSIDAKNQSIGIDLGIKTFAVMSNGETAKSPNYKALDRKIRKLQKKLARQPKDSNRRHKTRIQIAKLHNRIADTRKDFLQNYQPK

SEQ ID NO: 37324 - protein, 427 aa, unknown
  TnpB Polypeptide
MTDTIQTVVYELHPNKTMKRVLDEAIDYRRYCWNQALETWNELYLAHKIYDKILWTKFIPKQNKKTGKITVKHIDVHLNPAPNWKMVRDIMVHDKADWQYQRSAHLLGLAVKDLGNAWQNFFDKAQPDWGKPHFHSRREPRQGFKSDQSKIVDGLLRLERPQKSLVPSEEWRDFKLSEKPLSDKIGVVSYFREKGRYYAAVPFKVATKKALPKTGKNTAVDVNVGHFNYTDGQQNVLPKKLERIYEKIKHYQRQLAHKRVVTGSAQSNNYLKMRTKLQACYRKAFNIQNDLMHKFTTKLVNNYDQIVIENLSVKGMLMSHVASKGVHRSMFGRFKQMLTYKCKWYDRKLILADKLYPSTQRCAVCGTIKRGDERITLYGNKKYGTKHNEFVCYNKKCPNYNLVVDRDTNAMLNLLVLIEHPKLNKAL

SEQ ID NO: 37325 - protein, 430 aa, Cyanobacteria sp.
MYLTQKNQIRELNQSEFVALRQLCRLSKNLYNVGLYTVRQYFFQERKHLRYEGAYHLCKTNENYKLLNTDIAQQTLKVVDRTFKSFYGLISAVKSGSYQPKVKLPNYLDKDGYFLLIIPRIVVKDGKFRVPLSPAFKKQFGEVWIPFPKRLNINQIKEVRIHPKYKARYFEVEFISEVEPEPVEVKSDRAISIDLGVDNLAACVDTNGASFLVDGKPIKSINQWFNKRNAQLQSIKDKQRIKGITNQQVKLAAKRNNQVRDYLNKTARFIINHCIQNRIANLIVGYNPGLKQEINIGGCNNQNFVQIPFHSLRSKLKAMCERYGLNYTEQEESYTSKASAVDGDEIPIYNADNPKAYPFSGLRVKRGLYRTKDGHLVNSDLNGALNIGRKSKHKGFNRVSRGSLTAPRRINLLELEKWRRVALAPFGTTS

SEQ ID NO: 37326 - protein, 420 aa, unknown
  TnpB Polypeptide
MRGRAYRALLLKYDILGLPPEVQQKIPALLRAQEEFRRWAAEWAKSGGKVPMPEENPLRYLAQKFVHAWNMLEWLRAHAVKRGMKVPLILDAQLRLSDERDVSRGVLADVPKRKVRVRKLGTGTIALPLGEDATKQILERVREGAKLVLAAVWVGRSRGSRAAKLYIALVFRREVEPVEPKRVLAIDLNALHNGITYAVVERNRVLRRGALRPDVSKIVHMQRRAAELDSLCAKRGDPYCKMARSAKSRLWRLLREWEVGAARELVWLARKRKAAIVVDVPDDSSMRELKQDNKYPAERKALLNFGRLRRLIEGLAEWHGVPYVEARLFSTVCPRCGAKMQELPERRVKCAQCGLEVHRDGVPAMWAQRRFDELMRLANPPSFSSPDAYIAPLLCPLMEGRPPPGEGSRPAPPTSRLAAS

SEQ ID NO: 37327 - protein, 222 aa, Coleofasciculus sp.
LYPTPNQEVLLAQSFGYSRWWWNYALSKTIETYRETGFTLSQSALNVLLPGLKKELEWLGECYSQILQATTLNLTTAYKNFFAFRARKSRFKLKNGKQSIQYPQNVKVLDGAVKLPGNIGTVVAKIHRPIEGKIKTVTVSKTPSGKYSASILSKIDGENPATLTEGKVIGVDLGLTHFAMTYDGKKVSKYDNLRHLAKHEKNLKRKQQKLAKKQKGSNSKRK

SEQ ID NO: 37328 - protein, 382 aa, unknown
  TnpB Polypeptide
MLRAIKVRLYPNKTQEQPLNKVLGCYRFVYNHMLALKQKEYNENGKSLGVTELSKYFHGALLKDKQYAWLKEQNTKVMNQAIRQMDGAYQKFFKQHNGFPQFKTKKDKQTALFPLEAISKRNKFNDRKITLIKSLKDIKFRCSDLYFKRLQTYKEKIRSATLSKTKSGNYFLSILVEVPQEEVIKFRATNKHVGIDLGVKDFVITSDGEVFENRHFFKKQEVKIAKLQRQLSKKQKGSNNRSKQRVRMAKAFEKLTYQKDAYIHSVVNELLTYYDTIFMEDLNVQGMLKNHKLAKAIQEIGFYKFKQILVDKARNNYKQVVFVDKFYPSSKTCSYCGYKKQDLKLSDRFWVCPECGKHHDRDINAAINILHEGERIEKNRCP

SEQ ID NO: 37329 - protein, 373 aa, Frankia sp.
  misc_feature (63)..(63): Xaa can be any naturally occurring amino acid
  misc_feature (70)..(70): Xaa can be any naturally occurring amino acid
  misc_feature (265)..(265): Xaa can be any naturally occurring amino acid
MLAVAEVDRQMREARKNLPEGFEWLSVLPAQAGQQVLKQYQTAWKRCYSGLARPPRFKSRRRXRLAVDVXQARGLNVARVSRRWGVLSVPGAGRVRFRWTRPLPGVSRGVPGRLTGARLVREAHGWHVVFRLETPDVQPEPHGGPPVGVDRGVTRTLALSDGTFRDLPVLLSAGEARRLLRLERKAARQRRARPRGAPTSNRLTRTYDQIARVRARTKRRRDDWAHKVTTGISREFGLVVIEDLRVGTMTRSARGTVETPGRKVXQKAGLNRSVLNAAWGRVGAHLAYKTARVGGVLVRVPAPYTSQRCHVCGVVDRVSRPDQATFLCTSCGWSGNADTNASLNIRAAGLSSMDVEISGLPGTVKRQPPGKAA

SEQ ID NO: 37330 - protein, 701 aa, unknown
  TnpB Polypeptide
MSKTARPKIIKNKPVKVTNDKPTKIFKDPNLSPIFSSNDDCQLTNWIPPVIRHNSFIPSCSWFDTKMYYRNDPIDVPFVNVSIPIIPPDSLKQQNISIGKKKARIKKIQESKLETDEPPVKTKKTRIKKIQEDDLETDELPVKAKKTPIKKIQEDDLETDALFVKIKNPDKLTPAFITTEKIKIYPTHHQLLILDSWLDGCTDMFNIAIKFIENKIYERDDEFDHVLDKHDHKILIPNISKTLTIENIRPFLLARRNIIVNSMKTPIKIHIIDEAIRQAIACFKSSITSTEKVLEWQKKYIEENPNRPEPVTPTFRIRPLKHSRPRRVLKLESDFFKTPGTFCPTVFDKFKSSKEITNFDSTVTLLHDRASKKYMLLVPIRNKIKDNCKIIHDAVGIDLGVRTFITAYSQNYTLSICNSARQWKLQNCIKKIDRIKRLISLKRNAATLRSLMSKKKSLIDLISKTESKTKRAELKHKGLKIVEEIESKKKDREKSLEILVIKEEINERRRFDKNITPLYKRIKDAKKGVLEKALLKYEVKKQNLAKDMHYKAANILVKGCDRIYIGNLSTKKIVSRSNITIRKSTKKTILALAPYKFKQILMHMGYKYGCVVKEVSEYLTTKTCSNCGNMYEIGSSKVYKCKKCKMESDRDENSAKTHLKLGLEKEILAEANSRPRKRQVIRQDQKRGNSLRTSNVSQKKK

SEQ ID NO: 37331 - protein, 388 aa, Nocardia sp.
VVQLRYNFRLYPTVGQQRKLARAFGCARVVFNDALAARKAAFEDRLPYLPDSELSKRLTEAKKSPDRAWLAEVSSVVLQQALADLNAAYRGFFESVTGKRRGARVAPPRFRSRKDSRQSVRFTKNARFAVTPAGALRLPKVGDVQVRWSRELPSEPSSVTVVKDASGRYFASFVVHTEAEPLPSTESEVGIDLGLTTFAVLSDGKTIASPRFLRQAERKLRKAQRALSRKEKGSKNRAKARVGVARAHARVADTRKDWAHKHSTAIVRDNQAIYVEDLSVKGLARTRLAKSVHDAGWSLFTRMLEEKAQRYGRTFAKVDRWFPSTRMCSVCGAIGGKKPLHVREWTCTCGTTHDRDLNAARNILAAGRVDSRNGCGAEVRPERVPALG

SEQ ID NO: 37332 - protein, 175 aa, Scytonema sp.
RGSNNRHKLNRKIARLHQRISDTRKDWHFKLAHKLCNNAGMIFVEDIDFRVWAKGMFCKYTLDAGFGQFVSILQWVCWKRGVYFAKVDKDYTSQVCPQCDAHTGKKELKDRVHNCPECGYTTHRDVAAAQVIRNRGVNALGRSVEQNACGDGLTGTGDSLVKSRRDSEVGVTRHG

SEQ ID NO: 37333 - protein, 416 aa, unknown
  TnpB Polypeptide
VLHKALQVRLYPSNEQQILLAQTFGCARWWWNYALNKSIETYKETGKGLGQVALNSLLPKLKKEDMTAWLAECYSQVLQATTLNLTTAYKNFFEKRAGFPKFKSKHGKQSIQYPQNVKIVDGNLKLPGNIGVVKAKIHRPIEGKIKTVSVSKTPSGKYFASILTEVEGNTPTASEGKIYGIDLGLKHFAVVSDGEKISKYDNPKHIAKHEKNLKRKQQKLARKQKGSNSRNKYRKVVAKVYERVSNSRQDFLHKLSYKLVSDSQAVIVENLHVKGMVRNRNLAKAISDCGWGTFTNFLAYKLERKGAKLIEIDRWFPSSKLCSNCFYQMGDLPLDVREWTCPHCGTHHDRDGNAATNIRAEGIRMLKAEGSAVSAVGGEVRPKLGRKSNLRHSPMSTEAQPTLRERQSRTGEAKAG

SEQ ID NO: 37334 - protein, 380 aa, unknown
  TnpB Polypeptide
MIVHQSCKYRLVLNRQQEAALLETLDRCRELYNAALQERREAYRLAGKTLTFAHQSAELPLVKVARPEYRNVFSQTLQDVLHRLDRAYQAFFRRVKAGEKPGFPRFQGRNRYDSFTYPQYGNGATLEHDGGKWGTLTLAKLGTLKVRMHRPVQGTIKTVTIRRDGDQWFVCFSCLVEATPLPETDTATGVDLGLLHFATLADGSTIENPRHLRRALGKLKKAQQQLSRCKRGSHRRARAKQTVARLHRKVRNQRADFCHKAARQLVNRYGTMVFEDLKVRNMVQNHSLALSISDAGWGQFVQCCVVKAASAGRHIVFVDPRYTSQVCSGCGAIRKKELSERWHSCGVCGTELDRDHNAAINIARLGCSQHAYGRVEAAPL

SEQ ID NO: 37335 - protein, 173 aa, Streptomyces sp.
MFPQRARQRTKKHRAAARKVATLYAKVRRQRLDFHHKTARALIRDHDTIAHERLNTAGMTKAPAPKPDPAGGGAFLPNGAAAKAGLNRSILDAGWGQFLTVLANKAESAGRLVIAVDARSTSRTCLECGHLSAKNRVTQAQFRCTACGFTANADHVGATNVLDRAKLVLCDAA

SEQ ID NO: 37336 - protein, 407 aa, unknown
  TnpB Polypeptide
MLVRHAFKFRLYPTGEQCQQLAVQFGHARHVYNWCLARRQAYYADTGSTLSYFDLKRAVTALKFDPDYLWLKEADSQVLQAKVEDLARAYKGFFERGTGFPTWKRKKDRQSVRYPQRVRFKDRRIYLPKVGWVRAIFHRELIGIPKSVTVSKTASGAYYASVQCEREMEPPVHTGPAVGVDVGLKDLAVLSTGERIPHPRHLRRAEKRLARLQRALLRKVKGSKNRDKARHLVARQHEHVANARRDTLHKLSHRLTRDFGTIRMENLNIRGMLKNHTLAKGIADSGWGMFVGFCQYKAQWRGGVVAQIDRFYPSTKTCHVCGHKHNTLTLKDREWTCAECGTLHDRDVNAARVILAAPTGTPRTPTQRELPPERRNVKPVERLSDAKASGRSAGLAEAGSPQASSRG

SEQ ID NO: 37337 - protein, 382 aa, Trichocoleus sp.
MQTISVKCKLQVPVELRSEIDRTLQGFADACNQILDTAKRENCWNTTKLHHKVYKPVREATGLKANHVCQAIRRVIGNAKTVKQIHKFRPTSINLDVRTFHYIEELQTVGVTLMCGRVKFKLSIGNYQLALLRGQSPTAATLSKTKQGDYYINICVDLPADPTGKTPKVIGVDLGRRDIATTSTGNSWEGAQIQATRDRYSFVRANVQSKRTRNSRRLLRRLSGREQRFQKWLNHNISKQLVQEAKQLNASLAFEDLTNIRESLNQKPRSKTERRRTNNWAFYQLRLFVGYKANIAGVSVVFVPPAYTSQTCSRCGHIHPVQGKSYRNGKAFKCGHCGFEHDADANAANNIAILGMSVIHPESPGMSCQMEGQLPLFSISQI

SEQ ID NO: 37338 - protein, 218 aa, Paraliobacillus sp.
DWYIAIPIQVRSELYFTETHKEVNKDFVDYTPVGVDLGLRYLAVLSEPTSGKRQFFSGKEVGYKRRHFRSQRCSLGKKKAQRAIERIGKKESRWMKDYNRKLAKDIVDFALQFDRPMMKLEQLDDIRSTCRSLKQADRTIHSWSFYQLKQFIKERALKFNIPVVDINPYKTSQTCFCCKHADKGNRHKETFKCKKCRYKNHADLNAANNIAISTSLAV

SEQ ID NO: 37339 - protein, 386 aa, Lactobacillus sp.
MTTVVKGVKLRLYPNQKQTGQLWQLFGNDRFVWNQMLAMAQKRYENNPKSQFANEYDMNYLLKPLKQEYPFLKASDATSLLVVNHNLALAFKNLFQQRGGHPRFKSRHNAKQAYTGRSTCVVEAKRRLRLPKIGSIRTSKTSQLRDAKIKRYTISHDATGRYYLSLQVETEVHDLPKTHQSVGLDMGVANLAIGSNGVKHGTFNARWLEKQATLWQSKFSRRRHQATVTMRQWNHNHKLSKLVLNDYQNWQRARMVKARYQAKIANQRKDYLHKLTTDLVSQYDVIVIEDLKTKNLMHNHHLAKSIANASWYQFRTMLEYKCAWYGKQLVVVSAKNTSRICSACGHNDGAKPLAIREWTCSGCRTHHDRDINAAVNILNRGLKAIG

SEQ ID NO: 37340 - protein, 416 aa, Rhodococcus sp.
VRAREGVNPIRKAVTAVKRIVMIKLAVTDEQAAALKQTLLTCNAAADVVSDLAQQSSDRRAFALQKTVYTRIKALGLSAQPAVRVIKKVSDAYTTRKANLKAGNYGRAGSKKYAAVSDTAIRFRPLAAQPFDDRCLSWQLDSSTVSIWTTSGRMKGVRFVCAPWQRKLLADRKGETDLVSRDGQFYLYATVDQPVPALVVPVKDPVDGWLGVDLGIVNLAVTTDDDPKSLDVRWSGGAVTARRRKNQVMRTALQKVGTKSAKRKLKTRRRKERRFATDINHQLSKTIVAQAQRTDRGIAIEDLSGIRDRVRLAKKQRAQVHSWAYAQLRDFLTYKAEMVGVPVQVINPRNTSRTCSQCGFCDAKNRRSQARFECRECGWAAHADHNASRNIAALGHEKYWAAQSTVPKAATALASS

SEQ ID NO: 37341 - protein, 365 aa, unknown
  TnpB Polypeptide
MHKGIKFRIYPNRVQQNLINQTFGCCRLVYNKGLSLRNDAFVNGQKIGYNQTSAMLTELKKSEDFAFLKDVDSIALQQALRDLDRGFVNFFQKRSAHPVFKSKHNNHQSYRTINQGDNIRIVGKCLKLPKLGYVKIRQSIDVGRINSVTIERTPTGKYFAVLNVEFTPELCPNKGGVIGIDVGIKDFYTDSNGNTVSNPKYLEKSMRKLVREQRRLSRKQIGSNNRNKQRIKVALVHEKITNQRNDFLQKQSTMLIRENQTICIEDLKVRNMVGNHKLALHIASASWSKFFVMLDYKAIWYGNDIIKVPTMYPSSQICHVCGYKNPLVKTLSVRKWECPICHTIHDRDTNASINILNKGLQLKTA

SEQ ID NO: 37342 - protein, 545 aa, Microcoleus sp.
MARRHGSQVGIESKIEYHATLEILGEKYESWRRTALSWLQLGLTEDEVEKRLQSTFDIDWAWADSIATEAKQCLDQLATAKELNIARIKEQIKKKLKRAKDTLKALEKQLATAKKKGFANQQESDKFAKTLLGLKSKTLKIESLKRDVTSLESKSRLHICFGSRKLFKAQHHLEENGYDSHQEWKTDWRKKRSGRFYCVGKSQLGGGTMMKVFPLDDNGKYRLNIRIPRCLRDELGEYLDLTFEVSDRDGRTRKGDLNYALLMQKPITTQVFRREHKDETWYVHLTTYVPEVPLAHTLENGCIGIDFNKDHISIAYVKRDGNIGYVQEMPLVWKGLSTGQRQARMRDIVVEVVTLAESLNCAIAIESLDFSKKKASMSEESKLYNEMLSNLSTGLFRTSLESRCRRFGVELIKVNPAFTSVIGMIKFMALYGLNSGTSAAMVIARRAMNLSEKIPQGLATPEDEAKPVWSAWNRVARYLKLHRISRTRLFRWTKALEGILTSPPSGTEHQPSSPVSLETGELPNPRQSPKGEVRPNGNVQLCLDF

SEQ ID NO: 37343 - protein, 407 aa, Limnoraphis sp.
MLHKAVKTRLYPTPNQQVLLSQHFGCARWWWNYGLNKSIETYKETGKSLGQAALNAFLPKLKKAKETIWLSECYSQVLQATTLNLTTAYKNFFAGRARFPRYKSKHGKQSIQYPQNVKVLDGFVQFPGKVGKVKAKLHRDIEGKIKTVTVSLDPSGKYFASILTEIEGENPPCSTEGKIIGVDLGLTHFAITSDGNKVSKYGSPRHLAKHEKNLKRKQQKLARKQKGSNSRNKARKTVARVYERVTKSRQDFLHKLSRKLVNENQVVVVENLHVKGMVRNHNLAKAISDAGWGTFTNFLAYKLERKGGKLIEIDRWFPSSKLCSNCYYQIDNLPLDIREWICPNCGTRHDRDGNAATNIRAEGIRILQTDGTAVSANGGEVRPKLGRKSVLRHSPTILEADTTIASI

SEQ ID NO: 37344 - protein, 340 aa, unknown
  TnpB Polypeptide
MSDQPQRTNTLAADAATERYRQCLFDWLAAHAPLWNQITYRRRQQYFSEDGDVWDADHTDLYDEYAPVLGKAACQQIARKNSEAWRSHFTLLEKYHDDSDQTVQTKPEPPGYWGNRDEGYELHGLVRNDLYTFDWDEHTSTLEFGVGDVLKDEYGLGGNERITLEVRGNPQWDGDDSRLELIYDEHADQLRVQHPVRIHPDNLRQQRQDAFTHTLDTENTTRSAAIDVGANNTLAVVTETGETAVYHARPEFKRFQSYFERIATLQSELPEDTYTSSRIKRLYDVRSRTRDHSRDAAVKHVADWLLTHNVDTVYIGDLTDVLDTHWNGEDAGILVTPRVA

SEQ ID NO: 37345 - protein, 441 aa, unknown
  TnpB Polypeptide
LNSIITIKVIFIRNYKKGANLIQYGTAIIHLKNLTEEQSAAYLLLCSFSKNLYNLSVLVLNREYEKSGQVLDYNALKLKLSNSEEYKILGGMYYAILIEAIANYKKYDKLLHYSSTKDKQLLEKKNLTKIEPPSHLKSIFPVYLKRPKQSEDNIYFPKTKYTNELAISLPKDYADKEIKQVILRPTQHFMNWELIIQYQLPTIKNTGLEPDNALGIDLGVSNFCTCAINNGNSFIIDGRRLKSIIQGYCKYNKRLSKNENKATRRLASLQRKTANRVRDYLNKTAAYLIKYCVQNHIGTLVVGWGLHFQEFYIGKQNNQIFSFFPYAVFVHALRTKCHQNGITFRKVDESFSSQASSLDLDAIPEHVTRLEQHFSGHRRYRGLYITKDKRKINADVNGALNILRKGNAITDTEIICFGSRGLVPPERVSILSKSTQLSKFN

SEQ ID NO: 37346 - protein, 399 aa, unknown
  TnpB Polypeptide
MNFGSPEVKVSFSFCGQCFLFPFVELLFGGVYWRQRGENKMLKAYKFRLYPTEIQKAYFANCFGCVRFVYNRMLNDKIEHYKETRQMLKNTPAQYKHEFPFLKDVDSLALANAQQNLEKAYKNFFRDKSVGFPNFKAKHKSKASYTTNNQGGNIRIENGKIKLPKIGFVKMKQHRDFEGLIKSCTLSMNKSGNYFISILVEQEAPQWLPAEHKIGIDLGIADFAITTNDAGESVKYANPKCLYQSEKKVKKAQRALCRKQKGSKNRDKARLVLAKKYEKIANQRKHFLHKLSNKITDENQVIVIETLSSRNLMKNHKLAKAIGDVSWFEFSRQLAYKAEWKGRTLIKADRFYPSSQICSACGHRDGKKSPHIRDWKCPDCGTHHDRDINASKNLLALAK

SEQ ID NO: 37347 - protein, 421 aa, unknown
  TnpB Polypeptide
MSKPEKDFRTYIVATAKPTAELDAINRLGGRIYSKTVSLAFKTHDQKGFWLSDGGLKKYLKFKRYPCHAHSVQAIIDDYCGARRSFFSNKGCNPKAKPPKRTCKFHTFTWRATGISYKRGKLRLSMGKGREAVYIKIDKKFHKIVPSEVSLVYNRTTKLYELHATYQTQPKQTKVKHGTAVAVDMGEIHPITAFDGLHSEIYNGREHRSKVRYREKSKGSINRKLSRCKRGSRRWKKLKCAKDKSLAKLNAQLRDMRHKITSRFVSTCYKRKIETIVIGDIKHIRHSISYGKKANEKLHQWAFSQIRDMITYKAKALGISVDAQDEAYTSQTCPSCGHRKKPAKRNYKCSKCGWHGHRDIVGASNILTAYQGFLFNPVVGVVVSPTGVRFHPHLRRLDKWSPFSGLISSKPAKSRQRSTRL

SEQ ID NO: 37348 - protein, 416 aa, Oscillatoriales sp.
VKHQAVKVRIYPSDQQKQVLSQHFGCSRWWWNFALNLCIETYKATGKGLTRAALNTYLPQLKKNQETEWLKDCYSQVLQSTTLNLVTAYKNFFEGQARYPRFKSKKNKQSIQFPQNVKVTDKGELSFPGKVGVIKSNIHRPIEGKIKTVTISMNPSGKYFASILTEIEGDYPKKSDKGKVAGVDWGIQEFAIVHDGKRTSKFENPKHFQKHQKNLARKQAKLARKQKGSHSRNRAQKLVARVHERLSNARQDYLHKLSRKLVDDNQVIVVENLNIKGMVRNHKLAKVISDGGWGIFVNFLSYKLEKEGKILVEIDRFFPCSKICSNCHYQIGEMPRSVRDWTCPNCGTDHDRDENAAINIRAEGIRVLSVTKDLVLGTRTAADGGDISPKHGRKSMLRQSPVKSEAHTISDSFGVG

SEQ ID NO: 37349 - protein, 413 aa, unknown
  TnpB Polypeptide
MEVRRTVPVTLDVDSDDAVLLEDTVDEFLWAAQYVVDYAFQSEYVTTSKGQLQDETYDDVCDQTPLNTGLVQNARNKAAEACKSVVERWKQGKQASKPRMTSPHVVYDHRTATFHDEYVSLATTDGRIEANYVVPAEDSDTPHAEYLFSDEYETTGAELHRKHGEWQLHVHCKREVESDTPEQTTTTHGTVLGVDLGVNNLAVTSTGTFWTGEEFGHWRREYEKRRADLQEHVTRWAHENIQSVGRKEEGRFKQTLHRISNELIEEARDHGCSVIAFEDLTGIRERLGASWGHKWAFNRLNEYVEYKAVEYDIEVMQVDPENTSRRCSHCGFTHPDNRESEAFECQKCGYENHADYNAAKNIGLRYLRRIQTGGDEGAPLGVRLNSGTLNVNGEYESPASTEARTGVHAESHR

SEQ ID NO: 37350 - protein, 200 aa, Oscillatoriales sp.
MPEQSIKIDATLQAFANACEYVNQTVSPTLTNELAMQSLIYHDVRDMFGLSAQLAIHAIRRVSGNRKTAKKDGKSVNKFTPTSVTYDARIFSFREKDWTVSLTTTGGRERFVLAIGNYQLGLLKGQNPKTATLCKRNDGSYYLNIQLESMPVEPPPSDRVLGCDLGRTDIAVTSDGDTFSGKQITQVRNHYAKLRAFRHW

SEQ ID NO: 37351 - protein, 413 aa, unknown
  TnpB Polypeptide
MGYRTSATQLVVQLVHLRLTAAQLAQCARLRREAGRCWTEMLQAHLASRAGAWLSEADLKARFKGRFALHSQTVQALAEKLIANVETAHALRQTDPTTQYPYREKLYQTVVWKQQAIRHTAAMILLANGRGQAPLVLPLPAQYTDRAIVRCELTWRANHYELCLTIDTGVVQPSLDRGVKAVGVDLGEVNIAAAVTETGAGIQISGRYLRSLKRLRNKRHATLSAKLARCHAGSQRRQRLLQRKAQASARFYRQSRDVLHKASRQLVDFARREQVAHVAVGDVRAVADAPDKGRHHNQRLSQWAHGQFVGYVTAKARRDGISVEYIDEAYSTRTCSVCGQVQARAPRGRVYTCAGCGASIARDGNGAANICSRYRYGAYGQVQVHSLTYLRPVAVEPRTTAKVAGLPPEATPH

SEQ ID NO: 37352 - protein, 435 aa, unknown
  TnpB Polypeptide
MSDNGNLMRTYRFVIDEHDKPIYKQLLNLTRISKDLYNQSLFVLRKDLDETKKFISKFDLMKKMSTVPNLDNEINYRKLPAQASQQTIMLCHGAVSSYFKALKAWKKDPSKFKAQPRFPSFVKKDGHQVLTLTNQTASMKENVITFGKRVFGDEIKISIPEKEYEKYKNLWIDSEERLARNRKLFQQIRVVPQQGGDYFNIEICYYRAKETVVLNSDNAIAVDIGVNNLMTVVSNFDDIPFIINGKPLKSINQYFNKKKAEMSSDLNKKGLFTSKRLRKLFRKRNAKVSDYMHKASKYLIDYCIINQVSKIVVGYNPEWKVGVQIGKVNNQNFVMIPFHSLISKIEYKAETYGMEVIKIGESYTSKCSALDLEPVKKHEKYKGRRVHRGLFKASDGQVINADVNGSINILRKEIGDDFVSEAINLQENPVKFTMN

SEQ ID NO: 37353 - protein, 414 aa, Clostridium sp.
MKLSFKFKPSLTVEQLNIIEELSFHTTKLYNIVNYELRENGFKSYVETENMFKANWHCDFLHSHTRQHTFKVLEQNWKSYFASIKDFKVNAHKYNGLPKPPKFKNMEDRKNEIIFTNLAIRFKNNKLILSLSKAMQKIFEVNTLNFEASGKLQSLINWNALQQVRIKWDNSLKQWYLIVIYNKQELGPVNNTNIMAIDLGLDNLATLTFKDGNETYLFCGKKLKGINAFVNKKIAYYQSIEMKKVGSDKFKNTKMINSLRRYRNNYVNDYLHKTSKNIIDKVIEHKVKKIVIGKIKGIKQDMNYNKSFVQIPIQRLAEQIKYKAELKGIEVKFKEESYTSGCSAFDLEPIDKKYYDKTRRVVRGLFKSNFGLVNSDVNGSLNILRKEGKCIPEIVKTMRDKGRVSSPLRVRVAC

SEQ ID NO: 37354 - protein, 512 aa, unknown
  TnpB Polypeptide
LRGHPRRAGRTGGAQHSHHRPERHAGAADVRRGRDALHHDRRPRRDAARPRPRADDDRPPQDHSGVRGPAGEGGEGGIGAGEEAGRGRGAGRAREEGKPDHHERGCAPESASPAPGRTAASDRNHVHVGGGADYVRGWFSLGFCMYRTFKYRIYPNRVQEVELLLWLDLCRSLHNSAIAERGDAWKKEKRPVKFKDQSAGLPGLKKSRTEYGRVNAQVLQQVLHRVDLAFKAFFRRVKTGEKPGYPRFKPEDRYSSLTWPQDEGFRVKDRTLWLSKIGDVKIKLHRPVKGRPKTCTVKRAASGWYACILCDDVPVRVYPKATAEVGIDMGLTSYATLSTGEHIDNPRWYRKSEERIAESQRNLARKKKGSKRRQKAKRKLARLCAKAAGQRRDFQHKLAHRLVSENALIAVEDLEPGKMAQKSPTSLSKSIGDAAWGLFLMILACKAEEAGRRFSRVPAPGTSSTCSRCGAYRKKTLAERVHACDCGFVLDRDHNAALNILRLGRSRQVCSA

SEQ ID NO: 37355 - protein, 383 aa, Acidiferrobacter sp.
VATLTKTLKLPFLRLNQTKAEMFARLERLNTEVANAILALPKDHRRALTSKSFAGVEIGSAWINQTIRNANARTHVKRFLRLPLETNNQNWRLHRTGATFSLGFGLLRGIKKRVPLEVHAASHRDALTALWEGRAKAGSLMLVRSKKGIWYACLSVSMDVPDAENTGRWVGVDRGQNIPVAAATPDGPVVFWKAARMRHVRRIYAERRCKLQKAGKRRAVKNLESKERRIVTHINHCISKDLVALAKRQGAGLILENLAGIRGRSKQRQETKSDAGQNRDYWPFYQLEAFVRYKALAAGVQVDSVRPHYTSKTCHVCGALNERRKHAYVCTRCGHQAHADANAAMNIRDWYGLCCPLELEVPAGGPHEPAPNPVRETAAQAAA

SEQ ID NO: 37356 - protein, 425 aa, Streptomyces sp.
MFECGSSLREGTVASVKLVVQVKLLPTPVQALALEATLRACNEAATWVSRVAFERDVKSNFALRKLVYGEAKARWDLGAQAAQHVIKKTCDAYATLKANIKAGNLGKPGSKRYMRAVGSPIAFRPEGAQPYDDRMLSWQMAERRVSVWTVNGRVKNIALTGSPKQLATLTLYRKGESDLVYRDGLWFLLATCEVPEMPLNTDLVDFLGVDLGIVNIATTSDGEIMAGRDLNRIRGRERKLRTKLQRKNTSSTKRRLKKRRRKEARRAKDINHKIAKHVVVEAERTGRGIALEDLTGIRERVRLRKPQRATHSSWSFAQLGSFIAYKARRVGVPVVYVDPAYTSRTCAECGHVDKANRVSQAWFVCRSCGFVDHADRNGSRNIRARAWELWRRGARSTAPVPLPRQRSGAGRKRSTTSSGARSANP

SEQ ID NO: 37357 - protein, 417 aa, Calothrix sp.
MIVYEFKVKGKDKQYQAIDEAIRTSQFIQNKCLRYWMDNEKVGRYDLNKYCAVLAAEFMIADELNSMARQSAAERSWSAIARFYDNCKRKVKGKKGFPKFKKNCRSVEYKSTGWKLSDTRKAITFSDKKGIGTLKLKGTYDLNYYDIKQIKRVRLVRRADGYYAQFSIDIDVRIESQLEMGKMCQAVPAFPPSQPTNQVVGIDLGLKYFIADNKGNVEPSPQFYRKSEKQLNRANRKKSKKFSQQKKKARARQSNNYHKARNRYARKHLRVSRQRKEYCKRLAYSVIQSNDLVAYEDLNVKGLVKNRHLAKSISDSAALASLRASAGWYTFRSWLEYFGHKYGKVTVAVPPHNTSQNCSNCGKKVKKSLSTRTHVCLHCGYTEDRDINAAINILRLGLSTVGHTGTYATGDLPRHLL

SEQ ID NO: 37358 - protein, 409 aa, Planktothrix sp.
MLLVEKHIIKASNRHFKEIDKMSFLSKNLFNSALYICRQAFLNEQKIPSFNNLYHQLKTGIDYKALPSKVSQLVIKQVSNSFNSYIKSLTAYKADSTKFLGKPKLPRYKDKKSGRNILTFNYQAVSKTWLSKGFAVPSGLHLKLKTQISALQEVRLIPKGRFYVAEIVYEQEAPKVEINNRIAAVDIGLNNLATVGSNCPDFQPFIVCGKALKSCNQQYNKVKAKSQSQLPTDRFYSHKIEALTNKRNAKMDYYLHTSSRFIIDQLVKQDVKHLIIGKNDNWKQNLNLGKQNNQSFTSIPHARFIQQLDYKAQLVGIKVTVTEESYTSKCSFLDFEPIQKQVEYLGKRVKRGLFKASNGKKYNADLNGSLNILRKVVGDSVFDGKLIERLVVSPVRVKPYQAGCLDICP

SEQ ID NO: 37359 - protein, 424 aa, unknown
  TnpB Polypeptide
LYTAELTIFAMTNNLTLFTLSKLGNIMKTRNYKFRLHPNDSQEKKLQNNLVVCRWVYNKFVEYAQKGFVSRNDCNYYLIELKQQKRWLYDYHSKMLQAVSAQIDGAQKVIINLDKKGHHTGNLKFCKYHNYRTFTYNQSGFKIEQHGNTNLLHLSKIGWIEIKQHRDIPQNSKIKQVIVTKSKSEKWFVCVTIDISESLINIPNISFSKSVGIDVGIKNFTYDSNGNQTPNPHNLKKMLKPLAKVQRKISRRKKGSNNRLKAIKHMQRIHEKIVNRRKDFQHKLSTQYAKNNDVIFVEKLEKLNMVKNHKLAQSIMDASWGTFLQKLEYKCKLFVEVPAKNTTIDCSRCGNKVPKSLAVRIHRCNLCGLVLDRDHNASINILNKGLNMSAKAGYKIPQELREVTLVEMPMASRKQEKVTQQVVW

SEQ ID NO: 37360 - protein, 402 aa, unknown
  TnpB Polypeptide
MIRNYKFRLYPNSVQKYKLQNTLAVCRWVYNKFVNQAQNNFISRNDMNYILTELKQQEPWLYSYHSKMLQMVSTQLEGSEKSLIELNKKGYKIGKLRFAKYEEYRTFIYNQSGFKLEQHGDKKLLYLSKIGFVEIRMHREIPSNTNIKQIIVTKSKSQKWHACVTCDINEPILNIPKINLLKSVGIDVGIKNFTSDSNGNQTPNPYNLKKMLKPLAKIQRKISKQKKGSNNRLKSILKMQKIHEKIANRRKDFQHKLSSQYAKNYDVVFVEKLEKLNMVKNHRLSRSIMDASWGAFLQKLEYKCKLFVEVPARNTTIDCSRCGNKVPKSLAVRIHRCNVCNLVIDRDHNASINILKKGLNMSAKADYTLPQELWEVTLVEMPRHQGSKKKPSISLMAVHQSS

SEQ ID NO: 37361 - protein, 335 aa, unknown
  TnpB Polypeptide
MSEERTSSRRAGGERRIWNTAIKVRIHPTEAQAALCEKTFGCCRYLWNQMLADEQAFYAAADVHFLPAPARYKAGAPFLKEAVSQALVDVHQNLRQAFRRFFSQPEIYGYPQFRRKKSGRDSFKIPCQYYKSGSGSDIFLTRDGIRLPKLGIVKARFHRRPLHWWKLKSATVSRTPAGKYYCSLLYAYEAAEKPAPAPEKTLDLRLSPLHFYEDSQGGRPDPPPWMGRSREKLAEMQRRLARMERGSRSYQDQLQKIRLQHEHIANQRRDFVHKESRRIANAWDAVRVEDACLRRAGNGAETGFGMFRDCLRYKLERQGKRYVPWGDTRSGRGAG

SEQ ID NO: 37362 - protein, 280 aa, unknown
  TnpB Polypeptide
MPKFYQDNIKIQFRDTHVKFEGFSSSRKANKQKLNWVKLAEHGRIPTDAKYRNPRVSFDGLNWWISVCVEFPDCRDRSNHDGIGIDLGIKDLAICSDGNTYKNINKSQTVKKLEKCKRRLQRSVSRKYEHNKKGGSYCKTNNIVKKEKLLLKVNHRLANIRKDYLNQTTSEIVNRKPRFICIEDLNVSGMIKNRHLSKAVQNQGFFEFRKQLEYKCNDSGIQLIVADRFYPSSKLCSCCGKIKKDLRLSDRTYKCECGNVIDRDFQASLNLKAYGEQFAS

SEQ ID NO: 37363 - protein, 388 aa, Boseongicola sp.
MFLTMKYRLSPSRAKRRRLTKLVDDQRLLYNAALEERIDCYRKTGKSLSYFDQCKSLTECRREVPEMREFPAHLQRGTLKRLDNAFKSFYRRVKARGAKAGFPRFKGHGWFDTLEFAEFSGVTFDGKHLRSRAFGSLRVHMHRPMQGDVKSCKIVRDGGNWHVCFQVEVEAPPRKVVKSAVGLDVGLTRLATLSTGENIPSIKAAKRAEKELRRRQRHLARCRRGSSGRHKVREEVAACHRKVRNVRRTCAHQQSAALVANYDLIAVENLNVNGLARSRHAKGVHDAGWSTFVAMLSYKAERAGGTLIRVDPKYTSQDCSSCGERVPKGLRERRHDCPSCGLSLDRDHNAAINILRKALGGVVIPGERNVAGCGERARGNIALLEKSE

SEQ ID NO: 37364 - protein, 436 aa, unknown
  TnpB Polypeptide
VLKDVQLTVIGKVFKPNRRKVLALNRCLEEYHRLVKWYLSLNSTSKNWLHREAYEKARARFNLSSALIQTARDKAVEALKSFRETRRKRSQLNLRRVSIRFDGRCYSFSQTTNALTPWWLTLTLNNERISLPIVYGEKQEELIRSALAGEYAFRTVEMVKRSGAWYAHIVIKRTVELKEPETVVGLDMGEVNLVTAVALVDGRPSKGRFWRGSETKRVRGLYNHIRRRLGEKRLPGKIRELGARERRRVNQQLHIIANEVVAYARQFPAPAIAMEDLNGLKEDMRFSRRMNRRVHSMPYRRLQKYIEYKANLEGIDVRYVERAYTSMTCHRCGHVARADGREFRCPECGLEYDRDLNAAINIARRLKRSAGWGSRDTPEPADEAAGAKPRTNAGTSATLPNGSPALKGGEDVTECYENAGVQKYSYLQALLGSDDL

SEQ ID NO: 37365 - protein, 400 aa, unknown
  TnpB Polypeptide
MVEVIRALKLNILPLTAQKDAELALLVKKYSEASKIIFKVCEYWDELPKSDDRFTRYSVQKVVYRTVKADYGLQSQLVVDIVKDIVTCFKSNGDSISSIPISFNIPRSGKFAHTKNGNPVVSMAALNGRLAVPIAKDGAYERYNEFIADGYTTTNFRLSYNIDHWTVTVMLRKDFDVKRGKNILGVDVGSRTLAAVSIVTPEHKILKQLYFGRDVWNRQRNISIRRSRLKSYSDKGSRKAVRLLKKLRTQETHFNNTRNYQIAHQIVDLAKTYDCSISIEDLKGLKDSRLSRKSNRRVKRMPYGTFRVALGSVSAQKEVEAVKVNPYHTSKRCSRCGTLGYRTKNGAIFVCKCGMLVNADRNASVNIAFDAGKTMFSNVLPQSIEGNLPVAASVCSNDGC

SEQ ID NO: 37366 - protein, 451 aa, Cenarchaeum sp.
MIRIVRVPLYRDELFADWAHRMGHVVRYVYNRAVSEYMFGGEYMERVVVYILQPFKLPNTLDGFTSATLEDDYQVYDFGPSKRKLKYGMYKQLTEWRAESDWISDLPMVFGRGAIQDASVACRRVMDDNSNHAPYRRKDGRIILSSVTPPVRKDEHTIHIPGYGTVKTAKPIDVSWDMRSFKIVDVTKKVTKYTKPSDHMFELHIAVHIPVKPHRNTGIVRGVDVGGKHLAVTVDTNGNVIIHNTRHREILREIDALKSLRDHKVRHGRKWHILNDQIKQLYRKADGIAVNTINQTVSCIVQGADAIIAEILSIQDMTTHGGNYKRHMNRSMRENRLGEFLRKLAQRCEREGIPLCGVMAKYTNQTCHMCGHVDSESRITCDKFICTNCTRVFHADVNAAWNILHRAAGNVVLRRPGHKKGYKPTPAMLRSIQRGRQKRHECTAEAVYFCT

SEQ ID NO: 37367 - protein, 472 aa, unknown
  TnpB Polypeptide
LARPSGLLPRRSEATTWPLICHPVVVCWWHGSTRRIRPLGRRVRWHWLAPGLVPEVPMPNDPSVRRGADAPAGEGSAVRRAYKLRAYPTRPQEGRTVRLLADHCDLYNAALQERREAWRMRKVKVSYGDQSAQLKEIRAADPDGQGRQSFTAQQQTLRRLNATFSAFFNGVRHAKGKQRRVGYPRFKPYQRFDQVLFVAGDGARWEPADGGRGGRWAHATFQTVGRVKVSQHRPVVGRVKTLQVKREGRRWYVVVVTETETVPLPPTGRSVGVDVGVARFLTTSDGEIVANPRFLDAAQRRIVDLQRRKERARPGSGNRRCLRRALAKEWRRVRNQRRDFHHKATRRLVDTCDGLALEDLRVAAMTSSAAGTVEKPGHNVAAKAGLNRSILDAGWSQFMRILVAKAESAGRQVTLVSPASTSIDCHICGARCTRPRQDTVICPVHGGLDADLNGARNIAARAGLGSGQASAA

SEQ ID NO: 37368 - protein, 372 aa, Gemmatimonadetes sp.
MKRIIQVKLLPTAEQAGALEKTMRRFNAACNWVAERAFERQLANSYALHKLYYYEVREKFALPADIAILTFAQVAANYKRDKSKRVLFRPLAAIPYRKGAFRYKGLEMLNIKTADGQRHDIPMVMGDYQAEQFGNVKLFAELVRRKDGQWFLMATVEFDAEPPCDPNDFLGVDLGVENLAVDSDGQQHSGQDVERVRVKCQTLKQALQSAADLAKNHRRRKRIRKKLKRIGDREARFRRNTNHCISKQLVAKAKDTTGGIALEDLKGIRKRIRFRKPQRVRIAGWGFDQLRQFIAYKAQQAGVKLMLVDPKHTSQMCSQCGHIERANRSSQSKFRCKQCGYQAHADYNAARNIRARALVNAPIVSAHSVAAG

SEQ ID NO: 37369 - protein, 536 aa, Streptomyces sp.
VGAPFVVPGPSGVAVRDRLKRLSAEDERVLRLVGDHLGGLASRDLKARCAAALEHDAELWAERKRALTVESSSRWAGSITKATHDQWALARRSQLAHIQSLDASVRTIAHRLSLPVGEAGSKRAPGGYRSRREWFAKTRRLRVLEDRLHTARAEWEAGRVGVVRGGKRLLSTRHHLQTAALSEEQWRARWRAGRRFLSADGESGKRFGNETIRVTPEGEVSIKLPAPLAHLANAPHGRYVLACRVAFAHRGEQWADRIQANRAVAYRIHEDTSRGRWYLAASWTLPVVKAVPLAAARANGLIGVDTNADHLAAWRLDTHGNPVGQPLRFPFDLTGTAQHRDAQIRHALIRLLHYAQRHHLAIAIEDLDFTAEKTREKHGRRKKFRNLISGMPVARLRARLVSMAAELGITVVAVDPAYTSRWGAQHWQKPLTTAKRTTTRHDAAAVAIGRRALGHSIRRRTAPPPAHRSDEQGHRTAQAGSGFPGREEPRPRIPGPRTRSVRAGRGANAGNQDTQHRSGRPAEHEPWQQDSLPLSL

SEQ ID NO: 37370 - protein, 235 aa, unknown
  TnpB Polypeptide
VRRQQTVVGVDLGVNTLVAATDSKKALLISGREAKATVQWRNKRLASAVSRQSTMLKGSNRWRRVQRRKKQMLAKTRRRMNDLIHKATHRISQEFPGATCYVGKPFNEAARKLNGVWAQQVSQASNGKIARQLDYKTSGVIQVDERYSSQTCPNCGARQTCRRVYRCRECGIVAPRDVVGSTNILCIGLHEEMRIGQSLAPEVVYVRPVKVFRREPNSALGHSGHSAPRREAHDF

SEQ ID NO: 37371 - protein, 360 aa, Methanomicrobia sp.
MMETEIAKTIKCKLIGLTKRKLELLNREYDNFQHYLKTGEDKGVYSATKQQGKRTYRKIDPNREYPLVIRKDLMDIRKTNNKLAKYWARIPIYGVRGGIKVALAHQPFNFEEWEICGSKLVRKHGEFFLHVTAKKKVELRKEYSSIIAIDVGARWVGVSVALHRSKPKFYGKRVREVRGKYFWLRRKLGKEKKTLAIKKIGDKEKRIVSDELHKIAKDIVDEAEKHNAIIAIGNLNGVRKNNRGRKVNRKVNSMPFYRLKEYIKYKALERGIAVVEIPEYNSSKQCSRCGSMNTRRPSQGLFICLDCGYQINADVNGAKNILKRAQGYMLWAGAAVTRPGGERRFILHTPQPPQLHVEAP

SEQ ID NO: 37372 - protein, 452 aa, Halostella sp.
MLEWLMRRTNTFAVRPLSDTGEQLLRDLLDASAALWNEVNYQRLMRYNDEDGFEGDVWDADTGRFEGKYKGILGASTAQQVIRRNSEAWRGFFRLKDQYHDESNTSVTEHPEPPGFRGNEDNGRQLKTVIRNTSYTVEWGDRSRLEILVGSELKDRYDHTGRLRLEIAGDPTWPDYETQGRLDLWYDETDSTFRASQPVTVSDDARDTPLASETAALDIGANNLVACTTTTGEQYLYEGRGLFDRFRETTREIVRLQSKLEEGQYGSKRIRRLYRKRTRRRDHAQEALCRDLLERLYEDGVDTVYIGGLTDVLDTHWSVETNAKTHNFWAFKQFTERLACTAEEYGISVKVRSEAWTSQECPQCGGTDRTTRHQNTLNCPCGFEGHADLTASETFLKRHVDQAVRPMARPVRFEWDDHNWSGTPHPHERPKEQRTDPSTVHRGGNVASGESA

SEQ ID NO: 37373 - protein, 154 aa, Salinibacter sp.
MTHEIKRTYRYRIYPNEAQRAELARTFGCSRWVYNWALETKTKAYYQDEETLSFTDLSGRLTDKKREEETEWLLEVSAVTLQQSLRNLNQAFTNFFEGRAEYPSFKSKKGDQTARYVGTAFGLSRRERETEAPPLEDAGSDQHPVVERASVRAK

SEQ ID NO: 37374 - protein, 386 aa, Salinibacter sp.
LDELSRSSADLWNEICTWYWRWVDRQDHWTSKGQMQKWCVNGHDDFQAHSAQAVNDQFYDAINSWHKNNRKGNPPRNRSKRWNKICWKKSAIKMRDDGVLRLSCGRGNDPVLIDWPVDKKPVYAEIGWAGDGYEIRATYEVETEDRTTGDEIAGIDLGEKHLAAAATEDDSFLLNGGELRALRKYQNQTKAKLQRKISRKERGSKRWKRLVRTKNKQLNHLDNKITDLLHKLSRKLIEMLLERGVSTVVIGELKGIRDSVDYGSRMNQRLHQWAHAKFAQMVEYKAKGAGMIVKYVNEEYTSQTCPKCQHRHKPSGRTYDCPECGYSAQRDAVGAYNIRKKYVGTEDSSRLPGVMASPSGVRFHPHLSCSSRSRRKTQSKSDRQPV

SEQ ID NO: 37375 - protein, 433 aa, Desulfovirgula sp.
MKRCNIVRVLFSKEQAKVLETLGDRCAALWNAANFRCRQAFLKGEPVPSYATLCAEFQNHPAYKALPSDIAQEVLKKLRKAWDSFFACLRLWKKGKLEKRPGLPRYWKDRRTGKRPVRLIPVKSPRSYSLDARMLSLTLPADLRDGNGRLVLHTKGVLRFSGTPKTLELRYDRVKKRWYAHQVVEVPEPERKAKPEKYAALDLGARILATLAIEGSNRQILFSGRKVWKDFLYWTKRIAEEQSRLARAGRKTSRQLRKLYQTRARRLRHAYLALAAEIARMLSQHRVTTLFIEDLTGIREGMDFGPKNILVHNFWAVRQLKNLITAACARAGIKVVPVEPRGTSSRCAVCSSPTGRPVRHKAVCKRCGYVWHADANAALNILLLGSSKGHGAEATPLKPLVLRWNRHRWVSRFESAAGTPKAASGSRMAARAA

SEQ ID NO: 37376 - protein, 371 aa, unknown
  TnpB Polypeptide
VEKAYKFRLYPNTEQIQQIQRTFGCCRYVYNHFLARRIELYKDNGETLNYYACSADMTVLKGELSWLYEADNTALQSSLRDLDRAYQNFFRRVKQGEKPGFPRFKSKKNRHRSYRAKRMGDNIAVIDRHVKLPKLGLVRAAISKKVQGRILNATVSQNPSGKYFVSICCTDVDIPQYPSTGASVGLDMGLKDLVITSDGVTYPNHKHIRQCEKKLAKAQRELSRKAIGGKNWEKARIKVARIQERIANQRSDALRKLTTQIVQGYDVICVEDLNVKGMVRNRKLAKSISDASWSELTRQLRYKCEWQHKALVKVDRFYPSSQTCGVCGHRNAGTKNLSVREWRCPSCGTQHDRDRNAAKNILKEGLCRLAQ

SEQ ID NO: 37377 - protein, 427 aa, Escherichia sp.
MHQENTMLPRRISVSLFIDQSIIWPVKRLQAFKFQLRPGGQQEREMRRFAGACRFVFNHALALQNENHEAGNKYIPYGKMASWLVEWKNATETQWLKDSPSQPLQQSLKDLERAYKNFFRKRAAFPRFKKRGQNDVFRYPQGVKLDQENSRIFLPKLGWMRYRNSRQVTGVVKNVTVSQSCGKWYISIQTESEVSTPVHPSASMVGLDAGVAKLATLSDGTVFEPVNSFQKNQKTLARLQRQLSRKVKFSNNWQKQKRKIQRLHSRIAYIRRDYLHKVTTTVSKNHAMIVIEDLKVSNMSKSAAGTVSQPGRNVRAKSGLNRSILDQGWYEMRRQLAYKQLWRGGQVLAVPPAYTSQRCACCGHTAKENRLSQSKFRCQVCGYTANADVNGARNILAAGHAVLACGGMVQSGRPLKQEPTEMIQATA

SEQ ID NO: 37378 - protein, 477 aa, unknown
  TnpB Polypeptide
MVRAARTVIVKSVKLSRKVFRVFVELEGMYRNMLEQLTLYASRNIIKSFTSLKTQKYRELRSIYPHLPSHYAYTACQDVATRIKSFYRNKIRKLTEDIVDELQEYLGYNIKELCEGERKHLYRTAYKIAKQQIEYEMRDGVARPCVKRISIWLDDHLWKLNGLTSIRIATHKGWVAVEFGPHKQYWRYVNRGWRLASEVKIKLDKRNRQLIIYLTFVKEVEEYKPRGYLSVDVNENNVTMLVSGVAYLFETNIEKLVLGYYYRRKKIQERYDELYGVKSRVKRKVLKKLKERKKKQDIRWKIASIIVRVAYEKRYAIVLEELGERSANSMIKRIKDKQLRHRIFQASFRGIQKVIEEKAKEYGIPVIRVNPKNTSIICPIHNAPINYNNGSRIGKCSKGGEIWHRDVVACWNLLLKALWGNGSNAPNPVGHTLLDVSPIPLGTKATHDPITLPKGLWARWKSLPQTRFVTILNKMKR

SEQ ID NO: 37379 - protein, 441 aa, Parageobacillus sp.
MRLEDVQAKIEKTEKKIDEYQHGRKTPKKVDLPTCLAGLHRRLEKLKSKEEELKHHLDHGTIPRVIFGGKQNFYKRLKGNITNEEWKDLRSNQLYARGDKSKKGNLNIRLTYDDKTYQCYVEIANPLGQQENKTAPRLRFPVSVPEKYEEEIMDLVMGEQVGVNAKGKPIIEYRPYTVEIQRKNGEYYVHLIYEEEVYGRELAYDEPIQAERIAGMDINIDRIAVSIVSKQGNFIQSKVFYCHELEYVKANKRNNIVGETVRDVYDWLLQENVGAVVIENIQLRQRHDTDKRFNRLTHNFNKKKLTDTIIRRGMRLGFRIKKVNPAYTSVIGRFKYMKKYGLSVHESAALVIGRRGLGYQERLPKELIHIIKTKVKNHLIAVLGSMEESYKQSKSGKKQRQYIAMMLRKIENFKQEHEWSLWNILHKCCWLNQDQIQLKEV

SEQ ID NO: 37380 - protein, 475 aa, unknown
  TnpB Polypeptide
MLRAYKYRIYPTDEQKVMLAKTFGCCRYVYNWALEMKETLYWKYHTSVSEFDMTALVRSELREQAPWLTEVSSKAIDFAVSDLYTGYKNYFEGRTRKPTKRRKHERQHFHDRGSGKEGRSTIRVNFRHGLISIPKIKNIPCVFHRRFDTKKCKIKQVGIELLKSGVYNASILVDDGKPVPTKAPIDPDKTIGIDTGLKHYVVTSDGLTDEPMHYAKEQKRKMKLLQRRLSKKEIGSRQFRVLKRRIAKLHQHIANKRRDHIHKLTHHLAYENQATTICVEDLNVKGMVKNKHLAYNLADASIGEFYRQLEYKCQWAGKNYIKIDRFAPSSKRCSCCGYVYRQLTLEDREWTCPKCGTHHDRDLNAAINIKHIGLSENKTLPSVRRKVKPVEQSLMDDRSPASAAGPKKSCCCGSTRRVREDNQQPPLRNRKTSSSGRNRKSEGQRCSNGAPDAPMPQFSEAKPTVSRTTSEASGL

SEQ ID NO: 37381 - protein, 251 aa, Thiorhodospira sp.
MRQGLRFTGQTKQVTISKRAGRFYASILVDTDEYNPHAPEHASVGVDLGIKDLATLSTGEVIPANQRLKKHLKYLKRRQRKLSRKVKGSRRSAKAKRSVARLHQRISHQRKAVLHELSDKLTRTYQVITLEDLNVSGMIKNHCLARAIADAGFGELRRQIEYKAAWRGVTVIFANRFYPSSKTCHACGKIHDMPLNQRTMACDCGHVMDRDLNAAKNLDRYGLDRLDALRPDVKRTQEPSQTASAAWVLTA

SEQ ID NO: 37382 - protein, 268 aa, unknown
  TnpB Polypeptide
MRIAPLAFTDATDEEICEVSAITHAHRTSTDACVIFVELMRDVMNGALPSWALQLKGIPEQEIRSVKTAIGLDFSMSELYVDSNGAHADYPHFFRKSQEKLAREQRRLSHCEKGSSRYMKQKKKIARLHAHIARQRKDYLHKESRKITNFYDLVCIESLNMKEMSQDSRFGKSVHDNGWGMFTEFLSYKLERAGKKLVRIDKWYPSSKICSCCGKLKKELKLEDRIYRCTCGNQMNRDENAAINICREGLRISGVELDTERKAFHQCI

SEQ ID NO: 37383 - protein, 437 aa, Desulfurococcus sp.
VVELDPDREAWNKLKLLCSISSKLWNEVNYARRRQFFETKRVDLRSTYKEFYERYKTLIGSATAQQVLNKNDEAWRSFFGLLKARKEGRLPPFMRRVSPPGYKKRGGFRTLWTVLRKDQYRIEGDRIVIKGLGAIGVIVVQYKGLIHVRGEQGRLEIRYDPDRGRWYAHISFSEVREKLVRGSWVEVPRKPRGSLEAGVDIGINNLMAVYVEDGRAFLVNGRPLKAISHYWMRRIARYQSTLNKYGLTTSRRLRLMYRSWRLQIKNYIDSRVRSVMEKLYEMGVSRLRVGYPRYIAQESGDFNNVHVWTYRYLLRRLVEVGEEYAIEVVLSDEKYSSSKCPLHRSVECGVRIKRGLFKCVKTNKVFNADLVGAYNILVDAEPITPSPGRGRGNGPETRPRAKPYQRGCSPNLPALTSGTPALKGGEEVRGRFEEILL

SEQ ID NO: 37384 - protein, 429 aa, Desulfurococcus sp.
VARTVAVETPPLPRKLFRVFAELEGMYRNMVEQLVLHAVREGVSSFTKLKALKYRELRNLYPQLPSHYAYTACQDASARAKSFLRLKKKGLVEREHPEVDSVSIWLDDHLWRASGLTSIEVATHRGWIPLEVIPHKQYWKYVNKGWRLASETKIKLDKRSRRLIIYLTFVKDVEEYRSRGFIPVDVNENNVTALIDGSVYLFETNTGRIVLGYYYRRKRVQEKYDKLYGVKSRIKREILKKLKEKKKKDNARWKIASIIVREAFKRRYAIVLERLGRRPAEHMIARISDEQLRHRVFQAAFRGVQRAIEEKAREHGVPVVYVDPKNTSRLCPVHGSKIVYGDESRIGKCERGGEIWHRDVAAVWNLLLKALRGGGSAAPSPAGLFVDGSPVPLGSTAAHEPTVIARDLWARWKSLEATLNDPKKHRTAL

SEQ ID NO: 37385 - protein, 429 aa, Desulfurococcus sp.
VARTVAVETPPIPRRLFRVFAELEGMYRNMVEQLTMYAVRSEVKSFTKLKALKYRELRNIYPQLPSHYAYTACQDASARAKSFLRLKKKGLVEREHPEVDSVSIWLDDHLWRANGLTSIEVATHKGWIPLEVIPHKQYWKYVNKGWKLASEARIKLDRKSRRLIIYLTFVKDVEEYRSRGYVSVDVNEDNVTVLIDGVAYLFETNMKRVVLGYYYRRKRVQEKYDVVYGTNFSRKKRILRKLKEKKKKDDARWKIANIIVREAFKRGYAIVMEKLGRRPGEKMVSKIRDSQLRHRVFQASFKGVQRAIEEKAREHGVPVIYVDPKNTSRLCPIHGSEIAYESGSRLGRCTKGGEAWHRDAVAVWNLLLKALRGGGSSAPSPAGLPVDGSPVPLGSTAAHEPTVIARDLWARRKSLHLIMNGCKVIEMKV

SEQ ID NO: 37386 - protein, 341 aa, unknown
  TnpB Polypeptide
MWLPIPKGASKEGLSLHSQTVQAVSEEYITRRKQFKTRRLSWRCSKGARRSLGWIPFKASAIAYRDRQVRYQGAPISLWDSYGLKDYKLGAGSFSEDARGRWYMNVTVEVKRSEKLQTSVLEQSALGIDLGLKDLMTGSDGSKVEAESFYRDLEPALAVAQRAHKDKRVKAIHAKISNRRKDFLHKASSHIAASHAAVFVVDVNASALAKTNMAKSVLDSGWSTFRTMLRYKCDDAGVWFKEVKESYSTQECSHCQERSSPKGQAGLSMRQWICVHCLSSHDRDVNAAVNIRNRGLEWLQKEFAVTGETKVGEAVANKDSGVHIPMAAPGYGRPVEGILVL

SEQ ID NO: 37387 - protein, 628 aa, Micromonospora sp.
VDEETGEVLSPAVLAQRIGWCADLVAGMVGALIGEHWNTADVQVLASGQDAGGRKLPSHAWMALRRLGWTVTPAEGVRVNDRVVRMAQEQAGRALRSVWWRAALTAGVLATWPADPRKRTPAEWEQVRASIPGGEHLPSGVIKGRTRQAVTFLNANGRLPVDVFELEGVPRVPRMLLLAACDRQQATLERCETDPGRVLLRLQLPLRPDPRAYRDWTWVACPIILPPTVPVGAVLHLPTLRVLGGRVRADVAFTHVVAKARRAGHTVGLGVDWGVNTLLSAGAVRLHTDGRITALGAGGQFRAAGVLAKQHRLRRHSERLHAKVDHYQRLIGVNERHQLVGKHAVLRDEIRHVSERRQNLNNAVAWAAARWAVDQAIAARASVIYLEDLRSLEARGMGATLNTRLSQQVRGKIVDRMRHLAAETGIAVVTVPARNTSKHCPQCLTVLQHRKAPDKPTVAGWKWAICPNQSCRWQGDRDHGAWRRIAARGLTHQAKTVIDKTSGQMVIRAVVDKLEATAVITKVSRVDRSKTGPTWHRATRPAPRRRRAPSPTRPHSRAGKRPEGHAPTGQRLPRAAHRHQGVNTISTPTTGHRPRGAALGAGFHLHAHASPPRWETIPETQSDSGSLG

SEQ ID NO: 37388 - protein, 544 aa, Oscillatoriales sp.
MVSHNTNMAKYVKPNEAANTLGVCLRTLRRWEAEDKINTIKTPSGQRRYDIEKFIKKESEPEGGRATVYQRSTQALKLLRKWEEDSILGGKDSSPFWDEFCEVISQLLWLPTKTDLQDSDSTLSNGFVSNLTAKSWFSTKSVSLHTPNSFKISSQSSTAFQADFTPLEGLKTKSSRSYKSNPRHKKEKTRYCYNKAIATLKAGEKITSAYSLRDYVLGLNLPDWVKSAPSHPKENAIFDAWDAWKQAKSVKGEASFRSCRQPSQSIKFHKVNFNGETWFPSLVKGLNFRATEPIQKTEFATQLVRDKKRWFACIPIIEEAKTKELDKVIALDPGVRTFLTGYDGDSFQEFGKADIGRIQRLCSHLDKLMGRGSKASRKQKRRMLEAASRLRIRIRDLVDECHKQVVNYLTSQYKVILLPTFETSQMVVKSKRKLRTKTARQMLTWGHYRFECHLKQSAKKRGVVVIDVNESYTSKTCTKCGHKHSKLGGSKTFKCPNCGHEHDRDWGGARNIMIRALRDGSFTLSINSESIAIAYALFVQGCAA

SEQ ID NO: 37389 - protein, 369 aa, unknown
  TnpB Polypeptide
MLKAYKYRIKPTKTQELKLNQFFGCARFIYNWGLNRKSEVYSNENKNLSVFDLIKEATQLKKDESFAWLSEVHSQPLQMSLRNLDTAYTSFFKKKSGFPKFKKKSNSQSFQYPQGVKVDENKVYLPKIGWVKFFNSREFIGDIKTVTVSKNPSGEYYVSILVDNKQELPAKKPIQKSTSVGLDFGIKDLVITSDGEVFENQKHFHKMKAKLKIAQRSLARKQKGSKSRERQRLKVAKLYQKVVNQRMYYLHKISTYLVNTYDTICIEDLSVELMLKEKRLSSLISDASWSTLRLLLAYKCEWRGKNLQVIGRFEPSSKRCNNCGNIKQNLKLYERTYKCEKCNANLDRDLNAALNIKDYGLGHSLCTLT

SEQ ID NO: 37390 - protein, 389 aa, Oligoflexales sp.
MKIKRAYKFRLIPKPQQRVSMAQTAGCARLVWNKGLALEQKALDSKEKRNGFAGLCKQVTAWKKDDSTTFLKLVHSQPLQQTCKDLDRAVKDGLDKQSPKRFPRFKKKNQHDSFRYPQGFKFDGRKIFLPKIGWVKFIKSQEIEGIPKNITLSKRAGEWYVSVQVEQEIPDAIHPNRGYEVGIDHGIARFATISDGNILKPHNSYRRHEKKLAKEQKILSRKKKGSNNRQKQKRKIQRLHKKIADSRLDYLHKSTTWIAKNHGKVVLEDLKIANMSKSAKGSIEKPGKNVSAKSGLNKSILDQGWFEFRRQLEYKLNWLGGEFVLVNPRYTSQKCYACGYVDKENRKTQVRFVCKSCGHEDNADNNAALNILAAGHVVSACGDISSVAS

SEQ ID NO: 37391 - protein, 413 aa, unknown
  TnpB Polypeptide
MFVLEFKVKAKTYQYHAIDEAIRTTQFIRNKALRYWEDNRGVNKYDLNKQCRILAEEFSWAKNLNSTARQSAAERAWSAISRFYDNCKKGIKGKKGYLQYQKNNRSVEYKRSGWKLDLETRKHITFTDKKGIGRVKLVGTRDLHFYHPDEIKRVRLVRRADGYYCQFLINTEVKEQLEPTKKNIGLDVGLESFYTDSNGYKEPNPRFFREGEQKLKQLQRRLSRKQKGSSNRRKARQKLGKAHLRISRQRKEHAMRLARCVVRSCDLIAYENLKVSNMVKNHCLAKSISDVGWYQFRVWLEYFANKFGKVAVAVPPQYTSQECSSCGRIVKKSLSTRTHACECGANLDRDENAAINILREGLRTLGRSETAGFEPDSTLVERPASTSVVSEQLEQADSSAEPSSVVRSKNLPL

SEQ ID NO: 37392 - protein, 377 aa, unknown
  TnpB Polypeptide
MVNDCIDIGLASNVTTLKRLAMLSWPRRRQYGCPDCYKACAVSRAAGILAARKKSLRRGIPTKNPYSLKPQITAYRGFKIKNATLRIPVGKRNFLFVPLISHIVSALSDPALTVRSFTLTPTSLSLCISKEVPEIECADAIGVDRNLRNLAVGNEAGVTHYDLSRTVRIAETTVKVVGSFKRNDSRIRKKIVSKYGRRRRNRTQHLLHNATKRIVTEAHERRQAIVLENIKGIRRLYCKGNGQGPKYRGRMNAWSFGEAQRQLEYKARWVGLPVIRLSRKETRGTSVTCPQCGERLQEDRRIRRKLWCGKCRVVMDRDVVAAINLSRRGRLRFDRSRAKRGLQGRAVETLKRNPTTTVILRADALKPSKQPKTWQNL

SEQ ID NO: 37393 - protein, 497 aa, unknown
  TnpB Polypeptide
VLYTAFDKDGGSLNLDEVMNGVKADAELVAHYALKEMTEQNLALSTYFDRIKPAEAGRQMNLKLPSEVKKQFKSGASRLEKMFQEQVVTNLRSWATRVEVMTQTYPKYVSAGWERTASDSKPASLKPRLALSATDKCYHKNFNVTPERIVFDMVVRGSWVTLRFPTPPQLLEAGCEPGVPDIWVDKNDKVVFGFHGKTDPGRPKFSERYVIGVDVGVKNPAAYVVWDTEKKQVVERSLLGQRARSLSNKIKRGKTQVTSLKRKGRDEEAVSHREHLSNRRKELSILIAQELADVSWRHDNAIVSFEDLSHIKNTMKYGRWFRGEVFRRTRDMVEADGGRVMKVNAAYTSKRCHVCQSDLDMSRYSQPICTTCGITHHRDLNAAANIAQRANVKKACKTRNKHATKTKRVRRSKCHVKPLKHPGTKNRPTPKAPQNQKKTHTATPTKREVSVRMCPADNRVSAVDHDYKEWFQTTSGTTVQKENHPPVFAVDVVYLEE

SEQ ID NO: 37394 - protein, 554 aa, unknown
  TnpB Polypeptide
MGNKHAEERKPSKPKTPTFLLELPLMTDAGQAARLGAHLEAGRQFYNAVLSAGQQRLRRMRADPAWQAACAIPRTQPQERRAAFAALRERYGFSEYAFHELARKLRVSWLAEHLDAVLAQTLATRAYRALNRVCLGKARRVRFKSKGRGLSSIENKRNDTGLRFVLQTHDQGRGQGYLLWHDEQLRALIDWDDPVVAHGLAHPIKYARLVRRRASSPRAQGADRQGERYVVQLMLKGLPHHKPKHTIGTETIGLDLGPSSVAIVPQQAEAHLVPLCAELRPDAHAIRRLQRKMERQRRAANPEHYDDKGRPKKRGKGAPRWKQSRSYQASRRRKATKERKLAAHRKSLHGRMIHQIVRTGNTIITEKISYRGWQKRYGRSVGRCAPGMLIDHLRRTVASTGGTLHEVPTRSTKLSQFCHGCGTFVPKPLWQRWHQCPCGVGPVQRDLYSAFLAAFLDPADPIPSCARYVVPWEGAEARLRAAHERATQRANEGQVMPRSMGISRAGARLPKSPGEATQELLFLSSRGKVEAWKHRPEPPGLQPGESSAKLSQSL

SEQ ID NO: 37395 - protein, 454 aa, Geodermatophilus sp.
MARVGHGAVRVRLDVTDVQAGMLLRAAGARRFAWNWAVARIKANADQWQAEASYGVEKPDRVRPLSYFTLGKLWTAERPGVAPWAGEHSTWTFRYALRDAANAHQAFLAGQRRFPRFKARHRDRARFTVRDGLALEAGRVRLAKYGWVRIAACPQQAKLRRLLRRGHATVQHVTVSRHSDGRWYATVNYTREVRIPAEQHAPPAGPVVGVDRGVKTAAVVATADGQVAAQLPASRALRDRLRHVKHLQRAVSRAQRGSANRRKAVARLGRAHAKAASVRADALHPFTATLAREHGVVVVEDLTTKNLMANRSLAAAIGDQGWAELARQLAYKAARHGGQLIVADRWFASSKTCSACGAVRPKLTLAERTFHCGDESCGHVADRDVNAAANLAAWGEHTLGICPCVTRAGDRHPGGPSAEPVRHACGGWVSAAAVPVAAVLPGEAGTSRPRLGVA

SEQ ID NO: 37396 - protein, 428 aa, unknown
  TnpB Polypeptide
MELIRSEDTKAKIKASMAETHARRKSQICRVFELKVSIRHNPKETFQKLAQCFKEAKWVINDMLSLSKDNPDNSMFDYKYTEHKDVVHYDKDKNPVTSTITLPSVLHRATVAQKKTDIINLAKAKKKGIKVGALKFKSEVNCIPIITGFTKILDASHITIPGFRKLKVNGLHQIEFEEYEIADAKLIRKASGYYVKLTIMLPKEPRNRTRRSVGLDFGIKNTITTSDNKTYDCKVQETEYLKYLSKMLNRHKKEKDSKRRWNCRKQLAREHEHVANIRKDICNKIYHDLVSNYDVIYIQDEQIKNWHQTWFGKQVQHSCMGALKQRIKMLVKADRAFVLSKWLPTTKMCPVCGAVNQIGLDERTYHCDCGYTKPRDWHSACNVLLFGTTKRAECVEHASAEVAASMQSSSTGLAQAAPLKRKLEAHSL

SEQ ID NO: 37397 - protein, 431 aa, unknown
  TnpB Polypeptide
MKTVKLTISNRIDVLDDMRVFSSIVHVAYNRYQDGMDEKEVRAYCNNLFATNRWFIQCAIKEAAALHKLNGDTRILFGGKNNLHQYLTGIIDKLTFKYRRMFPVGIQGQANYQGNRLFDFDLNNQKILYKPCRGRHVDIEFLPMRKKIANELAKVQELAEQNKITVSVKLSEKYVWLTYDESLIYDARFKKLKRNRILGIDMNPSYIGLSVIEFDKNDEFRVLHKRVFDLSKLTVSSGKASSDSASKYITNKLRHETIAIAHEISRLVDVWKCRTVAIEDLSIKPKDHKKGKKVNRLCNNKWERRLFTTKLKMLAELHKYDIVEVNPMYSSVVGNFAYGNGNTPDMIAASIEIARRAYKKFEKGWFYPRFNIQPRDEQWKQTLAAVEDWKGLFSKIKESGLKYRFLLKDYIQNAVFSKNYIQKCYNIYTFA

SEQ ID NO: 37398 - protein, 209 aa, unknown
  TnpB Polypeptide
MNRAVKIRIYPNKEQRVQIEKTIGCSRFIYNQMLADKISYYQKEKKMLRNTPAGYKKEYPWLKEVDSLALANAQLHLESAFRKFFREPSCGFPRYKSRKHSGISYTTNAVNGNILLQDTHLKLPKMSAIKIKFHRQVPSDWQLKSVTISRESSGKYYASLLFCCESQTVEKRPSAIKRRRSDRVCRRLWGCGQKRKRRSRKRSLQLFCR

SEQ ID NO: 37399 - protein, 424 aa, Halobacteriales sp.
MDDDAPRRTVPIKLDVPEQYHGDFHQTKDQFLHCANRTSEWAWRSGDYCVTSKSKAEDALYDDLREETDLTANLVQKGIRRAIEAVDSGVEKLKQGEKTSQPHFDSWSVVYDKRSATFNDDHATLSTPNGRITVEYVLPPEDDRENNPFGRYYENDEWDASSATLQYDEHTDTFYLHVTLKNPDYGVDGTERQEAESPDNHDKNGVVLGVDLNVTGAFAVTSTGAFIGSADYLNHKRDQYEQRRGRLQQTGTRSAHLTITSIGSTFSDWSLDWLHNRANDLIEEAYNADVDGIIFENLDHIRENIANGSKFQQWAYRKFVELVEYKVESTALFVDFVNPAYTSRRCSQCGFTHEDNRDDKTFACQDCGYEVNADYNGAKNIANRYCGYIHRGQKSRSGWATSQLALKSGALNVNGEYTPTELLG

SEQ ID NO: 37400 - protein, 461 aa, Pantoea sp.
MLTGIKLRSNPTASQREKLSRWMGCARVIWNAKCDEERYYRTFARKYYPVGTYAPVDQTAAHFKDAELTPWLSECPSQIIRNTAVNWYNTYRKFLKGVCGRPKRHPKTDRASIYLTRELFRFDHCADGVTRLFIGTKTNNIGYLSIKNHATYNLPNSLYIRKERGQYFVSFCYEDGKPEAASYTDDLAMLAGADRTWLEENTIGVDRGVAVPVQAGDLALDYLPSQKHHTARAGRYIKRLQRRLARQQKGSNRRNRSRQRLSGYHAQRANIRTDFAHQTSRTLVNGARVIVFEALKTQRMTRRAKLKQDESGRYLPNQRKAKSGLNAAILNIGWHRIELFTKYKAKAEGKACFRVPAPYTSQECATCGYTHPDNRRTQDAFVCVSCGHSDNADRNAARIIKKRAIELILHPGTGLTNDNELVTGRGDQRKTSKAKSPARNGQRSVKKEKGSTTLPLEALPL

SEQ ID NO: 37401 - protein, 398 aa, unknown
  TnpB Polypeptide
MFAATRIRLYPTDEQAHSMAVQFGCARWAWNNALALTSDLYRTMGKGLNYHAMAIRLPKLKQEFEWLGDADSQALQASLQNLSRAFENFFAKRGRYPRFKSKHGRQSIQYPQRVKIEGPRIYLPKVGWVECVVHREIVGKVKTVTVSRNACGQFHAAILTDDGEALPAVSTDGKAIGIDVGLTHLAVTSDGAKFENPRHLRKAEKNLKRKQRMLSRKKKGSNRRNKARRLVARAHERVACARKDHLHKLSRRIVNENQVIAVEDLHVKGIMSNHCLAKATADAGWGTFTGFLEYKSARAGKAFIKCDRWYPSSKACSACGSICDKMPLDVRAWTCVHCGTHHDRDINAAKNIRAEGLRILAGGALATASGGGVSPGKRRNPHVGRSPKKLEARSFRAE

SEQ ID NO: 37402 - protein, 398 aa, unknown; identical to SEQ ID NO: 37401
  TnpB Polypeptide

SEQ ID NO: 37403 - protein, 204 aa, Microcystis sp.
LHNTNRRAINAPKPLKKRLKRLRKAQKNLSRKQKGSKRREKARKRGAKIHAKIKDTHTDFLHKLSTKVVRENQTIVLEDLNTSGMVKNRKLSRAISDLGWRSFRDMLSAKSDKYGRDFRLISRWEPTSQRCSCCGNIGGKKALNIREWECLFCGTFHDRDINAAVNIKVAGGQSETLNGRVGKRKTSVKEAASCEALTPLTRLP

SEQ ID NO: 37404 - protein, 346 aa, Ruminococcus sp.
MAQQILKEVDGSFKSFFGLLKLAKKGKYSFRDCKLPHYLPKDGFTTLVIGFVRLNENKLILPYSHTFKKTHKPTTIKIPPILADKHIKEIRIIPKSGARFFEIQYTYETECIQRNLNKNNALALDLGVNNFVTAVSSEGKSFIIDGRKLKSVNQWFNKENARLQSIKDRQDDKRRTTNRQKILADKRNRQVNDYMSKTARKIIDYCISHDIGTLVIGYNETFQRDSDMNKRNNQNFVNIPYGKLRSKLEYLCELNGIVFVKQEESYTSKASFWDNDAIPVYNADNPKSYHFSGKRVQRGLYRTADGTLFNADVNGALNIMKKSSVVDLTVLYSSGKVDTPVRIRVA

SEQ ID NO: 37405 - protein, 591 aa, unknown
  TnpB Polypeptide
MQTTLTATLIKNQSSIEKIKTQLDSVVVLHNIIKRKLYKDIVAYYIKNKVNVLPKAVVNQFKQDYQLKYNINARQYNAIYTELNGKIASVLELNKSYLEDTKDKIESLHKAIKSKQKTLANLVKKINAKNYQYNKFDDSNLSNIKTKIYHLKQKLNKAILKLNKLVEIDKTGNPHLCFGSNKLFRQQFQINSINNLTEFKNHVDWKKAWVESRNKSFFLLGSSDETLGNTNCQIKHIQNNTYELKVNVNPKEPKLKDRTISFQIEVHNDKNNLIQQAILNNLGKDKSKHQALSYRFYKSNGSYKVFISLDKSKQQPKIKSIKQLGTIGIDINADHLSITEIDRFGNLIKSWDIQLNLKDKTSAQSLDNIACAVKEITDYAVKVSKSIVIEKLNFSQKKKELKAGYDKKYNVMLSSFAYNKIIQLIKSRSFDKGIEVIEVNPAYTSKIGKFKYQNKYKLTTHQAASFVIARRGLLSYSKVVEVKDKDGIVKEKTITVCNKEKTISNRCSKYYSFELPARTIQRKENVYWKEVELNYLKAKKHRLSLKKKKRNLILDKQKLSYNLSSELSREITQVVDNLEANRGLNPNSIPF

SEQ ID NO: 37406 - protein, 417 aa, Escherichia sp.
  misc_feature (113)..(153): Xaa can be any naturally occurring amino acid
VKRLQAFKFQLRPGGQQEREMRRFAGACRFVFNRALALQNENHEAGNKYIPYGKMASWLVEWKNATETQWLKDAPSQPLQQSLKELERAYKNFFRKRAAFPRFKKRGQNDAFXXXXXXXXXXXXXXXXXXXXXXXXXXXXXXXXXXXXXXXXXNSRQVTGVVKNVTVSQSCGKWYISIQTESEVSTPVHPSASMVGLDAGVAKLATLSDGTVFEPVNSFQKNQKKLARLQRQLSRKVKFSNNWQKQKRKIQRLHSCTANIRRDYLHKVTTTVSKNHAMIVIEDLKVSNMSKSAAGTVSQPGRNVRAKSGLNRSILDQGWYEMRRQLEYKQLWRGGQVLAVPPAYTSQRCACCGHTAKENRLSQSKFRCQVCGYTANADVNGARNILAAGHAVLACGEMVQSGRSLKQEPTEMIQATA

SEQ ID NO: 37407 - protein, 460 aa, unknown
  TnpB Polypeptide
MHDNRTLRAKITNHAQVATSLDQHGWSASKLWNVGLYYLRHEWDETGEIPDEDELKSELKTHYNYKGLHSQSSQKVLEELSEAFSSWYSSSDPRDNPPGYRKRNYYDAEGNRVHEEHPRSTVTWKQQGIRHDTKHDQIRLSKGKNHKSSEHAREYILVEYDIRSDVDIDSIQQVRAVYVDALNRWELHLVYRNEIATPEPPGEETAGIDLGISQFAAIAYSTGDTALYPGNRLKQDNYYFSKEIAKCDDPRGERATQLHHTKSERSHQFVHAWAATVADQCVAHGVSDVYVGSPKGIRTDEDGDARDWGKHGNLDLHSWPYATATDVLDYKLKECGITLHRSSERRTSKTCCNCGQERDANRVERGLYMCDECTIVAHGDVGGAENIRLGLGELIEDHLETHEDSKSNSESDEPCRCSREEMNTVSLYTGEDRSTGRLARPDVYLYDLSTGFSPREMVVH

SEQ ID NO: 37408 - protein, 437 aa, unknown
  TnpB Polypeptide
MEYSPRFRLYPTTPQRELLGWQLDTVRQVYNDGLKRYNDLPPAEDDDRTVKQRVQHVRDQLPDLKQRWSEYGWDQVYSTVLQEAVERIATNIENLGKLKAAGYDVGSLNWKSPREYQSFTYRQRGFELDKKSGRTGRGRLILKKVRGETIEIPIRLHRDIDPADIKHVTLKREASGAWYASFDIEKETPDKPEVEEIDPNNTVGLDLGILNFVFDSDGRAINRLDLSDDRDRLEREQRNLSRKRYESRNWEKQRETVAAVHESMRNKVGDYHHKLAHFYTTHYDIVFVEDFTIRGLFEGPDNARNKQEVAWGDFKDILDHHGEKNGCHVVEVPAYNTTKECHACGVEVDKELWVREHSCPSCGFETDRDYNAALNVKRRGLRKLGLGQSEGTSVETGLPAETDDFTEVSAKAVVEAEIPARANTGSPTLNEPAVAGE

SEQ ID NO: 37409 - protein, 380 aa, unknown
  TnpB Polypeptide
VNEKRSEQMANKAYKFRIYPNAEQKILFAKTFGCCRFVYNHWLDRKIKQYKNDKTSVTYTTCAKEMAQLKKISEFSFLQEVDSVSLQQSLRHLDTAFQNFFRQPKNGFPRFKSKKQSKNSYSTVCINRNIDIENGCIKLPKIGFVKLKQHRKIPVDYKLKSVTISQTPSRKYYVSILFEYEKQVQNKELLSFLSLDYSMHELYKDSNSNEPAYPRYYRSAEKKLAKEQRKLSHMQKGSSNRNKQRIKVAKLHEKVADQRKDFLHKLSRQIANAYDCICIEDLNMKAMSRYLHFGKSVSDNGWGMFTAFLKYKLEEQGKRLIRVDKFFASSQTCNVCGYKNNATKDLSIREWDCPQCGTHHDRDVNAAINIKNEGMRMLLA

SEQ ID NO: 37410 - protein, 453 aa, unknown
  TnpB Polypeptide
MQQIITAKLKLLTTPEQFALLRETQLAYRDALNAVSVYAFEHGKTSSADKLQKGMYTEIRLSYKLPAQMACNVPRQVGATYKGLWTKLKQNIEHRRTKRTKKRFKGLDKSPKYVSPTLIYNYGRDYNFKTEQRVSILTLQGRIILDYKGYTPHVALIQHGATIGAAKLWYDKPHKQFYLLVSLELEGADPTPTTQKQVVGVDVGQRYLATTATLKGESQFFSGKQVRAKADHYARTRKRLQQKGTRSATRRFIALSGRERRFKLNTNHVIAKTIVTTHPHTLIGLEDLSGIRERTKRRKRRRKGTQVLALTPKQRRANRHASKWAFAELHDILIYKAALSKTSFAVKVDADYTSKACPMCGYTDKRNRSGNGLTFECQNRECVYRVRTGHAYHLHADLVGARNIAMRTFLIRQDWVRTGQLSVVPDVSDSEAKAARLKRYADMRWSPDTSPLL

SEQ ID NO: 37411 - protein, 491 aa, unknown
  TnpB Polypeptide
VHSQVLQNVAVRIDLAFKAFFRRVKAGETPGYPRFRGRERYDSFCYPQSGYKLDGDRVFLSKIGRLKTVVHRPLGGTVKTCCVRRTSAGKWFVAFSCEAAPLSVTDTAVGIDVGLEKFATLSTGEQLANPRFFRRDEHDLARAQRRLSKEPRPRKGERAAPARRKRRKVVARIHERITNRRANFAHQESRKVINGHDIIAVEDLSINTMVHNHCLAKSIHDAAWRQFIAYLTYKAEDAGRRLVTVNPAYTSQTCSHCGHRTRKELSDRVHRCSCCGLVLDRDHNAALNIVALGRQSLAHDLDVFEAQARDLRDTARGHGDAVEAVGLAHGPSIVRDDDELRLGAQRAQRLAHTLGVGLIEGGLGLVEHAEGHGPHRQHGEDERQPHQGALAAREQLQVFGALAGRLHGDVEPAGQPGLVVEGGQFAAPAAEELLQIEAELRVEFAGCRPNLAFARRCWYGRRVLRPFHRAKRGRAAMAGPKVSANADKSRR

SEQ ID NO: 37412 - protein, 461 aa, Nonomuraea sp.
MAIRRSTTAEQGLPSAVQLRLAPTLAPQPGLQERKFGHRARLALTPAQIRLIDEQAHAARALWNLLHDWWTMLAKHQRSLAAADAAIRQARKEIEWLAVLPAQAAQAVLKTYYQAWKNCWEGRAHPPTFKARFHTVMSVDIPQGRDLQITRVHRRWGMVTIPKVGRVRFRWTKDLPAGAKADAGNRITGARLVKDALGWHVAFRVQTLHPMPEPHQGPQVGIDAGVSVPLALSDGNHHTHEQWRSTCDKSNAWLTGREQATLLALERRAAHRKSLRKQGERTSHRLRATYDRIASLRARAKRRAIDWQHQTTTEIARTYGVIVVEDLAITNMVTSAKGTVEAPGKNVAQKSGLNRSINQEAWGRTVTMLTYKAARYGGVLHKVPAPGTSQRCSACGFTIPGSRQSQAVFACKNPGCGWRGNADHNAARNILHLYRMGLALVPAAGRAVVRRARRVKPATAR

SEQ ID NO: 37413 - protein, 515 aa, Scytonema sp.
MARKKTPSFITEIPLIVDSSQEKELLSKFEAARQLYNACLNEAMVRMELVRNSEAFKLAKKIPKSKKKERTDAFSAARSAYRYSDYDLQAYATIVANLSKWIADKIDSNTQQTIAKRAFKASVRVIFGRAKKVRFKVSSRFHSVEGKTNKQGLRWKNNELVWGSLKLRSIIDESNPVIMHGLQSPVKYVRILWRELNGKRRWYAQLINEGLPYQKEKNYVSNGLIGLDLNISNIAFVGDEKAGLLPFAKKVPTYEREITALQRKMQRSQRVNNPNNYESDFEIKKGHHTVKKKGKVKKGKREWNRSKNYQKTAQKKRELQRKKAAYAKSQNRKVVNEILRNGKDIKTENVSVKGWQKRYGKAISAKSPGFVLAELIRKAENAGGTVHKFSTQKTALSQTHLDGSRTKKSLSERVHHDATGIKMHRDLMSAYLSRFVNQDDTLSVQDARNGYRGAEPLLLEAWQQSKNREQVGSSESGLIAPERFSDKLRQVNQIADCLQSERKVNPNSQPESAQL

SEQ ID NO: 37414 - protein, 398 aa, unknown
  TnpB Polypeptide
MKRAILLQTLSTKTKSSHLKDFMNKAINEYNRLLSERWDCDSFMEFHHKTLSVSKQNTSFNVQVRCSLIRDAWKKKSEKVNGLTVKFNIPRNCKTFNTKSNFFVDLGLYPRNRIAIPIKQNRNYQRFQSLIHNGWVCKTFGLTYNLQIVAFLSKEKEIKQRKNIMGIDVNAKYFAVSIVSPKGKALYQTYLGKHIWIKRKKIIERRAMLQSLNAKKKLKRLQHQERDFVKTNLGQVVREIVNLAIKYDTDISIENLKRFNPKGRKFNKIAMRIPFYKFKQILEQRCFDNDIRLNIVDSWHTSKWCSHCGALANGHSSNYSLFKCKCGQTVNADRKASLAIAIKSLLERGNTINQSIYTQISKWRDYVNNLVRPNVVGNLCSENHNYQPMENFCSLNSK

SEQ ID NO: 37415 - protein, 466 aa, Kribbella sp.
VSHRQGFRVELAPDPGQAIVMGRHCGLSRVVENFCLETVRKKWAQRKAEESYGVTGDDLTKVPWSAPALEKEWRAAHPARFPWFAENKLSSRVPKEACRVRAAGFSNYLKSKKGERRGAKMGFPSWRKRKHGSRFRYDADRAKPLDARTVRLPAIGDVATREDMSWLTGRMENGSARILGATVREQAGRWWISFQIEVDRDDLNKHRQADAEAPACGIDLGLKTFAVIKNSDGTTEEIHAPKPLKAAQRALKRANRKLARSANDSKNRAKARQRVARLHLQVADRRRDFLHKTTTRLTRTKSAIAVETLHVKGIIKNRRLARSISDAGFGEFVHQLDYKADWYGSTVWKADRWFPSSKTCGDCGRINRALVLADRTWVCPGCGVLHDRDQNAAGNLLAAMLADRPCTTSPGSCPENRNACGDHIRPHSPESAAVSEAGRAEASTSLRLTQRLVVPEYDGSDRSREV

SEQ ID NO: 37416 - protein, 400 aa, unknown
  TnpB Polypeptide
MQLVEQHIIKKNDNRYKILDEVCFKSKNLYNAALYEIRQHFFNTKQFLNWFSIDKIFKEKKQDDYYSLPCKVSQQTLKLLNQNFKSFFSLLKKKNYTKKKSIPKYLDKSKGRFVAVYTNQAISKKELRNGMIQLSGTDFKIKTKVDGNSINQVRIVPKNSYYKVEVIYEVEEIEELEDNEKYAAIDLGVNNLATVSFNESKPFIINGKPLKSINQFYNKRKSELQSKLSGDRKSSNKINSITRKRNNKIKNYLYKASRCIVNHLVSNNVNTLIIGKNDNWKQETNIGKKNNQNFVLIPHSQFVEMISYKCKLVGIAVMMTEESYTSKCSFIDNEEMKHHEEYKGKRIKRGLFRTNEGRLINADLNGSLNIMRKVIGEFQYPIEVCSTPLVKTMFDTIKLN

SEQ ID NO: 37417 - protein, 236 aa, unknown
  TnpB Polypeptide
MDLTKISKFINPHISHNGRCWILTLGIEIENRPHKTTDEVIGIDLGVKELAVCSNGMVFKNINKTNQIKKLEKRLKHLQRKVSKKYESNKKGGRYLKTNNIKDLEKRINKLHRKLKNIRLDYTHKCTSTIVKTKPCRIVMEDLNIKGMIKNKHLSKAIQQQNLYKFIKQLEYKCEWNNIDFVQVNRFYPSSKMCSNCGNIKKDLKLSDRIYKCECGLTIDRDFNASLNLANYGKSL

SEQ ID NO: 37418 - protein, 449 aa, Natrarchaeobius sp.
MQEVALTRSLSFGLDITEGEPANLREASLEARRIRNEVNRLDRQGWNWDDIEDPVTERAIHVKNTTQQLIEKALQEIETYHEHKDNDRLDWGRPRTYIDEPYPVRMNHNEGYALTLNEDGEVEFRISYKKRHFVRGTLQGSPDHLERVKTALTSVDWRVGTAELVYKHDEWRLHVTTTHETHTVASPDTAETIVGVDINEDCIALAAMTREDGVIDSTVIEYPDIKRVRHEFFTKRKRMQEAGQSAMDAVVQTEERDFVHDQLHKVSRDVVEWLSQFDTPVVVFEDLKDMRDDIDYGTKMNRRLHSLPFAKLREFITYKAAWNAIPSQDVDPEYTSQRCPCTECLHKARTNRRKKRFKCTACSFQDHADRKAAVCVCQEWLWDRDETVPSLNTLPRVTKVRRTVSGPGGGADPHGPIFDSGVNRRGTAAQASSGEQVRRELKSVAPSEG

SEQ ID NO: 37419 - protein, 384 aa, Nocardia sp.
VQVRYRYRIEPTLAQQQELGRVFGCCRVVFNDALRVRDDACRAGITLSDTDIQRRVITQAKTTEQRFWLAEVSSVALVQSVGDARRAWRNFFDSASGKRKGRKVGRPRMKSRKDRRQSFRLTRNGFRVRPNGRLDVAKIGEIRVRWSRALPSEPSSVTVIREPDGKFYASFVVEVERMPLPQTATECGVDVGIARLATVADTTGTRTDIANPKYLQRKSRKLARLQREQARRQKGSKNRDKSRRKVAVQHGKVARTRRDYHHKQVLRLVLENQVIHVEDLNIAGMVRNRRLARAISDAGWAQFVRIIGEKAERYGRTLHSVSRWLPSSKTCSACGHQLDELSLRVREWTCPAEPTACAPTSCAGRLDRLDDRASHPEQFPGDPV

SEQ ID NO: 37420 - protein, 415 aa, Nocardia sp.
VQVRYRYRIEPTPAQMEEFAKVFGCCRVVFNDAVRLRNESFRAGIRLSDTEIQRRVITVAKTTEEREWLREVPSVALVQAVGDARRAFKNFVDSCTGKRRGRKVGRPRFRSRKNGRQSFRLTRNGFTLRSNGKVCVAKVGEVRVRWSRPLPSVPSSVTIIREPDGRFYASFVVEVAKVTLLDAVGSECGVDLGLARLATIATNEGGRVDIANPKHLHRKTRKLARLQRQLSRKAPDAANRAEFRRRVAVQHLKVARARRDYHHKQALRLVRENQTIYVEDLNIVGMIRNRRLARAIADAGWRQFVQVISGKCEQYGRRLVRVDRWLPSSKTCSECGYVMDSLPLGVRAWACPVCNHVHDRDFNAARNILAAGRAERLNASHEGGAIVVDGCRGAPVRPPEWEARSVEAGSNSDAA

SEQ ID NO: 37421 - protein, 398 aa, unknown
  TnpB Polypeptide
VLILTYEYKLKPNKQQSEEMQHILDVCRSVWNYALRERKDWSASRKCPVNACRVRSEYIMAADAPSPNFAAQCKALTQAKKDNDWLKSVNAQVLQQTLKTLDRAHAEIKKQGKGYPRFKKPNRMRSFVFPQLGKDPLADGFVKLPSLGAVKIRQSRPYPEGFDVKQARVVKRASGFYLMLSFQADVSVPDVPLAGHFVGADVGLEYFLSSSDGLQIARPKFFIDMQRKLKLLQRRLKGKQLGSANWKKQQRKIARLHERIANTRKDFHYKAAHKLCDGADVVAVEKLNLVGLSRGFLGKHMLDAGHGQFLNQILPWVCSKRGVGLVSVPAEGTSQECPQCDQVVKKDISVRWHQCECGCSMPRDIASGIVIKNRAVGRTVLENACRDGLTGAAALAAA

SEQ ID NO: 37422 - protein, 262 aa, unknown
  TnpB Polypeptide
MPRAGEKRNKKDKRNIQKILMYYGNVATYRHHRCERLYYRAMDRSRRATNPENYNADGIIKKGKKKWTYSRHYKKLKAKHAELCRINATNRQLAINEDANHLRSLGDTFVTEPKNAARLMKRAKETTVNNKGKINRKKRFGKSVKNRCPGGFQAAVENKFKTSGGTYIEVPNNYRASQYDHTADDYIKKKLSDRMYKLTDGTLVQRDWYSSFLLYCYNYRTNDIDKKKCAAKFKKCYSMEKDFIEWIKKHKINVLNSGIKIA

SEQ ID NO: 37423 - protein, 428 aa, unknown
  TnpB Polypeptide
MNAVRVYRLQPPPKLFACLKAAQMEAARVWNLCCEIHKQARMTHSKWPGRNELQKATKRQFALHSQSVQMVVHAFLANIDTTRELRKTHPQMKMKYPWREKHFYPVKWPAQAVSKENGRVVLPMGKGRQSIILPIELEDHSGACSLVWNNGFELHVCVEQPIAQEAPGSVHATVDLGEIHLAAVSTNTGQAMIVTGRGIRSLKRQRTKQLGKIGKRQSRCKKYSRRWKKIQKAKNKIKARAERRIRDMRHKATRKVITFCQEQKVGTLFIGNPHGVRNRDSGRHHNQRMALWEYGKDIDYLTHKAKQAHIMSFTGSERGTSSQCPVCEHKHKPKGRNWACKACGFTGHRDIVGSVNMHTLVFDKHVIFPRSVTYLRPGLSRRSRRADAPLASSDACCLSQSPHQPLLSEQVSSETGHTVEVTQKLIPF

SEQ ID NO: 37424 - protein, 301 aa, Moorea sp.
MIILEFKAKGKESQYSAIDEAIRTVKFIRNSCVRLWMDNKGTNKFDLSKYSKVLAHQFPFANELNSTARQAASERAWSSIGRRPRYANVRFYDNCKKKVPGKKGFPKFQKHCRFGVADAARTVEYKQSGWKLSPDKKSITFSDKKGIGKLKLKGTWDLWRFDKKQIKRVRIVKRADGYYIQFCVSVDVIEELEPSKSTVGLDVGLKEFYTDSDGNSEPNPRFYRTGEKRLKFYQRRVSRKKKGSSNRRVRLVLSRSLLRKEGYNSGNRGVKIPKILTVCWMVVKTHPIKRYVTPYLATPSR

SEQ ID NO: 37425 - protein, 217 aa, unknown
  TnpB Polypeptide
MVLVVDDGSNPEVEIKTGKIAGFDFGLKTFLTCSDGTKIESPQFFKLSINAIKKASKQHSKKLKGSSNRERARKNLVRKHEDVSNRRRDWFWKLAHELTLKFDVLCFETLNLKGMQRLWGRKISDLSFGEFLQILEWVAKKKHKQIVFVEQWYPSTKTCSHCGHILEKIDLSVREWRCPSCQSVNGRDENAARNIQMVGASTIGLGDVSQATPAIAV

SEQ ID NO: 37426 - protein, 225 aa, unknown
  TnpB Polypeptide
VVDIDEKSKYNKDLKASYHTVTDGVGIDLGVKDLAIVSDGKVFKNINKSSKVKLLERRLRREQRCLSCKYEFIKKKGGKTATASANIEKQKLKVPMLYQRITIIREDYENKTVHEIVKQKPRFITVEDLNVKGMMKNRHLAKAIAAQRFNHLLAKLKRKAEIIGIELREVDRFYPSSKSCHSCGHIHKGLKLKDRVYVCPKCGYTADRDYNASLNLRDAKEYRIA

SEQ ID NO: 37427 - protein, 480 aa, Kribbella sp.
MLTAAQELLDRPGVAKGAARAGIASSEELTRGSVLTLKAYKYALNPTPRQGRLLDGHCAAARLAFNWALGWVKANLDQRAAERSYGIPDELLTPAISWTMYSLRKAWNQAKARVAPWWAEYSKEAYASGLTQLAAALKNWGESRKGKRRGRAMGFPRFRSKRKAVKSCRFTTGTIGCEERYAVLPRIGRIRLHETPAPELLNGTARIMAATIRFERGRWFVSFTVEQKMPAQMPRRPDAVVGVDLGIKSLAMLAGPEGEPQTVPNPKHLDAALRKLGKLSRRVSRRVGPDRRSGRIPSNRWKRANAQRNRVHHTVAYQRADALHKLTTDIARKYGTVVMEDLNVAGMLRNRRLARRIGDAGFGEIRRQLAYKTQWNGGRLVVADRWFPSSKTCSGCGVVKAKLLLSERNYNCESCGLVMDRDENAARNLAALAVAASGAETLNGRRADQRTRATGQVAVKRLPGSRERETGTASPEAVGE

SEQ ID NO: 37428 - protein, 364 aa, unknown
  TnpB Polypeptide
MPSYLRRSAIQHALGTVSSYKTRLDLWEKTDGKSGKPKLVYENHAMPVFYRDVMYREGAEGKDEAYLKLYDGHDWKWSCVRLDHTDMEYLRKCWSGKKASAPTLEKRHQKYFLRFSYKEEVTLTKTPVKEQIICSVDLGINTDAVCTIMRADGTVLGRRFIDHPSEKDRMYRTLGRIRRFQREHGSAQTQGRWAYTKRLNTELGKKIAGAIVRYAEENHADVIVFEYLEMQGKISGKKKQKLHLWRKRDIQKCCEHQAHRKGMRVSRICAWNTSRLAYDGSGAVTRDWENHSLCTFQTGKRYNCDLSASYNIGARYFIRELLKPLPATERSLLEAKVPPVKRRTSCVYADLRKLHSEMELLKAA

SEQ ID NO: 37429 - protein, 259 aa, unknown
  TnpB Polypeptide
LDIGTQSLGICSKDSVKLLELAPELQNIEDKKRILQRKMDRSRRSTNPNKYNENGTINTKDKTKWIKSNHYIKTQMELKELQRKQREIRKQSHNKLANYVLTLGNDIKVETMSYSGLQKRAKNTTVNKKTGKFNKKKRFGKSIANKAPAMFLTILDNKLKWVDKTLKKIDTWKVKASQYNHIEDRYIKKELDERWNDFGELDIQRDLYSSFLIMNVNDDFETINRDLCFEKFNDFKVLHDIEVQRLRSIELPLALRNVI

SEQ ID NO: 37430 - protein, 226 aa, Proteus sp.
MASWLIEWKSDTETQWLKEAPSQPLQQSLKDLERAYKNFFQKRTAFPRFKKRGKNDAFRYPQGVKLDQSNSRISLPKLGWMRYRNSREVVGEVRNVTVSQSCGKWYVSIQTEYEATEPQHESTSIVGLDAGVTKLATLSDGTVYPPVSSFKVNQRKLARLQRKLSRKIKFSANWQKQKRKIQRLHSHIANIRKDYLHKVTSEISKNHAMIVIEDLKVSNMSKSAHQ

SEQ ID NO: 37431 - protein, 395 aa, Leptolyngbya sp.
MLIFNYQYCIYPSADQAAILDDWFETSRRVYNYALREIKDWSQSRKCPVNACDVRSCYIIPADAPYPSEQRQQASLAKAKQVVSNLKTVPAQNLQQAIKRLHKSFEAKRKRGFGYPRLKKFGQWHSTLFPQFKASPLDAEGKSLKLPKLGDVTINLHRPIPEGFTIANVRVVKKADHWFANLCIKCDVEVPVIGFHGHAIGVDVGLDYFLATSDGLQVKAPKFFKQSQSKLKLLQRRLARKTKRSANYQKARIAVARQHRHIANQRRDLHFKLAHQLCDGADSIFFEDIDFRIMAKGFLGKHTLDAGWGQFRNITKQVAFKRGKFSAEVDHRGTSQKCPDCGAEVRKELADRVHSCHACGSVKPRDVASGQVIRNRGVALYSTIVPVEHREMETA

SEQ ID NO: 37432 - protein, 312 aa, Tetragenococcus sp.
IKQVDSVAVQCSVKRLSETFVRFFKGYSRYPKFKSKKNTRQSYLSTIRGNNIRFNDNQRYIKLPKLGWIKCKSSVLHIENERIKSVTVKYTPSGDYYISLLVTSDNQAMPKTGNVVGVDLGVSDLAITSDGQKYQSQRLHLSYKKQLHYWEKRMARRRLQAKKNGVDLVDAKNYQQAKRQVARIHQRIKNIRKDYIHKITTDMVKSYDVIVLEDLKTTNMMKNHQLARSIAGQSWRMFRTILEAKCEMYDKTFVAINPYKTSQKCSNCGYDSGKKALNIRHWTCMKCNMHHDRDINAAKNILNIGLEQALVK

SEQ ID NO: 37433 - protein, 639 aa, unknown
  TnpB Polypeptide
MTRIVFLELHKKKLFTYNMNSKKTKNKKNITSVIKIGINKFCRYPEHIAHVKQFIKPTTQVLYEQTLFINYYVLRAMELNHDIIDLSSQTNLNRIRYLCENRKQQNYTKVLDDIKNPFLEECWILWKEQRNNTLPFGEQLITSLGNAYSVNTITMYKNFFTMRYFSFMLKYARYLFRNSNCTGFTSKQRSYVAKRIIQQFEHDKNLPTFTCERLTDLVISNTDEINSIHTELLKYLPETQPNPLNGNTIKNNWTQYIKPWYNLLKVFEEQNLVTEHDYKFTLHNILPMYSMNAKYVPFTKPILFKLHNKIAKSKKYKKIKHVATQKLYNANFYYYASKVFRLKHVENKNGKHFFVGPILTNGDFVSITMQKLPVEDTTNTPITKINLDNKHVIAVDPGIKNIIYSVDKDGVTCKITNKEYYHYLNNKKRQRKHENTYRRNGIDLLQTVSSKTCNLNIYKLFLRDVYNSLHTQLDINCSHAIKKLKKEAYIARQRTYTKLMSKFNNIYSSNKKKVIAFGNGSFQSSMKGYTTSTYKTFKNKLNIGNILEGVDEYKTSQVCYNCHKEELGYIYKNGLKQHHVRVCNNKHCRMTVLDRDLVGAKNILTVYVHKNEHNNQVPYCFQRSTITSCSNDKILLIQS

SEQ ID NO: 37434 - protein, 671 aa, unknown
  TnpB Polypeptide
MSAIKEKKTKPPDKPTDYFKCIKIPLKHVLKNQDINLPKITDAVIKCNKIVINTLMFIKLYLLDYFEKNNKLPEIDKIFVNSCMKILCNENASGRPPKKEIKELKDKLTAFYNSDYKPLIKDTNLDYTHLNTVLDYLTIGIITMYENNIKLHYIEYIERFVNIVWKKKEIIVKIKEENKDEDKQKELVNEFCRQLRKIKTDILEISSEYKSDVKYHNWIKEIKKTITPNKDKYQKDNLYYDLQCNPQDYLPCMIRMMKEIEKDKVMIYNVFPMRNDIIMKSIKIDTTTLVHLLFTQKQGNKTDYLLEGNLKKYENEIWEFFFRTERQCFKKPKYTFHHMIETDGVSCSILMLRNDLIGKRIPNIKIGSNTEQYIDELSDYTNIKNKKIIAYDPGLSDILYCVDNDNKDAIEFRYTQDSRRKECKIKKYAKIILEFKKEKIDGKTVIEYETKLSKLNRKTLIIKDFKEYIKKKSEINNKLYKFYEKYIFRKLKLNGYMNKKKNEQKLINNFRKIFGKPEDIIICGGDFEQKQHMKYKEPTKGKGIRKIFRDNGYKLYLVDEFRTSCMCSICKEEIGRCEKFQIRENPKPYKSGNILVHGLISCKNCFNVWNRDVNGATNIYRIAKNAINGLERPKYLCREKKDENVKVEKPKKEKVKKVVQKKSINQLRLSP

SEQ ID NO: 37435 - protein, 271 aa, Thermus sp.
MRVPLKLGNYQRHLLRQAKSVQGAVLTKGPKGKWYVHITLRVQTPEPPPGGGRVVGLDLGQKALATLSTGERFPGGPLRGRRLHYLKKRAEVRSRLDRPSQRTRGVRRLWERLSGREARFVNATLHALTRRMVDLLEPGDVLAIEDLSGIRQWTTKRGKEERHLHHLWPYARFRSLLEYKARLKGVGVVAVDPRHTSQECPRCGHTARENRRSQALFRCEACGFQHNADWVASVNIARRAVAQGAGSWGLGHGQLAPMLGNRLRHLHSLAS

SEQ ID NO: 37436 - protein, 386 aa, Chromatium sp.
MLIAHKIELRPTPEQADYLNRACGTRRHGYNQLLAHFSQPGVKWSKAAAYQHYMTVLRVEFPWYSEVSSRVARNAIDDLDAAFKGFFRRVKAKAKQPGFPKFKQKDVNDCFALREPSRFSVEGQELRIEKLKTRIKLRQPLRFTGTTKQATISKKAGRFFVSVLIETDDYNPHAPEQASVGVDFGIKTLAVLSTGEEIPANQTLKKNLKLLKRRQRNLSRKVKRSRRRAKAKLKVAKLHARIGNQRQAVLHELSDTLTRTYNVIAIEDLNVSGMTKNRRLARAVSDAGFGELRRQIAYKAAWRGVTVIIADRFFPSSKMCHVCGQLHDMPLSQRLMICDCGNVIDRDLNAALNLNQYGRDALKRDLKRTQESDKTGSQDPALALMA

SEQ ID NO: 37437 - protein, 492 aa, unknown
  TnpB Polypeptide
MARTKTDSFILELKLKTSPADDAYLEKCFSAGCSICNTLVRHCRRQIASLRQDKDYRKLLAEYCSPKKGKERSAVAKRINAIVASYGLTEYSLHDFVKVQQKKHKKYINSHVAQKVASSVWRGVEKVLYGEGKYLHFRKWKDFLSLEGKNNTTGMVFQGGILKVNQRPVHARRQKKDGSPARRYEEEALSKRIKYCRLIRKPVGRRYHYYVQLVLEGKPPRKGHTLGEGAGGLDIGTSTAAVVTDTECILTVLGDGIESIEKKQWKLQRKMDRSRRAMNPQNYNPDGTVKKGRKKWTNSSHYRRMQMEYASLCRRRAAAMKQWQEVMANRIVSQCDTIYVEQMNFKALQRKAKTSVVKENGKHSRRKRFGRSLQSRAPAQFCCILERKITALGGRYLEVDTRSFRASQYDHAADTYTKKKLSRRHAIIDGHWVQRDLYSAFLLSNSASDLAHADRERCQKTFDHFLENHDACIAEIRNTKTKIPRSFGFRAA

SEQ ID NO: 37438 - protein, 405 aa, unknown
  TnpB Polypeptide
MQRDVHVTVVGKVFKPNRGKVLALNRALEEYFSLVKWYLHFNCKSKSALHRSCYEEAKERFNLHTALIQTARDKAIEMLKSFEKNKKEDSTLSLKRVSMRFDKRSCKLSKTTNVLTPYWLTLSLTKGKRVSLPIIFGEGQKQRIEEVLRGEWELATVEMVKRDGEWFAHFVLKKTVEVPDEPETVIGIDMGEHNLAVAVAIPKNNPKPTKGQFWRGSEIKRTRGLCAHIRRRLQEKHRFGKVKELRGREKRKVNQQLHIIANEIVAYAKQFPKPVIVMEDLNGVRENFKKSKKLNRRFHSLAFRRLQTYVEYKALLEGVDVRFLPKKEVRNTSKTCHRCGHVAQVEGREFRCPKCGLKYNRDLNAAINIAHVLTRGMGWGSCEPLEPADVSEGEKPRANAGSHPL

SEQ ID NO: 37439 - protein, 404 aa, unknown
  TnpB Polypeptide
VKAILVERHIIKYNNDYYKMLDKFCYNSKNLYNHANYNVRKRFVEEKLWLKYNEMDKLFKQEGRDFDYRNMPSAQSAQQNLRLLEKNWKSFFKAIKDWKINSSKYTGMPKLPNYLPKDGRNIITLTTYDCKLKENIIKFPKTFNGFYIKTKISNLQQVRILPRNKHFIIEIVYRKEIIDLKEDSGRYLGIDIGLDNLATIANNVGALPMIINGKGLKSINKFYNKKISHYQGIAKRMNNMYYTNRMNNITLKRNNLINNIIHKASKIVVDYALCLDINTIIIGNNKDWKRNSPMSKRVNQSFVGIPHQDFIRKIIYKANNVGIKVILTEESYTSGTSFLDNELPTKEFYNKSRRVFRGLFKSNIGKLINADLNGAFQIIRKVFPNVKADGIEGIGLCPIRVNVK

SEQ ID NO: 37440 - protein, 468 aa, unknown
  TnpB Polypeptide
VGAGADFSQDAGGGVYEVKYRNRRTNVVRLLPNGAQERRLRKLADAAAKLWNELNYERRQQFFRGEKVDFKGTWSKYYGKYKNVLGVNAQAVMQKSNEAWNAFLHLLRLRREGKLPPHMRRVSPPGYWKDEVTKQRRLILLVRQDRYVVDERRHVLILKDFKMAIRFTGGLRWFGRQGRLEIHYDETRNAWYASIPVEVGVEEARTGRKSKHIVRGERKSIQVESPKGSKVASIDLGINNLASVVVSDGTWLLYKGVRAKEDYFYLQRLISRIQSLRGTLKDRLLADAIDELNREVRRLHGKLRRLLHLYRNFASHLLRTLHELGVSTIYLGYPLNIAQERGNKFTVNMWTYRRLMEAIELKAQEYGIKVFEAVKYKTSRVCAYHNVEVKRQPRGVVHCPKGHKLHSDLNGALNIMKKATDKTPLVIKKPLSFIVDHNKVAPVKRGVTPKTPEHPRPLRRGGGQYTPE

SEQ ID NO: 37441 - protein, 313 aa, unknown
  TnpB Polypeptide
MNTKTLKIRVKDRHRNELNNQARQVNFVWNYINELSSRSVRERGIFLSAYDIQKYTDGSGKELGLHSHTVQCIGNEYVLRRKQFKKRQLNWRKSKGVRRSLGWIPVNTRAAKFKNGQVFFNGKYYRVWDSYGLSQYEFRSASFNEDARGRWYFNVVVTVKSEQSQGKVLVGIDLGCKDSATASNGEQLTNGEYRKLQQQLGIAQRANKKKRVKAIHAKITNRRKDNIHKFTRKLVDTSSAIFVGNVNAKAMVKTKLAKSVLDAGWGSIKSVLEYKCAIAGVHFEEINERFSTQTCSCCGSIPSSSPKGRAGNT

SEQ ID NO: 37442 - protein, 398 aa, unknown
  TnpB Polypeptide
MKLVERHIIHKSDKRYAELDDILYKCKNLYNTGLYHVRQHFFMEKEEYKYLNYYELDKKLRSENNCDYRALPTSVSQQVLMLVDHNFKSFFKLLRKKKEGKYTEKIHIPKYLDKQGRFIAIFTTTSLSTKREKGIIKLPKQYTFTATTKQNNIQQVRFVPKANHIVMEVVYNRQEKEMMPDNGRYMGIDLGINNLSTCATNTGIAFIINGKPVKAINQYYNKRIAYLRSRIKTGLSKRIKRTTEKRNRRISDYIHKASRIIINHAVSNNINTIVIGYNKGWKQEVNIGKVNNQKFVAIPFKQLIEMIRYKAQLKGINVIITEESYTSKCSFIDKEKICKHREYIGERTKRGMFVSPQWEINADVNAALNIIRKKVSDEAVYTLIGRGKWQFPTRINCA

SEQ ID NO: 37443 - protein, 404 aa, unknown
  TnpB Polypeptide
MLRAYKYRIYPTDEQKVLLAKTFGCCRFVYNWALKLKIEVYEHEKKSVSYKTVQDMMVNELKKDKQWLNEVNSQALLNSIRNLDTAFKNFFRDTHAVGFPKLKSKKDRQSFQCPQHCVVDFGKGTITIPKVKDIPAVFHRKFKGTVKTVTISMTPSRKYFASVLVDTDIEELPTTPIHGDTCLGIDLGIKSLAVCSDGRTFDNPKNLRRSLDRLKLLQKRLSRKKKGSANRNKARIRVARLHEHIANCRKDNLHKITYALTHDSQVRTICMEDLNVKGMMQNHHLAQAVGDASFGMFLTLLKYKCSWYGVNLIQINRFAPSSKTCGKCGYIYKGLKLSDRSWICPECGTHHDRDFNAACNIKEFGLKALPTERGKVKPVDCPTVDDRPSVLKSRDRKKQEETHA

SEQ ID NO: 37444 - protein, 381 aa, unknown
  TnpB Polypeptide
MQDQTNTVRLTYKYRLYPTKEQDTFLEGQLSEACDLYNCALQERIGAWKTCRKSISFYDQVNQLKEMRSENCLSIVNFSCAQNVLWRLDRAFNRFFCGINSRTKCGYPRFRSLNRYDSITYPRPDSGWKLIGNSKIKIQGAGHIKLNLHRPIVGNIRTVTIKREAGKWYVFFSVQKEAAYLANTEKEIGIDMGIEQFSVRSDGTSTPNPQWYRKSHHKLRRCQRKVARRKKGSKRRRKAVLLLQRAHAHVKNQRSDFHHKVSDNLVNNYGMIAVEDLNVKGLAASILAKSVNDAGWSQFLRFLAYKAEYAGRRLVKVDPRGTSQTCVCGARVTKTLRDRWHNCPECGLCGSRDHVSAQVILQRARSAPSGDNAEVVDSYVA

SEQ ID NO: 37445 - protein, 270 aa, unknown
  TnpB Polypeptide
LSDPSWGLGSLTVTPDRIIVVVRKEAPGPYEPEAAIALDTNEASLDGVSAGSEDAVLVTVPFPEVRVVQATHFRRRRRLVRKKAHDRRVMRTLLRREGRREHRRIRQRLHLPSKGLVAAAKERRAAIALEDLRLPQGGGRGPRMRRRLSSWPRGELHRQIEYKALAAGVPVIKVHPAWTSKTCPACGARRRDRVGQDFVCLMCDWELDRQHNAGLNILKSALASNEALARGVRFHLGALRKDVVIPLYDLPARAGAREEPSGAESLAGVA

SEQ ID NO: 37446 - protein, 377 aa, unknown
  TnpB Polypeptide
MDICMQRTIRIQLQPDIETAKVLSQTIEQYTLSFNAVCKYGWENDLANGVELHKATYYDHRAMTGLPSQLVCAARVKATEALKSAKALKKKGKKVGCPTSKRCPIRYDMRSYTVWFDRSELTILSLNGRVKLSFEIAEYYRQYLSWKNTSADLLQDRKGRWWLHVVMEIETPLASVSDEFVGVDLGIATPAVDSRGNKYGSDHWKGVEDRTFELRRRLQSKGTKSAKRHLRKVSGRQKGFRKDCDHVLSKRLARSVSSGATLVFEDLTNIRGRAKMRKVQRRRLHGWSFFQFQTFVTYKAEARGVNVGFVDPRYTSQKCSQCGHIERGNRPSQAEFRCKKCGFECHADYNAAINIREDFLKLRAAVNPPIALRSLDG

SEQ ID NO: 37447 - protein, 256 aa, unknown
  TnpB Polypeptide
VVRLRRRSGQSTRLSERKLLRRPRPSRPRRTPAFHCDVEAERHQTRHHKQPCSPLKRCEPQKHPRAWEYILVEYETRPGVTVENLQQVRAVYDSTKERWELHLVCKDEIETPNAPGNETAGVDLDQQLRRRRLQHRRRRPIPRQPSEARRLLLPKEIAKCDDSGGDRATRLHHKWAERRTHFFHSLAKHIVERCVEKEVGRINVGDLEGVREDENGSSKNWGKHGNLDLHGWAFDRFQLDSRIQGESRGNRGLGSV

SEQ ID NO: 37448 - protein, 413 aa, Sutterellaceae sp.
MKKVTKCAPQYALTDLGMAFEHLFDNPGDFKYPNFKKKGSKRDSFRLDNCQFKVENNRIRVPHVGWVRMHERLRFRGAKLLWATISRQADGWYVSIQLELHDLDHLSPAKNQGRIGVDLGVLNFATLSNGLVFEGPKPLKKYSEKLAKLQRKFSRTEKNSHNRAKLRIKIARLYEKISNIRLDAIHKLTAFLTANYSEVCIEDLSVKGMMRNHHLARAISDMGFREFRRQMEYKMKQRGGRLIIASRWFPSSKMCRFCGLTNKALKLKHRLWVCPHCGRIIVDRDVNAAINLCNYIDRVDKSDSCSDSGRAAASSQKGNAVSSESYPDVCPAGEDPSRLKAAAERQGCQSTMQTCRKTLAGNDAADPGENSKAFYYGVGSDDWGSQRNSLPGSFGAEVVSKQTVNVQVCSEAQ

SEQ ID NO: 37449 - protein, 477 aa, Streptomyces sp.
VTPKKKPKTRAATWWDHAGPLTVVFTGGADSHQGDLVLPVRLPSGSGRWPRLPHFLGDPGTRHKIDLVRRRDASAPGGWAYEAHVTVLCVGYASAQTRARRAAAAGLDRVGGVDGNVSNLSIVSFPSTFDPSHGDVEATRVELTDDELAALAKAHRKTRGRNRALNRSRRASNPDQYRPSKRQQTRAERRAAADLPARTLQLPSGARKANKAGAPKQAYRRDRLSAGYHLKRAQLAEAAATEAEAKDHRARRTAERIVTRHGANLIVEDCDIRTWYRLWGKTLQATTPGRLVTAIARECEKTGGRMRRASTFTTKLSQACFCGARVAKTLADRIHHCTSCGLNGNRDMVSAALAAHVQLENPDDPTTARLDIVQARQTHSLFQKGLQEALSSQPQRGAHPTRGCTRAAAPSRKPPAEVLCSTQRHQPVPDKPRMRPDPRTSGTRPTSEQPAVRTTHHPGAPDPHRHRTDITELRDDS

SEQ ID NO: 37450 - protein, 717 aa, Streptomyces sp.
VGTFVSSLLDAVPASDAAAVRRFRGKNKGERLKRGEDSELAVIRLPLDVHRLDDLQRVENLYSAMWSVKRALQRDARAAVDAYWAGDMRREADAKAWRQALGLSREGMERRAYQHMERSKHLSHHVTKALVMHQADEVWEGIARHLFLDATGRRFGRPKTGRWWDYTRIPGRARSHTTARKWETFRLHGTLAGHLAAYRHRGLSLAVTTPEHAAALPTGTSVLEQPRRLPIPDRPFGRVPTGEATSKGAPKTRAATWWDYTGSLALVFTGGADSQRGDLVLPVRLPSGAGRWPRLLHFLNGPDTWHKVDLVRRRDTSAPGGWAYEAHLMVLADGYASPGTRGRRKAAAELARVGGIDGNVSNLSVVSFPNTFDPADGEIQTSRVGLSDDERAALAKAQRKERGRKRALDRSRRATNPDQYGMSKRQQARAERRGAAGLPARQAEVPGGARAVNTAGIPKQAYRHDALSAGYRLNQAKLAEAAATLAAAKDHRARRIAAHIITDHGANLTVEDCDIRTWHRLWGKALQATTPGRLITAISRECEKTGGRLLRASTSTTKLSQTCLCGAQATKALADRVHRCTSCGLVADRDMVSGALAAHVRLTNPDDPKTAGLDIVQARMTQIVFAEGLQEALSGQPQRGARPRRGRTPAAAQRPVPGQRASARQNTTDRYRPAPNETRPALMRHKAHVGTAASVGNAPPTDGAPEQELIGRHPITG

SEQ ID NO: 37451 - protein, 451 aa, Streptomyces sp.
MVIAVSELGLVKRQFGHRARLALSTAEIRLLDDQAHAARTMWNCLHSWWTMLPKGERTLAAADEAIRQGRKDLDYLGKLPAQAAQAVLKTYFQSWKNCWEGRAGEPNYKGRFRSAMSVDIPQGRDLNIVRVHRRWGMVNIPKVGRVRFRWTMDLPVGKKATKENRITGARLVRDALGWHIAFRVQTLEARPEPRQGPEVGIDAGVNVPLALSNEDHQDHGRPPRLPDGTADRDKWLTHKEKAKLLTLERQAAHQKSFRKKGEKTSRRLQHTYDQIKRLRAKATRRALDWQHQTTTYLARTYGTVVVEQLNILGMTKAPKPKPDPDNEGNYLRNGAKAKAGTNRSITQEAWGRTVMMLTYKLARRGGELVKVPAPYTSQRCSACGFITPGSRETQELFACKNTECGWTGNADWNAARNILHLYRIGHIIMEIPAAGRRGRKAGKSVKPVAER

SEQ ID NO: 37452 - protein, 398 aa, unknown
  TnpB Polypeptide
MDHRVVEIAWKPRSERAWTIFSSARLEAGRLWRDLVTRHHRIRRLRWTWPSKSRWFTWAKGKYPHLSAQSTQQIIADFVDALVATTARRKQGHDAHYPWKTPKHRDVVYSNQDAKVKEGFLRLPHGKRGLGTLKVKIPATLTLPGRIMEVTLGFGVVRIVCETAEAPLVGGDVVVGCDLGVNTLIAATDGVTAVVVSGRAAKATVQYRAKQLAEIAALQAGKAKSSRRHRKLQRRKYQMLGKTANRIKDLCHKATRQVVDAFPRARMIVGEPFNDAAQRVGRRQAQQVSSVCGRKIIGLLDDKAKGATVVPEPFSSQTCPVCGCRQKCRRVYRCKDCGFEAARDVVGALNIRQIGRVGELRPIPGLVAPRVTFRHPSKYPGSRQVVPAEPRHVAQTRK

SEQ ID NO: 37453 - protein, 424 aa, unknown
  TnpB Polypeptide
MLAGRRYRLYLTPGQAEQATRASGCCRAIWNAALKQRELAWELRRERVWAIAQMAELPELKRAAGFEWLARDGIAQSLQQSLRDLDVAYRRWLAGRGGRPRFKAKGRRESFRLPQGRDLSVRKVNRRWAEVRVLKLGWCRFRLTRPIGGEIRHATVSRDALGWQISFCVALEQPPAKPNGGPPVGVDRGVAATVALSTGELHSCPGLPSGQAQRLRRLCRKAGRRETLRRRRPNGHRRRSRRHQRTLDQIARLKARDARIRADFLHKLSTRLASAHGLIAIEHLRVGNMTRSAKGTLAQPGVNVAQKRALNRRILAQGWGELRRELRYKAAWHGSVLVEVPAEHSSQTCSACGVVHADSRKSQAEFRCVACGHQQHADVNAARVILARAVNGQEDGGRIWPLQRGEPSRRRPGPRTANPRWRAA

SEQ ID NO: 37454 - protein, 461 aa, unknown
  TnpB Polypeptide
MKVTRILNSKNLNQGKYRKLKEQAERLGKIRSEVWHSFGSVKGVAIKSDRQIRDSWLQEKRQFPVSANSWKETLRDSFKDIKAYLESAKEKTRKTLYRKVSDNKQRTQLYKELKSNTWTSNNYLRRLMRKNWRHGRNHTQNQIIVRSDNYITFQLGGRAWIKIPGLEKGKRIVIPLDSTVEPTGTLRIILSDGQIEVHYTIDIKETKTCGKATIGIDKGYTEVFVDSNGEHYGHGLGELLSQHSDNLKKKYQARNKLRAIAESKPHKKKNIIKNNLNRKKLNRLNIKVKAQIRDKIFQATHKLIDQAEVIATEDLTSPIASKRFGKNVTRRLSAWTKGVIANAIETISRRRGSSVILVNSAYTSQMDSRHGALLGKRSGDSFYCFDGVVLQADENAARNVLARLCDQEIDRWMPFQKVKSILQKRTERLRLGLLNQDSSCNSEELSTESELPKNVQLCPSF

SEQ ID NO: 37455 - protein, 427 aa, Escherichia sp.
MHQENTMLPRRISVSLFIDQSIIWPVKRLQAFKFQLRPGGQQEREMRRFAGACRFVFNRALALQNENHEAGNKYTPYGKMASWLVEWKNATETQWLKDSPSQPLQQSLKGLERAYKNFFRKRAAFPRFKKRGQNDAFRYPQGVKLDQENSRIFLPKLGWMRYRNSRQVTGVVKNVTVSQSCGKWYISIQTESEVSTPVHPSASMIGLDAGVAKLATLSDGTVFEPVNSFQKNQKTLARLQRQLSRKVKFSNNWQKQKRKIQRLHSCIANIRRDYLHKVTTTVSKNHAMIVIEDLKVSNMSKSAAGTVSLPGRNVRAKSGLNRSILDQGWYEIRRQLAYKQLWRGGQVLAVPPAYTSQRCVCCGHTAKENRLSQSKFRCQVCGYTANADVNGARNILAAGHAVLACGEMVQSGRSLKQEPTEMIQATA

SEQ ID NO: 37456 - protein, 414 aa, unknown
  TnpB Polypeptide
MNLLMRVLATARVEAVAPEGGEALLTQFLKLYRDAVQYIVDGIWFLDDVPSEEKLHKMFYSELRRLCFRAHHVSEIYKRAREVVEATKKNRGSKPILKKLTARIHPLDYKIDFNAKVLRVAVLNDEWVELKLKWYKHLDTYLDGSWKPGEILISYRNNKIFVYITFHKDVELTTPRAVMGIDINFSNITYTVIDLNGSLVSIGVIPFKGLERALHLKKLAEDLQKRYPNSWRFMKWVGRVRGRWLSKARNILMDSAHKLSKRLAEIAKEYSALIVFEDLDKLKENSNNNHKLSWEKSLWCYKRIQMFTEYKAMVYGIKTVYVNPAKTSRKSPNGKKLRFINYRYVELGGVVTSRDVIASWNIALRGLKKLKRMRGSRVVLSPDSPADEGMRTRPNAGNPEARKMYLQLTTAIRR

SEQ ID NO: 37457 - protein, 385 aa, Bacillus sp.
MKRAYLIEVKPTNEQITKINQTLGVCRYVYNLYISKNKERYESKGKFLNGYDFSKWLNNVYTKECDQWIKEISSKAVKQAIMDGDKAFKRFFKGLSGFPRYKKKKNQDVKCYFPKNNKTDWTIERHRVKVPTIGWVRLKEYGYIPKNGIIKSGTISKRAGRYFVSVLCEVEKTATKPTHNKTGLGIDLGLKDFATRSDGIVHENINKTINVKKIEKRLKREQRSLSRKFEHVKKRGEKSVTNKRANIDKNILRVQKLHARLANIRLEYVKSIVNDVVRTKPTFITVEDLNVKGMMKNRHLSKTIAKQCFYTFKTWLLIKCTEYGIELRQVDRFYPSSKLCSCCSQKKADLKLSNRVYTCECGNVMDRDLNASINLLQAKKYTILT

SEQ ID NO: 37458 - protein, 276 aa, unknown
  TnpB Polypeptide
LGKRRHKLGKGIIGADIGTQTIAYTSDTEVDLKNLAERGNSIQKSERLERLYYRAMDRSRRTTNPQNYNEDGTIKKSRKTWQYSNRYKKLRTKHQELCRINAINRQLAINEDANHLRSLGDIFVTEPKNASKLMKRTKETTVNSKGKFNKKKRFGKSIKNRCPSGFQATIEKKFKVTCGTYIEVPNNYRASQYDHTADDYIKKKLSDRMYRLTDGTLVQRDWYSSFLLYCYDHKTKNIDRDRCISEFKKCYSKEKALVERIKANKIKVLNSGIKIA

SEQ ID NO: 37459 - protein, 457 aa, unknown
  TnpB Polypeptide
MKVTRILKSKKLNQGKYEQLEEQAKRLGKVRSEVWYSFGSIGGVSIKSDRKIRDQWLKEKRQFNVSANAWKETLRDSFGDIKANRESAKEKVRKVLYRKVSNNEKRTKLYKKLKSDEWTSDNYLRRLMRKYWKHGRNHTENQIIVRSDNYTTFQLGGRAWLKIPSLQKGKRITIPLNTTVEPTGTLRLILKEGQIEVHYTIDIFDPKTCGQATLGVDKGYTEVFVDSEGKHYGEGLGKILTKHSDQLKKKYQARNKLSAIANKKPHKKTNIIENNLGRKKLNRQNESVQSQIKDKIYQATHKLVDKAEVIAAEDLTSPIASKKFGKNVTRRLSAWTKGVIANALDTISRRRGSSVILVNSAYTSQMDSRHGVLMGKRNGDSFYCFDKVVLQADENAARNVLARLHDQEIDRWTPFQKVKSILLKRTERLRLGLLNQDSSCNSSGLSTESELPMNRFE

SEQ ID NO: 37460 - protein, 396 aa, unknown
  TnpB Polypeptide
  misc_feature (371)..(373): Xaa can be any naturally occurring amino acid
MVELKTYKYKLYNRDALKYLDNIIAIAGRIYNHCIALHRRYYGLHHKMLNKYHLQKHLTKLKRQYPEWNEVPSQAIQDITDRIDRAYRLFFSNLKAGKKTNPPRFQKTAKYHSFTTKQAGYKFHGLNRVKIGKKDFSYWNSRDFDGKVKTLTVKHKSNGFYIYIVVEQECTQTEWTKSGEIVGFDFSLCDFLVSSNGDDCSMPKILRKNLNSLRNLSEKYRKSKGKRGSLRTLQKLHEKVANQRSDMHWKLARRFCRDYDVMVFETLDLANLSRKYKKSMYDFGFTAFLSILEYVAHKAGKTVMYADKWYPSSQLCSECGYQNPELKNVSIRHWICPSCGAKHDRDMNAAINLCKVGASTFGTRCPSVTTXXXHQGLDDAITQGVRVTNASVITDK

SEQ ID NO: 37461 - protein, 529 aa, Cyanobacteria sp.
  misc_feature (435)..(521): Xaa can be any naturally occurring amino acid
VLHKAVKVRLYPTLEQQQLLAQHFGCARWWWNYALNKSIETYKETGKSLGQTALNAFLPQLKKTEETQWLRECYSQVLQAVTLNLTTAYKNFFAGRARFPRFKSKHGKQSIQYPQNVKVISKALKLPGKLGVVKAKIHRPIEGMIKTVTVSLEPSGKYFASILTVSEAGGQGPTVDSAALATLGASGDNPEPSTEGKVIGIDLGLTHFAITSDGTGKISKYDNPRHFAKHEKNLKRKQQKISKKQKGSNSRNKYKKLVARVYGRVSNSRQDFLHKLSRKIVNENQVVVVENLHVKGMVRNHNLAKAISDAGWGMFTNFLAYKVEKKGGKLVEIDRWFPSSKLCSNCYYQINELPLDVREWTCPHCGTHHDRDGNAATNIRAEGIRMLQTDGTAVSANGGEVRLKLGRKSVLIAKRASVPARRHSPMMLEAYTIVXXXXXXXXXXXXXXXXXXXXXXXXXXXXXXXXXXXXXXXXXXXXXXXXXXXXXXXXXXXXXXXXXXXXXXXXXXXXXXXXXXXXXXXDLVWVVHG

SEQ ID NO: 37462 - protein, 411 aa, Cyanobacteria sp.
VLHKAVKVRLYPTLEQQQLLAQHFGCARWWWNYALNKSIETYKETGKSLGQTALNAFLPQLKKTEETQWLRECYSQVLQAVTLNLTTAYKNFFAGRARFPRFKSKHGKQSIQYPQNVKVISKALKLPGKLGVVKAKIHRPIEGMIKTVTVSLEPSGKYFASILTVSEAGGQGPTVDSAALATLGASGDNPEPSTEGKVIGIDLGLTHFAITSDGTGKISKYDNPRHFAKHEKNLKRKQQKISKKQKGSNSRNKYKKLVARVYGRVSNSRQDFLHKLSRKIVNENQVVVVENLHVKGMVRNHNLAKAISDAGWGMFTNFLAYKVEKKGGKLVEIDRWFPSSKLCSNCYYQINELPLDVREWTCPHCGTHHDRDGNAATNIRAEGIRMLQTDGTAVSANGGEVRLKLGRKSVL

SEQ ID NO: 37463 - protein, 467 aa, Veillonellaceae sp.
LQSRTSSRKHSQAARNPSASRAAAALCCPKCTKACAVSGSGKKPVPPHALRNEPLVYNGKLLTCKSLVIEGDIRMLKSYKTEILLTTEQRGKICRSIGICRWLYNEYIARNKRLYHLYQRGCLDGHQKHFLTAMDFDKFVNHHLKNMDELTWINECGSKARKKVITNAETAFQKFFHGKTGFPKFKKKNRQSVSIYFPKNNRGDWTIERHRIQIPTIGKVRLKEFGYLPAGAIVKSGVISQKADRFYVSVVIDVPVPEYASPEGESLGIDLGLKDFAILSDGTKFKNINKTVAVRRLERKIRREQRRLSRKLECKKKKGSDKLVTSFANISKNVLKVQKLHHRLFSIRTNYTNQVIYAILKREPSFITIEDLNVIGMMKNKHLAKAVAACKFYEFRTKLTAKCHERGIELRIVDRFYPSSKMCHNCGHVKRDLKLSNRMYACACGYVADRDQNAAMNLRDAKEYKIA

SEQ ID NO: 37464 - protein, 197 aa, Streptomyces sp.
RRRARVKVPGCGWVRFRLSAEGKGAQLPDAKTFRVTFRNGQWHIAFAVMPEPTPAPGTGEVIGIDRGVTITAALSDGRKLNCPQLTVKERARIRKYERRAARAKKDSPEKAAAYAKVAKLKAREANRRKDWCEKTSTMLARSYGLVRFEKLHIKNMTRSAKGTVEQSGKNVAQKAGLNRAVLAQGWGLLRRRTEHKA

SEQ ID NO: 37465 - protein, 416 aa, Oscillatoriales sp.
VFGCQQILLKPDKELKAVLEYICHESNKLHNCAVYYARQIYFKAHRYVRPFDVINELKRNPHYGALCAQSAQQTCGAVGESVKSFKGLNKLFQEGKLENKPKFPGYRTPGGLHLIAYPRQALGKKLIDGQVLIPLGLKVKTWFGLKNFQIPMPSNLNYTDIREIRILPRNRCFYAEFVYKTEVAYSDVNTEKVLGIDHGIDNWLTCVSNSGTSFIVDGKRLKSVNQWYNKRVATLMEGKDNGFWSHQLARSTEKRNRQMRDAVNKAARLVIDRCIKNRIGVIVFGWNKGQKNCASMGKKTNQKFVQIPTARLKTRIAQLCEQYGIKFVETEESYTSKASFVDRDFLPAIGEKPEGWKETGRRVKRGLYRTGAKNWYINADCNGAANIIRKVATMLGLDLDGVGRGVLTAPLRISIW

SEQ ID NO: 37466 - protein, 351 aa, unknown
  TnpB Polypeptide
MGNDNFHSFRKECTHSVISDNSEESSDEGYFIRTTEYALYPNREQERKLLLFLEVCREVYNRLWKVCKFLLERNLGLPNDIYLMKVARGIWNHNEWMKPIYQNCLNDVAKRVHKAFKSFLKGRKEGRNVGYPRYKSKNRYDSFTYPHPQGYYFVSKDGKKGGFDRIRLGKIGNIRFGNRFRIPGIMKTATISRTRVGKEYRWKICIVWMVNKFTEHQTSLDFEDTYSKPIGMDLGLRSLAAFSDGTVIPNDNTYRRKESELAKIQRKLSKAIEDNPDYKKSDDYYRMRARLTHRFRKLKNHRKDLYHKTTREITYNHGDIYAESLNVKELSEETESKTMKKQFRDAAWSTF

SEQ ID NO: 37467 - protein, 371 aa, unknown
  TnpB Polypeptide
MFIKNLYSLKTIKRSITVRSPINVIKFNELKQFLTDYSECLQYSIDRLWSRKSDSKRFIEYYKEPLVKQRFNKLTTRLLQCAGKQASGIIRGHVETEHKGKPDVRNLVAVLDQRFVTFQPEFNSFHWLRIHSGNYEFFVPYKHNEKLFNKFPNNGYALKKTIRLRIVRDELFIDFIFEKPTQILKTEGKTIDIDLGYVNLTTCSDGTMVGKRMNDVIKTLNKRKKNTHETITNYSYSELKKINYNEIKMIVIENLHSGKHGKRGMFPRKHNRRLSHWQYAKVRTWLEQRCEETGIRLRVVSPAYTSQYCRKCNKWDRRNRRGEKFKCIHCRYETHADYNASLNLELLGLAGVYSLRLLQKLIISGQMNICL

SEQ ID NO: 37468 - protein, 372 aa, unknown
  TnpB Polypeptide
  misc_feature (47)..(123): Xaa can be any naturally occurring amino acid
VANRAYKFRIYPNDEQKILFAKTFGCVRMVYNHWLDRKIRQYEENKXXXXXXXXXXXXXXXXXXXXXXXXXXXXXXXXXXXXXXXXXXXXXXXXXXXXXXXXXXXXXXXXXXXXXXXXXXXXXLSNGYLKLPKIGQVRLKQHRIIPEEYSLRSVTVSQTPSGKYYASILFEYEDQVQEKELQKFLGLDFSMHELYRDSNGKEPAYPGYYRNAEKKLAREQRKLSKMQKGSNNCNKQRLKVAKLHEKVSNQRKDFLHKQSRQITNAYDCVCIEDLDMKAMSRSLNFGKTVSDNGWGMFTTFLKYKLEEQGKKLVKVGRFFASSQTCSVCGYKNAKTKNLALREWDCPQCGTHHDRDVNAAINIRNEGMRLVIA

SEQ ID NO: 37469 - protein, 435 aa, Richelia sp.
MYGCQQVLIKASKQLEGYLEYVCSEAKKLSNCGIYYSRQLFFKTGKIPSRADLHKELGTISRNPHYHALYSDTAQQILTTVAESFKSYKTLLKAYGQGKVENRPKLPKYLKGRSGLAVATFTGRSVKLKGKNKGFEHLKGIRLPLGKKVKAWFGLSEFYIPFPSNLSIDDIREVRILPRNNCFYALYVYKFKPSSVPLDDSKALGIDPGVSNWLTCVSNFGTSFIIDGKHLKSVNQWYNKSVALYKKDKPQGFWNQRLAGITEKRNRLMRDAVNKAARIVINYCIENNTGQVVFGWNNFVKHNSQLSKQNNQSFVQIPTSRLKERIKQLCEQYGIRFTQTEESYTSQSSFINDDFIPTFGEDNKPKGWKPSGKRIKRGLYKTDCGFVCNSDCNGAANILKKVATTLNLKLSGVSRGSLSNPCRVHFWTKAKSPVL

SEQ ID NO: 37470 - protein, 427 aa, unknown
  TnpB Polypeptide
MQLTERHLIKPSHKLYQTLDDLTFKAKNLYNHGLYLYRQSYFEYKKNPETQILSWIDIDRNLRQEGHEDIRALPSKVANAVLKNLGEAISSYWKLVNLKRNGDLNQKPKLPHYLHKTNGRYPLSFNYQTFGKTRGSNQELILCPKGLCIPIPTKVEHPKQVRIVPRHGNFIIEVVYEVEEPTTNTTSKYAGIDLGVDNFATVTFSTRNQPLIIKGLELKSINQGYNRLIAKAQSLLPESQKTSKSIHRLWSRRSWILHSKIHQITAFLTALFDEMQIETVFVGKNKNWKQELPFGKVVKQRFAYLPYEIFIAQLRYKCQLRGISVITQEESYTSKASFLDGDEIPVYGEVENPRFSGRRIKRGLYRSGNDQLINADVNGSYNIMKKGLLSRHQLLHIDNPIIQPLVVKGIGQETNKNLVRLYVTPNV

SEQ ID NO: 37471 - protein, 390 aa, Enterococcus sp.
MWKNKEQDIEFTLRRCTEMKKAHKIRIYPNNRQQIQFQKTFGCVRFYWNFLLDQRITNYKMKKENADYQENKTTYATLKKMEEFSWLKEVEAQPLSQVAMDLNKAYKNTFKSNFGFPKFKSKKYSKKSYRTAMGIKVNGNYFYVSKVGWVKMAETLRFNGKLMNITISQSKSGKYFATFLVDTENFIKEPVTQSIGLDLGLTHFCITSAGEKIDNPRFYRSLEQRLIREQRKLSKRLEVAKKHNRKLDECRNYQKQKVKVARIHEKISNQRTDFLHKLSSRLTDENQIICIEDLNVKGLVKNHKLAKSIADVSWSEFVRQLDYKCQWKGRTLIKIDRFFPSSQICSVCGHNDGKKELNVRGWICSNCGIIHDRDINASINIKTEGLSGIA

SEQ ID NO: 37472 - protein, 374 aa, Leptolyngbya sp.
MKTLKFKLYQHKRNRYLKQDINIAANIYNHCIALHKRYYRMWKKHLNCAKLQSHIAKLRKRKSHWQRIGSQAVQDICQRIEKAYQLFFKHHKKGVKPPGFKKAKKYKSFTLKQAGYKFLGGNRIKIGSRVFQYWNSREIEGEVKTLTIKRTPLGELFMVVVVDSVAEPETQFETGNIAGFDFGLKTFLTCSEGFKIESPLFFKQGLNAIRKACKQLSRKQKGSKQREKARKHLVRQYEKIANQRRDWFWQLAHELTNQFDVLYFETLNLKGMQRLWGRKIQDLALREFLSILEWVAQKKGKLVEYRDPWFPSSKMCSKCGHVLESLDLKTREWRCPECNTLHDRDESAAKNIKMGEKPSIGLGDVRQAQPAISA

SEQ ID NO: 37473 - protein, 395 aa, unknown
  TnpB Polypeptide
MMLNWLEQCRRVYNYALAERKDWINSRTCAINACSIHSEYIIAADTLYPNYYTQKRNLTQARNEIPELKAVHSQVLQDVLGGLEKSFCFMQERGFGFPRFKKFGQYRSFLFPQFTDNPITGHQIKLPKIGMVLINFHRPIPEGFAVKQVRIVRKASGWYAIVLLQTNVSIPDIIPQGNSIGIELGLKKFLAVSMGKLVEHPRCFLNLQSKLKWLQRKLKNKQCGSHNYRKQQHKIAKLHEHIHNLRREFQFDIAHQLCNGVGMIFAQDSNPKVNSYGMQPNQFLEILQWVCFKRGVFFLKVDSKQTSQICPNCGARSGKKHSQNLRTDRKETEFFNINSTWKREFLVNEFDFYCSECGYTTDRDVAAAQVVEQRGLAAVGYMVKVPVEASASALR

SEQ ID NO: 37474 - protein, 363 aa, Brevibacillus sp.
MHRAYKFRLYPSREQATLINKIIGCTRFVFNHFLVKRKEAYEQEKKTLNYNDCSALLTQLKKEIEWLREVDSTALQSTLKDLDSSYNKFFKEKKGYPKFKSKKNPKQSYTCKMNIKVEGNRIKLPKLGWVSFAKSREVEGRILSATIKRHPSGKYFVSVLCETEIQPLPEIEQTVGVDLGIKDFTILSTGEKVDNPKYYRKYEKQLAKWQRVHSRRQKGSKNRDKARIKVSRLHEKITNTRNDFLHKLSTKLVNENQVICLEDLQVENMVKNHKLAKSIADASWSMFRTMLEYKAQWYGRTISIVGKHFPSSQLCSTPNCGYRNKDVKNLNLRQWTCPNCGVQHDRDQNAAFNIEQEGLRLLA

SEQ ID NO: 37475 - protein, 436 aa, unknown
  TnpB Polypeptide
MRRTNVVKLAVDKKTHEKLKELGIITAKCWNEVNWLRMQQFKKGERIDFVKTEKEVYEKYKHVLKVNAQQVARKNAEGWRGFFSLIKEKREGKLPKWFKPRPPGYWKDKNGRCKLTILVRNDRYEVDEGKRVIYLKDFQLALRFKGKLKWHGKRGRLEIIYDDARRCWYAHIPVEVENEVKVEGGLRASVDLGIVNLATVYVEDGDWYIFKGGGVLSQYECYSKRISRVQKLLARHKQRGSRKLKLLYDKRRRFLRHALNCMVRRIMSDLKEKGVGEVVIGYPKDISRKHGNKLTTNFWNYGYVIKRFEDVGEELGIKIVKVGEGYSSKKCSLCGEAHEGGRIKRGLYKCPRIGKVINADLNGAMNILHIPESLGAADGGLSAARDRGNGLKTQPAVYRWTSGAGWVLDAPTSREAVRMKAVNHEPMIRPKGTPAL

SEQ ID NO: 37476 - protein, 275 aa, Verrucomicrobia sp.
VPGFVFNEALSLQMARYDAGEKKLSYAGLCKELTKWRNGEPMPSGRVAAWLADAPVHPLQQALKDLERAYGNFFAKRADFPRFKKKGQSDRFRYPDPKQIKLDQANGRLFLPKLGWLRYRLSRDVLGEVRSVTVSQSCGKWHASILAEREVEQPIPKGGAVGIDMGVARFATLSDGTFYAPLNSFKRHETALRKAQQAMSRKVKFSNNWKKAKARIQKIHSRIGNARRDYLHKVTTTISKTTRWRALRTCRCGTCPSRLRARRMHREETFGPSLD

SEQ ID NO: 37477 - protein, 513 aa, Verrucomicrobia sp.
LDVRGHRRPGFGHELSQEGPQAAAGRCGGRPHRAASHHAQGSATALRRGTGVRHLRGQGRRGRHPQPRGRHDVRGRSGERCVGDHHGVQRPAVRQPFAQESEAARRGESRRGGVAMLIAHRIALDPNNVQATYLARAAGTARFAYNWALAEWKRQYEAWKADNSLPKPSQAALRRQLNAVKREQFPWMLEVTKNAPQMAIIQLGQAFQNFFAGRARYPQFRKKGRDDRFTLTNDQFSLDGCRIRIPNLGWVRMRESLRFTGKIMSATVSRVADRWFVSIAVDTQDDSHLPKAESQGVVGVDLGVSALATLSTGEKVPGPKPHKARLGRLRRLSRSLSRKRKGSANRRKAKEKLARLHARIANGRLDALHKLTTGLTRRFSLIGVEGLNVRGMMGNRRLARSISDMGFFEFRRQLEYKAAMRGGEVVVADRFFSSSKTCSHCGHPLESLPLSVRQWTCPACGAEHDRDVNAAMNLKNVAVSSTVSACGEEGSGSARKRRVKPASAKQEVSFVPV

SEQ ID NO: 37478 - protein, 520 aa, Verrucomicrobia sp.
MARTKPEHPPVHRTDLLPSNLTASKEAAVRALLRAYRRGAVLLGREEWRLFFETGRFEKNHDLDKVTFAAVIGAANRVQMARWQVVGQLQGWIRNRANEFRDMVNHSTLTPATKQMLHAINGLGAWFRRGEVARRETGEVIPVSVRRLARAMMRHCMARHRRPDLSRISMRLDHRAGSIARPVKATQGGRVGWWVSLSTLEKGRKIAIPLLTYDYHAKRPGRVTNGIQVNEREGRLSFGVVTDMGEVCAKSRAAYDGHGALALDFGLSTLLATSDGRLLGQGWLKRLKRYDALLALIAASQQRAGRRPRESKRYRALVEDVRGFLRTEVGRVLNRLVEQGKPKELVLERLDFRHSDLSKRLNAILRNCGRSIVQEKLRDLEERFGIPSAEVNAAYTSQACSGCGYVDKRNRRDQKTFVCLWCGHQMHADLNAASNIEARRARPNGWLFQGKAAVLAELVREFGERPVRALGLGRTGSRGAPADPRSTNPYFGGVPLPVVRSSERREASMKSPDTPALVAA

SEQ ID NO: 37479 - protein, 370 aa, Methanohalophilus sp.
MLRAYKYRMYPDKNQIEMFHKHFGACRYIYNWALENKMKSYEQEGKSISRFELNGKIRMLKKEFEWLKEVNSQSLQGATLNLDNAFTKFFREKKGFPKFKSKKNPVQSFSVPQHHQIDFEKNKVKLPKIGWVKTKLHRNFEGDLKTATVSKTSSGKYFISILVDDGKELPDKQVFDIDTTIGVDVGIKDFAIMSNGEKIENPKHLKNSIKRLNVLQQRLSRKKKGSANRQKAKLAVAKLHEKISNQRNDFQHKLTSRLISENQAIALETLNVSGMLKNHCLAQSISDVSWSSFVTKLEYKAEWHGKSILRIGQFEPSTKICNVCGYHNKKITLAERQWQCPDCGASHDRDVNAAINIKKFALNKQNLIGI

SEQ ID NO: 37480 - protein, 363 aa, unknown
  TnpB Polypeptide
MKQQISVIGKVVGLTKIKESILKGEYDRFNQICRQVQQCRNNDIEPKYIWFKDHNTHACYASDAIRSIKTQFANLSEQPLYLRNDVSRIAIRDTKLAKFWLKIPTMQRRQFWVAIKVAKEKEDLLGYKFCDSKIIKRKNGWFAHITIEKEIIIKTNYKDVLGIDLGSRRVASVVHLSDGIPIYYGKEIRQIRGHYFHLRKSLGIKKANKTIRKIADTEKRKVNDQLHKISRKIVNQALETNSLIVLGDLKGIRTKKEHGRRFNRILSSMPFHKLSNYITYKANWAGIQVITVNEAYTSQTCHKCNEIGIRNRGLFTCKCGYQDNSDRNGAINIALRGLGQASKSGAIVALPITVGGTYGKQIR

SEQ ID NO: 37481 - protein, 348 aa, Okeania sp.
VARFTYNRTVEYLQQPDTKANWKAIKGGILKNLPEWSKPVPYQIKSIAVRDACIAVREAKVKYSQTGQVQQVKFKSRKNPIQSCYIPKSAVSTKGIYHTKLGQIRFTEPIPEGFGDGRIVVQRGQYYLCLSVDLPKYNLENQGRVVALDPGVRNFLTLFSENSFGWIGSGDIGKIQRLCYHLDDLISRLTKAKSKTKQRMKKAANRMRLKIRNLISELHHKVALFLVQNFDVILLPTFEVSQMTTKSSRKLRSKSVRQMLNWAHYRFELFLKHKAAEYNKVVVDVSEAYTSKTVSWTGEILNNLGGKKVVTGNDGFRLERDLNGARGILIKSVVEKFSTTLGDTPSVS

SEQ ID NO: 37482 - protein, 424 aa, Okeania sp.
MYLTQKNKIRNLSSQEFKALKQLCRLSKNMYNVGLYSVRQFYFSEGRYLRYESNYHYCKDNENYQLLQTDIAQQTLKVVDRSFKSFFNFYQKAQESLYPWEQIPIPRYLKKSGYFPLIIPRIKVINGYFNIPMSRKFKAEYGAVKIPFPQRLVGKNLKEVRIIPRYDARFFEVEFITEVEPQKVVKSDNALAIDLGLNNLATCVSNIGSSFILDGRKLKSMNQWYNKENSRLQSLKDKQGIKGLTKKQISITVNRNNKIRDYLNKAARYLINWCRENKIFTIVVGVNHRIKQSINLGKKNNQKFVQIPHNIFRFKLKAMCDRYGLIYTELEESYTSKASFLDRDKIPVYNADNPNEYSFSGQRIQRGLYKTKQGKLINADCNGAANIGVKSNLNGFTPDRLEASLAMPLRVKFDGLSSRQIYSP

SEQ ID NO: 37483 - protein, 156 aa, Okeania sp.
VAFTSLQQSLKDLDQAYKNFFDSCTGKRKGIKVKPAKFKSRKYRQSARFVGANYKVGQDKIYLPKVGKIQIVWLRPLPVTPKSVTIIKDSADRYLTSFVVEINPESLPKTNNFIGVDLGVSKFATLSNGEKINASKQLKKNLKKLSNTKLINICYK

SEQ ID NO: 37484 - protein, 540 aa, unknown
  TnpB Polypeptide
MNNKNNIIYRTYTIHIKDNNQFYKNLIDIGKINKAIFNSIIYFFKQNYFHYQNLIINNQIKDNPIINIKYKDLINFFSDSPKWTIKEQQLYNPMNILPNKDLYQSQNAQVSQQTIISAFETIKSFINLQKQFIKGKLKYRPNLPKYIRNDTYVSTFTNQLCNINYQDINNIYNIKNLKTKIKIIKYKKEKNILIYDQIKKLNLDINKFNKIIVFPKGVLQDFIININHINNLHAFKELRIHFKHNIAIIDVVYEIKFKQKKQRYKYKKRYCGIDLGVNILAASSFSCNIPNLLIKGNEIKAINNKYNYFISKYQSLNMLCGRYKEYIFENETDEYFKNGIEDIIYDTRIKLDNNGNKYIMKSNYNTTKRLHKLWLRRENKIKDLFHKVSKKIVDYCYKHHIDIIIIGRNKNWKIKKKGMKNFVRIPFYKLVQMIKYKAEEKGIRVEEVHERYTSGCSVLDRELPMKKYYNKSRRMTRGLFKNNMGKYIHADINAAYNMILKWKYIKTRNKKWKLFKAIRKLYTGMLLSNYYDMIVIDKVL

SEQ ID NO: 37485 - protein, 512 aa, unknown
  TnpB Polypeptide
MSSVTRTVPLRPFACRETKTAAGVDLHKVLEEARADAELCAVETSKHITVENLEKLPEHDGLKPAGAGRRMGIKLSPGKSVTGRSRFERMIQEYAVTQLRSWSERQKVYTRNGNKYVSHGYRRTNNSNKPAFLKPRLALSATDKQYYVIRQAGSNIELDMVVNKRWVTFKFVSPKRFLEPGVKIIAPTISIDDKNRVMFNWHIEIPTELTEFSDKYVVGVDVGITNHTTAVVRDITTGRVVEASFMNRRVRSLENKIKRAKTQIAALYHQNRLDEVDPHRKALSNRRKELAILIGQEIADFSYRYDNALVAVEDLSHMVNTMKHGRWVRGLIVKRITDMVESNGGRVMTVPAAYTSKKCHQCGESLDMTDYHTPVCTICKVGWDRDENAAANIAGKLKDKHKKACTTRKRHASKKRRKNSKGSLRPLKHPLKNMGPTPKAPQNRPKNRSTHNIHHKYKVMKKREEVYPILCAAGQSPLCGVNVPAVGPGKVSDKKPHDYPTGRHRSDDLCAS

SEQ ID NO: 37486 - protein, 421 aa, Halomonas sp.
MPMRKPPEKGFPGFPRSKAETRNVAVSSTQELFDRQPVASDKTQVTIYDSVTRKRTKLFSITVPYSPASLSKQFVISHQGRSFTFSGSLDDGQTYPDNEALLNDVAYLDDDKLLGYITGLDGGVARPLQACNGTIFDYTPEEKRQLRRHNDRIKRLQAALSGKKRRNGNKSRRCESNNQRHLANQISTLHGKIRRLRRNFAHRVSRNVVETSGEIICVEDLKLKAMTRRAKKKTQGCQTLKNGARAKSGLNRSLNNVGLGQIYTLIKYKANARNKAFLKINPAYTSKECHACGSRNTERPTQAGFHCLACGLKANADENAARNIAKRGVRDIKSGAFAAKAKPRKTIARRRKKHLESDLPLVGERPSGKKSESREDGLASLAASHVSMVETSGISPETSGSLHLPHTEAATLSTTKVDPSG

SEQ ID NO: 37487 - protein, 349 aa, Desulfotomaculum sp.
LKKLRKAWNSFFACLRLWKEGKLEKRPGLPRYWKHRRTGKRLVRLIPVKSPRSYSLDARTLSLTLPKDLRDGNGRLVLYTKGVLRFSGTPKTLELKYDQMKRRWYAHQVVEVPEPARKTRPEKYAALDLGARVLAALAVEGLNRQILFSGRKIWKDFLYWTKRIAEEQSRLNRAGRKTSRQLRRLYQVRARRLRHAFVALAAEVVRVLKRHRVTTLFLEDLTGIRKDMDFGPGNLLVHNFWAFRMLRNLIEAACARAGIRVVPVEPRGTSSRCAVCSSPVERPVRHKVVCKRCGRVWHSDVNAALNILLLGSSKGHGAEAAPVDFQIDSGKIFKLNWGNQLVEQRKFSF

SEQ ID NO: 37488 - protein, 368 aa, unknown
  TnpB Polypeptide
MAQIVKRAYKYRFYPTPEQAEELLRTFGCVRLVYNKALEERTRAYTQEGRRVSYVETSTALTQWKKTPELAFLNEVSSVPLQQALRHLQAAFVAFWEKRAKYPKFKSKKKSRASAEYTRSAFRWRDGRLTLAKMGDPLDIVWSRPLPAGAEPSTVTVSRDAAGRWFVSILVEEKIAPLAPVDRSVGVDVGITALATLSTGEKIVNPKHERADRRKLAKAQRALARKAKGSNNRAKARLKVARVYARINDRRRDHLHKVTTRLVRENQVIAVEDLTVRNMVKNRRLARAISDASWRELRGMLEYKTAWYGRELVTVDRFFPSSKLCSQCGTLQESMPLNVREWVCACGATHDRDVNAAKNILAAGLAER

SEQ ID NO: 37489 - protein, 365 aa, unknown
  TnpB Polypeptide
MNTAHRKSPIMRRASRIFLNDVNAGKAAVVRDFLHQCRDVTQYFVDLFWQREDFTADLADLETVHRGCNRFGITTRLAQALAKQAKEACRAASANGNRKPNIRRWTTTLYSHFVTLEAFAGTHFDYALRLIGSGAPPLVLPVHSTKHLNGLLDAGWTLAKTVRVGWRKGRLFVECLLEKARPALKTTGDIVGMDSNYKHGLVFSDGQTTGETAYDTIQGFAKRQRHTHAHIKSLVGQALKQIDFTNIRVLCIEDLKHVKRFTRGTFPRRLNRRLSHWLYHFLAEKLANCCQEHGMRFERKNPWKTSQFCRFCQKWDRRNRRMDQFVCRTCGHRDHADLNAAHNLAFLGLAGAYGLRPLQNSSFVP

SEQ ID NO: 37490 - protein, 451 aa, Nitrospiraceae sp.
MSRPRKKNSITPSVATIRVTHKYRAYPTVLQEYTIENWLFILCSVYNHAIEERAEGYKNTGETISYSAQQNALPVLRKADPALRKVHSQVLQDCLQRVDKAYQKFFEDLKQKKAGAKIKVGYPRRKKLEKYRSLTYPQVWMKSKDRLTENIKIRSGEDRRSALVILPGIGGMNIRVHRAVDWRNAKTVTLKREASGAWYICVSVEKELVPTVSDNGKTTGVDVGLHKAVATSDGNFAEHPKFINKAERRLRKAQKVLSRREKGSANYQKQKGILARRHERVANRRRDFLHKLSLWLVLSYSYIAFEKLNIAAMVKNPHLAKAILDAGWGSLIRLTSYKSVMLRGNEVVRVNPAYTTQECSKCGARVPKTLTERIHKCPQCGLVLDRDTNAANVIEERAFGSSTVGRDLPEPTVLAVNACGDGTSAASASAVSLVVDPGSPDYNVASAFSRG

SEQ ID NO: 37491 - protein, 428 aa, Nitrospiraceae sp.
MRKTNVVRLLPEKEALWTLHAVGDRVSCLWNAGNYICRQAFIGKEKVPNYSALCALMKDSADYKALPTHIGQEVLKKLSKSWISFFALRRSFAKGEIRHKPGMPKYRKDRKKGSRPWDYIPVKSTAAYCVEGCLIHLAVPADIYSQRIAIPFRGTLRYQGDFKTCELLYDNAKKRWYAHIVVEYQERVVADERPEKHAGGDIGARRAIAVSTQGNPQSVVYSSRQAWKDYKYWSRLIAKEKTRLSKQGYKTSRRLQMLYRIRRLRLRHAMEALCADIVQGLRRSGVTHFTVGYPVNCRDNANFGKGNELVHNFWNFEILLRIIEKHCIRAGIAFKRVDERGTSSHCHICGRKVRRPKTDIVVCPVHGIMHADVNASRNILRKVTPALAGDGEKASPGWVVMRWNLHRWQSHAESANNRVLQEAAHAAA

SEQ ID NO: 37492 - protein, 593 aa, Halorubrum sp.
VSDVVAGPPLVRDGAPKPLFRLGNDVRGDSDEQREVPGEASERRRVWRAASTANGQGRGKERERRAEADRRMPPEASRAFRPPRERDFDEHRDGRTAEKRDRAKQRSRRTSVSPPGNPNGECDERGRSGVGVSCRHGTQYVTPSDTDVGMAIGPRRCRAPEPLVPVLMPRPSPQPNLSRLVVADSREDVAEFSADCVCGGGDRVEGVAPRVATSAFADEPDGRVAQDVGTDSDFRRGTGAFLVRKPVLNDAAGFFVPFPVARGCWEPVDQRLRIGRRLDARGGHTSCWVVAHIPVSASSPTESCVPSGTSASAARVCPRWLGRRRRRRRARRVSQSLRVEAPVPPQAAGPRTGTRTARGAPRSPQPGADASDPSDERDRLEREQRTLSRKQHGSNNDEKQRRRVAECHADLRRKRRDFLHRLSAYYAQEFELVAVEDLNVEGMMEGPSNSRNTASAAWRTFLSLLEYKCEREETHFVAVNPRGTTKECASCGVSTDKPFWVREHSCPSCGFEADRDASAAWNILSRGLQDVGVGHSESTSPEIEDFWLANDSLGDSSTPVETALPVDTFLSAKRVVETGGPSVKERTASAVSE

SEQ ID NO: 37493 - protein, 341 aa, unknown
  TnpB Polypeptide
MLLSKKTSIKVSREYANLIGHMCYAASKLWNVCNYERQHYKETGMEQHPDWYYQKKAHKEDLWYKQLPSQTAQEVCRLLDKAWKSFYALKRSGGIETPRPPRFKQESIPITYMQMGIVHERDTDRVRLSLPKTLKKYMEETYQIHENFLYLENKIFRGMDQIKQLRIYPPEKGSCKIIVVYEVPDQEELPQNGHELSIDLGLHNLMTCYDSGNGKTFILGRKYLALERYFHKEIARVQAQWYGQQSGKGVKHPVTSKHIRKLYKRKQDSVTDYLHKVTRYLAEYCREQGITCVVTGDIRNIRREKDLGHRTNQKFHSLPYNRIYIMLEYKLKRYGIRFIKQ

SEQ ID NO: 37494 - protein, 466 aa, Holophagaceae sp.
MQIGFRTRCHPAPKLAGVLSQWTGCQRVVGNAKHDEVNLLLWLRKRAILSPSWTDADPQADPFPLDQTFSQFKTEQTPWLSEVPSQVLRNGVVRYKKGWSNHWRNPGHFRRPRRKRKWDGNSVWLTRELFRFVGPGLIEIGTVAHPVGVLPFVQHREIPEPNSIVISRARYGHWFLSYASDGLQGPEMLPDEDRLKALATAPDLENRVMGIDRGVVFNAACSDGSTFGLKDEAKARIKRLEKRRRHYQRRAARGQKGSRRRDKILGKAARCSARIASVREDFLRKTAFQIAKAAPEVVALEDLNLKGMSKRAKAKRDGSGKWLRNGAAQKSGLNRALANAGLGNLKVYTEQALRKLGKMFVAVPAHHSSQECSECGFIHAGNRPDQETFLCQRCGHAENADLNASKVIKKRGIALIISAGSADSARRVPKPKGPGRGAVRRTKGDQPSAASMKRETPSSKERTCAA

SEQ ID NO: 37495 - protein, 338 aa, Streptomyces sp.
MVMGVSVEIGYEKRQFGHRARLALDPALSLRADEQAHAARTLWNLLHAWWQMMPKGKRTPANAGAAIRQTRKDIDFLAVLPAQAAQAVLKTYLQAWKNCWEGRAGAPNFKACVRSVMSVDIPQGRDLNIVRVHRRWGMVNIPKLGRVRFRWTKNLPVGRQADGDNRITGARLVKDALGWHIAFRVQTLEARPEPHRGPEVGIDVGITVPLALSDGTTYTHGEWLTEPERARLLRLEQRAARRKKHRKPGERTSRRLHRTYDQIADRRAKPSAGPSTGSTRPRPPSPPRTAWSWSKHSPSRTWSSPPKAPSNSQGRTSRRSLASTVPSAGRHGAGRSRC

SEQ ID NO: 37496 - protein, 416 aa, Solobacterium sp.
MYLTVKQVLKHLTKEEYLSLKELSHIAKNLSNEAIYNVRQYYFNEGEYLNYEKNYALLKDSDNYKMLNSNMAQQILKEVDGSFKAFFGLLKLAKKGKYNFKDIKLPHYLKKDGFTTLVIGFVRIKDNVLIVPYSNAYKKKHNSISVKIPPILKDKKIKEIRIIPKSNARFFEVQYTYEVKETQSNLNKNKALAIDLGINNLCTCVTNTGESFIIDGRRLKSINQWFNKRNAYLQSIKDKQDIKVKYTKRQNSNLKDRNNKVNDYMNKTVRKIIDYCLDNDIGNIVVGYNETFQKDVKLGKRNNQTFLNIPYGKLRDKLEYLCKLYGINFVKQEESYTSKASFFDKDVIPIYNDDNPKVYNFSGNRIKRGLYQTRTNKLINADINGALNILNKSKVVDLSVLYHRGEVDTPVRIRIA

SEQ ID NO: 37497 - protein, 388 aa, unknown
  TnpB Polypeptide
LKAAERKSSCLEGWVPAGTRIPLRLTRNLEEYCRQVLGVGRFCYNLAVATHRFHRINRLPWPSWQDTYKAFNACKHEDYPFVTKMASRVAEGAFMEFGKAVANWRNPNTKSRVPKFLKRKLTGEGSFRAASGVQQIRYNGKRRARLPVIGFAKLAHTLPKGIYHDAHIRLQNGRWYLCLKYCKEPEARPQPDQRITGAVDSGINPHASDSDGQTYENPKAYYQIERRLRRWQRAQARRQRSSRGWHEAQRRINRCHRRIRGIRQNAVHQMTHTLTRKYHTLVIEDLNVQGMKQGLTPKAQADASMGEIRRQLEYKCNWRHTDVVVAHRFYPISKLCNACQTYNAKIKRERYWTCETCGTRHERNANAAIKLRNLFPKAGGQRSVTGKL

SEQ ID NO: 37498 - protein, 405 aa, unknown
  TnpB Polypeptide
MNLVEKQIVKRGDPRYAELMELCHLSKNLYNAALYLVRQHWLDTRNDDTVAKKYLNYYDTWNLMKKGNPDFRALNAHTAQLVLKQVDAAFASFFSLLKLKARGKYAKRVRLPGYLPKDGYNAVSFNQFKVRELKDGYVTLPKAKTLRFRVAHRNVHFINVVPRNGYVQVNFVYRRDPAPRKPDNGRYMGVDLGVDNLATCTSNVRRAFIVDGKPVKHVNQHFNKRISELKDELAKKNGTTTSNRTRSVTLKRNSRINDYFHKASRYIVNQAVSSDIRTIIVGHNRGWKQEACIGRRGNQNFVQIPFDRLISQLKYKGALVGITVIEVEEGYTSKCSFLDGEEIGAHEAYAGRRVKRGLFQTASGRLVNADVNGSYNILRRGVKRNRDAAMPADAGFVYNPVKVRL

SEQ ID NO: 37499 - protein, 226 aa, unknown
  TnpB Polypeptide
MVVVTDRTDVREYSKSDNSVGYDFGMKTFLIGSDGTDHEAPLFLRRSKATNDRLSRSISRKQNGSNNYKQAVLAKARYMRRLTNQRTDFQWKLVNRLIERYDVLCFENLNLKGIAARFGKKVGEYGFGEFLGRLQHLAGKHGKEVRFVDRFFPSSRLCHRCGYKNDGLRLSDMEWTCPNCGVHHDRDRNAAINILQEGTSSCGRDAVRPSETMAGVIEPRISRLQL

SEQ ID NO: 37500 - protein, 430 aa, unknown
  TnpB Polypeptide
VKEKDNRLVCPETKREALKATRLATALKRKSQVCKVFECKIVEKRLNKTQKEELEKLFVEGKWFYNHVLNIHQKGKALKDINSTNIKWVEHFNKDRQRVSSKIEVLGSQIKQSIVSRMVSNEKTVMSLVRKGLQKHGNLKFKSELNCIPLKQYGITYSFRSFNKVKIQGISGKVLVRTGNQLQVADELANANLIRKPDGYYLKVVAYINKENFKEKPKNGKEIGLDFGIKTNITTSEGEKLDVCVEESERLKKLQKKLFRRVKGSNNRYKTVRLIQREYQKLSNRKRDKANKIVSKLRKYETIVMQDEQIANWHSGLFGRQVQHSCMGLVKAKLKALPQTIVLDTWIPTTKWCPRCGTINRFITLEDRTYHCGCGYEFDRDVHSAGNMLIIKDLVFRKHNLVPTEHREITLAEFKTSADDTCGVVGKSGQ

SEQ ID NO: 37501 - protein, 354 aa, unknown
  TnpB Polypeptide
MKTLKLRIKDKHSEMLNQMASEVNFVWNYVNDLCFQHLKRKGEFLSAYDVAKYTKGTSKECDLHSQTVQAVTEELVTRRKQFKKAKLKWRVSNKKSARRSLGWIPFKKVAIKYADGYIQYGKHQFKLWDSYGLSKYNIKTGSFVEDARGRWYVCFVVEAAAVEKSTATQAIGIDLGLKDIATCSDGTVISNPKFYRHYEQKLGIAQRARNKKRVRALHAKIANSRKDHLHKASSMLVKKNALIIVGDLSAKKLVKTTMAKSVLDTGFSALKTMLKYKCENAGVLFEEVNEAYTTQICSCCRKISSSSPKGRAGLGIREWQCMECGTFHENRDINSALNILALGHERLAVGISVL

SEQ ID NO: 37502 - protein, 626 aa, unknown
  TnpB Polypeptide
VKVTSSYAVHVQDHRQSLKATVSLYRAAVAFMIDVVDKEWDTLPPICAAGGKLGQHALEHMIHKTKGFPKPKYNFDEKFYKFPSYFRRAAITMALGAVSSYRKNLANWEAGGKQGRPPKLAYDRNVMPVFFRGNMSECESMLQGETTVVQLKLFVKNDWVWVDIHCRPRDVKYLVKWWSGAKASAPTLEVKKRKGRRDCSFRLRFAYEEYRDLSLRDEPLDRRLALAVDLGINNDAVCSVMAADGAILGRRFINFPREKDRMNHLLNKQRGEQRDHGRYGGRRTWDQINNLNDQLSANIARAIVDMAVEHGVNVIVFEALDFHGRIRGRKAQRLHLWRKRAIQDMVEHKAHRNLIRISRVCAWGTSRLAFDGSGEIFETVPLGAKRMTYEQVLCPNDTLLLNNSYLLQQFSLRTHEITPFANKKNSMKAMLDASGDLALWYTGEEIVACDFGSNTEVWRETVKCKKSKDPNFAYYCFGMLSPRQSKAAYRVTEGEYVLVDLKSAQKVVIPNEGWHPFFSPDDQCFSVGGKFYLTQTGEEIANPFPFSVRQGLSFSDTCTVRTRGSLMAIQQERGSSPIELWDARSGQMLASINDPFVVRQTNFAFTKSRLVLHTDYGAMSIYRCAL

SEQ ID NO: 37503 - protein, 542 aa, Streptomyces sp.
MGGLREVAAPFVAPGPTGVAVRTSLKGLSGQDAMVLRLVGGRLGSLASRDLKARCAAGLDHDSGQWARRKRALTGDSSSRWAGSITKATHDQWALARRGQLAHIQHLQAGIDMIASRLSLSVGAKGSKGSPGGYRSQQEWFAKSRRLRLLKDRLARERADREAGRVRVVRGGKKLLRHRHHLQAAQLSEAQWRARWEAERWFLQADGESGKRYGNETIRIAPDGEVSIKLPAPLAGLANAPNGRHVLACRVRFGHRGEQWADRIAANRAVAYRIHYDVERGRWYVTASWHIPPVTTVPLQAVRSVGLIGVDMNADHLAAWRLDVHGNPVGEPRRFGYDLSGRAPHRDAQVRHALIRLLHWARRHQVSIAVEDLDFAAEKTREKHGRQKRFRKLISGMPTSRLRARLVSMAAELGITVVAVDPAYTSRWGAQHWQKPLTGKNSKPTRHHAAAVAIGRRALGCPIRRRTQPPPLHRSDAVGHRSVQAASGIPGREETRPRIPGPRTRSVGAGCGAKAGDQCAHNRSGHTAEHQSWHQDSLPLSL

SEQ ID NO: 37504 - protein, 400 aa, Burkholderia sp.
MQRLQAFKFELMPTGEQQRDMRRVAGSCRFVYNKALALQKENYDAGGKFINYVAMAKHLTAWRNGSETPWLKDSPVHPLQHALKDLERAYKNFFGKRAAFPRLKKKGKSDRFRYPDRKQIKLDQGNSRIFLPKLGWLRYRNSRGVLGELRNATVSRSAGKWFVSIQTQREVDPPVPQATRAVGIDVGVARFATMSDGTFLAPLNSFKQHEARLCRAQRAMSRKMKFSSNWKKAKARIQRIHSRIGNARRDYLHKATTTISNNHAMVCIEDLQVRNMSRSAAGNAENPGKNVRAKSGLNKAILDQGWSEFRRQLDYKLAWNGGWLIAVPPANTSRTCPACGCVSAENRLTQARFACIECGFEENADVVGAINVLARGHRVAACGEPVQSGPSVKQEPAEAI

SEQ ID NO: 37505 - protein, 260 aa, unknown
  TnpB Polypeptide
MGAAIVEITATDGILLGDLQMELPAVRGGLDFADVALFHQTVHLIGGVGRGDAHEGGELVHRRPPQRHDALHAEGLHRGEAGFPVLKPAEDLLIKVKLEFGVYFVKSLMQHGASPSCGMKKSKLSIPILTEKGKSSPDGGGTVFPYRPLWVFSAFVQNPQSGKNMMWNHKLALHIADTSWGEIRRQLTCKTDWNGKELVIIDRFFPSSQTCGCCGYRNKEAKDLSVRLWECPECGALHNRDINAAQNILKEGLRKRTPAA

SEQ ID NO: 37506 - protein, 234 aa, unknown
  TnpB Polypeptide
LSAFLVAARADGEEVDRITDAPKALAGGINRLRRLAKSLSRKQKGSHNRRDAAAKLGRHHYHIANVRRHFLHQVSNALVKTHDRLVIENLNVTGMLANHSLARAISDAGWAEFARLLKYKQAWRGGELVEADRWYPSTRLCPVCGALNGDMTLADRVFTCGCGHSADRDTNAAVNLARWAKPTTTKHHQIPGPPSSGAGRPMPADGTALTSTPSRAGETSPVETGTDVHTAPAA

SEQ ID NO: 37507 - protein, 432 aa, Halorubrum sp.
MTMEIIRTVKIKLDVPNPRRDDLHQTADQFRYCANQTSKWAWRTSATEYCVTSKAKAEGALYDRLREETDLTANLVQKGVRRAIEAVKSGVEAWKRGDRTSQPHFDAWSVVYDKRSATFHRDHVSLSTVNGRVECDYVLPDETAGTPIGDYLLNEDFEFRISTLQYDRFEDEFYLHARMKRATEDGEDTRSNSDTHNENPTVLGVDLNVDGSFAVTSTGEFIESADYLNHRRREFEKTRGNLQETGTRSAHLTIQQMNDREHRWIQDVLHNVANEILCEARRVDATHVAFENLTGIRDRMAHAKRFHAWAFRQLYQYVEYKGEAEGVTVEQVSPAYTSQRCSKCGCTLEENRPSKHEFECQKCGYELNADYNASKNIARKLAKRLHPGQKFSGGGATYQLALASGFLNLNGEFHDTGPAAAEGKSTDKPHSP

SEQ ID NO: 37508 - protein, 281 aa, Halorubrum sp.
MAEVRRTVVVKLDVDDSDATLLHETIEEYLWACNYVVKDAWKDDYKPTSKTKLHDRTYSDVREQTRLQANLVQSARSKAAEAIKGVVARWKRGKKASQPHFTTPSIRYDKRSATFHDDHVSLSTVNGRIEAEYVLPPEGDNPHTKYLRNDEYELTGATLQYRDATDTFFLHIGTKADVESKIPDQGDAENSTVLGVDLGIEQIAVTSTGQFWSGDYLAHRRREHERVRGDLQRTGTESAHRTIDQMGNRETRWVEDYLHRISKAIVQEASHTGATRSRSRS

SEQ ID NO: 37509 - protein, 377 aa, Proteobacteria sp.
MLKTIKYRLRPTKKQAHQLEAQLEECRTLYNHFLEARKRAWEDRQESLSFFSQCATLPALKAYCPELSRVHSQVLQNVAVRVDLAFKAFFRRCKAKETPGFPRFRGYGRYDSMTYPQYAQGWKMGERVLKLSKVGAVRVVEHRPVEGTPKTCTIRRSSTGMWYVTLACAFTPETLPGRDEAVGIDVGLLAFSVLSTGESTPCPKFLRTDEHDLKRTQRQLSAAPRGTRERRKRRAIVRRIHERIANRRTNFAHQESRRLVNRFGVIAVEDLAVHRMVHNHCLAQSIQDAAWAQFATFLAYKAAWAGRRFVAVNPAYTSQDCSGCGHRQKKTLALRIHQCTCCGLTLDRDHNAAVNIMRLGLQSLGLAPRSSAVYGGE

SEQ ID NO: 37510 - protein, 561 aa, unknown
  TnpB Polypeptide
MITLECLLEFEAKEDINAILYLMRRFSSAMRYAYKRLLEGEKRKDLKKHLSKLFNINTRYSDDAILLAQSMITLCKEREQNPKKLIFGSRKVFEQLKKNHLTGKRRKQLKTKWKESRQGNLYSRGDKTKQGNLNLRFEWINDKLYLRINTGDRQYIYTKVIRGVKREKDKWIEFMFMLENAYKYGAWFLYSVRLKVKNGNVYAFISVEEKLPPVTIKKDNGIIGIDINAYPFHLALATASKDGNLENYQAISLHELLDVSSEKRQYLEWQIAHQIIEIAKKENKAIAIENLDKLPKGKRGDGFAKLRQKLQKWIYKRLLNKIEITAKRNGIEIRKVNPAYTSLIGKLKYAPQFNIDKDIAAAFVIARRGLGFKERLPKNYKELLNDTDFLSYTIARIEYNITKLKQKIKEEKNEYKRNKIKSKLAKLRKNLKALQSHVSLFTFRVSRSESGKSKTATQQTVNQRKEQVRGLPTGRHKSWQVLSIALAFCCLEKSYRDFSPLKRVIISKDWIAVANRLVPMLGQGTMILPKYRLLGLEVSEMAEYKYPNPSCTEQYSFVQFG

SEQ ID NO: 37511 - protein, 325 aa, unknown
  TnpB Polypeptide
MRRYSWLKEYDSLALQQAVINLDKAFSNFFNKKLKARFPVFISKHCQQSSYHPNGKVLTNAIQLPKIPPIRASIHREIIGKVSSITITRNATGKYYASILADDGQKAAAKPTYITSVTGYDLGLSHYLIDNAGSKVANPRHLVNAYRRLRRDSKAISRKKLGSANRRKARIRLAAQHERVANARADFQHKLSRRIIDENQAVIVETLKSANMMKNRRLSRHIGDAAWSGFVAKLAYKAESAGVHLVKLDQWFASSKTCHCCGQKMPEMPLKVREWKCPGCNADHDRDINAAINIQHKNITELMAAGHVVKAHRGLRKSGSTLVAA

SEQ ID NO: 37512 - protein, 356 aa, unknown
  TnpB Polypeptide
LQKQLPELKQDWKELQQVHSKVLQMVLKQLYDNLKSLSKQKEKGYKVGKLRYKGEGWFKTIEYNQSGFKLKQTDNRLDRLKLSKIGEVPIRLHREIEGEVKGVILKRDSAGDWYAIFQTEQEKHETDTAEPENVEAVGIDLGIKNFIVDSDGTRIEHPKSVEKAEERLRKEQRDLSRKEKDSNNYEKQRKKVAKLHKRVKNRRMDFLHKLSNAYVRNYDKIVLEDLNISDMVQGEMNSKNTLDSSWRTFIELLLYKAANAGTEVVLVDPKDTSKECSQCGVKTDKKLWQREHSCPSCGYTTDRDYNAAQNILGKGLAEVTPAETATSTDNKDQKPVFCDVSASCVIETGSPFHLEA

SEQ ID NO: 37513 - protein, 402 aa, Nostoc sp.
MLVFEAKLEGTNEQYQSLNEAIRTARFVRNACLRHWIDNRSIGRYELSAYCAVLAADENFPWVAKLNSMARQASAERAWSAIARFFDNCKKSKPGNIGYPRFKKEQTHGSVEYKTSGWKLSDDRRHITFSDGFKAGTFKLWGTRDLHFYQFKQFKRVRVVRRADGYYAQFCIDQERVERREPTGKTIGLDVGLNHFYTDSNGETIANPRHLRKSEKSLKRLQRRLSKTKKGSNNRAKFRNKLARKHLKVSRQRKDFAVKTARCVVRSNDLVAYEDLQVRNMVRNRHLAKSISDAAWTQFRQWVEYFGKVFGVVTVAVPPHHTSQNCSNCGEVVKKSLSTRTHVCPHCGHTQDRDWNAARNILEKGLSTAGHVGTNASGETDQYLSEVTPSSKSTRGKRKPKK

SEQ ID NO: 37514 - protein, 358 aa, unknown
  TnpB Polypeptide
MMMLTYKYRVKDETTGKHLVAHSRAVNFVWNYCCQIQREAEGRWKAGVKTRWPSAFDLIRLCTGSAKDLGLHSDTVKTVCQQFVVSRDVKRKCPRFRASGGAKRSLGWVPFVSRAVKIDGDCAIYLKKRFRFWRSREVEGVFKTGAFVQDACGRWYVTFQCEVAETLPTGNGEVGIDLGLKTLAVCSDGKTVPALRHYRRYQAALATASRANNKARVKAIHAKIANSRKHHLHEQSTVIVRANSFIAVGNVNAANLAKTKMAKSVLDAGWSTFRNMLEYKARRHRASFYQVDERWSSQTCSYCRTIPGSSPKGMGALEVRHWVCSNCNSVHDRDLNAALNILRVGRERSPLVAEIPGL

SEQ ID NO: 37515 - protein, 304 aa, Bifidobacterium sp.
MAQGQSDPVECVEQRHHGFPQGTSAYFRKAQYGKHRPRFASRNDNIQSFRNAMPIRRMDGNRYPLSRKLGSVRIRKRDRLRHPIESLSSWTVKRENRTYCLVLLFDVDIQPKTRAEGRVGIDLGVKDLLTLSTGEKIDYPNRLRRLEEDVKREQRKLSRRTTGSNNYRRQRAIVAKAYAKLRRYRDNFQHQLSHRLIEENQFIGMETLMVRNMMRKAKKNAEGIRSGQSRKRAMNRSILRDGWSGLVDKLSYKAEWCMVASSSKWTGSIRVPNSATTAGTSTRDCGCPNANGCANGAESRTTGT

SEQ ID NO: 37516 - protein, 399 aa, unknown
  TnpB Polypeptide
LRRRKVIISHSIRLASTETQEAYFFRAAGTARFTYNWALDAWKRQYEAGERPSGFALKKQFNAIRREQFPWTYDVHRDCTAQPFASLDKAFTAFFRKTAKYPKFKKRGQHDSFAVANDKFRLSGKQVKLPVLGWVKLRESLRFTGKIMGATVVRKAHAWFLSVQVDVGDYRKVRAANGIVGVDLGVKTSAVLSTGDFVQGPKALHRAQKRLRRLSRRHSRKVKGSSNKRKTSQLLARLHFRVANTRSDFLHKLSTKLCRENQTVVIEDLYVKGMVRTRKLAKSISDEGWGELRRQLEYKSRIYGTNVIVADRWFPSSKLCSFCGARKADLKLSDRTYSCEQCGAVIDRDWNAARNLEQLGTVSPEVTPADIGALVSLTGNETLVDEAGTICGHLCSQKG

SEQ ID NO: 37517 - protein, 383 aa, unknown
  TnpB Polypeptide
MKSYKYRLYPSKEQEFILNRTFDICRFTYNKLLELLTDKKDRNVLQHEIVNLKKEYPELKNVYSKTLQYECYRLFSNLKGLSELKKKNQKVGKLRFKGKKWFKTIVYNQSGFKYLKTNKRYDILKLSKIGDIKIRIHRIFKGNIKQIIIKKSFLGWYAFIVTDEEYKIKGGENNIGIDLGVINFITTNEGRKITNPLFMNKNIERLKTTSRKISKSKKGSKNRYKYRIALKKIWEKIDNQKNDYFHKITTNFIKKYKVICVEKLNISSMVKRKKHYNMRNILDSSWGKFISMLKFKAESAGSSIIDVNPKNTTKKCSRCGTIKNMKITDRIYKCPICNLVLDRDHNAAINIYRFGMSLCGERHQYPSFGQMFSMKQEAMSFRA

SEQ ID NO: 37518 - protein, 620 aa, Rhizobiales sp.
LIRTFETRLKSEGRKAARLAPVLAEYADLMSRAERLLLAQLKAGRTWTGDLKVSFYQPLGISAIHLDMAYRQLMAKLASVSELAKEHAKALAHKAASKKTDIKRKTMALARTRKARVKLGEELAAITVKLEKRRASMMVATEKHRADELFALKQLLIKHHARRAAFESATVEIQKLGFALHQHKRRLAILETKQAQARNQAGDPTICFGSKKLFREQFDLDGSGYADHEKWLSAWKAARSSQFTLDGNSSMNGGNQFARMRPRGDGRFDLELRLPKALAHLATRTFKVSGQTISCVDLVGLSFNHGNEVIEKALKNRKPVTVKFLKDAQSWKVIVSIDHAVESMMPDFSAGALGVDLNAGHVSAALVRRDGNPVEVFNFPCVTYGKTSDQAQDAIRKVAAKIAGLADRLGVPVVAELLDFNEKKKTLKDAKDARYARMLSSFAYSAFGNALSSACARRSVALRWVNPAYTSIIGRVKFARRYGLSVHEAASVTIARRAMGYSERLPRSSTDTVKVPTNGCDHVTLDLPARKDASEHAPKSRHVWSRWNGLNKEYQRALAALGSSRRKPRPKRGKSQAWGRQLSRAGGGTLAGGAENRSMVPRNTRDVPAQNRFSHVARGG

SEQ ID NO: 37519 - protein, 475 aa, Rhizobiales sp.
LQTISIPYRCCDESAAFLRELRRVFSAAVRTAYVNAVSNGVALKQKDLRNLVKQRFAGGTADAWILHCATLEGMDLRKARPEGGMIFGTRAGSERRRKGLITHSEWREMRLRPLCSRGDKTFAGNRHFRLSLDGRTCCVRMYGREVLLSLPQMIGNAGETLRQASALAAAKKINLTFRLDSEKLHVTLDPADLPDHPQRRRPVRPLHGRAVGVDLNPNWIGLAVAVNCGDASKIEDTKLLDHSLVKLDMPVDASPELVRETLAAVCDRAISMARKHRCGTIVLEKGLGELRSSGKSRSLNRLLNYWARTVFVQMLTRRARLAEIEVLEVWAGYSSTIGNLAFDAPDACASATEIARRGIARLAGIKDVLPALEEGCVSCLWKNGKVPAELSSWQDVHRSIKAAKIGYRRPHPDVPIGARGSDVHGTEMFCGHAVVRLGRCHRPGILFRMASVKPDAIFRDSVQRGLVVERHGSTL

SEQ ID NO: 37520 - protein, 426 aa, unknown
  TnpB Polypeptide
MDRFKYSKIKLEVIEMNVKRTEQIWMRSDKNISSLCHISKNLYNEANYLIRQEFFKNGKWVRYNELDKELKESENYKSLPAQTAQQILRLLDKSWKSFFKVIKEYKAQPNKFKARPKLPKYKKKDGEHVLILTNQQCKIRENRTIKFPKLLELDIKTRLDKKTNLREVRVIPKGVGYVVEIVYAKEVDTKNVNEDRICGIDLGVRNLATIGNNIGEGEKPIVVKGGICKSINQFYNKEIGKIQEIYTKQGIKIGKRSKKLFNKRNRKIKDHLHKVSRFIVDYCVKNDIGTLVIGQNEGWKQNTNIGTKNNQNFVQIPFFMLINQIKYKAEEKGINVILQEESHTSKCSFLDNESIEHHDLEKYIGKRFKRGLFRSAKGIIINADVNASLNIIKKAIPKAFAKVEADEIEDVGLHPLRCLMASYKGI

SEQ ID NO: 37521 - protein, 414 aa, Nostoc sp.
MEKAYRYRFYPTTEQEQILRRTIGCVRLVFNRALAARTEAWYHRQERVDYAQTSTMLTQWKKLEDLQFLNEVSCVPLQQGLRHLQTAFTNFFAGRARYPNFKNKRSGGSAEFTKSAFRWKDGQVYLAKCSQPLAIKWSRQLPKGCEPSTITVRLEPSGRWFVSLRINDPTDETLHPVDNAVGLDVGVTSLVTLSTGEKIANPKAFNKHYQKLRKAQKSLSRKQKASCNRDKARLKVAQIQAKISDSRKDHLHKLTTRLIRENQTIVVEDLAVKNMVSQRVGRVSRLEATGEPVRVNNPKLARAIGDAAWGELVRQLEYKAKWYGRTLVKIDRWFPSSKRCGNCGHILNKLPLNIREWDCPNCGTHHDRDINAAKNIFAVGHTVTVCGANIRPNNHSVKGQLQKTRQGRKQKPKS

SEQ ID NO: 37522 - protein, 434 aa, unknown
  TnpB Polypeptide
MQKTIQGTIHNITNNQKLQQLMRDFCSAKRFSYCRFKEEKELNDVRHLTKLKYPSLNGRYIYDAVSEGKAVFTRFKDQRIIFGSKKLWKQLINKEISKELWIQKRNDIIYSRGEKNHSGNANTRIYLVNNKLKLRINCGIRDYIYADVWLPPKYHSIILDIIQSANPCYSIRIKQEQKQCRIIVSYDEAYPEIQHPLAHGAIGIDLNPNLISLAYIQPDGNLIETKSILNNRINNARWGKRHYDIWMIANEVVEYAVSKNCGIVLEDLDFKKNKKYKHTNDKYNKKKNRALGNFTWKQLLTAIEAKAHRSGVEVKKVNPAWTSIIGRLKYCDDIKVHEAAAYVIGRRGLGYKERIPDWLRSIIAETLQEEGIKKSNWKIWSDLKKLTVPDCRAFVPRRVRRRVKDPPSGLMGNLLPSPDLLGLTGQSSEDDLFW

SEQ ID NO: 37523 - protein, 425 aa, Leptolyngbya sp.
MTLQAFRYRFYPTPEQESLLRRTVGCVRLVYNKALAARSQAWKERQEKVGYRETSKMLTKWKKEEELQFLGEVSAVPLQEGLRYLDKGYANFFAGRTQYPRFKKKRNGGSASFTRSAFRWRDGSLYLAKCQVPLDIRWSRQLPKGAEPSTVTVRLSPSGRWHISILVDDNTIKPLPQSEKSIGVDLGITHLAITSDGEKRCDPAPSHGARERAPREVENPRHLTKHYRRLRRAQKALSRKMKGSRNRDKARCKVAKIHEQIKDSRSDYLHKLTTRLVRENQTIVVEDLSVKGMVRNHKLAKHICDCAWGELVNQLDYKCQWYGRTLVKVDKWFPSSKLCSSCGHKADSMPLSVREWTCPKCRTVHDRDINAAKNLLAVGHTVTACGASVRLERHRSGEQLRKTPERTALSLSKGSRRGKKQEPKS

SEQ ID NO: 37524 - protein, 223 aa, unknown
  TnpB Polypeptide
MRRFAGVCRFVFNRVLALQNENSEAGNKYIPYTKMVSWLIEWKSAPETQCLKDAPSQPLQQSLKDLERGYKNFFQKRASFPRFKKRGPNDAFRYPQGVKLDQTNNRISLLKLGRVRYRNSREVTGEVKNVTVSQSYGKWYVSIQTEYEVADAVHNAESMVGLDAGVTKLAMLSDGTVYHPVNSFKANQRKLAMLQRQLSRKVKFSALNADIPRTPILTVLVTF

SEQ ID NO: 37525 - protein, 450 aa, Nodularia sp.
VIYLLTNFVFKLRPNITQFHKMDAWLNMLRSTYNWNLADRIAQYGQQFIQGSYCDIRTKGEASPLTCLVSKNGASGEPWKDAKTDKDGKPRNPRRNAGNIQITALPELKKARPWFGEIDSTVLQQNVKRLDTAYKNFFVRVASPSGDGRGFAKFKNRSNFTSFTYQMGIKVQGNKIYLPKLGWMRFFDSRFIPNGFTIKAATLRKRQDGWYVSIRIEDKSVPDYASKPLNEVSSVLGCDLGITKLVHLSDRHQIDHPKFSTNRKARRTLKIRQRRVSRKVRGSKNRKKAANKLGRFHKKIRDKRVAYQWNVANTITSRKVDAIAIENLNITGMFKRCKVKVDETTGRFLKNGQSRKKGLNRAISDASWGELISKIEYLAAKQGKVIIKINPQYSSQECRSCGHIDKLNRDHEKFICTKCGYHEHADIGAAKTIRDRGLKIVRGDSAKLAV

SEQ ID NO: 37526 - protein, 575 aa, unknown
  TnpB Polypeptide
MKRSTGIITCVKVPINWENMTDQQKTRLSQITGRDTRVIAAYLGVIERHEKELRTGKRGTQLDPGKLNELTLTALRGKNHRTSVAHDFKARFPRISVNEFGECRETATAMWSSYHERNGAKPLKSKNYRPRKIPRCVFSHCFSLVYSDTSATECMLYLRDSLDSRRNGRAHHDKLSISLSVSSYHANRMKQGQVKTVRILKDFRRKWWAIFSVNLEPEQQDSRGKPPAVLAIDLGVSKAACTVMLTQHGFKQVRYWKQNDKLRHLTGYDETIAALQKASMQPMSNGGSPQAVVVKLSQLGHKRANVSSEYDREMIKSISEHILDMNSRYDLYVAIGRLRGIRNRARKGNFQGSAYRKMIHRWSFGRVSTSLEHKLTTLGFDARRFRSVPEAWTSRVCHKCGHFGYRPKQSLFVCGTCGYHANADLNAAINIGRRLITLIPSLRDETKGLGMWLPSPKKATPNAQRGEHPRGKSLLSQRLPASPKGESVADDCTQTPATMFECDEDPAMVKTVEEPSAAGSMGSPGTNQQRQETTCREGTTFQKSRTKLTHRRLDLSRHQLVTAVVRMVEHRSPLC

SEQ ID NO: 37527 - protein, 378 aa, unknown
  TnpB Polypeptide
MSKSHITLHHIKLFEPTNIKRNELKKLSRNWNKAIRSALKIIKHWGLTAYTKSHKHVYRVVKNNYNLPSQVAIEANRKAMESYKSCHKKFRDNVKFNYQVPVDLVKNKSFKLIRKDNGTNIIKISIEPYNNIYVPISLSNYHLNYINNDRYEIKTAELYKQDGEWYLNFILRYEVKGKETDTHLGVDLGIINLATFSVVDSSENILHTEHLSGKELRFKRMRYKSKRKRKAFKSDSKNTSLIKENRITKETNWLITNRIIEIAKEYNSTIVFENLKNIRKNITNDNNLNNYEKNSWAYYQLKQFVKHKANLNNLPVEEVNPYKTSKICHVCGQEGIRETQNLFECTNGHTFNADTNASINIAKLAMGIEIENPFVDVA

SEQ ID NO: 37528 - protein, 373 aa, unknown
  TnpB Polypeptide
MIKKFKPINKAYKFRIYPNQEQQELIDKTIGCSRFIYNEFLAKTKEENYQSYTKYSRQLPQLKKEYEWLKEVDSIALQQSLKDLDRAFKNFFSGKYNYPKFKSKRKARLSYRTQKFIRPSGTTNIEIKENKIKLPKLSWIKFAKSKEVKGKINNVTVSKSRAGKYYISINVKQVLVTIVKDNQCELGLDLGIKDFLTTSNGEHISNPRHLSKYQDKLAKLQRRLARKEEGSNNWYKLKKKIAKVHEKIKNIRKDFLHKLSTSLTKENQLLVIEDLNVKGMLKNSKLAKHISDCAWNMFTTMLEYKSKWYNCILHKADRFFASSQTCSECGTKNPKVKDLSVRTWTCECGANHDRDINASKNLLKQGKLDLGIR

SEQ ID NO: 37529 - protein, 417 aa, Halomicrobium sp.
VTVVRNIQVKLDVPADAHSSLDATFEQFRHAAQYVVDYGWAGDPTEIVTNQNDLNAATYDEVRTQTALHSNHVQSARRLATDALDNYQSRIFDGGAASKPTFRGTAVVYGSRTITYNDDHCTLATVDGRIRANYVTPDDPDSTPFEDYWDRNEWERKEATLHKRDGAYYLHVAVAKEPDTDPSTVENGAVLGVDLNVDGSLAVTSTGRFLGNADFLNHKRDEYERRRSSLQQTGTRSAHLTILRSGSRFAHWSEDYLHRVSKVIVHEARRHDCAAIAFEDLENIRDRISNASKFQQWAFRMIQEFTEYKAEEHGVLVETVDPAYTSQRCSHSACGFIDRGNRDGDEFECLHCGKQLHADYNAARNIGWRLVQHWLTSGAGRANCQVALKSGMLNANGEFTPAMSNGQSGSPLTSPPL

SEQ ID NO: 37530 - protein, 411 aa, Halomicrobium sp.
VPDEEYRTAVTRLELSQSSRQLLEQTISEWRRGCNIAVDAAWGIDDLSSRRVQSIAYDRIRERTELKSQHAVLATHHAAEAMRSCVEQLGYRSGTSPTFSSPTIKYDPRTMTLFEDGTVSLTTLGSRVRCSLALPEESNGYQFTFLDDDAWSLKQSTLTIRGGTFYLHLGFRRAISASESTAEDGAVLGVDLGLENIAVTSTARFFSGSELRHRRREFSRIRRRIRQTRTRSAYRTLSRLSGREERYARDVLHSVANGIVEEALRYQCQVIAFESLEGIRDRIPEASFFHQWAFRQLQKFVQYKAESHDISVVTVDPANTSLKCADCGYSASANRPTRNHFQCEKCGTEANADYNAAKNVGLRYVRRGLQSSRRTGASRCALKSGTVTPNGNFAPYHDGFEAEFTDKVAIS

SEQ ID NO: 37531 - protein, 448 aa, Halomicrobium sp.
MKRTNTFAVRPLSESGEQLLVDLLDASAALWNEVNYERLMRYNDEEGFEGGVWDADTGSLEGQYKGVLGASTAQQVIRTNSEAWRGFFRLKDQYHGESNTLVTEHPEPPGFRGNEDDGRQLKTVIRNTSYTVEWGERSRLEILVGSELKDRYDHTGRLRLEIAGDPNWPEYEKQGRLDLWYDETDSTVRASQPVTVSEDVRDTPLADETAALDIGANNLVACTTTTGKQYLYEGRELFQRFRETTREIARLQSKLEDGRYSSKRIRRLYRKRTRRREHAQEALCRDLLERLYEDGVNTVYIGGLTDVLETYWSVETNAKTHNFWAFKQFTERLACTAEEYGIAIEVRSEAWTSQACPQCGSTDRTTRHQDTLTCPCGFEGHADLAASETFLKRHTSNAVRPMARPVRFEWDDHTWSESPRSHRPKEQRTDQSTVPRDGNVASGESQAV

SEQ ID NO: 37532 - protein, 401 aa, Erysipelotrichaceae sp.
LNSSPPLHFVRRRRLLRNYVKKGFNIRIYPSADQKALFAKTFGACRWLYNQMLALQKERYDNSSEAGFLTTYSMNYILTQLKRECPWLKEADATALTGVNDNLGRAFRNFFQKNAKAPRFKSKKHEQSYISKCVNNNMRIIDGHHILIPKAGILYYRSGLIPHGRICSVTIRMKPSGKYYASVLCEYEEEPLAKTGNAIGIDVGLKNLAVLSDGTKIPAVRFDKALEDKLVYWQRIMSRRLLKAKEAMREDPNLKLSDFRNYWKAKQMVAKINEHIASQRRDYLQKITTELVRKYDVIVVEDLYASHMIKNHKLARAIANAGWREFVTMLEYKCGFYEKELRKVDPRSTSQMCSDCGCINNRLGFSSYGWLKVREWNCPICGAHHDRDVNAAINILNLGLA

SEQ ID NO: 37533 - protein, 278 aa, unknown
  TnpB Polypeptide
VTIENVGQVKAVWNGSKGEWELHIVCKHEIEAESPGDETAGIDLGISNFAAVSYSTGDHELYPGNALKTDERYFAKEIAKCNSSRSNNALRLRKKRSERRSHYLHAVTKHIVAECVERGVGTIAVGNLEGIREDDETGEARNWGDRGNEGLHGWAFDRFTNVLTYKAKVEGFTVVIVSERDTSKTCSRCGQKRDANRVERGLYVCRGCEAVMNADSNGAENIRRRLDQAKKVTLNPRSTEDRSSGRVARPVVNLFRRGEHDQSRGQGTFAEQASSCKS

SEQ ID NO: 37534 - protein, 383 aa, Proteobacteria sp.
METVRTIACKLAPTEEQRTELEVTLVAFADACNFAAEVARSLHSTNKVTLQHAAYQDIRQKFGLSANLAIRAIARVCAALKVPAKRHSLFEPTSVDYDARIFSFREWDWTFSMTLLHSREHLATKMGNYQRRQLKGCLPTSATLVKRRDGTFFVHVVLTETAPEPEEPHGVIGVDLGVKNLATTEDGKNFSGDAVEAVRKRYGRMRRTCQQAGTKSATRKLQKIRMRESRMRANENHRMSNRLIAKAKDTKSAIACENLAGIGDRITARKAQRSRLKGWAFLQLRTFITYKAKREGIVVLPVDPRNTSRTCSACGHCEKRNRKSRDEFVCRHCGLTLPADWNAAKNMKVRGEVMHPVVGVADAGPRNLVETTNKPRQFIGSGS

SEQ ID NO: 37535 - protein, 415 aa, Spiribacter sp.
MHRFQAFKFELRPNGEQRQQMRQFAGSCRFVFNRALALQKARYAAGENKLGYVDCAKALTVWKQSPETAWLAKAPAQTLQQALKDLERAYANFFAKRSGFPRFRKRGRKDTFRFPQGVKLDEGNSRIFLPKLGWMRYRNSRRVLGKVKNVTVSIAAGRWFVSIQTEREVEPPRHPARSVVGLDRGVANLATLSTGETIAPANALRKRQRQLARAQRAMSRKQRFSRNWTKAKARVEKLHTRIGNTRRDSLHKTTTALSKNHAAVVVEDLQVRNMSKSASGTVEQPGRNVRAKAGLNRAILDQGWHEFRRQLEYKQSWRGGMVVAVPPQHTSQQCSVCGHVAAANRPTQSRFESVACGHTAHADVNAACNILAAGHAVMACGGDVSPDRHLGDDPAAPMKQEPAEATLPAAAVEAR

SEQ ID NO: 37536 - protein, 406 aa, unknown
  TnpB Polypeptide
MNVNRACRFELKPNNVQQTHFAKCSGVARFAWNWALDERHRLYREKQDNERFTNAIEQHRRLNVLKKTEFPWMYEVSKCIPQEAIRNLDAAYALYSRARNAGRKARLPRFKKKGRSHDAFAFTTGAIRTERTHIVLPRIGRIRVKEPAVLTGRILRATVTRVADRWFVSFAVEEEVVNRISPAGCAVGVDLGVSHMATLSDGRVFENLMPSRSSYRKLRRLAKELHRRNRGSNNRKRSADKLAKAYWHIGNIRRDALHKATTQLAKNHGEIIIEDLNVQGMVRNRNLARAISDVGLGEFRRQLEYKCRWYGSRLVVAPRFYPSTKRCSSCGHVKDEMPLSERTYECESCGLVLDRDLNAALNLVAVSSTETLNACEDMASTAPARAPRAGSMKQEVNAAIPHGIDG

SEQ ID NO: 37537 - protein, 432 aa, Cenarchaeum sp.
MKYNGGKYVIKTVQYRLKISAKLTRYFDSMYSESHVWLNTGIKARRASLSVFDTNKIATICQGIPQSWVHGAIKEGHKMGGCTHVKYGKKVYPLYSNMPLGKKSKGNTVYCPKCDKPFKLQKGRLPDTLQSYKIVDVTNNADRERQFELHVTIREHVPDRVCAGVHAGIDIGGKHTLVVAKSDGRIEMTTLREKDTIRNIARIQKKMSHCKLHSHKWWTLHAQLQSIYHKMGNRQTDKLRKFAKKLLAQCDKIIMEGMNLRTMTTKGPGQKNKNRLMRQFKCGEARALLAQQALQHNTEYAEIDPKYTSQQCCVYGSTNTWRDGSRFRCHDCGVLMHADVNAAFNILFTFRTIQWSKRAQAVYALYNKAGMVLRGKIHLATLTIPSVVGDVMAGTGHPKDGHQSLTNKEHRMESPLNGNSPTSAVRQAVISL

SEQ ID NO: 37538 - protein, 453 aa, unknown
  TnpB Polypeptide
LNEKAAQLSQQWGLDVKNSLAGERKGEKIESNSWFTIVKHKQVLITNDSLDLPLKVHIEKELTRARHIRLYPTTSQQETLRKWFGTQRYVYNRALKLHHEGQPMNIKTLRQMLINKDINILEPHEQWLKEYNYDLKSEALRDLVKNYSSNMARYKSTGTPFKLKFKSEKAKTQSLSVLKKYWNNKKSFYSDVFSSTKMRSAEKLPEQLLMDSRLQRTRHNHFYLIVPMVGEEIARDEGREKFIFIDPGVRTFLTGYDSGQNVVEIGKNAVVRTEKLKHRRRKLQSKLAKLKTHKKRQNHRKALHRLDEKISRILSDMHKKSALCLCKSYETVFIPKLNFHQCTKLNRKSRSSMATMAHCSFNDRVVMKAEQLRGTSVIVVEEDYTSKTCSKCGNIKKDLGSNKIYSCVSCFSVFDRDFNAAKNIMLKYCCEHLMTSDASSVPLPLVERVRGSP

SEQ ID NO: 37539 - protein, 401 aa, unknown
  TnpB Polypeptide
MWTRQAYRYELKPNNRQRTLLGKHAGCARFAYNWGLARRIEEYKRTGKSSNAIEQHCQLNALKKTKFPWMYEVSKCALQEAPRDLDRAFANFYRGLKSGEKVGFPKFKKKGIHDSFRLTGSMHVFAREMVLPRLGEIRTKECTDIKGRILSATVSREADRWFVSFGVGRERPAYERTGRDPAVGVDVGLSSFCVLSDGRRIESPKPLNKALKLLKRRSRKHSRKKKGSANRKKSALRLARLHRKIKNTRKDFLHKVSTELAKTKSVIVVEDLNVQGMMGNHRLSRQISDSGWGEFVRMLEYKSSWYGSSLVRAPKFYPSSRICSACGAMRRHLDLSEREFVCERCGNIIDRDENAARNLERLATGSSPGSYACGDTSGGGTPLRDSGAVYEPCVYEAGSRH

SEQ ID NO: 37540 - protein, 368 aa, unknown
  TnpB Polypeptide
MVASKRNKNLMKRTARVYLNDLNVGKSEIVREFLAQCHSIMQYFVDLFWQRQDFSGKLADLPTVHRAKKKFGITTRLGQALAKQASECVSSVHQKKRKRKPQLKRHTVTLFYHFVTISPFKKKGFDWCVQLIGSGAPKLVIPLKSTSVINQRIAQGWQISKTLRMGLKKGRLWIDFIFEKVRPPLKTSGQVVGMDSNYKNGVVFSDSQVVGQSIYQRIQEFKKRQKHTHAEIKSRLGQALKKVDWSSIKVLSIEDLKLVKQGKRGTFSRLFNRRLSHWLYRTLVQLLERKCEEEGIQLVVKDPFKTSQFCSSCNRWDRRNRKGDSFRCVHCGYQSHADHNAAHNLELLGSAGVYGLRSYLSSKRQSFG

SEQ ID NO: 37541 - protein, 417 aa, Bacillus sp.
MSVGGRQNFPYDGIIGTNVLICEVNYMLVNKAYKFRVYPNKKQMELMNKTIGCSRFVFNFFLGKQKEKDAYWSIVQEMVQNGQFSTNNWKVTCLNKYETVKALPELKKHYSFLKEVDSIALQKSVEQLADSYDRYYKKQNKLPRFKSKKNPVQSYTTKHTNGNIAVIGNYIKLPKLGLVRFAKSREVEGRILSATIRRNPSDKYFVSLATESEVTELPKTHSAIGLDVGLKDFAILSDGTIYSNPKFFRALEEKLAKAQRVMSRRTIGGANWSKAKRKVARIHEKIANRRKDYLDKISTEIVKNHDIIGMEDLSVSNMLKNHHLAKAISEVSWSQFKTMMEYKAKWYGKQVITVGKNFPSSQLCSDCGHQNKDVKHLGLREWECPKCHTHHHRDVNAGINLKNEAVRLLTAGTAGIA

SEQ ID NO: 37542 - protein, 367 aa, Aneurinibacillus sp.
MIKHKGFKFRIYPTEEQATLINKSIGCVRYVFNHFLAKRKEMYETEQKTLSYKACSSLLTQLKKEITWLKEPDSTALQNALQDLDRAYQTFFNEKTGYPKFKSRKNRRQSYNTTNNKEAIRIEGTHIRLPKLGLIRFAKSREVEGRVLSATVRRNPSGKYFVSVLCEIEIQPLPKVDSQVGVDLGLKKFAILSNGETFDNPKYLRKYETKLARFQRIMSKRTKGSSNWNKARIKVARLHEKITNCRMDFLQKLSTTLIRENQTICLEDLQVVNMQKNHKLAKSIADASWSEFRRMLTYKANWYGRTVCFVGKTFPSSQLCSACGYRNQDVKNLNLREWDCPECHTHHNRDINAAINILQEGLRLLEI

SEQ ID NO: 37543 - protein, 367 aa, Aneurinibacillus sp.
MIQHKGFKFRIYPTEKQATLINKTIGCVRYVFNHFLTKRKEVYEQEQKTLNYTSCSALLTPLKKEFVWLKEPDSTVLQNALQDLDAAYKKFFNEKKGYPKFKSRKNRRQSYNTTNNKDAIRIEGTYIQLPKLGFVRFAKSREVEGRILSATVRRNPSGKYFVSVLCEVEMQPLPKVENQVGVDVGVKQFAILSNGATFDNPKYLRKYEGKLARLQRIMSRRTKGGSNWNKARIKVARLHEKIANCRTDFLQKLSTTLIRENQTICVEDLQVSNMQKNHNLAKSISDASWAEFRRMLEYKAKWYGRTLSFVGKTFPSSQLCSCCGYRNKEVKNLNLREWDCPECQAHHDRDVNAAINILQEGLRLLET

SEQ ID NO: 37544 - protein, 263 aa, Aneurinibacillus sp.
MVERHRIKMPTLGWVRLKEKGYIPVNATVRSGTVSQKAGRYFVSVLIDVQESYEQAERGDGIGIDVGIKDFVSASDGQVFGNINKTSAIKRTEKRLKRAQRALSRKYEQRKRGEKSATYRGSNIRKAVLRVQTLHMRLANMRSAYRSYVVSLLVKTKPAFITLEKLNVKGMVKNRHVARAVSNQGFYDFKLKLLSACKKYGIEVREVGMFYPSSKLCSCCGHKKVQLSLKERTFTCENCGISLDRDFNASLNLKQATEYTVLT

SEQ ID NO: 37545 - protein, 397 aa, Aneurinibacillus sp.
MKTRFYASKHNLDRLFACNRESANVWNECISLAKTYAMQNNGRWIGKTELQKLIKGKYPLHSQSIQAVAHKYLFSRDGARQAKQKGYINKYPYKTKKYFNTKWANHGFMLHQNGKIELSMGIWERKRQSPIVVYVKDVPKGQVKEIELVYDRGLRLCLSYEDGIVAEPKQVGIRCAIDVGEIHTIATVAENGANLIITGRKIRSIKRLRNKKLAKLQRKMSKCQKGSRQWKRYNHAKQYVLSQSDKQLQDALHKTTKAFVEWACQQQVKQVAIGDVEGVQRGTSRNKKKNAKKKRRRRIHNQKMGQWQFGKLFDYLTYKLKSKGISIEKVNESYTSQQCPCCGKRKKIASRTYVCSCGYTQHRDIHGACGILSKVMYHGEIQRLPVEVEKTKYLRIA

SEQ ID NO: 37546 - protein, 385 aa, Aneurinibacillus sp.
MLRGCKTEIYPTPEQADKINRTIGTCRFIYNLYLSKNKEQYEKDKTFLTANDFSKLVNHDISKQDEYKWMKEVSSKAVKQAMVNGEKAFKKFFKGLAKYPRFKKKKNQDVKAYFPKNNQTDWTVERHRIKMPTLGWVRLKEKGYIPVNAKVRSGTVSQRAGRYFVSVLIDVQERYEQAERGDGIGIDVGVKDFMSESDGQVFGNINKTSAIKRTEKRLKRAQRALSRKYEQRKRGEKSATYRGSNIRKAVLRVQTLHMRLANIRSAYRSYVVSMLVKTKPAFITLEKLNVKGMVKNRHVARAVSNQGFYDFKLKLLSVCRKYGIEVREVGAFYPSSKLCSCCGHKKVQLSLSERTFICENCGISLDRDFNASLNLKQATEYTVLT

SEQ ID NO: 37547 - protein, 372 aa, Aneurinibacillus sp.
MDITITAKIKINPTYEQMDLLRTTLDAYRSGCNFVSDLVFGTKQLAQAKLHKMTYESLRSRFSLRSQMAQSVMKTVIARYQSLKSNGHDWTRVQFKKSEYDLVWNRDYSLIKGLFSINTLSGRIKVPFETKGMEQYFDGIWSFGTAKLVNKYGKFFLHIPMTKEIKEASEHTIRQVVGIDMGINFVAVSYDSHGKPLFFNGRSIKNKRSKYKHLRKQLQQLGTASSRRKLKRIGGRENRWMADVNHQVSKALVKRYGANTLFVVEDLTDIRNVTERVRIKNRYETVSWAFYQLRTMLEYKALMSGSKVIAVDPRYTSQTCPKCGHTEKENRNKKKHMFSCKTCRYTSNDDRIGAMNLQRKGIEYIAEVTTQA

SEQ ID NO: 37548 - protein, 425 aa, Shigella sp.
  misc_feature (68)..(68): Xaa can be any naturally occurring amino acid
MCQVFGVSRSGYYNWVQHEPSDRKQSDERLKLEIKVAHIRTRETYGTRRLQTELAENGIIVGRDRLAXGNKYIPYGKMASWLVEWKNATETQWLKDAPSQPLQQSLKDLERAYKNFFQNRAAFPRFKKRGQNDVFRYPQGVKLDQENSRIFLPKLGWMRYRNSRQVTGVVKNVTVSQSCGKWYISIQTESEVSTPVHPSASMVGLDAGVAKLATLSDGTVFEPVNSFQKNQKKLARLQRQLSRKVKFSNNWQKQKRKIQRLHSCIANIRRDYLHKVTTTVSKNHAMIVIEDLKVSNMSKSAAGTVSQPGRNVRAKSGLNRSILDQGWYEMRRQLEYKQLWRGGQVLAVPPAYTSQRCACCGHTAKENRLSQSKFRCQVCGYTVNADVNGARNILAAGHAVLACGEMVQSGRPLKQEPTEMIQATA

SEQ ID NO: 37549 - protein, 388 aa, Psychromonas sp.
MAQYAGNCRFLWNKALAINLFKLENKQKLCYYQEFDFFSKLWKKSEEYGFLALSPVQTIQQTLKQLERAFKDAFDKNQPLKRMPTFKKKSGNNSFSFPQGFKIDNNGKRVFLPEIGWVNFRKSQAVLGNAKNVTVSQKGKHWFVSIQVEQEREEPKHPSNTIIGGDLGVKRLLTLSSGSFFKPINTEKQTTKIKRLQKQFARKVKFSANWKKFKAKIITQHTKVANIRHDRLYKISTQLSKSHAIIVLEDLKIKNMTKSSKGDSEQHGKMVKQKSGLNRVILNQGWGMFKALLKYKQVWRGGKVIFVDPKYTSQTCPCCQHKSKDNRLTQSDFVCVECGYQNNADHVGALNILARGHRVLACGEIGISQLSEAGTCIVSDHNKPMVLN

SEQ ID NO: 37550 - protein, 424 aa, Hydrogenophilus sp.
MLIAHKIALDPNNVQATYLKKACGVARFAYNWALAEWRRQYEAWKADNTLPKPSQAALRRQLNAIKREQFPWMLEVTKCAPQMAIIQLGAAFKNFFAGRARYPQFRKKGVHDRFTLTNDQFTVEGCRIRIPNLGWVRMREPLRFTGKIMSATISRVADRWFVSITVDTPDGSHLPLAENEPQDENQVCGEFRRSQNQGAVGVDLGVSALATLSTGEKIAGSKPHKALLDRLRRRSRSLSRKAKGSANRRKAKAKLAKLHARIANIRQDALHKLTSDLTRRFHTIVIEDLNVRGMMANRHLARSIADMSFFEFRRQLEYKAAMRGGMVVVADRWFPSSKTCSPCGTEQEKMPLAIRQWTCPDCGSIHDRDVNAARNLLAHGLAAPSGSTASSAGCEACGEEGSGRRRKTAVKPASVKQEVSFVPV

SEQ ID NO: 37551 - protein, 357 aa, Streptomyces sp.
VRVSRASDTSGSTSTARCSLGIASFLTDSNGTHIPNPRHARKAACKLEAAQRALSRFPRCKAKNRIRNHQRAVDKVAALHGKVRRRRLDHAHKTALTLVREHDFIAHEDLKIRNMSKAPAPKPDRDRPGVFLPHGAAVKAGLNYSIADAGWRVFLTILNAKAESAGREVMAVDPRNTSRRCPACGHIAKESRPTQEKFHPSGRGGVTGLRTNESPMPSVGENSFLIVASRVAWLSAPLLFIRFAAVSVNEAPPPVKVWYRVFSSTVMFVPAQPVPALKATGAWASRPRVTCRPPESSVVVSVMPTLSPEAWAVPDESPVRPAEASAAASSTRTALPGRIMLKTFLGGSVGNVPSNEA

SEQ ID NO: 37552 - protein, 494 aa, Bacillus sp.
MTRKSTPTYTIEFPLRIPIWQQDRLEKKLKIARLVYNSCLGEALKRHKAVKANKNYRILINEPKSKIRDKQLSELRLTFGFSEYGMHHFVKSVQQKFKENIGSLEAQKIATRAFEAVEKLHFGKAKRVHFKSFRDDISVENKSNSTGLRYVDGNILWGDKPTKKNPKPKNWICAPITPKANDEYAHIALLDKTKYVRILKREVRGKVRYYAQLILEGYPPKKSNRKVADDETKRVGIDIGTSTIAISSESKVELHELAPECNTVERELRRIQRKMDRSKRSINPNNFHENGTIRKGRLTWTYSNQYKKLRQKRKELFRKTTIKRKLAHEILANDILHLGSDIRVETMRFQSLQRRAKNTTRNKKNGKINHKKRFGKSIANRAPAMLLAIIDRKLGYQGRTIKKIDTYATKASQFNHRTNEYNKKQLSERWNHFGEISIQRDLYSAFLIGNTNETLNSVDVDLCNAQWDNFVKLHNREVAQLKKSSSKTLRWFVA

SEQ ID NO: 37553 - protein, 388 aa, Thermosporothrix sp.
MSSLKTYKYRLYPTKKQAITLQGVLDRLRELYNAALQERRDCYRYTGKGTSYTQQAAQLSEIKELRPEYQQIHSQVLQDTLRRVDKAFQAFFRRVKEGETPGYPRYQGKNRFDSFTYPQSGFSVTHDNRLCLSKIGTIKLKLHRPIEGKGKTCTLKREGDHWYCCFVCEVETIPRTPSPDEEVGVDLGVSKLATLSTGDVIEHPRFYRQAQKKLAKAQQALSRKKKGSHRRKKAVKRVARLHRKVRHQRNDYLHKWSRWLVNTYQTIVFEELAPATLSKRPKVKQDAETGQYLPNGASAKAGLNKSILDAGWRQFVTFCQYKAAWAGTVQIVMVDPKYTSQTCSGCGAVKKKELSERWHACECGCSLDRDHNAAINILRLGRSRQANT

SEQ ID NO: 37554 - protein, 461 aa, unknown
  TnpB Polypeptide
  misc_feature (377)..(377): Xaa can be any naturally occurring amino acid
MGVALWSARGADPRPACRASRQGKPLMRVLQAFRYAVDPTPAQARACRSHVGARRFAFNWGLALVKARLDAKAGGQDVGIPYTLPALRREWNRAKVTVAPWWQENSKEAYSAGLDGLARALKNYFESRAGKSAGRRVGFPRYCKKARRRQSVRFTTGAIRITDRTHIVLPRLGRMRTHEPTTALAERIQAGTARILSATLSNDGDRWYASFTCEFEREERQPTRPTSIVGVDAGVRHLAVLSTGETVANPRPLGKAHRQIARLNRALTRRRRGSRRWNDTARRLGRAHARVAHIRADVMHKLTTRLARTHGTIVVEHLNVSGMLQNRRLARALADAGLGELRRQLGYKCLWYGSQLIQAPTFFPSSKTCSQCGAAKXTLPLSAKVFFCNHCGAALDRDLNAATNLAALAAVSVTGSDPEALTARGWDVRLAGHGEQSQMNCEAGRADAQKTGAAVLQGTAT

SEQ ID NO: 37555 - protein, 385 aa, Bifidobacterium sp.
LQRNELARLFGCVRVTWNVSLAWQYSERRAGLGLQGYGQLSKHLTQMKRDGSYMWLNDVSCVPTQQTLRHLGCAWDMHFKSMAPDWEGPYVEEPRFKKRGKRQTAEFTRSAHWRIRHEPDGRYGYLRLPGVTGELRFRWSRDLPSEPSGLTISLERSGEYMVSFNVMRNEPDSWPEPIHEWCGIDLGLISLAVIASQDKGGATHMENIPNPHVLYEHAERLAVLQRKLSRLSKGSNRYEEQRKRVAKEHAIIKNIRRDCLHKLALKIVAENRHIALETLYPARLAKTRLGKSVLDTGWRTLVSLIEAYAARMNRQVVRIAWNEPSSQICHACGVRTGRKPLHVREWECPDCHVKHDRDANAAWNILQMAYGISHAQPHTDCENMR

SEQ ID NO: 37556 - protein, 424 aa, Candidate divison MSBL1 archaeon
MELTQKIKIGPSEEQEKVLTSLSETCRLLYNFSLAERIENWKKNKNKPKDEREYITYVDQQNKLPGLKKKYPRYKWVYSKVLQMTLRKLDADYKSFLALKKNGDEKARPPRYKGKKYFTTLCYNQSGFKIEREKISFSHNHPSDTQLEFEVPEKFDFENKNVKQVEIFRDGVKKEYYVSITYEVETPKYVDNGLYQAFDLGVIKHTGVNLHRKFVEFWNPRPDKYWQPKIREVQSKRDHCKKGSHRWMRYNEKLWKMRRKCANQMRDWQHKASRKIVNNTKANTIIIGKLDPKKMAEGGENKGLNWSLQNTGMIGRFARFLAYKAELVGKKVIEISEENSTKECCICGKKENRPLYERTIKCDCGNVMDRDRNSSVNHLKRFLSQKRPVDGQSILAGMGLLRQTGSGYAYRPTPEYSQEAPCES

SEQ ID NO: 37557 - protein, 399 aa, unknown
  TnpB Polypeptide
MNKAYKIRIYPNKPQIDFIEKSFGICRFVYNSVLAYKIDSYKYGIKYGAYDAIKDLTLIKKIEGYEWLQEVDSQVLQQSILNLDNAFIKFFKEKKVGFPKFKSKHKTQDSFRVPVGFKIDFENKKIKIPKIDWIKFKDKRIFDSKIKSITISKNKCNQYFASILVEEEFEVNLPKEVLDSKIFSADMSCKDFLVSSEMKFENQKFYRKNERRLKIRHRKFSKKKKGSKNFERSRMTLAKTYLNISNQRRGYQWNLCHELTSKFDLLIFEDLNIEGMRQFNKGISKTVTLDFSFSEFLTTLEWKCFKENKHFVKIGRFFPSSKLCSSCGQIKKDLTLADRIYICDCGLEIDRDLNAAINIKKEGINLLKNSTVIETESYACGNMSQDVNNSAQESQIIKD

SEQ ID NO: 37558 - protein, 538 aa, Streptomyces sp.
VLAAPFVVPGPTGVAVRDRLKDLTDRDERVLRSVGAHLGVLASRDLKVRCADGLGHSTESWAGRKRVLTPLSSSRWAGALTKASHDQWALARRCQTAHVQGLEAGIRMLRHRLSLPIGERGSKGVPGGYRSRREWHAKSRRLATLEARRAVAVADWRAGRVRVVRGGKGLLSTRHHLADARLTEAEWRERWEAERWFLSADGESGKRYGNETIRVTPDGEVSIKVPARLAGLANAPHGRYVLSSRVRFAHRGSEWADRVETNRAVAYRIHHDPTRGRWYLTASWQIPLAPAVPLEAALAHGVIGVDTNADHLAAWRLDTHGNPIGNPRRFSYDLAGTADHRDAQVRHALSRLLNWAKTCGVVAIAVEDLDFQTEKTREKHGRKRRFRQLISGMPTAKLRARLTSMAERTGISIIAVDPAYTSRWGAGHWQKPLSGKNRKSTRHDAAAVAIGRRAQGHPIRRRTAPPPQHQSDAAGHRTGQARSGTLGREEPRPRIPGPRTRCVPPGHGAKAGDQLAHDRSGHAAEHGFWQQASIPLSL

SEQ ID NO: 37559 - protein, 394 aa, unknown
  TnpB Polypeptide
LTCFLVCVILGLVIKKDKKEMTEIRKKSYKFRLYPTEEQKVLFSKTFGCSRFIWNQMLADKIAYYKETGQTLKNTPAQYKKEFPWLKEVDSFALCNVQLNLQKAYKSFFQSGFGFPKFKSKKKAYKQSYKTNNNHGNIELCDGKIKLPKVGWVRLKQHRKLKGLIKGATISKTTTGKYFISILCETDIPSYPKTKSSIGIDLGLEHFAILSIGEKIENPRFLVSASKKLRREQKILSRRGLLAKQKGKSLNDCINYQKQRMKVAKIHERITNRRKDFLNKLSTSIIKNHDRICMEDLRISKNLMKNHRLARAIGDVSWAEFCRMLEYKADWYGKKIIKVNKWFPSSQICSNCSFNSGKKALHIREWACESCGSHHDRDLNASINILNEGLKILA

SEQ ID NO: 37560 - protein, 430 aa, unknown
  TnpB Polypeptide
MKQVERHWVKEGHELYAICDDLTFRAKNLYNAGLYQVRQSIFARNKNEEETKPSVLSWVELVSQFRKEKQPDMLALPSKVATNILKLVGSSISSYYQLLKCYLDKSNLNVTTKPKLPRYLHKTDGHYMVEFTNQTFSKKRGVNGELILCPKDLHLMIPTKVENPKCVRIVPKLGAFVIDVIYEVEETPLQHTGNYAAIDLGVDNLASITFSNGVQPLLIKGSKIKSLNQGYNRLIAKTQSKLPTNQHSNKRIHRLWRNREKKLHSELHQITAFLSLYFDEMAIEKVFVGKNKGWKQGLDLGRKTNQSFAQIPFTTFISQLTYKCQLRGIEVIEQEESYTSKASFIDQDDIPVYGEIKTKPNFSGKRVSRGLYKTKHGIILNADVNGSYNILVKGLASLGKVLSRSLVSFHTKSLSGLGTQSNVNLISQYM

SEQ ID NO: 37561 - protein, 420 aa, unknown
  TnpB Polypeptide
MTSLEAKKESLKRRKQLKLKVFTLKIDNKSIKENELYFKMLFLEARWLYNHLLSQEDIFKINVTDVKSVQVKVKDGFDEREIKYLSCAMKQASCDKLKDNIKALSKAKKKGLKIGKLNFKSEINTIIIKNFKVYFKAKNRKNKTRLPRLKNLVKVYGLSQLNGALEIGCAYLVRKPSGFYLKVTTYWPKENTQPKKSLGIDFNISNTLVISNGQQIEKISIKESKRLKKLQRKRDRKVKGSNNRFKHNKLIAREHEKIFNKKEDISNKIVNKLKNYNVVIQDDNLRNWKQNKSYSKTIQHSILGRIKSRLISLETTKVINQFERTTNTCFSCGNKLNLSLGDRVFTCPECGFTHNRDLNAAKNIMKIGLEQSEFTPLESYIDFGPVKGIEVKTLKKENLEKDKSSHSIECDIVHVVRLHV

SEQ ID NO: 37562 - protein, 420 aa, unknown; identical to SEQ ID NO: 37561
  TnpB Polypeptide

SEQ ID NO: 37563 - protein, 376 aa, unknown
  TnpB Polypeptide
LETKINAYQSNRTYIYKYDLVKQITDLKKDCPWLYEICNQSLQQTIFNLDTAFKNFFRNKKHFGFPKFKNKKSKQSFKIMSDIKIDFENKKISIIKFRDGIKFALNRSFSGQIKQATVSKVSSGKYFISITVNNKQEPPFKAQIEEKTSIGIDLGINSLFTLSDGTKFDNPRYLNKSLKKLKFLQRKYSKFKGRKNKHKITILYEHIANQRKDNLHKISTQLIRDNQSIALEDLNISDMMKKCKPKQSKNGKYIPNGQNAKSGLNRSIHDAGWGIFVLMLEHKAEWYGKNILKIGRFEPSSKTCSGCGHINQDLKLNNREWKCPECGTTHDRDVNAAINIKNFALSKNKTVCGVHTENQKELPRLLGAMTSEAHRE

SEQ ID NO: 37564 - protein, 376 aa, unknown; identical to SEQ ID NO: 37563
  TnpB Polypeptide

SEQ ID NO: 37565 - protein, 406 aa, unknown
  TnpB Polypeptide
MLKAYKYRIKPNKEQIEMFEKHFGSVRFVYNWGLEQKTKAYQETGETILHNKLVTSLPELKEENPWLKDVNSQAIQSSLRNLDNAYTRFFREKKGFPKFKSKNNSKQSFQCPQSCSIDFDRGFLNIPKIKNIKTIFHRKFDGEIKTLTISRVASGKYYVSVLVEDGKELPSKPKLDRNDAVGIDLGLKDFVIMSDGDRVSNPKYFRKSERKLAKLQKRLSKKQKGSNNRNKQKQKVAKTHEKIANQRKDFLHKTSYEIVHKNQGTICMEDLCVKGMIKNRRLAKSISDVGWEMFETFLKYKVEWYGKNFLDIGRFEPSSKMCSNCGAIKSDLKLSDREWICSKCGVNHDRDINASINIRNMAFTNQNLVRCIGLGQPDSKPVEKADRTKSKSASVKQEAQGSLNLG

SEQ ID NO: 37566 - protein, 450 aa, Desulfotomaculum sp.
MYPVKPLKDILLNKRRGGENVKRKKKKYDELGQLIVEEHEEPYQLLTTKAKIINLSNQDALLLGLAGYAATKMWNVANHERRTVWQETGKIPGFPEQCKALKTNRWYKLLPSQTAQEILAELDDSYRSWYSHRKNGNKLAKPPGFRKKDTLSTLTFKQNAFAMPDIGQIVLKLPRTYARRVVTLEYKLPPETTLGKVQQVKLSYEHKTGSWYLLIYHKVKVNYLPLQNIMALDLGIVNIITGYITNGKSFIFPGGELLALDRYFNKMKAKTNSTKSRKCRFLNRKWSRQRNHFLHVLTKRVIDQAEANNVSHIIVGELKGIRLNKNWGAKQNQELHTWPYRRIIQMLRYKAALRGILVEEVSERNTSTTCPLCSKRVKSARVERGLFVHCGKAFNADVVGAFNILQKYLRDNGLPLLEVVGALARPVVNLFVWRKTTPLGREQGTFKLAA

SEQ ID NO: 37567 - protein, 425 aa, unknown
  TnpB Polypeptide
MTTITLVTESKLYLKDNTALYDYFDDYSKLFNFLVRKCVHHLKNKLNGEKESQYRTNLMIKFCITNRMAKAIIRTAKNQLKLLSESARYQYNNLYKRRRSLFKKIQKLKVILSLSSVSLKQRKLAKLRLFWTQMKLNKANQLISNGLKLHLTFGTKHLLKTNKAKFLAKRDNQVVYIGDKNETCGNQQFQINFNSKCNRFEYKLRLDNQWVSGVDKYIFGSFVLKNKDAKVHILKTLSEKKSNPLTYRIIKRDNDLYLQIMYRRETFDITRNNYGVLGVDFNKGFISVSEINTDGKLQSLTRYNYLHQGKATKTKTSMLELVSKLVSQAVNVGKDIVIEDLVSLDSNKKQEKTTSKNYNRMINSLKFGLFKHCLVSKATKEGVSVHTVNPYNTSKIAKASYTDKMKLNVHDAASYVIARRFYQYN

SEQ ID NO: 37568 - protein, 395 aa, unknown
  TnpB Polypeptide
MLKGIKIALNLTDEQEQQMWKSAGVARWSYNYAITRCKEQYLKYLEDNTLPKTLTESEIRKELTVLKNTTHSWLKEVGSNVSKQAIRDWNNARNLFFKGLGKAPNYKSKTTSKPSFYVNYESLRRMSGGFRGERLGFIKTREPLPRLPKGSHYKNPRISFDGKHWYLSFSYEVPTISVELTDLVIGVDLGLKTLATLSTGEFVKNINKSHRVKQLEKQLRREQRHLARQLQANTKGYLITTNGRQKPIYKKSLELCSNIQNTKRKIKLLYRKLASIRLNHTHQTTSHLVKQLPKGIVIENLNVKGLLKNKHLSKHIQNAMFYKFRRQLEYKCLQYGIQLVVADRFYPSSKTCSYCGYVKSDLKLKDRIYKCDSCGLKKDRDLNAAENLAYYFYRS

SEQ ID NO: 37569 - protein, 193 aa, Streptomyces sp.
MNGSRAAPGTRVCSPHASARACSQGAGGEPARGLGRETSTMLARTYDLIRFEKLNIKNMTHSAKGTVEQPGKNVAQQSGLNRANLAQGRGLLRQRTEYKAPGRVEDVPAPYTSLRCSACGWIDRNSRKSQAEFECVSCGFTCHADTNAATNVAAGQGGICRPRRTAGAGGVTTATSRSSTREPQPNWVGIPLF

SEQ ID NO: 37570 - protein, 351 aa, Arthrobacter sp.
MSKRYRYRAYPTPDQEQRLTRLFGCVRVVFNDAIAARRTAREQGEGLPSAAELSRELTAAKQTPARAWLAEVSAIPLQQALADADRAHRNHFNSVTGRRKRHRVGAPRFRSRRDATQTARFTRNARFRVNGGWANTSPGGGRLVLPKIGALRVAWSRPLPSEPSSVTLIREADGRYYASFVVGVSSVHRPLPKHEVAGIDLGLEHLATIAYVDGTSEKVENPRLLKKKLAKLAKAQKELARRQKGSANRRKSRRRVAILHREVRETRADHHHKLARRIVDENQVIGAETLGITGLARTRLAKSVHDAGWGMLLRLIGEKAAESDAPSSKRNGHSHPLDSARRADSSAKPNH

SEQ ID NO: 37571 - protein, 536 aa, Butyrivibrio sp.
MTGEEHKKALKQYHKLSDRHSLVAETDMPYSDVLKIVILSDKIRKAGNELVGLMRKNYDQLFRTKRYRKLLFLYGNTGDKAKRKILANQLNEMQKSYNVTWDYCRKSMIPIGKKYGVDAVFALTKAEDVWRGVEKCLYGNGRTIHFSKYGELPCIRAKQINRGIPISVKDNRLQFKVGKTTFGIQADDRFQADEVNAVLAYLAEPEIMDKKAVNTLIEDAYCVDTYRPCYATLVSKMIRGKYRVYLHLTIEGKAKTKYDKYGNPRHKYGKGMIGADIGTQTIAYTSDTEAGLKNLSERGNSIQTSERKERLLYHAMDRSRRATNPQNYNDDGTVKKGHKTWKYSNHYKKLRARHSELCRINAVNRNLAIKEDVNHLRSLGDVFVTEPKNASKLMKRAMETTKNDKGRVNRKKRFGKSIKNRCPGGFQSNVEKKFKATGGTYIEVPNNYRASQYDHTADDYIKKKLSDRLFKLHDGTEVQRDWYSSFLLYCYDHMTHDIDKNKCNTKFEEQYNREKALITWIKANKLKILNSGIKIA

SEQ ID NO: 37572 - protein, 392 aa, unknown
  TnpB Polypeptide
MPKKSQHIKPGYVTQYNTIKARLYPDEAQAELFEKTFGCCRYIWNQMLSDQQRFYAETGKHFIPTPAKYKKGAPFLTEVDNQALIQEHNRLSQAFRQFFKNPESFRHPNFKRKKDDRDSFTACNHVFESGPTIYTTRDGIRMTKAGVVKAKFSRRPQAWWKLRRITVERTKTGKYFCSIAYEYTEKAREAAVPTPETTIGLKYSLAHFYAADNGEMAGPPRWLKQSKEKLGKIQRQLSRMQPGSRNYEQAVQKYRLLHEHIANQRRDFIHKESSRIANGWDAVCVRDDDLREMAREIKLDRVPDAGFGMFRECLRYKLERQGKPLILVNRYQPTTRACSACGFVGEAVSDRVKTWACPKCGAVHNREINAAKNIKTQGLSQYFNRQELRESA

SEQ ID NO: 37573 - protein, 173 aa, unknown
  TnpB Polypeptide
MNTYKAYKLRIYPTDLQRGLIEKTFGSTRYIYNSFLAERKSKYEECKTKVNFFERLKELTDLKKEKEWLREIDSCALQACVYNLDDALQKIFKGNGYPRFRTNNILKTYKNKKYESIKIDFDKRIITLPKLKEVKFRGYRTTKEIIGKIKSATISKDANKYFVSILVEVPFIT

SEQ ID NO: 37574 - protein, 380 aa, unknown
  TnpB Polypeptide
MRRTNTIQLVPGAQEEELMHRARVSVALHNTINYRRRQSYFTGKVDYSTTYEYNGFKTVLGSATTQQIIRKCDEEWKSYWALLKLWKTGGLEDKTGIPGYWDKKNPTTLMRNDSYRFEDNILKLPKKLEVKWKGNKVWTGKQGRMEIFYKNDSKKWYAFIPMEVEATETTGRKTAYIDLGIKNIFTCWIEMASNAEIFSGRPILADWRYSTDKLSKLQSELGKRSSKRLRRLYTKRQRRFRHAINTIVARFTRKCVSADVSKVVIGDVKGIRNSGSKGRTTNSLVHNFWSFGYVYDRLQTTLENNGIDLLRVNEAYTSKTCCLCGVIHKNGRKHRGLYVCPDHGVSMNADVNGVANIKQNNNCEPPGSSNWAMASPLRVL

SEQ ID NO: 37575 - protein, 331 aa, Tenericutes sp.
MCKALKELENEYPFLKEVDSCSLRCSIFNLEDSYKNFFAKSQYPKFKNRYSKQSYRTTCIRSGYKGKSYSNIEIDLIDKKVKLPKIGLVNIRGYRNLREIKGKIINATIEKEATNKYYVSIIIEEEIEREKVIPNSIVGIDLGVKDLVVTSDGEKFGNKKELLKREKQIKRLQRKLSRQIRNSKNYLKTKEKIARVYSKIKNSRKHNIIEIVNKLIREHDIIVSEHLNVKNMSRNHHLSKSILDASFNKICEYIKWKTKIQGKYYYQVDAYFPSSKKCSHCDNITIKTNNLNVRDWICDKCGCENDRDINASINIMFEGLKKYYQNQNNNI

SEQ ID NO: 37576 - protein, 403 aa, Ardenticatenales sp.
MVESVTLVEQHLIRRTDARFALIDAAAFASKNLYNAATYLVRQAFIHQGRWLRWAPLYHLLKTHDAYQALPRKVSNLVLKQVDLAWKAYFAALEAWRQDPSQFLARPCLPGYKDKTQGRNLLQYDRQALSRVGLRQGLVQPSQLGITLETRQTQVQQVRIVPRKGYYMVEVVYEHDVQPAAVTPTLVASIDIGLSNLATLTSNKRGFQPLVVNGRPLKAMNQYYNQEKARLQAELPTGQRTSHRIRDLTANRNRKVRHYLHGASRLVIDHLVAEGIGTLVLGRNKQWKQAIALGRQTNQAFVAVPFAEFIQMLTYKAQLVGITVLLQEESYTSKCSFLDQEPIHKHDRYLGKRIQRGLFRAADGRLINADVNGSYNILKKAVPNAFADGIEGVAVHPRRVLPA

SEQ ID NO: 37577 - protein, 409 aa, unknown
  TnpB Polypeptide
MHQAFRYEIDPNDRQRTHLAKHAGCARFAYNWGLARRQEVFKQAGSSPNAIALHRELNALKASELPWMYEVSKCAPQEALRDLDRAYERFFAEIKAAKAERRHTRVGRPRFKKKGTSRDSFRLTGAIRAGQKWVQLPRLGRLRLKETTEKLRGRILGASVSRQADRWFVSLRVEMQRPEPEFRSGAAVGIDLGLLSFAVISDEEQPVQGPKALERGLRKQRRLARGHSRQQKGSRNHKKSALRLARHHRRVANIRGEFLHKLSTRLAKTKPVLVVENLNVAGMLGHRSLARKIADAGWGEFRRQLEYKTRWYGCRLWIAPLFFPSSKTCSGCGAIKSELALSERVYSCEACGLEIDRDRNAALNLARLVAVSSTETTKTPGGEAVRPATVRRASVKQEPSRRCAVGTNA

SEQ ID NO: 37578 - protein, 239 aa, unknown
  TnpB Polypeptide
LKFDKIWYSFHQHRQWHGDVRYIQILRDAAGDYWLCVITDDTSTEPFTHTGESVGIDFGLKAFLTLSNGDKIQAPEFLKQSLNTLRSLNKSLSRKSKGSNNWYRAVRKLARHYRKVANQRLDWQWKLATRLCRRFDIIVAETLNIDGMKRLWGRKISDLAPYQFFTMLEYKCVKHTKKFHPIDQWTATTKPCSKCGHKNDNLTLNDRCWTCPKCYAEHDRDINAAINILKAGLAASVEQ

SEQ ID NO: 37579 - protein, 404 aa, unknown
  TnpB Polypeptide
MRKINRSYRFRLYPNKKQTELLAKHFGCTRLVYNTFLNQRIEQYKLTGKSDNYYEQAKILTELKKQEETAWLNEVNSQTLQFAIRSLETAYNNFFKKRTKFPKFKSKHSKNSFTVPQFASISEGRLFIPKFKEGIKCRVHREIKGKIGKVTITKTPSGKYFVSVFTEEEYITPLKKTGKSIGVDMGLKDLFITSDGETFNNNRYTKRYEYKLAKAQQHLSRKKKGSRGFENQRLKVARLHEKIANSRADYLHKCSISLVRRYDTICIEDLNVKGMTKNHHLAKSISDASWSSFVNMLTYKAEWNNKKIIKIDRFFPSSQTCNVCGYVNKETKDLSVREWECPVCHAHHDRDINAAINILRFGLNNNNNISAGTVDYTGGEEVRADLLESHSSTKPEAHQYLNCV

SEQ ID NO: 37580 - protein, 402 aa, unknown
  TnpB Polypeptide
MRKINRTYKFRLYPNKRQIELLAMHFGCTRFVYNFFLDQRIEQYKLTGKSDNYYAQAKTLTALKKQEETVWLKDVNAQTLQFAIKSLELAYTNFFKKRAKFPKFKSKHSKNSFTVPQAASVAGGRLFIYKFKEGIKCRVHREIVGKIGKVTIIKSSSGKYFVSVFTTEEYVTPIEKSGKPIGVDLGLKDLLITSEGETFKNNRYTKKYECRLAKAQRHLSRKKKGSKGFENQKLKVARLYEKISNSRADYLHKCSISLIRRYDTICIEDLNVKGIVKNHRLAKSVTDASWGKFVNMLTYKAEWNDKNVVKIDRFYPSSQTCHVCGYVNKDTKDLSVREWECPVCHAHHDRDVNAAINILRFGLNNNISAGTVDYTGGEEVRANHLESHSSVKPEAHKLKTCV

SEQ ID NO: 37581 - protein, 376 aa, unknown
  TnpB Polypeptide
VYNFFLDQRIEQYRITGKSDDYYSQAKFLTEMKKQEETVWLNEVNSQTLQFALRSLDTAYKNFFQKLTKFPKFKSKHSKNSFTVPQNASIADGRLFIRKFKEGIKCRVHREIKGKVGKVTITKTPSGKYFVSVFTEEEYITPIVKSGKSVGVDLGLKDLLVTSEGETFKNNRYTRRYECKLAKAQQHLSRKIKGSRGFENQRLKVARLYEKIANSRADYLHKCSISLVRRYDTIYIEDLNVKGMVKNRRLSKSITDASWGKFASILTYKAEWNNKKVVKVDRYFPSSQTCNVCGYVNKDIKDLSIREWECPHCHTHHDRDINAAINILHFGLNNNNNNNISAGTVDYTGGEEVRTDQSESHSSMKPEAHNFLKKYM

SEQ ID NO: 37582 - protein, 380 aa, Varibaculum sp.
MILNIEYRLYPKTKQENLLQQNFGCSRWVYNHFLEEKIRFFKETGKSLSYCKCSKILTALKTQEDTAWLSEADSTALQQSLRNLEDAFKNFSERMHQGVGFPSFKKKKSRKTYRTTIAKIVDDSHVWIPKVGLVKARISRPIQGRITSATIKQTSSGKYFIVFTCSDIPQPPKAETGKAIGIDLGIKSLVTTSDGEKIEGVADTRKLEKKLAKEQRKLSRKKKGSNNRNKQKVRVARVHEKIASKRRDHLHKVTAKLISENQVICAETLDVSGMLKNRYIAKSIANQSFATILGFLEYKAKLKGKTFVQVGKEFASSKICHVCGVREEKMPASKRRWKCKSCGARHDRDINAAENILAEGIRILNGTEGHSGTAAITVAA

SEQ ID NO: 37583 - protein, 384 aa, Varibaculum sp.
VERGYEYRIYPSQQQTVLLARNFGCVRWVYNLFLRTCIDFYERTGKQLRPFDCIKMLPGLKEQEGNSWLAESDSVALQQALFDLGKAFQNYFERRNQGVGFPSFKKKKSRKTYRTSKAKIVDDSHVWIPKIGLVKARISRPIQGRITSATIKQVPSGKYFIVFTCTDIPQQPKESTGKAIGIDLGVTTLVTTSDGQKIGSLEGSKKLDKKLAREQRKLSRKKKGSNNRAKQKIKVARVYEKIASKRKDHLHKVTAKIVSENQVVCAETLSVDGMMKNHYLAKSIAAQSFATILNFLEYKARSKGKTFVQVDKWFASSKTCHECGEKDASMTLDVRKWQCKNCGARHDRDINAAKNILAEGIRVLQGTEGHSGTTVESFAVTLVE

SEQ ID NO: 37584 - protein, 348 aa, unknown
  TnpB Polypeptide
VSVSLLKLQRTIHAKLVLDRWGKREAIEREYEAWQRELRGSNEELYSATKQQAERFKRRVREQNHHGLKMREYPLILRRDCVKLQEQKSSTFRWWIRIPVHPMAVWVPMQLPYEQEPLLRRELRECKLLRVSEDWFVNITIQKDAHLKRRYTSILPVDMGVRKLATTIEDGKPRFYGKDVRRTRGNYFRLRRSAGKARIIKRWRHKEQETVRHQVHAITRRIVEQAKRAKAIIVIGDLKGIRGQDRGRSFNRRLSSQPFYLFKQLLTYKANWEGIRVLTVPEAYTSQMCHRCGVRGQRVAGRFSCSTCGLVCDADVNGAWNIAKRAHGMFHETGAVLAPPRTLAVCEP

SEQ ID NO: 37585 - protein, 549 aa, unknown
  TnpB Polypeptide
MIKKKKYLENKEFILLKNKINSSSNTVFLPNFNDSLIKNNNNKSWFNISIYKDGQNNKIPTLNEDIIKIDDDLENKKSEKIILNLSKEQQQILSYWFKSNDLMYNETIKFIKNNYINLKNEFNNFINTEFVIEFLKIKKDKISIETKIRNAQKKIKTLEKNEKLDEKTKEFLINIINTEEKNLIPIKNIYEEKKINIDIFFKNKPYYMANNNFKLNYQNIRTYYLKDIRNNIIKNCKNLKIDKNISIKTHILDSTIKLACSNYQSAITNFENGNIKTFRIRYWKEKRDKRVLEIEKSYFTNNSLCPSIFNKIEGIFKKGKKYYPFNFNNIEGSAKLHYNKKTKEYNLHVTKKIENNILNMENRSELIGIDLGLRTFSTCLTKNEVINIGDIKNSRLESLINKKIKLIKFKNNKKIRKYKKSVNKRIKGLIDELHWKSIKFLTDNYKNILIGDLSTKGIVCNNNSVLKEYNKQLAYALSFYKYRERLKYKCFINNSNYIKVNERYTSKVCSICGEFKDDLGSSKIYECKNCKSILDRDVNGCRNIILKCL

SEQ ID NO: 37586 - protein, 423 aa, unknown
  TnpB Polypeptide
MSKKPVQEVLFGVQKQQLKHLSITEYKALREMCFLSKNMYNVALYNVRQYYFAEKKFLSYESNYHLCKPNENYTLLNSNSAQQIMKVVDRNFKSFFALIQMARKGQYEYKDIKLPKYLRKDNFFNLIFGEFNTSKDKFTVPMSPPFRRVYGNVKIDIPSNLKGKPIKEVRILPKDKNAKFFEIQWIYKIPEFKGNLDKNNTLAIDLGVDNLCTCATNSGNAFIVDGKRLKSINQWANKENSRLQRIKDKQKNKNITKAQRKLWSKRNNRVNDYLNKSVKIIIDYCLNNNIGTIVVGYNPTIQREVNLGKANNQNFVNIPIGNIRKKLTYQCLRYDITFIEKEESYTSKADFLANDYMPIYKAFDKNNHMVSGKRISRGQYKSATGVIINADINGSLNIMRKSNIENINLINREYVNPIRIKIA

SEQ ID NO: 37587 - protein, 545 aa, unknown
  TnpB Polypeptide
MKKLILLLLLPLLFLIKPISAHAETQIPERPTNGIYDPKNYVTNKVSSKLAEFNSTSDTQIAVYIVDTLDGKNIDDQANAIAKAWQIGYSDTNKGILIAIAIKDKKFRIETSNEASKSLTKTNIDSILSASKSYMRKEDYDGAIINMIDSIAKYIKTNNQPEKEKDGQGLFQFENNSQQSERKIKPNVYEEYQQKETIRILKVMAVVGGIMGLIIGLPSAFDFMNKLSYKKRSKFTYNGPYKLTPKDSKFQPNKTWTDERTKNFWKNEYKNRSQFTYNGSDKIYPGDINFVDNSSWTVKRIEDYKQKKADDLARKLEEEKRQKEERLKRSQYDYQGEDKLYPNNANFVSNDTWTTLLIANYLSDLKSQNHDDYHSSSHNSYNDYSSSSSSSYTSSYDSSSSWSSSDWGGGGFDGGGSSGDCLPYRFKSGNKTSTDLETIATTVVKRALDACKDICIENLDFRDKKSNTQNKMGQKYNEMIHSLAYRQFVNKIEQCAYKNTVFVRRVNPAWTSWLAKKIYCPVMKLNTHVGASYVIARRGQGYKDT

SEQ ID NO: 37588 - protein, 370 aa, Bacillus sp.
MTKHNKAYKFRLYPTEDQAHLMRKTFGCVRFVYNRRLAERKEAYEKHKDDKDQLKKQKLPTPAKYKAEFEWLKEVDSLALANAQLNLQTVYKNFFSGQNDFPTFKSKKDRKSYTTNVVNGNIMLLNGHIKLPKLKMVRIKQHREIPQGHIIKSCTISMTPTGKYYVSILTEYEKEIVQKEVETVVGLDFAMDQLYVSSEDERANYPKFYLEMLDRLAKAQRVLSRRTKGSGRWNKQRIRVAKLHEKVANQRKNFLHHKSKELATYFDVVAIEDLNMKGMSQALHFGKSVADNAWGMFTAFLAYKLNEQGKQLVKIDKWFPSTKTCSSCGNVKNMSLSERVYSCICGVNLDRDYNAAINIKNEAIRLLALA

SEQ ID NO: 37589 - protein, 421 aa, unknown
  TnpB Polypeptide
MQRVERHVVLKSNINHKQIDDLAFACKNLYNKANYVIRQKFFETSKLVEIGELEHTVWVRYHELDKLAKSEEWEEYRNLPAQTAQQTLMLLEQNWKSFFAAIKTFKTNGSLGIPKLPKYKHKTKGRFIVIFTGQQVKLKNGFIHFPEKANLQSIRTKQAEIKQVRIIPQATCYIVEIVYGREVNKDENLNESLYLGIDIGLNNLVTATSNDVGLQPFIVNGRPLKSINQYYNKMKAILQSYIGNGTSNQINSLTHKRNNLVQNYLHHASRFVIDYCQENHIGNIVIGKNDGWKNKINIGKRNNQNFVQIPFANLIKQIQYKAEEVGISATLQEESYTSKASFLDMDRIPIYGKKSKLVNKFTGKRIKRGLYKTDSGRMINADVNGAYNILRKAIPKVFTDGIEGLGLVPIKMSTLNFNKGY

SEQ ID NO: 37590 - protein, 410 aa, Streptomyces sp.
VIDVQLRYSFRVYPSAGQRSALARAFGCARVVFNDALRARETARAAGLPFVPSGELSKQLTASKKTPERAWLAEVSSVVLQQSLRDLDTAYKNFFDGLKGKRPKTGAPRFKSRKDTRQSVRFTANAGWRITTGGKLRLPKVGDLAVTWSRSLPSVPSTVTVVKDGADRYFASFVVETDSEMLPATDNVVGIDLGLTHFAILSDGTKIDSPRFLRRAEKKLKKAQRDLSRKAKGSKNRAKARIRVARAYARTADARREFHHQLSTKIIRENQAVAVEYLAVKGLARTRLAKSVHDAGWSAFTTMVEYKAALYGRTFHRIGRFEPTSQVCSQCGVKDGPKPLHIRTWTCGACGAHLDRDINAAVNVAKAAGLAVTACGARVRPGLVPAQREETGTHPKASRASGSQAGHSVL

SEQ ID NO: 37591 - protein, 549 aa, Ktedonobacter sp.
MGTQQTKENKHPKQQTPTFLLELPLVVNQGQACRLRAHFEAARQLYNAILSEGNRRVRQMRSDAAWQAARAIPRTHKQERAAAFSALRQQYGFSEAALHEAVKGLRVGWIAEHIEAVLAQTLATRAYRALNRVCLGQARRVRFKSRGRGLSSIENKRNDTGLRFVLQQPEEGKAGFLLWKDEQLAALIDGKDPVVTHGLAQRIKYARLIRRPASSPRAQGADVTSSRYFVQLALEGTAYHKAKHPVGTDVVGLDVGPSTVAIVPRVAPARLEVLAEQLAPQEKQIRRLQRQMDRQRRAANLEHYDEQGRPKKRGKGSAPWKRSKGYEATRRRKASKERMLAAHRKSLHGRMVHEIVRVGNTIFTEKLSYKGWQKRYGKSVGLRAPGMFIDRLRRTVASTGGTLHEVPTRSTKLSQFCHGCGKTVKKPLSQRFHQCACGVGPAQRDLYSAFLAAYLDPADFTPSCARYAQYWEGADARLRTAYERLVQRAKEGQILPRSFGIPRAGARLSQSPSEPPLEPAFLLRHGRLEAWTGRSEPPVLEPGEHSALT

SEQ ID NO: 37592 - protein, 440 aa, unknown
  TnpB Polypeptide
MLEVHRTHQAKIRNHSQVADSLDRHGWSASKLWNVANYHSRNVWEETGEIPDHGDLKHELKGHTTYNGLHSQSSQRVLEELAEAFNSWYKTRESDSRANPPGYRKRNYYDQQGRRVHEEHPRSTVTWKQNGIKHDPKNNRVRISKGATHKEHPKAWEYILVEYETRPGVTVENLQQVRAVYDKAKERWELHLVCTAEIETPTAPGTESAGVDLGICNFAAVAYSTEEADLYPGNRLKQDGYYFPKELAKCDDSGGDRATRLHHKWSERRTHFFHSLAKHIVHRCVEKGVGRINVGDLEGVREDETGDSKNWGRHGNLDLHGWAFDRFTEILTYKAKVEGIEVVDVSERDTSKTCCVCGREDDTQRVERGLYVCEECEAAFNADVNGAENIRLNINDESNSESSAILDEDRSTGWLAQPGVYLYDLSSGFQPQAQVVDCKP

SEQ ID NO: 37593 - protein, 414 aa, Peptostreptococcaceae sp.
MRLSFKFYPKLNQSELDVLDELSFHTTKLYNIANYECITHGIKSYLELEKLLKLNWHNDFLHSHNYQQCLKVIDQDWKSYFASSRDYKKNPSKYLGIPRHPKYKNSSQKNQVIFTNLAVRTHDTTMKLSLSKFMKEKFAVKSLNLTLPEKVLKQVDFNSLQQIKCIWDTRRKQWYLVIIYKQEVKTLSLDFTNVMAIDLGLDNICAVTFKYSNVQYVMNGKPLKSKNAYYNKEISRLTGIQMKSTGNKYFKRTKKINALNKKRDHYMHDALHQISRRVVNDAMKHKCSIIVIGDLKGIKQHSKIKGFVQIPIQKLVSQIKYKAELLGVEVKLVKEYYTSGVSAYDLEPVDKRHYNINRRVKRGLFKTTQGYLVNSDINGSLNIMRRYDKNVVPMVVANLIGLVATELLLAYAPR

SEQ ID NO: 37594 - protein, 425 aa, unknown
  TnpB Polypeptide
MIVARAYRHRVVFNLEQDALARSFAGMTRLIYNETLAYKKMMYRETGSSSSIFELKRELRAIKKTPGLEFFAEAPHHSLCEAMLNLKKAFDRFYRGEASFPRFKKRGVGDSFSFPDKKQIKTNHPGREGQVFLPKLKWVSVTNSYPRLGTRLYEGELRNVTVSREADGWYISINALVEIVDPVTPVGVPIGIDLGVANSIATTSGDLVSLPVETRRESARYARLQQRLAGQQRGSRNAEKTKRRMGRLRKRALDRRNDAMHKTTTRLAKTHSTIILENLAIKNMTRSAKGTLEKPGTNVKAKSGLNRVILKQAWGEFDRQLAYKTKWYGSELVKVDPKNTSRECSECGHTSSNNRRTQAVFECEACRHEAHADLNAAKNLLHRGLETTTGTEGTSGTETLRVSMPAKRKRIRNGVSRDTHKQVTA

SEQ ID NO: 37595 - protein, 573 aa, unknown
  TnpB Polypeptide
MQLTEQFHIPDEHHEACDRLTTLVQKHTRRLLSNEYWQDHHLDALSDHGSHSYTYIRDDDHDAFEGVEEYVYSRFKRCVYHRITHVLDAHANESRTFQFVTDTVAERKIRRIGWHRLRNRLFDEDSPYIEWRVLESVVEQLNDYYDTHGRFPDAYTDLVDCPEPNGTLPYAPDTGDYHIHELSVENTELVVTLNAPDSLSPDSHHDWTDHQLRVPLHNQVREMLAAGRLKAPTLHASDHGYTLDVPVAVPDTECETVDGRVLSVDLGVKKQATAVSVEADDGLRQIAPPEFLDYPSKNKLFRVKSDAEGINDRLAELRRHGNAHTDRFDHLLAEYRRTRRKERRLRQQIHHTVANELVWLAVDSGCETIAFESLGQMESPDTSGSVAWSLSSWARGELLDLVAYKADLVGIDVETVNPWGTSRYCPRCGERGRTVNAPDDHTECRHGGHFHCPACGYECDRDVVGALNVGRKHLSETQMEEANPVAYTETGKHASFPSPSGARSAGVQSATDKQDAASGRQTQLSGFRAMPLTVKHGETDTGGLPQTQRRNTGQRRPSGSVTRYILASTTDCG

SEQ ID NO: 37596 - protein, 383 aa, unknown
  TnpB Polypeptide
VDFKETWDKYYEKYKEVLGVNAQAVLQKSNEAWSSFFSLLKLKKEGKLPPHMRKVSPPNYWKDKQTGKRKLLLLIRQDRYTVDEKKHVIILKDFNMEIEFVGRLRWYGKQGRLEMYYDEAKNAWCASIPAEVGVEQTKTGKKSKYIVKGERKSIQVKTPKGNKVASIDLGINVLASVVVDDGTWLLYKGVRVKEDYFYFQEGIADVQSLADKTKNLCEYQAYEELAREKRRLFKKLTRRLLHLYRNLSSHIVKTLYELGVSAIYLGYPFNIAQDKGNKFTVNMWSYRKLIKAIELKAQEYGMKVFEVVEHNTSRLCAYHNVEAKRYPRRVVSCPFGHKLHSDLNGALNILKKVTNIVVSAIKKPLSFTVDHNRVAPTKKGCNP

SEQ ID NO: 37597 - protein, 284 aa, unknown
  TnpB Polypeptide
MSPAFKKLYGKVSIKVPQNILEKKIKEIRIIPKHKARFFEIQYCYEIPKSEEVSNQKNALAIDLGLENLCTCVTNLGDSFIIDGKRLKSVNQWANKQNDKIEALKLKKNITAITRKQFKVWNKRNNQVKDYVNKTCFYIIDYCVKNNIGNLIVGYNAKLEKSDNMERKIYRNFIRIPFGEIKGKLEYLCKIKNINFIRQEESYTSKSDFFADDFLPDINVDNVKKYDFKGERITRGQYKSSVGIIINADVNASLNILKKSQVVNLSNLQNNPQILKQPQRVRIS

SEQ ID NO: 37598 - protein, 182 aa, unknown
  TnpB Polypeptide
VQSVWYAQQSERGIKYPKSSKHIQRLYRKKQNAVKDYLHKVTRWIAEYCRKEDIRCVVVGDIRNIRKEKDMGHKTNQKFHGLPYNKLYIMLEYKLKLYGIQLIKQEESYTSQCSPFSPEISKRYAESSNRKERGMYITDGVRFNADAVGAFNILRKYLSVSGKQKELSVTGLKNPEIIKVAV

SEQ ID NO: 37599 - protein, 325 aa, unknown
  TnpB Polypeptide
LKNDYKNFNFIKYRNLKVKIYWKQNRLNTKKQKLKNLETEIETGKYKVCFGTKNLLQKDYSKFIKKRDSEIYFLGRAGDKACNFNFQVEYSSKINQFYFRIRKEIDLDNDKFVYGQFYFNNKIYTNLLKNLLRTKESALTYRIKIKDNRVFLQIIYNFEHNKDLCVTRNSYGVVGVDFNKGFVSVSETDKYGNLINTFNIDYQYSKGNQTTNDFQYIATRLKDYCLNTGKDLVIEKLNFDKKKDNLISKKGKKYNEMLSTLAYSKFDAIITSKCAKNRIFLHKVNPAWTSWIAKQKYCPKMKLNIHSGASYVIARRGMFLKDKAK

SEQ ID NO: 37600 - protein, 395 aa, Bacteriophage sp.
MLNLTYTYKLQPTAKQIETIEHNLNVCKSVWNYALYVRKLWYNSRSCKINQCSLFQEYVVEPFEYPNYHTKSSELTLAKKTNPFLKSGNAQAMQQTLRKLDRAFNDMKSRGMGFPRYKKKMKSFNLLGGISVQGNILKMPLLKEVKFRKSREIPEGFKAKQVQIIKKASGYYANLMIELDVNVASPTPHGHALGIDVGIQNMIATSDGLTLKRPKFLDKALRKIKLLQRKLKKKTIGSNNWRSLQHRIALLHEAVANRRKDYHFKLAHQLCGNSGMIFVEDINFVAWSKGSFSKQSLDMCLGQFFNILEYVCSQTDTYFSKVDKNYTSQICPNCGTHTGKKDLSVRVHKCSECGYERDRDIAAAEVIRNRGLDNIAVGTAVIKQSSNGVLAGTSV

SEQ ID NO: 37601 - protein, 401 aa, Bacteriophage sp.
MIVLEYKIKGTQSQYNAINDAIRTTQFIRNKAIRYWMDAPRESKVDKFALNKYSTELRKEFPFVAELNSMAVQSAAERGWFSISRFYDNCKAKKTGKKGFPKFQKDCRSVEYKTSGWKLHPTKRRITFTDKKSIGELKLLGKWDIQSYDIKDIKRVRLIRRADGYYAQFCVGVDVVDIQPKTGNAVGLDVGIESFYTDSNGYQEPNPKFLRKAESKIKHSQRRIFKKVKGSSGRRKARKLYAKKHLKVSRQRNEHAKRIARCVVKSNDLVAYEDLRVSNMVKNHCLAKSISDAGWYLFRQWIEYFAAKFDKLAVPVPPQYTSQKCSSCGAIVKKSLSTRTHVCKCGCELHRDTNAAINILNLAKAREGHSQSNANGLVTSTLLGESLVEQVTSMKLESPCL

SEQ ID NO: 37602 - protein, 152 aa, Bacteriophage sp.
VAKLHEHIANTRKDFHWKIAHQLCDTAQTIFVEDLNLVGLSRGILGKHCLDAGWGQFFEILEQCCFKRGVFFQKVDSRKTSQICPNCRIETGKKELSQRVHVCEHCGYTTDRDVAAAQVVLIRGLAAVGQTVKMLAEGKFVGIPVTQESPGF

SEQ ID NO: 37603 - protein, 298 aa, unknown
  TnpB Polypeptide
MSSSPNEEPKQPVNDVYGAHATRALDALLDGTATKGGLKLWRSRRGVWYALVSVTMDVPVAETSGQWVGVDRGQNHLAVTSTPTGRPRFWTYGVVRQARRHYAAKRRRLQKAGKHKTVTRLEHKEARLVRHVNHVISKQIVRFAVEHGCGIRLEELRGIRQTAKQRTETKRQADKNRAYWPYFDLETKIMYKAALAGIPVEKVPAAYTSKSCCRCGAIGQRERHSFRCPRCGYRGHADHNASRNVGRWVGVACPVVLERDVGVMLASVPLGAVHDSPRALYATDPVRGTAQEGESHRL

SEQ ID NO: 37604 - protein, 462 aa, unknown
  TnpB Polypeptide
MKAETRQDAMQQIITAKLKLTTTPEQFALLRQTQLAYRDALNYVSQYAYAHGKMSNAEKLQKGTYAELRMQYKLPSQMACNVPRQVGATYKGLWTKLKKNIEHRRAKRTKKRFKGLDQPPKYVSPSLTYNYGRDYGFKTEQRVSILTLQGRVIVGYQGYARHLDFIQHGATIGAAKLWYDKPHKQFYLLVSLEIEIANPSPEIHQQIVGVDVGQRYLATTATLSGASRFFSGKAVREKADHYARVRKRLQQKGTRSATRRLIALSKRERRFKLNTNHVIAKQIVAAHPHTLIGLEDLTGIRERTKRRKRRKKGTQVLPLTPKQKRANRHASRWAFAELHTIIAYKATLSASSFAIKVDADYTSKACPVCGYTDTRNRPGHGLTFVCQNKECVSQVRTGRAYSLHSDLIGARNIAMRTGLIRQDWVRTGQLSVAPDVSDNEAKAARLTRYAELRWSPDASPSL

SEQ ID NO: 37605 - protein, 358 aa, unknown
  TnpB Polypeptide
MSSVSDIVTPYDLPYQAKAALCNYVPKLRKTYNAQDLDDEHPIRLTNQAAKFDHSEERDYEFTWWVPRPGRGTNFWMPLRINPEQEDLWHDLVSEDAKAGEIRLQQHRKNWVLHVTVEYPVEEPAADGDATHIGLDIGETALITGCALKDGSPTDPFVCSGSRAKHLRKEMHTTLKRLQERDASEWRTDERFDHYQNALTDIVEKASREAVEYAKQFENPVLVMEDLTYIRERLDYGKYMNRRLHSWAFARLQGRIEDKATEAGIPVEYVNPAYTSQTCHSCHRIGRRDSQAEFRCPNDDCHVSTFQADINASANIARRVDPWERASRLTRPDAMTRLGMGAVVTPPRLTVRRAYQRR

SEQ ID NO: 37606 - protein, 419 aa, Calothrix sp.
MLLSFKTALIPNNQQQTAFKKACGVARHAYNWANAAIMEVLKQRETDKAVKIPSAIDLHKRLVAEVKSQHDWYYEVNKNVPQKALADLRQAWDRCFKKVSKPPKFKKKGQHDSFYLEAGTKAKPLIKNDGKRVKLPSIGWVHLAEPLPCTLIHNCVISRQANRWFIAIKYEIEKPSVATNRPIVGVDIGIKELAVTSTGKVFKNPKAYKRMNRRMKRLQRSVSRKVKGSKNRTKAVKKLGRIHATVSNIRQDAIHKLTHYLAKNHSEIKIEDLSIKAFLKNHKLAGAIADCGMYEFKRQLEYKTEKFSSKLTLVDRMFPSSQICSNCSQHRHKMPLKNRVYVCPECGHTEDRDLNASKNLERWFDGIFIPKATDVAVSSTVSACGVDKPLKSHLETTLNQEVNIKTTVVQLSLDLGSFE

SEQ ID NO: 37607 - protein, 367 aa, unknown
  TnpB Polypeptide
LNIAYRFRIYPTEEQKILLGKTFGCCRFLYNQMLNDKIQEYKKTKKMLKNTSAMYKKEYPFLKEVDSLALANVQLHLEKAYKNFFRDPKVGFPRFKSKHHSKNSYTTNVVNGNILVEDNRIRLPKLKWISMKKHREPAENCRLKSVTVSMEPSGKYFASLLYEGYSCENQAADKDYSNAKILGIDYAMQGMAVFSEEIEMEEAGFFRKNEKRLAREQRKLSRCVKGSRNYVRQKKKVARCHEKIRSQRRDYLHKLSRRITDQYDIVAVEDIDMKAMSQCLHFGKSIQDNGYGMFRNMLDYKLAWKGKKLVKIDRFFPSSKKCSKCGKIKKELKLSERVYRCTCGNEMDRDRNAAINIREEARRMLAA

SEQ ID NO: 37608 - protein, 406 aa, Escherichia sp.
VKRLQAFKFQLRPGGQQECEMRRFAGACRFVFNRALARQNENHEAGNKYIPYGKMASWLVEWKNATETQWLKDSPSQPLQQSLKDLERAYKNFFRKRAAFPRFKKRGQNDAFRYPQGVPQGVKLDQENSRIFLPKLGWMRYRNSRQVTGVVKNVTVSQSCGKWYISIQTESEVSTPVHPSASMIGLDAGVAKLATLSDGTVFGPVNSFQKNQKTLARLQRQLSRKVKFSNNWQKQKRKIQRLHSRIANIRRDYLHKVTTTVSKNHAMIVIEDLKVSNMSKSAAGTVSQPGRNVRAKSGLNRSILDQGWYEMRRQLEYKQLWSGGQVLAVPPAYTSQRCACCGHTAKENRLSQSQFRCQVCGYTANADVNGARNILAAGHAVLACGEMVQSGRPLKQEPTEMIQATA

SEQ ID NO: 37609 - protein, 458 aa, Vulcanisaeta sp.
VVVCAWVGAFLTSGELVGRLPTLFTNPGTKSPKSKGKGKRKQDENRRTVRLRLLPNGAQERKLRRIADATARLWNELNYARLVQFREGGEVDFEGTEHEFYHKYKSVLGVNAGQVINLNNQTWKSYFELLKLYKQGRLPKFMNKPSPPGFWKDKLLGKRELRILVRNDRYYIEPINGGEGYLVLKDWGLKIKYAGRIKWSGKQGMLVIKLEDNRWFAYVPIEVGAKPAKSNPKGYVRGVYDRVQIEKPRGGNKAFIDVGLNNLFAVVFNHSDVAILIKGSTIKSEYYYWKREIKTYQSIRDWLRNHGFESWRKFHAYWLHAKYKQHERLRHYYRTAIRFLAETLWEMGIDEVFIGYPYMVSQNNGNEFNTNIWWFNKIIKWLSEVLQEYGIRLNVVNEYGTSKQCSICNMEHENGRVKRGLYICELTRNQNQRRHKRSRNIAKRVGYKHQHQEKYSVT

SEQ ID NO: 37610 - protein, 564 aa, Vulcanisaeta sp.
  misc_feature (273)..(279): Xaa can be any naturally occurring amino acid
MLRRAVAVELETTRELNKFLYSVESVYLNIVHEVAMYAVVNNVTSATQLQRLLYRKYRLEYQDLNSQLVIQAIRQAAQIAKSFVERKKRGLVSKPYPEVKAVAIRFTEFTWNYEQFVRSIAPVRLSLSLPGGRREVWLRPHRRFWLYWWRVLTGEAELASTLVAKRRLNRWYAVFVFEIKPREEEPKSIIAFDINENTVAVSRIDIIATIDKIADWNRRYLMPELYSIRTDFGRLARRYERVRNTIIERLKPHFTLPSGNYVNVANTREFRKXXXXXXXEIRRISLGVEWLDYALQGGVPRGTWTLITGEPGVGKSILCIQAVGASVDAMPVVYVSTETRFYDVVRQARQFGIDLSDAVSLTEVLTGKVKEVKSNLMIIDLFGLARQYRELLKAGEEGGEKARAKSPLSMEVVMAAIEKAYEVLGVTEEGGKKDVLVVIDSLAPLWAHAPAMARLITYRLRQRLYRSNVTVIMTNQYAPTTGMTFGFGAEHIADAIIHMWFESVETTKEIRRWLIIKKARLTNHYRKAMRFDIEPGKGLVLLEPGIDELRKWFESNSKGRVSNE

SEQ ID NO: 37611 - protein, 366 aa, Cetobacterium sp.
MILSNKVRLKPNKLQETQLWKSTGIARFIYNWTLNRQQENYKNGNKFIKDNELRKELTQLKKSELSWLNEVSNNVTKQAVKDACNSYKSFFKKLSSFLKFKSKKKTKPSFYNDTSKLKVKEFSVLIEKVGWVRTAEHLPMNTKYTNPRISYDGKYWYISVGTEKVEPKIHHTTEIIGIDVGIKSLAVCSNELSFKNINKTSIVKRTKKRLFRLQRAVSRKYEKNKKGGVFVKTSNTIKLEKKIKLIYRRLKNIRQNYIHQSTTKIVKTKPSKIVVEDLNMKNRHLSKAIAEQCFAEFMRQIEYKCIFYGIEFIKANRYYPSSKRCNRCGNINKNLKLKDRTYKCICGYTEDRDLNASFNLRDYKLA

SEQ ID NO: 37612 - protein, 378 aa, unknown
  TnpB Polypeptide
MSQVKTYKYKLNPTPGQKQALGQWLGSCRYVYNLSLSYKKTLWDHSKVSIGKNELQKELSVIAKETSWIAPVHSQVLQEVTDRVFNAYEGFFKQGKGFPKFARKGHYQSFTFKQGIKINPTHVQLPKFGKVRYRNSQDCTGIIKRATVRECAEGWYVCLCVETSIEPLPVNTSSIGIDVGIKSLMVTSDGETIDNPKHLYKAERKLKRLQRSVSRKKKGSANRKKAVKKLALQHQKVANTRKDFQHKVTTRLIRENQSISVEQLQIKNMVKNHNLAKSISDAGWYQLTQMLAYKAVWYGRTFEKVNARHTSQDCSVCDYRNTELTLAVRSWICPTCGTTHDRDVNAAQNIKNRSVGHTQLARKVYAPVGVVVRESPRL

SEQ ID NO: 37613 - protein, 323 aa, unknown
  TnpB Polypeptide
MERGFKYRIYPNESQRDQIARTFGCCRFVYNRALDVKKTAYSETGKSIATNDLIKMIPAWKRDPDTSWLAQVDSMALQGRFMSVTVSLDAAGRYFATFLCTNVPSKDAPATDREVGIDLGVKTLATLSDGTKIENPRGLERYERKLAREQRRLSRRKGARKSEKQSRRYLKQRKRVARIHAKIADARTDALHKVTTMLADENQVLCMEDLNAKGMMKNHHLAKAVTDASFGEFARLLEYKCAERGRSLVKIGRFYPSSKTCSACGHRLDALPLSVRSWDCPACGAHHDRDVNAARNILTEGKRILSNTEGTAGHAGTVAATTA

SEQ ID NO: 37614 - protein, 300 aa, unknown
  TnpB Polypeptide
MPLFHLADAYDRFFKKQNHFPKFKSKRKSKKSYTTNFTNNNILIGKNVIKLPKVGMVKAVIHKLPKDDWKLKSVTVSQDSVGNYFASVLFEYEQEDIPSVSKSSTNAIGLDYKSDGLYMDSNGNKAGVHKYYRESHKKLAKEQRRLSRKAGSKKNETKSSNYFKQMRKVNRIYRKIANQRLDSLHKKSTEIANQYGIVCVEDLDMKAIGNKGFGNGKATFDNGYGMFLNMLEYKLKERGKYFVKVDKWYPSSQICHCCGSVKKLDLKDRVYTCDCGYTGDRDHNAAINILTEGLRILQSL

SEQ ID NO: 37615 - protein, 424 aa, Micromonospora sp.
VVVQLRYNFRVYPTAGQQTELSKAFGCARVVFNDGLRLRQQAREAGLAYVPDGELSRRVITEAKLTPQRAWLGEVSAVVLQQALADLNTAYRNFFNSLSGRRKGRMVAPPRFRSRKDNRQAIRFTRNARFKVLDNGRLRLPKIGDVEVRWSRTLPPEASSVTVIKDAAGRYFASFVVTTAEDETLPPVESKVGIDLGLTHFAVLSDGTKVAAPKFLRRAARKLKRRQQALSRKQKGSANREKAVVKVARAHARVADTRRDWQHKLSTAIIRDNQAVYVEDLCVAGLGRTRLAKSVHDAGWAAFTGMLEYKAARYGRTFARVDRFFPSTRMCSQCGRTTEKMTLNVRSWDCPCGATHDRDVNAAINVLAAGQADNSNDRGARVRPGLVPAPRGEAVTHPDAARSTRSVEGTSVLQDGEDVNAWAC

SEQ ID NO: 37616 - protein, 404 aa, unknown
  TnpB Polypeptide
VRTLIRTLRIPAKLDENTKNILVKTMEEYSKAVQMGFNYGLSNKTFSRIKIHHGIYKDFRKQSPLNSQLVINGKNKGVDVLLSQKKRIMRKQTSKKKKKKNKIMKLPQVKFSSIIPLRYDYRCSTIHLEQRYVSLATISKRVNLTFEIPKYYSKFIDWKFKSFELVYIHKRFFIHFVVEKTVSPEFLDSPHSGLFVGIDRGMRHLAVSSQNQFYSGSRLRASKDKYFRLKRSLQKKGTPSAKSKLKDSSGREKRFQKDMNHCITKDIISKIPANSTIILEDLSYIRKTTKRRRKTRSSREFHSWAFYQFQMFLDYKAIEKNIEIIYVNPAYTSQECSSCGYILKSNRNGSNFLCKKCNFSLNADLNASHNIKSRMFDTSYLLQLARRAIRMMGGASVIIPNVAS

SEQ ID NO: 37617 - protein, 376 aa, Sphingomonadales sp.
MSDEAPTQILNYRFKLLPTRGQHARLREALEYSRQLYNAGLEERIDCYRKTGRGLTFIDQCKALTELRADGSPWAATMERGPLKALHHTFNAFFKRGGFPRFKGKDWFKTISWAGREGWVFRDRKLLAKGLGAIRVHMHRPLPNQPVACRVKREGRHWYVILSVERDCAAANDNPSIGLDVGISSLAALSNGEIIANPRRRARAERETRRRARALARCKRGSRRRRKVKERLASWRAKERRARNAYLHQVSASLVRRFGVIAVEDLNVKGLAKSALARDVNDAAWGKLFSMLAYKAESAGCQIIKVDPRYTSQTCPECGEIKPKTLAERVHRCPCGCEMDRDVAAAKVILLRAVVSDRGVPNVAGYGERAPRMAVA

SEQ ID NO: 37618 - protein, 387 aa, Saccharopolyspora sp.
MFSERRYRLKLTTAQAAQCEEFGNICRAVWNTALDQRRRYRERGAWMNYNEQAGQLADAKTEHDWLKTAPSHILQQTLKDLERACKDHGTFRVKWRGKQRWNPSFRFPMGKLIEVERLNKRWGRVKLPKLGWVHFRMTCQLGGAVRSATVSRDGSDWFVSFLVDDGEQTPEQHAMPGTGVGIDRGVAVAVATSDGKLIDRDFISSGEVKRYRRLQQQLSRQRCGSANRRKTLESMRRIKRRERDRRADFCSQVAAELTDRNALVALEDLRTRSMISSASGSVEEHGRNVAQKSGLNRAILDKGWHKLELALRNAARCTGSEIVKAPAAYTSQTCAVCRNVDSENRNSQAVFRCTGCGHTAHADVNAAKNVLAAGRAQPVETSVLAGL

SEQ ID NO: 37619 - protein, 576 aa, unknown
  TnpB Polypeptide
MSSTHLSLPLHLPDEERERYTRLETLTKKTANTLIGKYWEPDHLTGIDKSSHQAWKYFDEQEAFAAFDIYLPSRYKRCLLQKVGETLRSHADKREAFQTIKPLLPDHKIRRIHTRRIKNRLWDSDEYLSSGYVDLLINQLNAYYDVHGEYPDTYFDFQDCPEYSSGVLPYSADDGPTSGQAVKYQYDETTQQLTVELKTPDTLKAETWGDWTWTEYTLEGYDAFYELVEHGSLSAPEFQPSTSKRGDEYYELSFPVEVEHAGKSDGVESVLSIDGGLRKDATAVVVDRDGEQLSTPYFIQNTEREKMRNLNCERNQLNAKLADLRRQGDDTTDYFKHIQSEYERVNNKIRHKREQLVHDVSNQVLALALVYNVDAIVHEDLRSLSPPRGEGQLSWELSSWARQEIIENIEYRADIVGIHVEQVYAGNTSRSCPRCGSTGHTTKSPDHYFEVWHGGHFRCDNSRCGFQGDRDYIGAVNVARVFYSESDSLDSGFTSSYIGDCEIELVGRSAGSRPVFGNSLVAFTGRSRVTAGGGSCLIAPAVTPTGTENAVSSESSVSSPATHSYSLFVRDAAVCC

SEQ ID NO: 37620 - protein, 414 aa, unknown
  TnpB Polypeptide
MEKRRTVPVKLDVDSADADLLEDTVDEFLWAANSVTRHAFEGEYVTTSKTTLHDDTYADVRDETALHSNHVQAARNKAADACKSVVEKWQQGKKASMPHFTSPHVVYDHRTATFHDESVSLATTDGRIEADYVLPADERDTPHAEYYFSDEYETTGAELHYSDGNWMLHIHCKQEVESETPERASTENGTVLGVDLGVTNLAVTSTGTFWTGDEFDHWRKEYEKRRGDLQQCGTRWAHENMQAVGRKEDGRFKQTLHRISNELVAEAREYRCSVIAFEDLTDIRERTGASWGHTWAFNRLYEYVEYKATEYGIDVDQVAPENTSRRCSECGFTHPSNRESESFECLKCGYENHADYNAAKNIGLRYLRRNQTGDGGGAPVGVRLNSGMLNANGAYTPPAEDSARAGVHAESPRL

SEQ ID NO: 37621 - protein, 353 aa, unknown
  TnpB Polypeptide
MKERIFTTKEQGRVLVEAGLPISTAIGFRDKYLDSLHSMEDDAGRIGLIEAVTPDISNPVWDVGTLLNLLPYYKNKHDNQSFRLPFPKFKITNNKIRIEKIGWVKIVIDRGVPDNARFISCTVSKNRAGQYFVSVLVETEQCYKQKTSKTVGVDLGIKTLATLSDGIAVENPHFLCENQAKLKRMQRHLSRKKLGSNRRNKCRLKVSRLHRDIANKRSWYMHNLTTMLVNNYDVICIENLNASGMLQNHKLAGSVYDASFSMFRNQLEYKCRWYGKELIVIDRFYPSSKTCSRCGWKNKDLKLSDRTFVCKDCGMEIDRDLNAAINIQAVGVDAAIRTQSSRVASCVEASKME

SEQ ID NO: 37622 - protein, 401 aa, unknown
  TnpB Polypeptide
MIKAYRYRLRPTAVQRQFFDRSIGCCRLVYNWALERRIKAYQESKVSMSAIDLCKLLPGLKSDPNYSFLKEVSSAALQQSIRNMDQAFTKFFREHAGFPKFKSKKSSRNSYKEVQGCAVDFELNRIKLPKIGWVRFYANQTFNGKIGTVTVSKTPTGKYFVSILVDNGADLPTKPVINPDKTVGIDVGIKDFAVLSNGDVYQNPKHLENSTARLKVLQRRLARKKVGSARRNKARLAVASLHERIHNQRQDFLHKVSSKIIRENQTIVIEDLNIEGMMKNHRLANSIASVSWGEFFRMLQYKSDWYGRNLIRIGRFDPSSKLCECGYVHRDLKLSDRTWVCPECGAVNDKDLLAARNIKRFGLEKTNLIGQTKDISPVVNRVGDVEPSALAGATKRQVISV

SEQ ID NO: 37623 - protein, 553 aa, Streptomyces sp.
MGVLREMAVPFVVVGPSGVAVRDRLKHLTVEDEKVLRLVGDHLGTLASRDLKARCAAGLDHDTEQWAQRKRALTEECSSRWAGSITKATHDQWALARRGQLAHIQGLEAGVRTIAHRLSLAVGEKGGKRAPGGYASRWEWHAKSRRLYVLADRLEAARADWDAGRVGVVRGGERLLNTRHHLEQAQLSEEQWRARWQAGRRFLQADGESGKRFGNETIRVTPEGEVSLKLPAPLAHLANAPHGRYVLTARVAFAHRGEQWRDRVTANRAVAYRIHEDTARGRWYLTASWTIPPVKTVPLATARANGLVGVDTNADHLAAWRLDAHGNPVGEPVRFGYDLSGTAAHRDAQVRHALIRLLHWAKRHSLAIAIEDLDFTAEKTREKHGRRKKFRKLISGIPVSRLRARLVSMASELGITIVAVDPAYTSRWGAQHWQKPLTSTHRTTTRHDAAAVAIGRRALGHPIRLGVPPRPLRHWGRTAPPPHDRSDRVGHRTVQARPGTPGCEELRPRIPGPRTRSVRAGCGANAEYQDAQHRGGHPAEHESWHQDSLPLSL

SEQ ID NO: 37624 - protein, 398 aa, unknown
  TnpB Polypeptide
VKLTAKVKLLPTPEQRRYLLDTLRRFNAACNSISDVAWETRTFQQIQQIPLHHRVYHTVKDRFDLSAQMAVRAIGKVVDAYTLDRTQPRSFHELGAITYDDRMLSWKLTASTVSIWTLQGRKTIPFASGEYQRRLLATRQGETDLAYVGGEFYLFATVNVEEPEPVEVEGVLGVDLGIVNIATDLDGECYSGKYLNSVRARHRRLRRKLKRKGTKSAKRRLKRLSGKERRFALDANHVISKRIVEKAQRTNRAVALEDLKGIRHRVRVRRPQRSTLHSWAFADLGQKLAYKAQRAGVRVVFVDPRNSSRECPACGHTEKANRPNQSRFRCRVCGFADHADKVAALNLSLRGWAVVNLPNVGEANRALHGSVPASLDQNPLGFGQGSYGSILPCPTLVP

SEQ ID NO: 37625 - protein, 216 aa, Streptomyces sp.
VTITAALSDGRKLNCPQLTVKERAQIRKHERRAARAPKSSEQKTAEYAKVAKLKAREANRRKDWCEKTSTMFAGSFDLIRFEKLNIKNMTHSAKGTLEQPGTHVRQKSGLNRGILAQGWGLLRQRTEHKAPGRVEDVPAPHTSLRCSACGWIEKKSRKSQADFVCVSCGFTCNADENASINVAAGQGGIPRPRRSAGAGGVTTATGRSSAREPQPT

SEQ ID NO: 37626 - protein, 651 aa, Rhodococcus sp.
MLRDWAAASGVKYRTASAWFHAGTLSVRAQQLPSGTILVGDTAVCTPWVGKGMKIRKLFADQNVTTIVVEHREQPDEARVRMHRGRFCRRKVVLCSRWPTMGVVDDLVGHDRGGDVAACPPERAAPCTSACRRCRGRRDGPPMTAAAALEDRTADITAPDPSRTVIRAYVYVLDPTPAQVEALRSHCGAQRFAYNWALSQVKANLDQRTAERSYGVPDAELTPSMSWSAYRLRKFWNTVKNDVAVAPETGKVWWPENSKEAYSSGIANCAAALSNWSDARSGKRKGSMGFPRFRSKRAVLSCRFTTGSFGLVTDGGDRRHVQLPRIGAIRTCESTRKLARKTIAGTARIRSATVSYRRGRWQVSFSVETTLPARALPPTATCASAVADGGVDGSVVGVDVGVKHLAVLSTGEMIDNPKHTRKHAKVLRRLQRRASRQIGPDRLTGQEPSQRWLRTQDQIRAVHTRTADARRDHLHKLTTRLVRDVGTVVVEDLNVTGMTRSGGAYKRGLNRALRDAALAEIRRQLTYKTEWTGTRLHVADRWYPSSKTCSNCQVVKAKLPLNVRVFTCDSCGFRADRDHNAALNLAALAAVVDGGASSASCGRDVKDARQKPTIRPAIRRADGIAAGTPHSGERGRGNPAAHAECTKQHSG

SEQ ID NO: 37627 - protein, 601 aa, Rhodococcus sp.
VIGPGTTAPRQFTFTTRAYMAVDDATGEPIGLDDVNTRARWLLDLVTAAGAELMSRLWQPVTFDVLAAGRDRQDRRLPVQGHVAAARLGWNPHYRDGVYVPSRVSRVVTAQVMATLRTLAYRDTAITALSERFDPATGRIAPPSAVADWVPLGFARGVRRQLVARSRRIDGAPSARLRITDVQGPPQTSAMARLSAADRQLAQLAVTGDELVLTVKLPTCPAPAGRAQWRSVRVTATIPGHLNGRAVTGWHLPTLALDRKGLLWRCAATELVPACDLGSATVAVGVDWSPSTLGAAAIATQTPDGVVSDYRGFTYDDRGLGTKLARLQAEGQLLQRKSARLTRLAATAPSEVRVRLEEKIAVLNEHRTAVGVKRGKINRELGFHFARQVTDYAEAAGAEMIAVEDLTTLEPRGHGRVNNNRAAQSARRKATAALAHTAAGVGIAVVTVPARGSSAQCPGCDEPLARPGGYHDAWCPGCWVGGNRDQIAGVNLAKRALLGKNKVTRRRGQMPAIRVAEHAPVRRSRDKTSPTPRRPRHRRVRHSLPTATPRMGVTPKQHVPAPQASVWDTVKPAPPHGDAGSRDTRTSHLTATLVADSMRST

SEQ ID NO: 37628 - protein, 458 aa, unknown
  TnpB Polypeptide
MNQNYVTFKIKYDCKASLYDYVLQYNNVLRYTYNRIIENPSIRTKDITACQHRLNNCDLMGSHLRNSAIHDAKALIARNRNKLIFGGKSNFLLRCKGKIDKQTFLNNRLMSLCSIGIASEHSNRLFRISSNNTIIFQPDRHHHFTLELCSIGNKRINDLRKLKLLQDNNQLAITYRLDFEYVYLTFDYNIIRAHEYKTVQNRVFAIDMNPNSIGWSIVDWQDEFDYRVIKSGTYSIKPLNDYRDSKKVAPDSSFHNYITNKRKHEIISIANELFQICKHYHCEVFSIENISISPQDNKLGRRFNKLVNNMWNRNLLINQLRKHVNCSSTTLVECEPQYNSYVGNLIFRQERLPDECLASIEISRRGYEFATQYIFNRRPHKKTAVFPDLKLVKNQLVLSLEELGIDVPDFDSWKTILSAVKESKKKYRFSTSDAQHYHQEGLFSKFHKRRYTIVNIYI

SEQ ID NO: 37629 - protein, 310 aa, Halomonas sp.
MLKAVKIRIYPMTEQVAFLNCQFGAVRFCYNTGLRIMSHRYKRHGQSLSAKHDIKKLLPVAKKSRKYGWLKEADSMALQQSCINLDQAFQRFFDSRQKAVYPRFLKQAQKNLKRKQQALSRTKKGSANRAKARLLVAKAHERVANTRHDFQHKLSRQIVDDNQAVIVETLKVRNMMKNARLAKHIGDASWHALMTKLAYKAREQGKHLVKIDPWFASSKTCHVCQHKVAAMPLSVRSWDCPACHTQHDRDINAALNIKHQGIVKLKADGLSVSAHGGLRKSGMSPAAACKVGSLARGASALRAGSSHDLQ

SEQ ID NO: 37630 - protein, 753 aa, unknown
  TnpB Polypeptide
VVETLTVSGHGYIVKATVPAPASGGGVVLGLPAVRERLGWLCTLVNELTSSMVAAHGNPADVRLLAAGQGPDGRPLPRKAYKAMERLGWAGRPAAGLYVPSRVRRMASEQAGRLLRSYSFELELTAAMLECWPERIEVSQLPAKADSVSLRNTRRHLRHHLKGLGIPAGRPLQPPLPLGDVWSPGGVPAVADLSVVDGEYASISMDGSRLHLELRLPTVARPCSRAQWSPVRLELSGFAHLIPDTDNNDGGEGEGARVGWPCFRLDRDRTVKVEIPVTLQAASRVPLSQICRVYGFDWGVNRLLTGLLVVGTSPAGRPWTANRPVFFSSTGLAALYHRQREQGQHLRAKRDQNRRLVQGLHPNPDRPELDHPAVALLSRAIARADTENRYVSDRMSRLNLETARLAARWAVDQALAAGANAVAVEDLRDMEARGMDRRNRTRMSAQVRGILIDELARACAKAGLWLIIVPARGTSSFCARCGSPIRHIKAPNSRRAGWSWGVCTGCGAQGDRDHLAAGHIGGRTITLLGMLGRPGVIRSRDGVKVTLGYPASPGKTRSAVPTASASTSMSASGAVTATLVQVAPVVGEPAEPAVLVPGLRVRKAPRHPRVLPRVNKVRIPHERRDRAERQPLCDISKLRGGPLAEPPTRRPASMLGYRSAGAQPRQQLRPDRGPVRRDRLVRACDGLRYAYRRHLRASPNRQTQTALTARIAVSTQTHQNHEQRFEPSLRVIGNSGLGGAASGVVNRFENGWL

SEQ ID NO: 37631 - protein, 353 aa, Holdemania sp.
MYLTCRIVLKTDENSSRILSIMANFYRNEVNRLINLYAKSNQIVRTSYSEFSSFIPFWSKSMVVKDAERIWTLIQQGGNARLRMKTPQCCWHQPNFKFRDHQLYLQVGGRFGIGDYLIISYHAGELQQRYLKFPLGKMTIRKLNKRWIADINVEVMEKTPSRSEKRMGVDLGIKVPAVAYTEDGKIRFFGNGREARFRRNAFYSKLKKLQKSNDLKAYRALDHALFRWSYTVCHIISKRIVEFAEKNDIGVICVEQLHGISSKPVSSSLARRDLNQWSHYRLVYNIRYKARRKGIRVVFVDPRNTSRRCPRCGRINTPSRRWYCCPCGFQRHRDLIGAMNITFAPESASSRSG

SEQ ID NO: 37632 - protein, 531 aa, unknown
  TnpB Polypeptide
MSPRDIKYATIYLSGNSSYEKDNDMPNEKKNDEEHGVRLSYKFRIYPTPSQCEAIKANIDASRFVYNHYLRARMDAYERTQQEVRRPKPACDEQGNVQYDQDGKEIWERTEGGKVVFHTVPNPTYDPAAKAMSMFDTSKDLTRLKKELVDEDGKPWLKEADATALIYALRNLDTAYQNFFRGIKKGQDVGFPKFKSRKNPVQTYKSGNVKLAGCDLDDGKAEAAVAEIPSPIPADWDLAGISWNGIVLPKIGKVRARIHRIPEGKFVSCTVERKASGAYYASINVKERELPAYPAATGEVGITFGASHWAVTSDGQVMDLPERIGRLQRRLAIAQRDLARKEPGSQNYLKQKRKVARVNERIADVRKAATHNATRELVNGYGTIAARQMNSKDMQQHGSAATKDLPRKVKKMLNRKMIDGNFAEFNRQLAYKSAWANRSFVEVPGDTPTAQVCSRCGHEELVLARDLRPAWTCSECGAKHDRKANGAQNVLEAGKDILAKQERSFVTKAKKSREKKRATKPISTAREGASR

SEQ ID NO: 37633 - protein, 342 aa, unknown
  TnpB Polypeptide
MKDKSLRPTRFSVVNELVRNKKDWQYNYSSRVLQKAVADLARGWRNFFNSNMPDHNKPKFKSAKHSKQSFATDMATVKDGKLILDKPLCVSKGNWYGIRMSEPIRFTGKTKLTVITKDVHGYSASLMIDTEDNEVPVTKGVVGIDANIKRFNYGNKETVMIYPKKLDKLYDRIGHYQRMLAKKRLVNPTNFRSKNYDAVRAKLQRDYSRVNRIQSDILHKFTYYLTHTYNEIHIEDLDVKHMQMSRKMGKNLHRSLFRKFREQLTYKCSWYHNKLVVLPRTYPSTQLCSNCGFRKTKDEYGGKQTLSGDSIHHEHQTYYCYNCGAVLDRDENAVENIKNYVG

SEQ ID NO: 37634 - protein, 469 aa, unknown
  TnpB Polypeptide
VVRNDAKLAADLAQVTAVQPAVAGRRAGVTMPDFLATGKSGRSRKEFLVQHNVVTAFRSWQERIKAANGESNKYVSQGWKRTVDASAPSYGNGDFINLGAVDKQYAVIENDPFATGEIILKMVIQGAWYRLIFPFDNVRFTEGKVTLPLIKIECGVPVFIFTVVTDNPVVQFSGDYVVGVDVGINNYATVVVRNSATGQIVQKTTLSQRVHSLWNSVRASERQVRALNKKADKLLYKRQAHMSAIDEAQLHREAASRKKRELAILAAQEIAYLSHQYGNAVVAVEDLGWISNTMQNGRWNRGTFVQWLTHYVAQNGGWVVSVNAAHTSQLCHMCSSKVTHPTHKVSLCPEHGDMDRDVNAAANIAARAVSRVEKSRKTRAKNRRVQKKTSLKTPITRDSLKYPGRDRRKNVPTPKRKKKCEGVNLPISPARVIMATVLADWDASGILETNQAAINQDSMAYECRLCDLK

SEQ ID NO: 37635 - protein, 456 aa, unknown
  TnpB Polypeptide
MLTGIRYKVTPTDHQAQVLSRWIGCARVIWNAKCDEDRYLRTFARKYLPVGTFPKPDKSYSQYKTALTPWLKECPSQILRNSATIWAQTYQDFFKGRCGRPRPKNRIKGNYIWLTRELFQLTREDGRWVLRLGTKKNDLGALKVKWHRKPRADRLPNSIWIRVEHGRWSVSFSYDDGKLDDHHLTNSQHLRWLRQCSAKQLEDLITPLDRGVARPVQTHNATYTVDARALQKQRGREKYLKRCQRKLARQKKGSNQRKKTQARIARLHRKAANVREDFLHQTSRSVVDSARVIVMEDLKLANMTKRAAPVAGPEPGRWLANGARAKSGLNKALLGTGLNRLETFIAYKAYRQNKPVFKVNPVNTSRECAACGHTHPDNRQTQATFRCVHCGHADNADRNAALVIRKRAISLILHSGTELVGARKNVLRPGANANPRKTPAANAAGATGGSSKKTAA

SEQ ID NO: 37636 - protein, 482 aa, unknown
  TnpB Polypeptide
VIIFPIHFFQLGVKARAGFCEQRPKTVDRILVEYGFSVFGDKDQMYVHDKNAMPAGSDIVDLLHRPNYIGVMQRLQAFKYELRPNGQQQCLMRRFAGSCRFVFNKALALQKERYEQGEKKLSYAGLCRELTQWKLDTSTKWLADTPSQALQQSLKNLDQAYANFFAKRAEFPRFKKKGVFDRFRYPQGFKLDQANSRLFLPKLGWVRYRNSREVLGAVKNVTVSQSGGKWFVSIQTEREVEAPIPKGDAIGIDLGVARFAAFDRPLPAFKGEDHLKPLNSFKKHQARLRKAQRALSRKTKFSNNWKKAKARIQRIHTQIGDARRDYLHKATTAISQNHAMVCIEDLQVRNMSKSASGTVDQPGNNVKAKSGLNRSILDQGWHEFRHQLDYKLQWNGGWLVAVPPRNTSRTCPACGHVSAENRQTQAQFRCVECGFEGNADTVGAINILRAGHARFACEVSGATRPPAAGTLRGESALQGLTR

SEQ ID NO: 37637 - protein, 230 aa, Salmonella sp.
MKRAYKYRFYPTTEQAELLAQTFGCVRFVYNSILRWRTDAYYERKEKIGYLQANARLTALKKEPEFARLNDVSCVPLQQSLRHQQTAFANFFAGRAAYPAFKSKRHKQAAEFTASAFKYRDGKLYMAKNKIPLDVRWSRPLPSVPSTVTISKDAAGRYFVSCLCEFEPASLPITSSMVGIDVGLKDLFVTDTGFRSGNPRHTAKYAARPALLQRRLSKRPKAQRTAPKPT

SEQ ID NO: 37638 - protein, 371 aa, Staphylococcus sp.
MKTIKVRLKPTNEQLPLFHQSSSTHRFIYNWTLAKQQDNYKQGGQFINDGELRKEITQLKKQEAYQWLSQVSNDIPKQAIKDACLAYRRFFKGRARFPRFKSKKRSKWSFYNDTAKLKVKDHRVLLAKIGWVKTSESIPKNQKYYNPRVSFDGKYWYLSVSINVDMDKPQLSDESLGIDLGIKTLAVCSNGQTFKNINKTHRIKQKEKRLRRLQRKVSRKYQMNKKGGNVVKTCNIIKIEKEIRLLQRSLSNIRRNHLHQTTTSIVKTKPRRIVIEDLNVRGMMKNKHLAKAIQNQGFYEFRRQLTYKCDWYGIELVVADRYYPSSKTCSSCGAIKKDLRLSNRTYMCECGHQMDRDLNASINLANYQLVS

SEQ ID NO: 37639 - protein, 391 aa, unknown
  TnpB Polypeptide
MYICIMFIAYKYRLYPTQEQSVLLNKHLGSVRFLYNLALETKQMVYSGNKTNLSRFDLQAQLIDLKKECEWLKEVNSQSLQCALLNLDNAYTKFFKGLTSFPKFKKKSNKQSFQCPQSVTLCSKGLSLPKFKEPIKIILHRKFFGKIKTVTISKTPTNKYFASILVDTARIIPEKKTINNSIGIDLGIKSFVVTSNGDKIDNPKYLRNSTERLKILSRRLSKKQKESNNRNKARLQVAKIHEKVSNQRRDFLHKISDVITKQYDTICIENLQINNMLKNHKLARAISDCGWSIFTSFLEYKAEWRGVNIVRIGTFDPSTKLCSVCGSINNELTLADREWTCSDCGTILDRDINAAVNILNFGFKKSGVERSVEHLELPTLVGTMKDEKIIT

SEQ ID NO: 37640 - protein, 460 aa, Chromatium sp.
LVVDSISKEKDLTPFWNAQCAELTSRLWLPTETDLRDLDMNSFDLLSSQMVENSWFYQKTHSAPQSNLLKTCSISYTSSVVECTDLEITKSKLLKLYPTAQNRAQFKHWMKVSRYVYNATIALLRDYEGAKPSWMDIKKMFTRLLPAWTKDTPFQIKGTAIKDAHNAFWKTCKANKGSGKRTTFRFRSRKDPIQSCFIPKTAISNKGIYPQVSGKGLGYAESLPESFRDSRLVWKAGKFYLAVPTKHLVPYGENQALGVVAIDPGVRTFATFYSTDSCGLIGSGDFSRIQRMAHYLDDLLSRASKAGKQKKKRMLLAGLRMRQKVQNLIDELHHKAALFFVKNFDCILLPTFETSQMVSKAGRKISSKTVRNLLTFAHYRFKQFLKNKAFEYGKTVLDVCEAYTSKTHPETGEIKQIGGAKRIRLVSGDWVNRDVVGARNILLRALVDIPHVFNVAVNES

SEQ ID NO: 37641 - protein, 376 aa, Azomonas sp.
MANRAYKYRFYPTDEQKDLLTQTFGCVRFVYNHVLRWRTDAFYQRQEKIGYREANAELSRIKKAGEFPWLNDVSSVPLQQCLRHQQAAFKNFFAGRAKYPAFKSKKHRQSAEFTKSAFRYRDGKLYMAKSRVALDIRWSRPLPSEPTTVTLSKDWAGRYFVSCLCVFEPEALPVTPKMIGIDLGLKDLFVTSEGERIGNPRPTARYAARLAKAQRRLSKKKLGSANRAKARLKVARIHAKISDCRMDRLHTLSRRLINENQVVCAETLAVKNLIRHPKLSKAIADAGWGELMRQVQYKGEWAGRQIVQIDRWYPSSKCCSCCGHTIASLPLDVRSWACPQCGIDHDRDINAARNIKAAGLAVLACGEAVSPSAQVA

SEQ ID NO: 37642 - protein, 679 aa, unknown
  TnpB Polypeptide
MLMSEIYGTYEFKHFANKGKIEKIKTVLKEYRKTAQDIANFLWTEFFKNGGRFPHKKKISVKHIQSNLSERYKYVCLWQVYGVLQSNLSNLQRQFASVVWNSTLSREDKLILLALNQRQEWLKCSADKVNIYDNGKPKEVEVKDFHRMLAKKIFKHLMDKNRKPSFKNISMQIDGKVVELLPKQQGKAKSFDYWLKISTLEKGKPIYIPLRKNSYAESLEGKFLNFCQVVERSGNLEFRIVKELRKREYVPTTDVIAIDLGLNPLFADDRGDLIGRFFLSFLTRLDEKITKRMANLQRRGLKPSEDKKYVKLITKLREFLKNEINRMLNRIVDIYKPAKIVVEKLDFRSPELSKRMNRLIQNFGKRFVKEKLERLRELYGIEVVEVNPAYSSQECSFCGYVDSKNRKDTHTFECKACGKKINAQVNASRNLLRRSSLKEFFFANLPKKKVLKILLKQYLERLKGCGSALLELLKSNPYFRDYLEEFLNPRQGSPSRVSVHGTFVHAEGNSKMLQKTNWKELYEKDFYLWVMENLRLLKEKRYEEVDWENLLEEVEDMGRSELRSVISYVSIILEHLYKLENFKVSQEMGNSWIKSIINARLELSRLYRKNPSLVKKSEEELQEAWEDAVKSLIGWFKYPENKTLAKRFFGRLPTDKDFPSKCPYTFKQVLEYEPWIEEI

SEQ ID NO: 37643 - protein, 151 aa, Gloeocapsopsis sp.
MNHNISKTIIRSAKQQNAVVAIEDLTGIRERTNSYLRNKTERRRSNCWSFYQLRMFLEYKGVREGVEVIAVPPAYTSQTCHRCLHIGLRSDKKFKCGNCNWSGDADFNGAKMISLLGLSVNQPARGSSYLCCPLSIDSSGLLKSPAILSLG

SEQ ID NO: 37644 - protein, 315 aa, unknown
  TnpB Polypeptide
LWGLSINKDEDWKKKNTNWYKRKRVNFIKEKKIALRIPNNNQTKIISKREIKIQAFGIIKIKGSLEGLDKYKISLVTIKPFKNGTYQLQITLFYNSEKDKTLAGKSIKGYDLGIKNNNVMIADDGQIITLNQQIDNKLISIQNKINHINTKISKTNPKGNLYKKLQQLKNKWFAKRVNISNQELWRIANLISNQSDIIAVEDLKSKTMRNKTNKFNYKLSIRQPGKLIHYIECVANRNNKLLIKVNPYKTSQYDFETGEVSKKDLSIREYINSNGNLVDRDVNATKNIKHWALNPLEHIGYKTKQLKKNEIITVI

SEQ ID NO: 37645 - protein, 534 aa, Holophagaceae sp.
LQPLLLKKPRTKRKKTPRHPVERRAFRFAMDVSHAESQALFEVLDRCWEIRNILASERQENRRVNRVLREEGMPVHYLDRDDQNIRLAEIQKADPRYQGIHSQVLQDVARRIDEGTKRWLESLKHKGERKVNPPGIIERKDYSSFTFTQCGSTIGIWDGRVHLSKLGSFKLFQHRKFRGTPKTLTIRFEEGQWWAILVCALQSKAIYRDPTEVEHLQDIGADPGLTSLLTLADGTIFDPPKAFKETLADLRHEQRNLSRKFEMREKRYDEEQACRKAANKPALPSLRDIPYANRLRAQLKKVAILHTKVARIREYHHCKLASVVDNRYRKVAIEEHGVAFMFRDRRLARSAADRAIAKMKHWLGSKLGPRLERTPNQRPGIGGNSQTCLCEAPVPKTLKDRMHVCAVCGLKAPRDVVSANIVMQMAFGRNLLQQVREAVKDSNVVAGQVIVRRGGTKGSAPCVTAESKRVTATTSEVPVIRRPLFPQHPNNTRGGKPTREAKSARIDGQPPLLDEAQGLVSGQAADGKHWPSGR

SEQ ID NO: 37646 - protein, 388 aa, unknown
  TnpB Polypeptide
MFKSYKYRIYPNQEQKEYLSKIFGQIRFIYNLGLETKITNYTGNRKNIDCFDLNKQITELKNTECPWLKESPAQALQFAIRNLDNAYTNFFRGFGFPKFKNRYGKQSFQLPQGVYLSENKKQIFIPKLKSVDIDLHREFKGGIKTVTVSKSITNKYYVSILVDNGELKPEKKPIMDQTTVGLDLGIKDFVITSDGMKFKNHDFFKSAMNELRIEQRSLARKVKGSNHYLKQKLKLSLIHEHIKNQRQDYLHKISKYLVDNYDTICMEDLNVSGMVKNHKLARAISDMGWGGFKSMIEYKCDWYGKNLSIIGRFDPSSKTCSSCGTINKDLTLNDREWTCKKCGSIHDRDINAAINIRNFGLRNQPSVTQSEWLHCACGVETTTSLVLW

SEQ ID NO: 37647 - protein, 330 aa, Archaeon sp.
MDKYLPLVHSQVLQDVLRRVNKSFDNFFGRLKNHESPGYPRFKGHNRYNSFTYPQTGFEIIGNKLHLSKIGDINIKLHRNMIGKIKTCTIKRDINVWYVSFSVEINDSLPEKTIIKSVVGIDVGINPIVTLSNKEKKEPPKFLLQSEHKLAKKQRKLSQKQIGSHNRNKERIKVAKVHRHIRQQRMDFHQKLSKKLVEKYDFIAFEDLKIKNMMRNHHLAKSISDVSWKMLQSFTAYKAEWAGKVVTFVNPKNTSQECSRCGKIVKKNLNIKIHHCPYCGLVLDRHVNAAINILYRGLKKVWLGYTGFMPVRGPAQDRPMTQESHDFSRG

SEQ ID NO: 37648 - protein, 380 aa, unknown
  TnpB Polypeptide
MNTYKAYKLRIYPTDSQRELIEKTFGSTRYIYNDFLAERKSKYEESKTKISVYEQLKELTDLKKEKEWLREIDSCALQACVYNLDDAFQRFFKGNGYPRFRVKGVHESFRTNNTLNTYKNKKYESIRIDFNKRIITLPKLKEVKFRGYRTTKEIIGKIKSATISKDANKYFVSVLVEVPFINITLKPTSIVGLDLGIKDFIVTSNGEKIKNEVKIKEKRLKGLQKLLSRCKPGSKNRYKVKLKIQRLYLKIRNARKHMIYKLANDILKENDIISIETLDVKSMYQVHKIAKHLKNLPIREFIRVLKYKSNWLGKKVIEINKYYPSSQSCNRCGFKNEEVKNLSIRKWTCPECGLIHDRDINASINIMFEGLKIYMKDCII

SEQ ID NO: 37649 - protein, 404 aa, unknown
  TnpB Polypeptide
MLVKGVVFRLESDLPPDAMLLLQDFRLAVNCAIRAGLHARVTSRNALCRMAYKDFRKDYPRMYAKHLVSSFEVAASALKNHRRRLRKGLAARVPYVRRLMMKAENQAYKLNREKGIVDLPIKAGCHVMLELVVSQYHRRYLDDESMSLGSLTVLPDRVIVAFRKEVPKPYSPQSVLSLDTNERSLDGVFVDQGSAAVVKASFPDVAAIQMRHHDRRKRLQKKKAQDRRTSRRLCRKEGNREHNRIDYRLHKVADSVLSFADERKSAVVLEDLTGIKHKKNKDLNRRLSMWPRRKLHQIIEYKAQWRGIPVVKVDPRYSSRTCPICGRIHDSRMGAVFECECGWRLDRHINASINLLQTAISRGMAGGLRFDPGAFQHDVVMTLYEPEMAARSEPNGTSCVQVGT

SEQ ID NO: 37650 - protein, 570 aa, Micromonospora sp.
VKADTGRRYRLYPSDEQAVRLASWGHTCRWLYNTAWEQRQFAWRQRKVTLGLAAQCASLTQARRDFDWVADLPAQSGQQVLRQLNQAYQNWWNPQHPAGAPTRKRRSVRLSIPFPGQAVHVRRLNRRWSAVTLPKVGEVRFRWSRPLGGAVRNAVVSFDGVAWHIGFGVHAGVKAPEAHAQPGTVVGVDRGVKVALAMSDGRMWNRAFTTAGQERDLARLKSKAGRQETARRKRGLKTSNRARKVRAEIGRTEAKIRNRRRDFVMWAANRICAQHAIVKLENLNTKAMTATAKGTIEEPGTNVRQKAGLNRAILDKGWGMFETALANQGRTTGTRIVKVPAAFTSQRCSRCGNTHPNNRESQATFRCGSCGHQANADVNAAINIRDAAEATPPLTGRAVRDRNRKASCRPPTHPALQATGAGSGNLPPLGRSGCQGNKEKLFAAAAEFDLHLPDARQLPQERLGEALVRHFLQRWEVDESLAALLRAAVTNNAAAERMRQIFATQVAPAVAAGCPDPAEAARRAGLIASQILGLALCRYVVQLPPVAAMTSDELAARVGPVVTGYLTGAS

SEQ ID NO: 37651 - protein, 374 aa, unknown
  TnpB Polypeptide
LNKAFKYRIYPEPEQEVLIHKTFGCVRFVYNNMLANRKEIYEQFKDDKEALKRQKYLLPADFKKEFEWLKEVDSLALANAQLHLQTAYKNFFRDKSVGFPTFKSKHHDKKSYTTNNQGGTIRLIDSKTIRLPKLKDMRIKLHRQLPKEAVIKSATISKTPTGKYYISVLVEYEADIKPVTPTSETVSGLDYSSKSLFVDSQANHADYPKFYRQAEEKLKKAQRKLSKRQKESKNREKQRLKVAKLHEKVANQRKDFLHKLSRQIANACTAVAIEDLNLRGMAQTLNLAKSTNDNGFGMLKTFLAYKLTEQGKQLVVIDKWFPSSKRCRFCQNENKELTLADRTWMCSHCGAELDRDINAAINIKNEACRMLGIA

SEQ ID NO: 37652 - protein, 389 aa, unknown
  TnpB Polypeptide
MITSIKIMLVPNNKQRTKLFSYAGTARFAFNWALGREKENYENGGKFLSDYELRKEFTQLKKKEEYQWLNTISNNVTKQAIKDACKDYIGFFKGEHGFPKFKSKKKSKPAFYQDTDKIKFTDTHVKLEGLAASRKKNRKQFNWVRLAEHGRIPAEAKYMNPRITFDGLNWWISVGIETADSDEVPENEGIGIDLGLKELAVCSDTEIYKNINKTSEIKKLEKKKRRLQRSVSRKYEKNKKGESYCKTKNVIKNENLLLKVNHRLANIRHNYIHKTTSEIISRKPMFIVMEDLNVSGMMKNRHLSKAVRNQCFREFRRQMEYKCHKHNVQLIVADRYFPSSKLCSCCGIIKKDLKLSDRVYRCKCGNVIDRDFQASVNLKAYGKNLYYGT

SEQ ID NO: 37653 - protein, 371 aa, unknown
  TnpB Polypeptide
MLQQKGYKYRIYPNKKQQNIINQTLGCSRFVYNRFLAVRKESWSDTRTSVTYKQTSSMLTELKRDPAYVWLNAVDSTSLQQSLKDLDMAFKNFFAKKAGYPKYKSKHNHHLSYRSQCVNNNIAIKDGKLKLPKIGLVKIKLSRAFTGKILNATVSCTASGKYFVSLCVEEEMVLFSNLGKEIGIDVGIKEFFSDSNGDFADNPKTLSKYSKKLAKAQRKLSRKVKCSHNRNKQRRIVARIHEKIANIRKDYLNKESTKLVKENQLIGIEDLKVKNMIKNHKLAKAISDVSWSEFFRMLEYKAMPYGCRIVRVPTFYPSSQTCCNCGYQNKNIKNLGIRKWECPECGQHHDRDTNAAKNILAKAKEIIAEQA

SEQ ID NO: 37654 - protein, 548 aa, Actinobacteria sp.
VSALRTITAPVVAAGPTGCRFRTRLHLSDAEAAALVEIGEFLGGCYRRELAGRVRLGRMDRDGHKAWRATRKQALTSVSSSRWAGAITRAVEDQYQLGMRGLAAHVADLHSAVEVLEKRCSLRPGEIADDAGDSRRGKRRRGYATASERFAKTRRLAILQQRLAVAEAELAAGRPSITVGGKRLWRNRTNLAATGTNEQQWRDRWNAARRFLTADGETGKAGGNETIRVDGQGRLQIKVPAALAQKFGGHLQFASPVGFTHGGPEWAARVDQRKAVRYDIVFDPQRGRWYLDASWAITPEPSPALEELRGGRVLGVDLNADQLAACVLDASGNPVGEPVTIPLHVKKLRASRRDGHLRTAITELLNVAERNDCGAVAVENLNFADSRATGRETMGRGGRGKKFRRAVAGIPTAKFRDRLTAMATRRGIPIIGVDPAYTSKWGDQHWRKPLQQQTSGEVTRHHGAAAAIGRRGLGKPIRRRPAGPRTQQRMGVGTPPARPVRLPRSQGVRKAPIHRRAHEACRSTGQRRSPAAKTVRAATEQHPLLLSE

SEQ ID NO: 37655 - protein, 370 aa, unknown
  TnpB Polypeptide
MKTEKYEFYHQSNLIQIGNLIDDLHSVHIHLLKLQRRYYRIYGKYASFGRICNHITKLKQRTKPHWADLPSQVIQQVAKRIHLGYKNFFDNIKERKAGLTNCKVGRPKIKPNHKYNSLTFTQSGFKIEGNRLYIGCLKKSFTFWKHRDWTGPVKTVTIKRDTVGDYYLYLTCEDCEPTEKLPLTGNVAGVDFGMKTFLTLSDGTTIASPEFYKQGLAAIRSANKALSRKQYLSSGWFRAKRHLARVHKKIADQRRDWFFKLALRLVRKYDSIAIETLNLEGMKRLWGRKISDVAFGEFSLILQWTYAKYGKTFLKAGHWTATTKPCHCCGHHNENLTLSDRQWTCLECGFPHDRDVNAAINILRVGVPWT

SEQ ID NO: 37656 - protein, 223 aa, unknown
  TnpB Polypeptide
VDFKKGTLTIPKAKDIPAVLHRSFKETVKTVTVSMTPSGKYFASLLVDTSVQELPATPIQDDTALGIDLGIKSLAVCSDGRTFDNPKNLQRSLDRLKLLQKRLSCKQKGSANRNKARIRVARLQEHIANSRKNNLHKITHALTHDSQVRTICLEDLNVKGMQRNRHLAQAVGDASFGMFLTLLEYKCSWYGVNLIRIDRFAPSSKTCGKCGYVYKGLKLSGRS

SEQ ID NO: 37657 - protein, 367 aa, unknown
  TnpB Polypeptide
MLQTLMVKLDPSPEQHKMLCETMKRFNEACNHIAETVFALHSANKVEIHKTVYYPARERFGLSSQLTVRAISKVCEAYKRDKSIKPEFRLDGAIVYDQRILSWKGIEKVSLITLQGRQTVPIRFGEYQKARLDRIRGQADLILVKGVFYLCVVAEAPEETPYDPKGVLGVDLGIKYLAVDSDGEIHSGEQINRTRDKLDSLKARLQSKDTKSAKRHLKKLSGRMARFSKDVNHCISKQIVAKAKDTLRSVAMEDLQGIRSRAPVRKAQRRSLHTWNFGLLRQFVDYKAKVSGVHLVFVDPQNTSRTCPSCGHVSEANRPTRDAFRCESCGFDGPADYIAAMNIAVRAAVRQPIVSEHSILQGQASPL

SEQ ID NO: 37658 - protein, 344 aa, Paenibacillus sp.
MGVCGMRVGQDFSPKNLRHKAYKYRIYPNLEQQTLIHRTLGCCRFVFNHFLAMWNDTYAATGKGLSYNACATQLPALKQQYDWLKKVDSIALQSAVRNVADGFDRFFQKQNDCPRFKSRKHPVQSYTTKYTNGNIAIVGNQLKLPKLGWIRFANSTSCEGRILSATVRRNATGKYFVSMVCEVHIQQLPPTYSQIGIDLGLKTFAVSSDGMRVSHPKALRPYEKKLAFWQRRMARRMKGGSNWGKAKLQVARIHERIARIRQDFLHKLSTKLIRENQTISIEDLKVSPCSRTPSWRSPSPMRPGANSDDSLLIKPHGTDAPSRSRTPLLPRVKHATSVERITKR

SEQ ID NO: 37659 - protein, 364 aa, unknown
  TnpB Polypeptide
MKLSMKLKLITTETQKQALLDTMQRFNSACDYISDVAFENKAFGQIALHKLTYYDIRSKFNLFSQMAIRAIGKVVESYKVDKKTKHTFKPYGAIVYDSRILKFKFPDKISISTIQGREVIPFLFQNYRNLDMRRVAGQADLVYHDGSFYLIVCVDVPEPPQCESDNFLGVDLGIVNIATDNTGTQYAGNKLNSTRNRYSRIRNKLQKKGTKSAKRLLKKRKRKENRFAKDVNHFISKQLVDKAKALDLGIALENLQGIRDRVTVRKPNRRQHASWSFYDLRNKIAYKAQLAGVKVVLVDPRNTSRMCSVCGSISKKNRPNQSTFLCQVCGYSCNADENASMNIAVRARASVNAPDVVCVETKAA

SEQ ID NO: 37660 - protein, 474 aa, unknown
  TnpB Polypeptide
MSRKVKRAIVFELSRLTEEQKIILGYLTYHAGKLWNQANYLIKNKLAKPYYVDLYHTLKDTSIHLHSLQSRCAQIILDELARGWSNFFKFLDNPKKFKSKGIEIVRPPKYVNPEIPHRAVIWDKTGFKIEKSKIRLSLSKELKKHLLVRFALCAEYLWLDTGYEGLKELKVLNIQIVPYKSYGHLSYKLVVVYEKEVVEVKKKGSRALAIDYGVSNFATCVIEGNPVAYIIDGRGLKTLLWKKLKKIARLQSRLDNLKPKGLPTVQLERKLHKLWKSIKNLIRDYAHKVSNLIKELAIRNGVKVVVIGKVQASKNKESNLPDLVNQMFKLLPHGKVSQYLAYKLKEVGIEVRFVNEAYTSRTDSCEKTATVREQNKGLGRRIKRGLFLSPVKGLINADINGARNILRRFKKGWFDLVTGLKGVVRVRIYRFRGGISESLQYAGIGVCGGVNPPRGIRVGITYQTPSEAYDFRRR

SEQ ID NO: 37661 - protein, 398 aa, Thermoactinospora sp.
MSRFRLQPTPAQEAALLEHCAHARFVWNLAVEQHAHWRLGRAGAPGYGEQSRQLTEARAAFPWLRAGSQTVQQQALRDFAQAMANFFNGTHDRPTWRKAGRHEGFRIVGTRGRHWEARRVSRQVGEVRIPKVGWVRFRWSRPIPEGAKSFRVTRDRAGRWHVAFAALPAPIPAPGTGEMVGVDRGVAVSAALSTGELLTAPGLTTSEQVRLRRLQRRLARARRGSNRRAKAKTQIARLKARESDRRRDWVEKTSTCLARRFDVIAVEELNIRGMTRSARGTVEAPGRNVRAKAGLNRGILGSGWGRLAERLEHKAPGRVVKVNPAYTSQRCSACGTVDRNSRESQALFRCRSCGVAGHADVNAARNIKLAAGRAVSAREGPRDGGPVHREPQPVLLSV

SEQ ID NO: 37662 - protein, 398 aa, Thermoactinospora sp.
VPRFRLQPTPAQEAALLEHCAHARFVWNLAVEQHSHWRPGRAGAPGYAEQSRQLTEARAAFAWLAAGSHTVQQQALRDFAQAMADFFNGTHGRPSWRKAGRHEGFRIVGVRGRQWDVRRLSRQVGEVRIPKVGWVRLRWSRPIPDGVKSYRVTRDRAGRWHVAFAAVPEPTPAPGNGQSVGVDRGVAVSATLSTGELLHAPGLRPAEAKRLCMLQRKLSRARHGSRRRAKVKLAIARLRAREADRRKDWVEKTSTDLARRFDVIAVEDLNIRGMTRSARGSVEVPGRNVVAKAGLNRGILASGWGLLVARLEHKAPGRVVKVSPRFTSQRCSACGIVDAKARKSQAVFACRSCGYAAHADVNAARNIELAAGRAVSAREGPCDGGPVHREPQPVLLST

SEQ ID NO: 37663 - protein, 301 aa, Okeania sp.
MKARFKYRIYPTPGQKYRLAKLFGCVRVVWNDSLACCQEKYTSGEKKPINSDLQKLFITQAKKTEDREWLSEVSSIPLQQSLNDLNQAYQNFFQSTKGKRKGKPVKPPDCFVPRNAPRFKSRKSKQTARFTKGGFKVGQHKVPSNAKIGKLKIVWSRELPNVPSSVTVIKDCRGDSRIAPTRYFLSFVVEIQPETLAKTDNSIGIDLGIKTFATLSNGQKIDAPKPLKKRINKYRKLSKSLSKKTKWSYRYEKARVRVAKFYAKLKDTRTYFLHKLSTEIIRENQTIVVEDLNVSGMVKKR

SEQ ID NO: 37664 - protein, 285 aa, Okeania sp.
MRTAYQYKLKPNKDQIATIELWLELLRRQYNYRLGERFSWWEENRCPVNACPLITSIPHLRDNPDYYSQKKALVNTKDKFPEYKLIHSQVLQDCIKRVKLAFDRWFKADKNGQRLGKPRFNGIGRYRSFTYPQIKQDCLEGNKINLPKIGLVKLIQHRRLPDGFQIKTATISRKADGYYVTLSLEDKSVPRFNCDVKPTTENTLGIDMGLKDFLVTSDGESVPIPQYYRKSQKRLKTLQKGLSRKKKGSNRWLKGVKAVGKQHKKVADKRKDFHFKTANELLSLI

SEQ ID NO: 37665 - protein, 456 aa, Okeania sp.
MKARFKYRIYPTPGQKYRLAKLFGCVRVVWNDSLACCQEKYTSGEKKPINSDLQKLFITQAKKTEDREWLSEVSSIPLQQSLNDLNQAYQNFFQSTKGKRKGKPVKPPDCFVPRNAPRFKSRKSKQTARFTKGGFKVGQHKVPSNAKIGKLKIVWSRELPNVPSSVTVIKDCRGDSRIAPTRYFLSFVVEIQPETLAKTDNSIGIDLGIKTFATLSNGQKIDAPKPLKKRINKYRKLSKSLSKKTKWSYRYEKARVRVAKFYAKLKDTRTYFLHKLSTEIIRENQTIVVEDLNVSGMVKKRCDPATTKVASGRNPARFPRHGNADQERERAPRDRKLSRSISDLGWRQFRTLLDGIAEKYGRDFRVINRWEATSQICSCCGFKGGKLDLSVREWECLNCGAKHDRDENAAINILVAGGQSETKNGRGGKRKTTAKVAAACETSTHRGAKARLFPRA

SEQ ID NO: 37666 - protein, 212 aa, Okeania sp.
MKSIKTKLKLNNKQKTLMAQHAGYSRWCYNWGLGLWNAAYRDGYKPNSRKLREVFTNHTKPLYPWMKNLSSKVYQYAFINLGEAFKRFFQGLGKRPRFKKKGKHDSFTIDNCGKPIELNGWSHKLPFIGIVKTYEPIEATTQKITISRQAGDWYLSCSYEFTPTSTPKTTEVVGVDLGIKTLATLSTGEVFESIKPYKKAQNRLARVTTTTE

SEQ ID NO: 37667 - protein, 357 aa, Clostridium sp.
MLKAYKYRIYPNVAQQIYLAKTFGCTRFIYNKMLADKINHYEKTGKMLKNTPSQYKAEFEWLKEVDSLALCNTQLNLDKAYKNFFRDKTVGFPKFKSKKSNYHSFTTNNQNGTVFIENRYIKIPKLKSMIKTKEHRKFNGIIKSCTVSKTPSGKYYISILVDTENIKLHKIDTKVGIDVGLKDFAICSNGDVFSNPKWFRKSEKRLAKLQKYLSRKQKCSMNRNKARLKVAKLHEKIMNQRKDFLHKLSTKLIRENQSIVIEDLKIKNMMKNEKLAKVIGEASWSEFRTMLEYKASWYGRDIIIAPSNYASSQLCSECGCKNPQVKNLALRGWICPSCGAHHDRDINASKNLLKLAI

SEQ ID NO: 37668 - protein, 406 aa, Clostridium sp.
VSIKRNKGYKYRLKPTKEEREYFEKAFGCTRKLYNIYVDMLYEKLENKNYVNGKVDYRTVKFPTPAAIKKEYEYMKEIDSLAFANVQLDFQEALKKYNKEYDGKTYRKKSKKLEKTTGKILTFRDIKGMPSFKSKRQNHHSFTTNNQKGTISIVDECYVKIPKLKSLIKFVKHREIPEGYCIKAASVSKDCRGKYYISFTVEYYEEEKEITPENFIGLDYSQTSFYVSSEDEKANYPHYYRENEEKLKKEYRKLTRKKLKSKNWCKQKSKISRLQEKISNQRKDWLHKKSFELSQKYDAVCIEDINLRNIAQCLSLGKNVQDNGFGMFRNFLEYKLQHRGKHLIKIDKWYPSSKTCSSCGSINDKLQLSERVWTCKNCNIIHDRDKNASVNIRNEGIRIYEKSKSA

SEQ ID NO: 37669 - protein, 220 aa, Clostridium sp.
VSKDCRGKYYISFTVEYYEEEKEITPENFIGLDYSQTSFYVSSEDEKANYPHYYRENEEKLKKEYRKLTRKKLKSKNWCKQKSKISRLQEKISNQRKDWLHKKSFELSQKYDAVCIEDINLRNIAQCLSLGKNVQDNGFGMFRNFLEYKLQHRGKHLIKIDKWYPSSKTCSSCGSINDKLQLSERVWTCKNCNIIHDRDKNASVNIRNEGIRIYEKSKSA

SEQ ID NO: 37670 - protein, 370 aa, Clostridium sp.
MILAKKVRIIPNIGQEQKLWQSVGTARFVYNWTLAKQEENYKNGDKFISDNDLRKELTILKKTELNWVSGVSNNVAKQAVKDGCNAYKRFFKGLADKPRFKSRRKSKPSFYNDNIKLKIKSKMVLIEKVGWVKTREQIPMSVKYTNPRVSFDGKYWYLSVGIEKANPIIELTDKSIGIDVGIKELAICSNGMIFNNINKTRLVKRFEKRLRMLQRKISRKYELNKEGRKFVKTSNIIRLEKQIRLLHRRLSNIRNNYLHQATNKIVKTKPSRVVMETLNVKGMMKNRHLSKAVAQQGLYQFKRQLQYKCKFYGIKFVEADKWYPSSKTCSECGHVKAKLSLSERTYICEECGAVIDRDFNASINLSRYSA

SEQ ID NO: 37671 - protein, 407 aa, unknown
  TnpB Polypeptide
MQRLQAYKYELRTNGEQQRDMRRFAGSCRFVFNKALAMQKALYEQGEKKVGYAGLCKALTAWRNSEDTAWLADAPVHPLQQTLKDLERAYTNFFAKRADFPRFKKKGMGDRFRYPEAKQFKIDAGNSRVFLPKLGWIRYRNSRELLGTAKNITVSSNGGKWFVSIQTEREIAEPVHPSTSIIGIDVGITRFATLSDGRFIEPLNTFRKDEQRLARYQRAMSRKTKLSNNWKKAKAKVQKLHTRIANVRRDFLHKTSSTISQNHAIVCIEDLQVRNMSKSAAGSSEAPGRNVKAKSGLNKSILDQGWFEFRRQLEYKQVWRGGEVLAVPPRNTSRTCPCCGHVSAENRQTQAQFACVECGYENNADLVGAINVLAAGHAVLACGGMAQLGRPAKQEPAEATMQGFALV

SEQ ID NO: 37672 - protein, 271 aa, Lactobacillus sp.
MIYACNFISQYIFEHAFELKQSKLNKALYHDLRDKFELKSQMAQSAIKTVIARYKTVKTQLFQHPFRYDTGKKDGKGRGIWAQIYRDLTWLWQPINFKRPQLDLQRGRDWSYLSATNQLSLNTLNGRRKVDFVCKGFDQYLDQTKWKFGSLKMLQLRGKWYIHLSATTAIPEFEAEQAVHVVGIDRGLRFLAAGYDEKGKSILFSGQKILRKRRKYKKLRAELQAKGTKSAKRRLKKIDQRENRWMSDVNHRLTRHSLTIMALTRSMPWKI

SEQ ID NO: 37673 - protein, 284 aa, Lactobacillus sp.
VLSPHHLRIGKKNGITLRTSSLHNLRNVRIQKAVISYRQDLDRYYISFSVVKDKRQLAQYQVKSKKTGKAVGIDVGLGKEWLVTSDGKRFGVPDTFKLEKEMLKRQSHCDRNRTAIEKRAARFNHEHEEKIDKHDYANWQKLRKTKSKYQLKIRNIRYDYLQKVTTELVKGYDVIAIEDLKTKNLQKNHHLAKSIANASWRMFRQVLEYKCEWYGKKLIAVDPKNTSRICSKCGYNSGAKPLEIREWTCFKCQTKHDRDINAAVNILHKGSTKLSGQGLAMVTS

SEQ ID NO: 37674 - protein, 413 aa, Lactobacillus sp.
LDQSVVIKAQLLNIGNETARAFSITMLKYRDACNYISQYIFDHNFVLKQSKLNQALYHDLRDKFNLKSQMAQSAIKTVIARYKTVRTQLFQHPFRYDTGKKDSRGRAIWAQIYRNLTWLWQPIRFKRPQLDLQRSRDWSYKAANHQLSLNTLQGRKVVNFVCKGFDKYLDQTKWKFGSLKLLKLRNKWYVHLSATASLPEYQVSQAEHVVGIDRGLRFLTACYDEKGKTLLYSGQQILRKRRKYKRLRAQLQAKGTKSAKRRLKKIGQRENRWMSDVNHRLTKTLIDHYGSNTIYALEDLTDVRFATEKSPKDQRYEIASWAFYQFEQFLTYKANLNSSAVVKVPAKYTSQRCPKCGRIHKDNRDHELHLYTCDKCGYKSNDDRLAAMNIQFLGTLYRSGEEAPQFNKQASVE

SEQ ID NO: 37675 - protein, 286 aa, unknown
  TnpB Polypeptide
MGTKKFARNDIKAFKQHRDSQINYIGRTCEKQGNTNFQFQYVKKGNFFSMKVRRDFGKWKDDRSFERFAYGKCHFKYGSKQLRDAMRNNSSPVTVSVIRRNGRYYLFVTVAVSYENSAIVTRKEHGVIGIDFNKGFVNICETDEKGNIVSVEKMRYPFGKAGITNAGLADVVSKISDKAVKTGKSIVAEDLSFERKKRKSKKAVTPTEKERMRMLHSLPYSRYAKILENITFNRKIELIKVNPAYTSRTAEHKFCDQMKLNIHNGAAFVIARKGMGIKDKFLKKAG

SEQ ID NO: 37676 - protein, 373 aa, unknown
  TnpB Polypeptide
VEEMISSALALIPLNIEKLETRIDNKIKLIEKKRKEIVKIHASRKTNTKRLRKLKFHIYNIHNSINRIRQKIENLERQLNEKKPNICMGTKKLARNDMKAFRRHRDSQINYIGRACEKQGNMNFQMQYVKKGNFFTMKVRRDFGKWKDDRSPQRFAYGKCHFKYGGRQLRDAMRDNASPVTVSVIRRDGRYYLFVTVAVSYESSAIVTRKEHGVIGIDFNKGFINICETDEKGNIVSIEKMKYPFGKAGTTDAGLADVISRACHKAAETGKSIVAEDLSFERKKRKGKKAVTPTEKERMRMLHSLPYSRYAQILENITFNRKIELIKVNPAYTSRTAEQKFCSQMKLNIHNGAAYVIARKGMGIKDKFLRKTG

SEQ ID NO: 37677 - protein, 414 aa, unknown
  TnpB Polypeptide
MDLTRKIRLYPNKVMSAILDNLCDYRRYCWNQALDVWMSLVQQRQKHLPADLRLKVKQAVKDKSISFTDNEKALLMHYPAPTHYTVRKILTADKQDWQRQLSSRALYLAVDDLAKAWNYYFNNKDNTSSHAGKPSFKEKKRPKQGFKTDRSQIKNGKLVLDKPRQYKGDWYGISFKGYSLPDGHIKYCSITKINNKYYASLVVETPIEPLVQTGQYTAVDANVNHFDYTDGQYSINPKRLNTLYAQIAFYQKRLAHKRKVNGQKASDSKSYTVMRAKLQALYEKATAIQNDLLHKFTTYLYRTYDIIVIEDLDVKSMQMSKKAKNLHRSLFGKFRFQMEYKAKKFNKQLIVADRYYASTQRCSQCGHIKTGDEKITLAGNDKHGTAHNEYICYKCGYHADRDMNAVHNLLALIK

SEQ ID NO: 37678 - protein, 436 aa, unknown
  TnpB Polypeptide
MSRRRTEVVGVDRSVTYRLLPTSRQRLALEDLVLWQCRLYNAALEERRGAWRWERRSVTLYDQINGLTGAAQWVPELARFGRRVSQGTLIRLDEAFAAFFRRVRAGDAPGFPRFKPLSRFDSVQWSNHLGSWKLLPTGKATYGRLYVQGVGHLSIKLHRRFEGAQARKLVIRRSGIGKAIRWEATISSRGVEVPVLVPTGRACGVDVGVAVLAAVADESGNVELEANPRHLDRRRAELAGAQRALAACRKTGRRDGGRRHRAKARVIRAHRLVRQARRDHAHQLSARIVRDFDVIALEHLALTSMTRSAKGSLEAPGCNVAQKAGLNRSILDAGWGQLVRFITYKAESAGRCIERVRAPYTSQTCAACGRTDPGSRLDRDHFRCTGCGYEAHADANAAAVVLSVALGRLVIEAPRTQDSPRPGPGHQPATAVRDVA

SEQ ID NO: 37679 - protein, 160 aa, Clostridium sp.
LLNLQRELSRKTIGSLNRNKARLKVARLQEHIANQRNDFLQKLSTKLIKDNDIICIEDLQVKNMIRNRKLSRLISDVSWSEFIRQLEYKANWYGRQIVKVGKFFASSQICNKCGYKNEEVKDLNIREWICPSCNETHDRDINASINILKEGLRLITIQNK

SEQ ID NO: 37680 - protein, 225 aa, Clostridium sp.
VEKAYKFRMYPNKKQQELINKTFGCCRFVYNKYLAKRIEVYKNAKETFTYKQCSSDLTNLKKELNWLKEPDKFSLQNALKDLDNAYKKFFKEKAGFPKFKSKKINRFSYKTNFTNGNIMYCGQHIKLPKLDMVKIRDKQVPKGRILNATISKEPSGRYYVSLWCNGCRILKQFENTNNQIGLDLGIKRILYLKLWRIYRKSLSILRSQLNKLAKFTKRIIEKNNR

SEQ ID NO: 37681 - protein, 413 aa, unknown
  TnpB Polypeptide
MLVKGVVFRLSSDLPPEAIELLRDFRLTVNRAVHAALDARVSSRNGISKLLYKGFREEHPGMYSQHLVSSFEVAAGILKNHRRRIREGRRCQVPFVKRLMMKAENQAYKLDCSEGIIDLPIRAGCHVRLKLVVSQYHRRYLNDESLSLGSLTVLPDRVIVAFRKEAPSPVAATSVLSLDTNEQSLDGIFVEGGQEGDAKCVQVEAAFPEVAVIQQRHHERRRRLQRRKAHDWRLARVLCRREGAREHHRIDYRLHGVANAVLEFAEHHKSAIVLEDLRGMRLNRSKDLNRRLSFWPRGKLHQIIEYKAAWKGIPVIKVDPWYSSRRCPICGRIPDSRMGTQAEFSCECGWHLDRHINASMNLLQTAISKGLEVAGGLRFSPGAFQHDVMMTLYEPAMAARSEPNGTSQIGTAT

SEQ ID NO: 37682 - protein, 266 aa, unknown
  TnpB Polypeptide
MGERVMLYVQNVGEVKVKYHRPLPDDAAIKHVVIKRRAHRWYACLMLDLPDPVILEHTGPAVGIDMGLSHLLALSDGTLVENPRWLRQSLAQLRVAQRRLARRQRGSARRRKAAAQVARLHERVANQRRDFWHKLTRQLADTYSLIALEDLTLAFMTANHHLALSAHDAGLAEFQQLLAYKAEEAGTQVVTVNPAYTSQACSGCGVVVKKDLSVRVHVCPDCGLTLDRDVNAARNILMLAVNPARTGPPERNVAGHGERALGSSPL

SEQ ID NO: 37683 - protein, 430 aa, Tychonema sp.
MQLAERHIIKSTEHRFVEIDGLAFKSKNLYNAANYVIRQSFVYGWGYINYNEMNRLMKSHSAYKELPAKVSQQILMILDKNWKSFFEAVKAYKIDSTRFTDRPKLPKYKDKVKGRNILVYTIQAISSKELKKGIIKLSGTNILIKTQIKPERICQIRLVPKCDSYIIEVIYNACTEPESTLELDENPKELVASIDLGLNNLVALTSNQPGFVPLLINGRPLKSINQFYNKRKARLQSQLKGLRKTSSRIQRLTRCRHQKVDNYLHSASRYIINVLGSRNIGTLVIGKNAQWKNELDLGRKTNQSFVNIPHARLIEMLKYKAELMGIKIVEQEESYTSKSNFLNLDPIPVYGYIGTFDVTFSGQRIKRGLYRTSSGRLINADVNGSYNILRKAIPNAFSNGIGSCVVQPRRVNLLEVKAKGEGLNASHVMS

SEQ ID NO: 37684 - protein, 381 aa, unknown
  TnpB Polypeptide
MSVRVVKRAYRYRFHPSPEQADLLNRTFGSVRYVYNRALAERSRAWTQDKRRVTFAETCRMLTAWKNDPETAWLYEVSNVALQQGLQHLQNAYVSFWGRRAKYPAFKSKRRSRASATFTTSGFRYRDGHITLAKMTAPLAIVWSRPLPEGAEPSTVTVSRDAAGRWHIAILVETTVNTLPPSDAAAGIDAGLTSLVTLSTGEKITNPAHERRNRARLARAQRRMAKKQKGSVNRAKARVMVARVYARITDRRRDHLHKLSTRLIRENQTVIIEDLSVRTMIRNHSLARAISDASWSELRRMLEYKADWYGRTVIAVDRFYPSSKTCSVCGVITASLPLNVREWTCSACGMSHDRDVNAAKVLRAAGLAVAACGDGVRPARA

SEQ ID NO: 37685 - protein, 378 aa, unknown
  TnpB Polypeptide
MKAHRAILIKLPKDKCDTAYIRRLMALTNLAYRGYEAWVPDLPKTIQYQLYDFKNMKSLVFGAEPKRWFAKTWVPLKTFRVYPDGSVKGDRNAPVVLDFKNNTIRVRQVCRNEHGYVVEVPMPKWVVDRLSEGGDVKYAMIGLKDNEPYLALVAEREVMPYKPSDYMLAIDVNAWNNGIAWGLIKSNKLVKWRPERPRLREIDGLYYRSVVLSQKYGKLKRLGLHKTKEGKGLWREVRRLRRRIYAKLRDYAQRLAHRLVRKALRHRALVIIDDMIEESRRELLEEKLPSGLRKIYLAETRRFVKLLVTQLQWYGVPYRFKRLPSTICPICHHELTQLQGRIMVCENCGFKAPRDKVPIHWVLTHFPALKGEGFSQDS

SEQ ID NO: 37686 - protein, 350 aa, unknown
  TnpB Polypeptide
LEKHIGCCRFIYNKLLHIKKTFYEKFKATISEFELNNHIKVLKDIHPWLKEVNSQSLQQASKNLNSAYNKFFKVHAGFPKKKSKKNPLQSFQIPQFYRIEGKKIWIPRVGWIKIKLHRDLMQGEMKTATISKTPTGKWYISIIVENDIELPEKQEYSHPTMIGIDVGNITFATLSNGEKIDHPKFLKNSLERLKFLQKNVSRKVIGSNNRRKAVKKLAKIHEKITNQRNDFQHKVSRKLISENQAIAVETLNIKGMMSNHKRAQCTGDSAWYSFVTKLQYKAEWLGKTVIKISQWLPSSKTCNICGYNHPNLTENIREWQCPDCKTMHDRDINAAITLVSKKCNFCHNFH

SEQ ID NO: 37687 - protein, 381 aa, unknown
  TnpB Polypeptide
MKAIKVKIYPKQNQATLLEKHFGCCRYIYNWGLNKKISHYQQFDQSLSKFNLMKELTQLKKEDETIWLKEVNAQALQQSLVDLDSAFSHFFRKNNQFPKFKSRKNPKQSYRVPQAFQVEIDKHYIKIPRLGWIKFKDEFNVPENAEFRNITISRKNSKYYAAISYKTPDPVPKKTKPTLDKTLGIDLGITDLAIRSDGVKTPNPKHLKQSEQQLKEAQQKLSSQEKGSKGYERTKIKLSNIHEKVANTRKDFLHKLTTSIVENQDYTSIAIEDLAVKQMEQSNYSPMSKAIGDAGWRMFRKMLEYKCQDRGKNLLVIGRFDPSSKTCSTCGNVYHELSRREKSWICEKCSASHDRDVNAAINIKTFGFRKYLEVGQDLWEA

SEQ ID NO: 37688 - protein, 348 aa, Geobacillus sp.
MVAGSPKARCKNKRKENSIFTANRFKPSATNTSSQDKPHTTPSNKDILSAIPTRKRSTSQRNGQKDGFKVYENGKMELSMGIHHGKREKPIVVHASHLPKGMIKEIECCFDQGLYLDVTYEDGQKEKAYKPGSSIGIDLGEVHTIGAFCENGQALLITGRKIRSLHRLRSKKLAEIQRRQSKCQKGSRLWKKYERAKQYVLSKSERQLRDALHKTTKQFVDWCLKQSAPDVYIGNVEGVERNTRKKTRTSRKQAQKLSNWSFGKVKKYLAYKLAPHGIRLHEIEESYTSQTCPVCQKRKKVSSRLFVCRCGYEEHRDVHGAKNILSKALHGTFVHWNVQTNLTYLRIA

SEQ ID NO: 37689 - protein, 201 aa, Anaerolineae sp.
LRKLKRLSRELSRRQEGSGRWNRTNKKLAKLQRRIANRRLEYPHQMTTKIAHTYRVIGVEDLNVAGMKRNHRLALSIADAGFGEIHRQRAYKSEGYGGMLVAMDRFFPSSRLCHVCGCINSDLTLADRTWTCDCGAVLDRDLNAALNIERQALEMVAGVGSRRPKTPGERMSDSSAQSASKRENRAEERRPSKPCQFGTVW

SEQ ID NO: 37690 - protein, 406 aa, Nocardia sp.
VRTAYKVRAYPDTEQAALLRRTFGCVRLVWNKTLAERQQRYTTEQKSTSYKQTDAALSEWKKTEDLAFLSEVSSVPLQQTLRHQHSAFAAFFKGLAKYPRFKNRHGRQSAHFTRSAFRIKDGALWLAKTSAPLRIVWTWPGVDLAALDPTMVIVSREPDGRWFVSFAVDQPDPQPLPVAGESVGVDLGIKDFAVLSTGEKIANPRHMARHERGLRRQQRRLSRMKKGSENRARQRVKVARKHARVRDARRDFLHKTSTELVRRFDTIAVEDLAPKNMVRNRSLAKSISECGWGEFRSMLEYKAEKAGRRVAVINRWYPSSKTCSACGHLLAALSLGTRHWMCPDCGTRHDRDINAAKNILVAAGLAETQNACGGDVRPHGASHRQSPVKQEPSQATAGIPVLQGGE

SEQ ID NO: 37691 - protein, 504 aa, Gracilibacillus sp.
MAKAKTPSYVLELELQTNQAERVILEKKIKIAKQIYNACLGFALKRLAELRSDKEYHVLVADKSAKGRTKRLKEIERSHGYSEYQLHAFVAPMQAKYAKNMGSLEAQKLATRAFKSVEKLKYHQAKRVHFKRPFDDMSVENKNNATGIRFDGEFLLWGKKNAKGSLKLKVFIKPNDEYAHMALCDKTKYCRVVMREIRGKPRFFVQLIQEGLPPTKRDKDTGLEKNPVDTFNSRVGIDMGTSTGAVVSEDKIQLVELAEACKADAKELRRMERAMDRSKRATNPHNFKENGVVKKGVKWSFSNRYMKRKAKRKDLHRKIATKRKQAHEELANDILSQGSDVRVETMRFQSLQKKAKKTTRNKKNGRIDKKKRFGKSLLNHAPAMLITILDRKLGYQGKSVKKIDTYATKASQFNHKTGEYTKKQLEQRWNDIQGLSIQRDLYSAFLIGNTTDSLDSIDVDLCDSQWEQFVELHNREIARLQQSTNKTLHWFVKPDKQRKTAVAV

SEQ ID NO: 37692 - protein, 555 aa, Archaeon sp.
MSEQILSTPIKLPRSHQENFRHMENLTRRVANHVLEEYWNEEHLVRISEHEGRAWKYFNEGEAFDDVDLYLPSRFKRCILQKVGETLRSQASKLRAFQKTKPLLPEKALDKPDKRQIRKKIYEDDEFTDLDEVSSLLKRIDNYYREHGRYPDSYLDMQNCPRYEKGTLPYSADDGPEKGQMIRYGRDGEFRVEIKLPETASPEVRGNWSWFDVKPDVHEHFHRLAEIGELKAPEFHPKNGKTGERFYYLNFPMEVRELDKKQETGRVLSVDLEVKKIATCVVMNEGGEQLSKPHFIRSSETEKMRRLYYERNDLNSKLGNLREHGLAHTHEFKHLQAEYKRTQNKLNHKREQLQHSVANQLLSLAIYYEVDAVVFENLGRLKAPRRHKTTSWIISTWARGMLKDKVEYRAEIAGIDVETVPAWGTSRTCPRCGKRGETVKAPDIQEKDRSGGHFKCKECGYQADRDYVGALNIGRKYLGNGHLKEVKPVAYTESGNTPGDRSLGVRPASFEAEKSEEPSSHPSRIVPPHRTLIDGGDEPRLGGKPKGIVQLVEDY

SEQ ID NO: 37693 - protein, 392 aa, Geobacillus sp.
MYRTLKTRFRAKKEVIQKLFECNRISAEVWNECLHLAKEHYLETGKWITKTELQKATKGRFSIHSQSIQAVVHKYIFARDGAKEARKKGEKIKYPYKKKKHFNTKWAKDGFVLHEDGTLELSLGIWNRKRQSPLVVKIDKEKLPNGKVKEIELVYDRGLWLCLSYEDGKKPKENPCKNRVAIDPGEIHTIAAICENGESLIITGRKIRSIHRLRNKKLKELQKLMSRCKKGSKQWKKYNRAKQYVLSKSEAQLKDALHKTTRQFVRWCLENQVKEVVIGDIEGIQRNTKKKRNKKTNQKLSNWSFGKLFDYLKYKLNAEGIQIEKKDESYTSQTCPVCGKKNKSSSRNYTCQCGYKRHRDIHGAMNLFAKVYYGEIRPLEFTVKPFTYRRIA

SEQ ID NO: 37694 - protein, 395 aa, unknown
  TnpB Polypeptide
MEHLTLQTKKNPEPAYDFNQCAYKMPAYLRRTAIQEALGAYSSYASNHENWVNNGKQGKEPKLTYERNAMPTLYKGNMFIRTGSDTARVKVYHRKDWVWLDVLLCKQDVKYIEKHCLSDPNTVQKNPKLKKCGKCWYLVFPFAKAVTFEDVAIEDRTICAIDLGINQNAVCSIMQSDGTVVARKFINFATEKDHLYKALGRQKKAQQHGNRKTPVLWKRVNDINQDISRKTAKGIMDFAILYNVDVIVFEYLDTNGKKRGSKKQRLQLWRKREIQRIVEHHAHKCGIRVSRICAWGTSALAFDGFGKVERGTYMQDGKEKYNYSICVFPNGKIYHCDLNASYNIGARYFIRELLKSESVMTRLPAEANDLRYGTGTTRTLSTLIRLNADLCATCA

SEQ ID NO: 37695 - protein, 414 aa, unknown
  TnpB Polypeptide
MLLSKRTTIHVSEHQANILNHMNYAASKLWNVCNYEKRNYKTLGIPYPNWYNQKSRLKDNIWFKSLPSQTAQEICNQIDQAFKSYYKLLKTGGIKSPKPPKFKQEGIPITYMQNGIVHNKKSAQIRLSIPKNLKVHMAERFDVHDNYLFLENKVFQDMENIKQIKLYPPVNGELLMIVIYEIPEVGWLPDNSHYLSIDLGIENLMTCYDSLGNSFIVGNSYLEVSHYFNKKIAHYQSISDSQQVSKGTKYPKSSKRVLKLYKKKHNSIKDVLHKSTKYIVDYCLEHHIYTVIIGDIKHIRDNNSLGSKTNQVFHAWPFREIYLMLEYKLKQHGIRLTRIKESYSSQCSPLSKEVSKRYANKSNRIKRGLYKEAGHIWNTDAVGAYNIMRLYFKQIGRGKQISHQNLGSPIKVTV

SEQ ID NO: 37696 - protein, 360 aa, Soehngenia sp.
VSILLKAYKYRLYPNKEQQLYFAKTFGCVRFIYNKMLNDKIKHYKLTSDMLYNTPAQYKKEFPFLKEVDSLALANAQLNLQKAYNKFFNEKSVGFPKFKSRKSNYFSYTTNNQKGTIYIKDNRIRLPKLKEMVKLKYHRKFDGVIKAATISKNSAGHYFVSVLVNEEIIRLPQTSNKIGVDVGIKAFAICSDGLVVENPKAFRKSEQRLKKLQKDMSRKKKGSENRNKARLKVAKLHEKIANQRNDFLHKLSYKLISENQAIVIEDLKVSNMLKNHKLAKSISDASWSEFRRQLEYKSKWHKRKLIIAPSNYASSQLCSSCGHKNKDVKNLALRKWQCPVCNTEHDRDLNASYNLLKLAI

SEQ ID NO: 37697 - protein, 437 aa, unknown
  TnpB Polypeptide
MELIRSEETKARIRASMSATKARRQTQICRVFELKVSVRHNPKETFQKLSQCFKEAKWVINDMLSLSKDNPDNSMFDYKYTEHKDVVHYDKDKNPITDTVSLPSVLHRATVAQKKTDIVNLAKAKKKGIKVGALKFKSEVNCIPIITGYTQILDGCRITIPGFRKLRVHGIDQLHGFEKFEIADAKLVRKASGYYVKISVMLPKERRNPTGRNVGLDFGIKDSVTTSYGDKYNCKVRESDRLKFLSRKLNKRGKKKHEKGSRQYYRCRRQLKREYEHLANRRKDACNKIYHRLVTDYDVIYFQDEQIANWHKGLFGKQVQSSCLGSLKQRLKSLQDSGRSFMISKWEPTTKLCPQCGARNILSLNDRIYKCDCGYEMDRDIHSARLVLMIGSSKRAECLEQASPEEIPLLNENHQIAQSASMTRDGKTRSSHPLGCA

SEQ ID NO: 37698 - protein, 483 aa, Micromonospora sp.
VKKFQPRPGFVVQAYRFALDPGAVQEKALRSHCGAARAAYNWAVGWVVASWWQRKAEESYGIAEEELTPWRPWSLPTLRKVFNEVKKTDPRFAGWWEENSKEAYSTGLANAAAAFDNYAKSKQGKRKGKRVGMPRRKSKHTARLACRFTTGTIRVEADRRHVTLPRLGTIRTHESTRKLQRRIANGSARVLSATVRFERGRWFCSLQVEVSKNARTAARPGVVVGVDLGVKCLAVMADSAGEVRYVPNPAHYDGALKHLKRLSRRVSRRQGPDRRAGRKPSRRWAIANAERNRVHHRVANLRQDGLHQLTTAITAEYATVVVEDLNVAGMLRNRRLARKIADAGFAEVRRQITYKTGWVGGETVVANRWYPSSKTCSNCRVVKAKLPLHVRVFTCDACGLVIDRDENAARNLAALAAAVTTGTGVAGDQDAQASNPRGADRKTRATTRSRKATGGRAGGAILPHQRQEETRDRHQDPEALTLR

SEQ ID NO: 37699 - protein, 333 aa, unknown
  TnpB Polypeptide
  misc_feature (91)..(91): Xaa can be any naturally occurring amino acid
  misc_feature (178)..(178): Xaa can be any naturally occurring amino acid
  misc_feature (185)..(185): Xaa can be any naturally occurring amino acid
  misc_feature (268)..(268): Xaa can be any naturally occurring amino acid
  misc_feature (328)..(328): Xaa can be any naturally occurring amino acid
VAVRRSYKFLLRPTRRQEIALAACLEDHRTLYNAALEHRRTAYRMAGVTIRYGDQSAELKHIRADDPDGQGRWSFSSQQATLRRLDKAFAXFFRRVKAGQKPGFPRFKGRGWFDTVEWPKDGDGCRWDSQPEHPTATFVRLQGIGHVRVHQHRPVRGRVKTISVKREGRRWYVILACXDVPAEPXPATGAVVGLDMGVASLVTTSDGEHLANPRHLAATADRLAAAQRDLARKKRGSKRRLKAVARVAALHAKVRRQRLDHAHKAALXLVRNYDVIVHEDLRIANMTRSASGTIDNPGRNVAQKSGLNRSILDAGWGVFLRSSRTRLXAPVAS

SEQ ID NO: 37700 - protein, 386 aa, unknown
  TnpB Polypeptide
MQAFKAVQQSYTPTAELLSLLDAFRRMVNECIRLGVAANVTSMKALSKKAYHALAEYDVVTYYRLTAISKAAGILRNYRHARRRRRSVKPPYASKLMLTDCYGFRIIDGELRLPIRAREYVYIPLNAYVLRSIESYTVRAVCLTACTVSVVFSKETVHLEAAGLIGVDCNLDNVTTAASGGDVRRYDLSRATAIKENCRQAKRGFRRNDYRIGKRLYSKYGRIQRNKVNWILHNTSASLVRQAKEKQFGIVMENLRGIRRLYRRGNGQGRDYRARLNGWSYAELQRQIAYKAQWEGLPVFYVHPSKTSSICATCGCHVAECAGRTVYCPRCGSLVDRDENAALNIVSAGLRFSLKGVAGEAMKGNPERGQVIPGADATQLPHQPQR

SEQ ID NO: 37701 - protein, 387 aa, unknown
  TnpB Polypeptide
LNSVIKSVRQRYVPTHEVLWLLEQFGQMLNVCVRTGLAENVTSLKSLSLRAYKQLSGYEVMSYYKHCAISAATGILRSYRKAKRKNPRTKEPYAHRSRLTTYEGFKLQDDELLLPFKPKQPIPIALNLHTLEVLSEPDLQVRSVTLTNDILSISYMRKVESIEPCGLVALDRNVENVTLADSNGQITRHDLSEATRVKAMYREVRSHMTRNDHRIRRQVSAKYGCKQREKVKQILHHASKRIVMEAKEKQFGIVMEKLTGIRKLYRRGNWQGHNYRGRMNSWSYFELQRQIEYKAKWEGLPVIYVPPHGTSSKCSICGHKMMPEENRTLRCPSCGYTVDRDVNAAKNILARGMRFVPIAPASEAMVQEPACAAILKVDADESNPREN

SEQ ID NO: 37702 - protein, 219 aa, unknown
  TnpB Polypeptide
VVGIDRGVKVAAALSTAELLYVPGLSRGEVRRLKVLQQRLARAERGSNRRDRTKRAIAKLKARETDRRRDWVEKSTTDIARRFDVIRIEALDVRAMTRSARGTVEQPGAGVAAKRGLNRGISRSAWGLFAARLQHKAFGRVERIPAAYTSQRCCVCGHVAPKNRKSQAVFECEACTTGPCDADVNAARNIAAGRAVTARGDLGASRSMNREPQLCSPAA

SEQ ID NO: 37703 - protein, 403 aa, Trichocoleus sp.
MIVLEFKAKGKTTQYEAIDEAIRTAQFVRNKCVRFWMDNRGVGQKELYRLSTLLRNEFSFVKTLNSTAVQASVERAYSSIARFYDNCKKSIPGKKGYPKFKKNSRSVEYKTSGWALSQTNKQITFTDKKGIGKLKLKGTWDLNFYQPDQIKRVRLVRRADGYYVQFLIKVDTHQELPSSGKTIGLDVGLKEFYTDSNGHTEPNPRFYRTGSKRLKLRQRRVSRKKKGSANRRKAINRLGRVHLKISRQREEHAKRIARCVIQSNDLVAYEDLRIKNLVKNHCLSLSINDAGWYQFRKWLEYFGVKFGRVTVAVNPAYTSQQCSNCGTQVKKSLSTRTHVCECGLVLDRDWNAAINVLKLALSTVGHTGTWILDPNASGDSTSTVVGANLSGQVGSLNEESSRL

SEQ ID NO: 37704 - protein, 382 aa, Escherichia sp.
MRRFAGACRFVFNRALALQNENHEAGNKYIPYGKMASWLVEWKNATETQWLKDSPSQPLQQSLKDLERAYKNFFRKRAAFPRFKKRGQNDAFRYPQGVKLDQENSRIFLPKLGWMRYRNSRQVTGVVKNVTVSQSCGKWYISIQTESEVSTPAHPSASMVGLDAGVAKLATLSDGTVFEPVNSFQKNQKTLARLQRQLSRKVKFSNNWQKQKRKIQRLHSRIANIRRDYLHKVTTTVSKNHAMIVIEDLKVSNMSKSAAGTVSQPGRNVRAKSGLNRTILDQGWYEMRRQLEYKQLWRGGQVLAVPPAYTSQRCACCGHTAKENRLSQSQFRCQVCGYTANADVNGARNILAAGHAVLACGEMVQSGRSLKQEPTEMIQATA

SEQ ID NO: 37705 - protein, 376 aa, Ruminococcaceae sp.
MSEMIKRAYTFRMYPNKEQQKLIERTFGCCRFVYNHFLELKEQLYKDSKKSLSYFDMTKMLTLKKKDFPFLKEADSKALYYSLNRLSKAYTNWFEAIKRKDYSHGRPRFKSKKNKVQSYTTSQIKGFVDDRHLFLPKIGAVQVSGGRIPTGKINEATIRRTASGYYVSLQCDAEKPEKLPETERVNGLDLGIKAFATMADGTKYENEKKLQKAQKKLRRAQRKLSRREKGSANWEKQVGKVGLIQEKVANQRKDHHQKLSTQLIRENQMIAVEDLGVKGMVKNHKLARAISDAAWSDFIRMLDYKAGWYGRTIIKVPRSFASSQLCSCCGYKNPEVKNLRVRTWSCPQCGAKHDRDQNAAINILRKGTEILSPNTL

SEQ ID NO: 37706 - protein, 565 aa, unknown
  TnpB Polypeptide
MKQEKQDGHAEGNRVIQYNTIKVRLCPTPEQEELFQKTFGCCRYIWNQMLSDHERFYEETDAHFIPTPAKYKKGAPFLKEVDNQALTQEYNRLSQAFRNFFRDPKTFGYPKFKRKKDDRDSFTACNQFFGSSATIYATRDAVRMTKAGLVKAKFSRRPRSGWKLTRLTVERTKTGKYYGYLLYTCPTYQPEPVEATAERTIGLKYSVSHFYVADNGNSADEVLEEYFRSSLVFRMTGDEYLVAVEDATYDTFIKSVNDAHHKLDNISLGLVSVGYAWEKVDIDAEKLIGRAEGMMREEKQKYYKNLKKGHHEPIIKQDLLSDIENGNFIVCLVPKVDVDTEEVVGAEAVVRYHHKDLGIMNPGKYLTLLEETKLSHYLDLYVFEEVCKTLRRWETEDLPMIPIAVNFAGATLRQIDVAEKMTALIEKYHVSCEYLEVEVSESYSDMNQEMLAETSNKIRKSNVRVILDHFGAKESTVAILTIMEFDGLKIDKSIVTNIVGNGRSQSVAKAVTDACCQLGVPVSASGVETRDQLNVLKELGCSCVQGSLFNKPITIDTFEVRYLKG

SEQ ID NO: 37707 - protein, 422 aa, Methanococcus sp.
MNNRVNNMMRTYKFRIYISKSIQETIEEHLNICRYLYNYLLEQKTKNPKLNKGDTQKLITEHKKENPELKKVHSKALQMVNNKLWGNLKALGKLKQNGHKVGKLRFKSSKNHYKTIEYNQSGFKIKDNKLYLSKIGEISIKLHRKIKGEIKGVIIKKELTNKWFAFFQVEEEPKPLPKTNKVVGIDLGIDGYTIDSDGNKFENPKFIDETLDKIKKVQKNLSRKVRGSNNYKKTKLKLIKVYDKLNNQKNDFLHKLSRYYINNYDKIVLEDLNIKSMVENKKGQKTLNRHILDGSWKKFINLLLYKAEGAGREVILINPAYTSKKCFNCGCVVSSLRLSDRIFFCPNCGWKIDRDYNASLNILKSGLGESVVPAEGRPLLRVIPYIKVISGQVSPMNQEALPEGRGLRKPKGFRSTPSVREG

SEQ ID NO: 37708 - protein, 301 aa, Methanococcus sp.
MMRTYKFRIYPSKRLQETIEEHLNICRYLYNYLLEQKTKNPKLNKGDTQKLITEHKKENPELKKVHSKVLQLVNNKLWGSLKALGKLKQNGHKVGRLRFKSSKNHYKTIEYNQSGFKVDYKTKRLKLSKIGEIPITLHRKIKGVIKGIIIKKEPTGKWFAFFQVEEEPKPLPKTNKVIGIDLGIDGYAIDSDGNKFENPKFIDKTLDKIKKVQKNLSRKVRGSNNYKKTKLKLINVYDKLNNQKNDFLHKLSRYYVNNYDKIVLEDLNIKSMVENKKCQKTLNRHILDGSWKKFINLLLYI

SEQ ID NO: 37709 - protein, 254 aa, Methanococcus sp.
VEEELNPLPKTNKVVGIDLGINAYTVDSDGNKFENPKFIDETLDKIKKVQKNLSRKVRGSNNYKKTKLKLIKVYDKLNNQKNDFLHKLSRYYINNYDKIVLEDLNIKSMVKNRKSQKTLNRHIIDGSWRKFINLLLYKAEGAGREVILINPAHTSKKCSNCGCVVDKLKLSDRIFFCPNCSWKIDRDYNASLNILKSGLGESVVPAEGKPLLRVIPYMKVISGQVSPMSQEALPEGRGLRKPKGFRSTPSVREG

SEQ ID NO: 37710 - protein, 414 aa, unknown
  TnpB Polypeptide
MNLSMRVRATAKIEAVAPERGEALLIQFIKMYRDVVQCIVNRIWGLDNIPSEEKLHKMFYSELRRLGFRAHHVSEIYKRAKEVVEATKKNNGSKPVLKKLTARIHSLDYKIDFNAKTLRIAVLNNEWVELKLKWYNYLDKYLDSSWRPGEILISYRNGKILVYITFHRDVKPIDFRAVMGVDINFNNITYTVIDLNGNLITIGVIPFKGLKRALHLKKLAEELQKRYPKSWRFLKWVRRVRGRWLSKARNILIDSAHRISKKLVEIAKEYRALIVFEDLGKLKENSKHCYKLSWEKSLWCYRRVQIFAEYKAMVYGIKTVYVDPAKTSRKSPNGKKFKFINYRFVELGGVVTSRDVVASWNIALRGLEKLKRMRGLGVMLSSDSSVDEGMRIRPNAGNPGARKIYPQISTAIHE

SEQ ID NO: 37711 - protein, 422 aa, Sarcina sp.
MEYHFAAELRIYPSSQQRHMIAVNDGASRFVYNRLTANDRELHGMKKAAGLCPAYAGRVAYLEQVRSSKRELFNTIPFLDEEDVDSCAVDNAVRNHMAAWKRFREVPGTGIPGFHRKSYEQSYQTNAHYRKDAEGWEEGNVHFVRRSPGEQVPHLISLPMLGAIRFRCSGKVLHMLTSHKEDTRIGTITIRRDNCGDYHATLQISSDIPFTDPLPKTGSCVGIDMNLTDLYTDSDGNVIDNPKYGRGMKEKLAKAQRKLCRMKEAAIKDGRPLNESSNYQKQRLRTAKLQRKVSRCREDYLQVQSKRLVESQDLVVSEDLKVKNMLRNHKLAYGIADVSWGRFMELLGQKAALYGKEYMKVPAQYTTQTCSGCGHVMKGEEKIPLGVEEWTCPVCGRRHSRNHNAAIVVLQKGLAVKALQIE

SEQ ID NO: 37712 - protein, 402 aa, Lentzea sp.
MRTAYRCRAYPDPEHAAVLNRTFGCVRLVWNKTLSERHGVYHVEGKRTTCRETDAALTRWKRTEDLAFLSEVSSVPLQQTLRHQHTAFANFFAGRAGYPRFKTRRGRQSAHYTRSAFRLRDGVLNLAKTSTPLRFVWSFDNVDITALDPTTVVVSREPDGRWYVTFAVDAEAPEAADPTGHAVGVDLGLTDFPVTSDGRRIPNPRHLDRRARRLARYQRRMARCRRGSRNRSKARAKAAGAHRKVRNARQDFLHRITTALVRSAEVIAIEDLDISGMVRSHHLARAISDASWGEFRRQLEYKCARAGRTLVVIDRWYPSSKTCSACGHQLAELGLTTRHWTCPGCRARHDRDHNAAKNILAAGRAVARGSSGDACGADVRRQGSSLPRSAMKQETRVVRHSA

SEQ ID NO: 37713 - protein, 542 aa, Chloroflexi sp.
MRTMVMPGRSAIRTIRRDAAVELTAAKREELLDLARRFGKGRRTYVDTYWQPKFLTAVCDPRLRIVQSQRIAGWLSPDLSAHQNKVCLESSLAILRSSWSTAFATARRVVLLDRRWDGDRDWALATLRSVGAIQECLTTPLRRSTRRQRRLRRLVLRARGRKPRDGGKFWFEIDCNLYRPFYRSAGHFRGAWLAVTGTRRGRRIAVPLAGSSLQMFASRTRRRDSRPNVRVVVGERVVFYVAEWVPCERRPEGRTIGVDKGMNTLLVASDGAVDSAKAFGRDASRQLEEIINTSARRRNRLRIAAYERSIRNSNRSRSRLIRRRNLGRRKQARTRTRESSGLRDFVNRSLNELFEDLGISRIYAEDLTFRPGWPRREINRRLSRWLRGYLQRRLVYKAELNGVELETVNAAYTSQTCPRCWFVAKSNRHGDRFSCSNCGYAGSADAIAATNVRQRGSDSVITRFMSATEVKQTLDARWRSARIGRAWDSNEASFMHQGASRTWIESRTVAGGRTRPPVIHTAALYPLAAAAESVTDGSTFTA

SEQ ID NO: 37714 - protein, 442 aa, unknown
  TnpB Polypeptide
MKPRKFTIVAQLHKKQNHNLIEYIDSCFATYGKAKRETFHVLKRDNNFNKSAFNTCLQNKYGILKRTANSIITDAQGKLNALIGLKQYEKSQLERKISSLETMIYKLEMKAANNKTLLRLNDKTVSLTQHRNLKRKLVSKKNQLNHKKQKLENLKYQIEHGVYKLCFGTKYLFKRNYNKFIERRDSQLSFIGSKIEKACNQLLQLSYNRQNNQFDIKLRKDIGGFKDQRGLYIIGKAYFNHHKQELISILTHHNSPLSYKIIKRNGRYYLYCTFELQRDESSFVTRSSNGVIGLDFNKGFVTLAETNQYGHMVGTDLIRYRFKKGAATKTDLEHIATVVKKRALATGKDVIIENLNFKDTKAKTVSKKGKKYNDMLHSLAYRKFVDVMESVCYRNCIWLREVNPAWTSWIAKQKYCTNMKLNTHTGASFVIARRGQGYADNI

SEQ ID NO: 37715 - protein, 394 aa, unknown
  TnpB Polypeptide
MTELVLTARCKLAPTQEQVSEIEDTLKAFADACNRINQKVPANLKNSVVIHHIVYQDVRSEFGLSSNLAVRAINRVSANRKAALKDHSVVKNFEPTSIDYDARIFAFREVDEEVSVTLLRSRQRIKLVLGNYQRDRLRGSKPTSATLCKKGSEYYINIQVKCEAPEQIQTKEVLGVDLGMTDIAVTSENQKFGGETIKKIKRHYQSMRAVLQQKASKGTRSSRRRCRELQQRLSGKESRYQRQINHEISKAIVTRAHEIPARLALEDLTGIRDGVSQKAGKSQRRKVNDWAFYQLREFLTYKALQFGIPIILVEPAYTSQTCHACGAHGTRKGKHFKCLSCNWSGDADFNAARNIAFLGLHVGQPKGSDGPPHGGPFRAIESPLHFGVDSLPNA

SEQ ID NO: 37716 - protein, 436 aa, Bacillus sp.
MFVTHSFRIPYDPLIYKQLRNMQREAASVWNDIVREATSYFFTFKKWLSKSDIQAARKGSYNLHSQTVQAIVDKYDANRQTTRKLRKSDKKIKYPWKEKYYYCIPLKQASMDISDETIGIKKAEYRLSLVDFVTKKKKKNWNEKFPKRNEQVIIPNLAKEPLKNCKYAEIVWKNGAYWFHYSIKVQEKDLSSLPLCPAGADLGEIHAVTVATENKALVVSGRAIRSISQFRAKVMANLQKKMSRCKKGSRQWKKYNTAKKRIRQKSSNQLADLEHKTTKEVILFLEKENVTNLVIGRVGGIEKNTKKDKKKKSKTTKVRRQQLSLWNQGKIKQKLTYKAKLKGIKVEETEESYTSQTCPFCHGRHKTNGRPFKCSVRKTEIHRDVNGAQNIARKRYPMEVNTQLEVIFKQPVWYKRYLSKNNHNQLRCKSIARRMA

SEQ ID NO: 37717 - protein, 414 aa, Azospirillum sp.
MQAQTREAATMLHRGYKFRLYATDEQAAVFGQFAGVCRLVYNLALEQRRDWWWQAKANTGYSISYASQCRELTKLRAEFDWIAAVSVTCQEQALRDLDKAYSNFFAGRSGYPTPRKRGLNDAFRFKGRECPWRKLNAKWAVVKLPKIGDVKFRLTRDIPGAIKNVTVTLDALGWHVVFSTEVERAAAPNFGPAVGIDRGVVHTVALSDGRFMDMPRERLNVLDRRARKQARKLAKCKRGSSRRNTAKKLLASTKAKMARVRLHWNHERTAEIARTHGVVVLEALKARNMTASAAGTADAPGRNVRQKAGLNRAILNNAWYQFEEFLAYKLAERGGELRKVNPAFTSQACSCCGTIDKASRESQATFKCGHCGHTANADTNAARNILMAGTQPALRTSVGEPLKRKPMAAAYPPL

SEQ ID NO: 37718 - protein, 389 aa, unknown
  TnpB Polypeptide
VVLLRHCADARFVWNLCVEQESWWRVGRGSAPGFAERCRQLTAARAANPWLAEGSVVVQQQAIRDHRQAMTNFFAGTHRQPTWRKAGRDEGFRIVHVNPDDVRRLSRHTGEVRIPKAGWVRFRWSRPVSANAKSFRITRDRAGRWHVAFAVMPDPVPGPGTGQVVGIDRGIAVSAALSTGELLHAPGLSSREQNRLVKLQRRLARARGGSRRRIRVKLAVARLKVREADRRKDWAEKTSTALARRFDVIRVEDLGIVGMTRSAKGTMQRPGQNVRAKAGLNRGILRSCWGLLVHRLEDKAPGRVESIHPAFTSQRCSACGHIAAGSRESQALYRCVACGFACNADVNAAINIAAGHAVTARGRSGLPERVNREPQLVLLQHGNGLEFSA

SEQ ID NO: 37719 - protein, 368 aa, unknown
  TnpB Polypeptide
MMKILKGMKYRIYPNIEQQYKLTIQFGHARFAYNSTLSAYKDYYKETGKSLSFKDSSSRITRLKCNDETNWLVQADSQVLQQKAKDVATAYKNFFEGRAGYPSFKKKHDKQSIRYPQRVKFQNNMTYLPKVGYVKTVFHRPLEGIQKSTTVSKTKTGKYFISVLCQIDLVVTAHTNKDSKIGIDLGLKNFYTTSEGTKVPHPKLLKKAERAIKIAQRKLSKTKKNSANRRKARLHLAVKHEHLANARRDFLHKQSDSLTSEYSLIGTETLRVSNMMKNHCLAKSIGDSGWAEFVRQLEYKAIWNGGIVFKIDTFFPSSKTCSNCGYINKDLKLSERKWFCIGCQTILDRDINAAQNILNQATAGVAEC

SEQ ID NO: 37720 - protein, 196 aa, Lactobacillus sp.
  misc_feature (196)..(196): Xaa can be any naturally occurring amino acid
SIGIDLNTDNFLTDSNGNVVANPRYYRAIKGKLAREQRKLSRRALRAKKEHRQLHDAKNYQKQRAVVAAIQRKVANRRHNFLHLVSTTLIKSHDLVVTEELRSKNLLRNYALAMSISDVGWRTFLGMLTYKAALYGKRLVTVNPRNTTQTCHNCDFIMGSGDTQKLSLADREWTCPACDQHHMRDHNAAQNILAKX

SEQ ID NO: 37721 - protein, 454 aa, Lactobacillus sp.
  misc_feature (11)..(14): Xaa can be any naturally occurring amino acid
  misc_feature (248)..(251): Xaa can be any naturally occurring amino acid
  misc_feature (448)..(450): Xaa can be any naturally occurring amino acid
MSERSKAVRVXXXXESYVSQTMAQLPYHYGFKVRIFPSNQQKRSIKRNSDASRFIYNEMNGLNRELYQLKQVKIPIRLVQQRIQTLEQRLKNPATGISNSHGWLNDKALDSLMKANAIKNYRRAWEMFRTVHQAGTPVFHRKRTEQKYQTSCLYPAKVKHPGMTNGSVRLLDHQHIQLPKLGRLRFRGMPAKLLARKPGIRIGTVTISMDATGRYYVSLQLASQHSFVVQTASKAQTSIGIDLNTDNXXXXSIGIDLNTDNFLTDSNGNVVANPRYYRAIKGKLAREQRKLSRRALRAKKEHRQLHDAKNYQKQRAVVAAIQRKVANRRHNFLHLVSTTLIKSHDLVVTEELRSKNLLRNYALAMSISDVGWRTFLGMLTYKAALYGKRLVTVNPRNTTQTCHNCDFIMGSGDTQKLSLADREWTCPACDQHHMRDHNAAQNILAKGXXXTCFN

SEQ ID NO: 37722 - protein, 522 aa, Methanoculleus sp.
MLRRYQYRLYPTKDQEPLIAKHLGCCRYVYNWALARKNRAYHDDGTSLSKYDLMQQLPALKEELPWLKEVNAQSLQQSIHNLSRAFTNFFEGRAEEPTFKKKHDPEQAFTVPQSYTVDFKQGTVKLPKIGVIKTVFHRTFVGTTKSATVIRRSTGRYFISIVVEDGRKPPQPADPIPDQTVGIDMGLKHYAVVSTGEKVENPKYLRNAQTRLAVLQRRLDRKQKGSRNRNKARLKVARCHQNIADQRKDFQHQLSSRLVRENQALAVESLNVNGMVRNHKLARASGDAGWGTFLSMLAYKCREAGKTLLKIGVFEPSSKTCSVCGYRKADLTLKDREWTCPDCGTTHDRDLNAAINIKNVALAGVDKRRRACGLAPGGEGDEAGSPLRKLGVVHTISTRLTVNVRSSPTRRWFASMVTAPGDISVTVPGSTCPPGRVIPTSSPTVRFSAPVMSAGSRTKTRSSRYCPYAWSTGTWRVFSSPTCIPTTPASNPGTTLPLPTVNPSGSPPTELSKTVPFSKVPV

SEQ ID NO: 37723 - protein, 418 aa, Burkholderia sp.
MPDLAAIAHRHGYDWIMQRLQAYKIELRPNGQQERQMHRFAGSCRFVFNRALALQKERHAQDKKKLGYAELCKLLTEWRNSDETAWLADAPVHPLQQSLKNLERAYANFFAKRTDFPRFKRKGQSDSFRYPDPKQVKLDRTNSRLFLPKLGWLRYRNSRDVLGTVKNITVSQLCGKWYVSIQTEREVEPPIPHGDAVGIDMGVARFATLSNGTFYAPLNSFKRHEAALRRAQQAMSRKLKFSNNWRKAKARVQRIHSQIGNARRDYLHKATTTISKNHAMVCIEDLQVRSMSRSAAGTIEKPGRQVRVKAGLNKAILDQGWFEFRRQLDYKLAWNGGWLIAVPPRYTSRTCPCCGHVSPDNRRTRSQFECVACGVKEHADVVGAINVLRAGHARCACEVSGAVRSPAAGTHRSDSGVA

SEQ ID NO: 37724 - protein, 217 aa, Arthrospira sp.
LFGCVRVVWNDALAFSKSDKYPGYNQLSATLTQTKKTEAREWLASVSSVPLQQSLKQLDAAYKNYFNSLSGKRKGKKVGLPRFKKKANKQSATFTKTAFSIKKGEVFLAKIGNIKPIWSRELPSAPSSVTVIKDGANRYFLSFVVEVEPIQVEAKNQSIGIDLGIKTFAVMSNGEKAFSPDYSKADCQIRKLQKKNSPSAERLKTEKQDSNSNCETA

SEQ ID NO: 37725 - protein, 433 aa, unknown
  TnpB Polypeptide
LKITTLYITLFIVILYKRKEDKSMADIVKTMKLHLHVKDDDVATAFKKVTITYADACNYVSEYTFNNGFELNSNRLQKVLYSSVRSEYGLKSQFAVSVFKTVTARYKTIQEQMKQNPYKYQDEIEKWHCIPRTLEWLRKPVYFRRPQADFVRGRDYSFVEDGTLISINTLGKRVKLSFDQPDCFKEYFDGTWSFGTAKLVSLNNEWYMHIPMTKTAADELDIAKPTHVVGIDRGLRFIISTYDEKGKTGFVSGKDIMAKRQKFADVRAELQSKGTKSAKRALKRLSGRENRWMSDVNHQISKTLVQTYGAGTLFVLEDLTGVSFSDENLAKDSKSNRDLRSWTFYQLEQFLTYKAHEAGSEVIKVSAGYTSQRCPKCGRIHKENRNHKTHEYICDSCGYRSNDDRVGAMNIYTLGTMYVSGDTNPRFGVRKVN

SEQ ID NO: 37726 - protein, 255 aa, unknown
  TnpB Polypeptide
LRIHQNTEVGLKNLSERGSSIQTSERKERLLYRAMDRSRRATDPQNYNDDGTVKKGRKTWKYSNHYKKLKAKHSELCRINAINRQLAINEDANHLRSLGDVFITEPKNASKLMKRTKDTTVNSKGKFHKKKRFGKSIKNRCPSGFQTTVERKFKVSGGIYIEVPDNYRASQYDHTADDYIKKKLSDRMYKLTDGTLVQRDWYSSFLLYCYDYRTKDIDKNKCISEFDKCHNKEKALIEWIKANKIKILNSGIKIA

SEQ ID NO: 37727 - protein, 225 aa, Actinobacteria sp.
VQRGRWYLTASWQRPAVNTIPLETARAKGMIGVDTNADHFAAYQLDRHGNPVGDPYRFFYDLSGAAHYRDAQIRHAITQVLHWAKRCGVAAIAIEDLDFTAEKTREKHGRKKRFRQLISKIPTGKLKGRLVSMAAEQGLSIVAVDPAYTSQWGAQHWQKPLAAPRRKMSRHDAAGIAIGRRALGHPIRRRTAPPHHHQSDGAGHRTVQADRDVRGREGTVGRLSA

SEQ ID NO: 37728 - protein, 404 aa, unknown
  TnpB Polypeptide
LDKLIFCVDCGRRTFVGHQAVHREPEEYLKEGETVEYSYKFRLYPTAEQQEQMSRNFGCCRYVFNHFLTQRQEQYKKTGKAPTRFQQDKSLTMLKQELPWLKEVDSTSLQATLQDLDAAFQNFFRRVKQGEKPGYPRFKSKHDHRQSYKSKCVGTNIKVLDKAVQLPKLGRVKCRISKEVKGRVLSATVSRNPSGKYFVALCCTGVEIEPLPSTGAAVGLDMGVKSFAVTSNGMEYPNHKYLSRSEKKLARLQRQLSRKSKGSNRWDKARFQVARLHEHIANQRQDTLHKLSSEIIRQNDIICIEDLAPKNMVKNHRLAKSISDASWGEFRRQLEYKAEWYGKQVVTIDRFYPSSQLCSTCGAQWPGTKDLAVREWVCLACGTTHDRDTNAAKNILNEGLRLLA

SEQ ID NO: 37729 - protein, 450 aa, Sporosarcina sp.
VNTLARKKTIKMLRKQKKSENIQRFTQKQNIGRGVLTAKEFRLLQRMSHSSKALRNVGLYTIKQSCLHNNRIATVKEVDAAMKADMNYWGVQSNSVQAIRRTLYSDVKSFFKALEKWNKNPEKFTGRPKFPKYSGSTEKRVIEIYQVPKVDKDGYWVIPMNAEFRKRFGSIKIRMPKNLLNKKISYIEITPKQKGRFFEVHYTYEVQVAQMKKQPTTTTNALVIDLGVDHLMSCATNKGDTFLIDGKRLKSLNQYFNKEIGKQQKKNIENSISKRVVTNKQANLWMKRERQINGYFSQAVGLLFKKVKELAVDTIVVGYNAGWKQASDMGKKNNQKFVQIPFKRLISAIENKCLKEGIRFFKQEESYTSKASFLDRDTMSVWTKKDQLTYTFSGKRITRGLYRSKSGRCIHADINAALNILKKSEVVEIDEKLTVKTPVKLEVQKRKAVA

SEQ ID NO: 37730 - protein, 417 aa, unknown
  TnpB Polypeptide
MEKGYKFRIYPNEEQKIQMEKTCGCCRFVYNHYLSERIEVYKEEDKKLTLNECNKDLTSLKQSEESNWLKDVDKFALYYSLDNLDKAYDNFFREKEKGNNNQGFPNFKKKHKSKKRYKTAYTNGNIEVGEDYVKLPKLGKVKAVIHRSVEGRIINATVEHSSSDKYYVSIGCTDIICHDITTLDMVIKSVFPYILEIPYLVYMNVNSLERIKSKDNYIGVDLGITHFAIDSNGLKYENNKYYRKEEKKLGYNQKKLSKKVPGSKRYRKQRIKVARLHEKIRNQRRDYLAKLSSKLINENQVICLEDLAVSNMVRNEKLSKAISEVSWAEFRRMVEYKAHWYGKQVLIVDRFYASSKTCSSCGYKLETLDLSVREWLCPQCNLLHDRDINAAKGLLKEGLNKLRGRNCPRSEPVELPQ

SEQ ID NO: 37731 - protein, 179 aa, Sharpea sp.
VGTDQKYYRESHDKLVKAQRKLSRMQGSKKYEVKSNNYMKQLRKVNIIHRHIANQRLDNLHKISTEIANQYDVVCVGSINMRSMANRSFGNGKATLDNGYGMLLTLLEYKLSDRNKYLIKVDKWFPSSQICSCCNTLHPEMKDLSKRKMICDCGLAISRDHNVAINILNEGLRLLSEAA

SEQ ID NO: 37732 - protein, 634 aa, Myxosarcina sp.
VKTVEFKLKLNKIQRATIDSWLESLRWVWNEGLGLLLEFHHQKYYNWLEKKLVGVSANSFRADDRSVISRDREFRKCYLKFSKTNAYAASCPISVGKTPHPVCPLPVPQPRLKYDNFKGLIGYITKTNYADCPHLKGIPAKFIAGTLKHLAEAWQAYKDKKRTIAHQPKFKSKLRGDRLKSLYCIQPENITLHINHNTFACPGVSVLGKLKVLNKNLEKRWQEEIKPRTLQIVKTASEYYLQLSGNLPEETEKPSQKACGLDVGLQYIYSDDLGKQVKPPRYYRASQKRLRKFQRKLTRQQKDSKNSIKTKQAIAKLHEKTKRQRRAYNHKLSSYLVKTFGTKRQRRAYNHKLSSYLVKTFGTKRQRRAYNHKLSSYLVKTFGAIAVEDIKIANLNRRPKPKKCEDGKGWEKNNAKAKSGLNKSFADAGLGQLLTMIETKAKAHQREFIKVKANFTSQDCPKCGTRQKKSLSQRTHRCSNIGCNYVAPRDVAAAICIRAKADFLGNYLPLGGNVKPLKEVHSTSVQEESTIVELGRDALTIPSHEEKTNRKNRRKTQQCAKREVRKNNLYFNAFQTLTIPGLATNFLAEDNRAPDNSGSLGLKAKPKKKRQKNNSVAQTAPEIQLVLNFQAATG

SEQ ID NO: 37733 - protein, 488 aa, Myxosarcina sp.
MQVTYRFKLYPSLKQVSRLIQWQNKIRSLLNVCLADRIDSYQDTFMQGEFCNLRSRGVASPLACSIHKSASLGEYWKENNPSKRRGDKSKLFNPRRSAYEIHSSFATSWRQTKPWYQDVNSDVLQQGLRNQNKAFGNFFSGRANFPRFKRTRDIGLEFKPGTVRIQENKIKFPSLGWMKFALSREISNNWSIRTVTITREIDIWYVSVLLKDETIPDYSQKSATELNTIIGCDVGINKIAAFSNGEIETNPRIGERFERRLKIRQRRLSRKKKGSNNRQKAGIAVAKVHRDIRRCRQDFQWKLGKKIAAMGDIIAFEALNIQGMKKRCKPKFCSQTGKYLSNNQKSKSQLNKAISDAAWYSLRQKTQHQAAKLGTWVIEVNPRGSSQECCKCHYISPKNRDKEKFVCENCGHYDDADLNAGNILAQRGKEKLGIDTLTVVSRKVTTEPELTGASGNRKNISSAMVDESGNPALFVQLKLFSDWEWNTG

SEQ ID NO: 37734 - protein, 241 aa, Arthrospira sp.
VFTKGRWLAIFPEPVAVTPTEANGVIALDPGVRTFMTGFDGSRFLELGSGDIGRITRLCQHLDDLMSRIAKELNRSRRRRMRQAAQRMRTKIRNLVDEAHKQIAHYLTNDYSIIFLPTFETSNMVAQAKRKIKSKTARAMLTWAHYRFKLTLRHQAEITRTTVVDVTEEYTSKTCTHCGHVHSQLGGSKVFRCPECGFTLPRDWNGAFGIFLKALRDTASVTLTGNSAIVALSGNSRINVA

SEQ ID NO: 37735 - protein, 418 aa, unknown
  TnpB Polypeptide
MTNDWIIYKRNAKFWGIEFTAEFGCALKRTNSTLNRISRYVRKSIKSGDITNVTKLGYVSLRDGVMIDGELKHELTKAQFKNSIQHIFDADSTNESLKRECVLYVLERYAGYFTRNGQGKVPNISFKGKGLYYKDNFVAIDQKAKYITLPTIYGVFKLRYNCSLKEEFVTKPKFGGHLIVRQKAFVVAVDVPFVLKYEVASTLSFDLNKTAEDNVVCNDGEIIPSSALMVDLVKKIKKINESLDGDKKLPVSQRKLRSKQRRPLRLEWKRLHKQLKNECRKVALRLVEKAEESKSLMCIDSVKTGQTMGTFGQDHIIPELQKECENRGIPFYVVPCRNTSRRCPECGHIHADNRKDTKTFKCVSCGHEADAQLNAAINIAHIGQMLYDGGVPYGNYAKRNVEKLISSYQKESIPVSSE

SEQ ID NO: 37736 - protein, 421 aa, Moorea sp.
MVNLNYTYRLDPDLNQVELLKGWLETCRNAYNYALRELKDWIASRKCPIDRCSLESEYIMSAEYPFPGYQQQQNNLPKAKKEFPKLAAVPSQVLQTTIRRLHDAWDFFQKRGYGFPRFKKYGQMKSILFPQFSTNPITGWQIKLPKLGLVQINLHRPIPDGFVVKQVRVVKKAMGWFAVISIQSDISIPEPVPHGHFIGVDIGLEKYLATSDGFVEPKRNFLLTEQRRLKVLQRRLSKKKKRSKNYEKARLKVEKHHNHIAFKRKDYQFKLAHKLCDMADTIFVEDIDFRVMAKGFLGKNTIDAAFGKFRSILAYVGKQRDVYVAEVNHRGTSQTCPNCRIEVRKELSDRWHSCPECGYQADRDIASAQEICNRGYEQLSTQGLWGKEIGCQVGLSGAFCLDKWRRAAMSNSDAGSPHYNA

SEQ ID NO: 37737 - protein, 445 aa, unknown
  TnpB Polypeptide
MSDKLVIFDEVQHKVLKIRIYPNQDQTILINKTFGSCRKLYNEHLQERNEFYIDNILPIPKEERQLKSKEIYKKFKPKTEKEWKEVYPYMTEVSSAALQQARMDCDQAFMNFFKSNNGSRKGKLGFPKFKSKHNNHQSYREVMVGDNSLNFEERKVKIPKIGKVSFRDRKFPTWWDRKTKLCSMTIEKSCSNQYFVAILFEVQKAVHKIDNRKDAIGMDFSPAEMYINSDGKSGKDFGYVAQKQTHHKQLRKLSRRLARKQKCSMNRNKARIKLARLEEHIANSRKDWIEKESLRLVRSYGKVVVEDLNLKGISKFLRNAKNMNDTSYGTFVSRLQAKGQDYNCKVIKADRYFPSSKLCSCCGWKYEKLQLSERKWTCPKCGTNHIRDVNAATNLKNYVPMEGRELTPVESDKAKSLALLALQVGTLDEAGNHSQATSGRNVLGL

SEQ ID NO: 37738 - protein, 378 aa, unknown
  TnpB Polypeptide
MFRTIKVALPCDNSLIQTAIAFNRACQIVLDYGSQAKTYNKNKLNRETYRTVRAAVPNLPSALVQTARDEASEMLKRNGFVKIVKKYLSVRYDNRAFKFYPDTRRVSLTTVFGRVNFSFKHYPYLDHWKGEYTNAQLLMRGKRIFLNIQVKTPDTAFEKSESPTVLGIDRGVRNIVVCSDNSFFNSKRLRAVKGRYQYLRRRLQHVDTRSAKRHLKRVGGRERRFVLDVNHCISKTIVSQPFTVFALEQLRDLKKRKNGRRFNSKLGSWSFAQFQRFLQYKAEQVGKTVVSVNPRHTSQTCSRCGCNEKANRKGVWFKCGRCGFQLDADLNASRNIGVLGKSEYLRLFVNEPNVASDESMPTGVVDDSYKPTTSVMGS

SEQ ID NO: 37739 - protein, 394 aa, unknown
  TnpB Polypeptide
MKNRHLHQRNYKFRLYPSALQEQQLAETLDGCRWVYNYFLDNGFTSESEYDMNYALTELKEQEPFLRNYHSKMLQMVAKKIASANKALKALRKNGHKVGRLKYLHSGDYNSFTYNQSGFDITSDGQLWLSKIGKLRIKLHRKAENIKQVTVKREGKNKWYAVICCEFAEPIFRFVDIKKSVGIDVGITKFVHDSDNHEVENPLFLKKMLKPLRRASRQLARRQKGSANYQKAKTRLQVLHERIRNQRMDFLHKQSSSYSARYDLIFLEKLRVLNMTRNHRLARAILDSGWVTFGSMLKYKVKKVVEVYSPNTSVDCSHCGNKVPKSLAVRIHRCDKCGLVLDRDHNAAINILQRGLESIAATKKSSLPMERREVTPVETERSGKQESIVVEAHD

SEQ ID NO: 37740 - protein, 393 aa, unknown
  TnpB Polypeptide
MKSTYKFRIYPSKDQISKLNNTLDTCRWVYNQTLSLRKESYEKNQLSLSKYDTHKYLTSWKDEHPFLREVNAQVLQNVQERVDLAFQGFFRRVKNHENPGYPRFKGKGYYDSFTYPQYGFKILESKELYLSKIGNVKIKYHREIEGTIKRLTIQRTIRNKWYTCFSVVKDSLNEIQPNGLHGEAVLKHDGIMRAVGIDMGIKTFATLSDGNTIEYPFFFKEEQENLKRVQQKLSKAKKGSREYIKHLKVVQRIHERTGFRRDNFAHQESKVLVNNYGLICFEDLDTKSMLENGTKSLSRNIMDASWNKFLRLTQFKAESAGSRVVLVDPKNTSQICSRCGFKVVKDLKERTHSCPMCGLEMDRDLNAALNILRLGLQSVSVGSYRSPSLNAGE

SEQ ID NO: 37741 - protein, 210 aa, Bacillus sp.
MEKKLKSINQYFNKMIRNLQLKNMENGLSKRVVTNKMAALWHKRERQINGYISQTVGLLFEKVKAFNIDTVVVGYNAGWKQKSDMGKKNNQKFVQIPFHKLIAAIENKCIKEGIRFLKQEESYTSKASFLDKDRVPVWDKDDRTHYRFSGKRITRGLYQSKAGKCIHADINGALNTLEKSRVVELDDNLKVKTPILLEVQKRKAVASCIA

SEQ ID NO: 37742 - protein, 398 aa, Bacillus sp.
LFIIELLEQTFGGDDIMKLNYRFEIYPTEEQQHTLERWISICRQQYNSALLDKQRYYKQNKKDLTRYELQDQQKLDKKIYHFLKEVPSQPLQEVFARLEKAYKKFFKKDAGYPKMKSFKESRSITLTQFGMFKYKKKDGSLGTSRRVCSLTKGGKLLISKLGVIDIKWHRKLDGRVKQVVIKYQGNRWFATFCVEKHVNQGSICDANKTTGIDVGIKKFAVLSNGEEVQNPTFLRKEERKLKRAQRKHSKMKKGSKNGCKQVAKVQQIHTKIANQRKDFLHKLSFRLTNSYGVICIEDLKIKNMVRNRHLAKSIHDAGWGMFRTFLSYKVKRNSGRLVLVKPHYTSQKCSKCGETDEKSLSVRTHVCKQCGTVLDRDHNAAINIEKAGLTQIAYQPVY

SEQ ID NO: 37743 - protein, 348 aa, Armatimonadetes sp.
VLSEYANVVNHFIGLFWTWSKAPSNKDCTSDIYNTASTWLSPTMRQIAAREAVAMVTASKERDGEKAVMPAHKGKSMRLTEQVVKIAESETDSFDLWLLFTAIAADKSVKFEVPIKKHKHYNRLACKGKLLKSYTVSEQGVQFAFEIETGEKKKGTRAVGIDTGINALASLSTGEQYGRDIKEAIERIKRCKLGSNGQQRAIRALKQRIAEVAKRITSRDDIDLVVVEDLHNLSHNTKLKGRLSRNVRSSIGKWNWRLWLERLEWACEMSRTCLRRVPPQYTSQTCNRCGYVDLSNRHGEAFRCLECGHADNADLNAARNILSRFVTGIYGSRYKGSDASVSAIVSTC

SEQ ID NO: 37744 - protein, 166 aa, Salmonella sp.
FVSCLCESEPASLPVTTKTVGTDVGLKNLFVTDTGFKTGNPRHTAKYAKRLALLQRRLSRTQKGSKNRARGRLKVARLHAKIAGCRMDNRHRLSRKRINGNQVVCVESLKVKNMFRNQNLSKAIADASRGERVASYSTKANGRGAAWSQSTSFSRLPDAVVVAASP

SEQ ID NO: 37745 - protein, 418 aa, unknown
  TnpB Polypeptide
MKELTSNNNRKTFQFRLYPTAEQEIALDAVLWRCRDLYNGALHERREAYRLGHKSLSYYDQQNELPAVKTAVPEYKAIHSQVLQDVLRRVDRAFQGFFHRVQAGRPPGYPRFQGRNRYHSLTYPQYGNGAHLDYTDGRWGTLTLAKLGTFRVRVHRPIAGVIKTVTIRRAADQWYVTFSCALDVEPAPTQPPDAAVGIDLGLLHFAVLSTGEQIDNPRYFRRAQKRLAAAQQKLSRGQKRRRGQPSSKRREQARLQVARAHRKVRHQRADFHHKLARRFVAEYGVIVFEKLEIANLTRRPKGKVDADKSAEAGATVYAPNGAAAKAGLNKAILDAGWRAFQQMCVSKAAWAGRTVVFVNPAFTSQTCSECGAIQKMPLVERVYSCPVCQLERDRDHNAALNILRAGKRACTETPARPV

SEQ ID NO: 37746 - protein, 393 aa, unknown
  TnpB Polypeptide
MKMLQTMEVTRHLWNDALAHRKTRWELERRSTSYNMQASILTLEREEDVELGGLHSQVCQDVLRRLDRAFKSFFAHRARYPRFKKRSDTGSFTYPQCYNGSVRPDTLRRRLYISKIGNVKAVFHRPLPKDALLKTCTVTREPDGKWFASLVFEEVVPLQNVVTKFVSPVGVDLGLSSLIITSDGAEVEHPRFLRKAEKRLKRLQRSLSHKKKGSKNRLKARQRVASQYSRVRRQRLDFVHKLSTALVRRHDLIAFEDLRIKNMVKNHRLAKSIQDAGWGQLVRLTDYKALSKGRRVIRVDPAYSTQECLHCGALNKVYLDVREFDCLRCGRHLRRDHNASCIVLKRGLAKVGQDMPELKPVEARPLLVATTRGASQVEEAGTIRQRGLEAHAV

SEQ ID NO: 37747 - protein, 392 aa, unknown
  TnpB Polypeptide
MDVRKMIKTIRVMLIPNNKQETKLFRYANTARFAYNWALGREKENYKNGGKFLSDGELRKEFTQLKKVDKYSWLNEISNNVTKQAIKDACNAYKRFFTGYSKFPKFKSRKHFIPSFYQDNVKIQFTESHVKVEGFTTSKRKNKQKLNWIRLAENNRIPTNCKYTNPRIKYDGLNWYLTVGVEYEDSTAIPSNEGIGIDLGIKDLAICSDGNKYKNINKTQKVKKLEKQKRRLQRSISRSYEKNKKGESYYKTNNVIKKEKFLLKLNHRLTNIRHDYLHKTTSEIIKREPSFIVLEDLNVSGMMKNKHLSKAVQQQGFYEFRCQIEYKSAWNNIPAIMADRFFPSSKLCSCCGNIKKDLKLSDRIYKCECGNIIDRDFQAALNLKRYGENVVK

SEQ ID NO: 37748 - protein, 486 aa, unknown
  TnpB Polypeptide
MRIVKITMKAILVNETEEQKSIIDNIMLVFCTAIRYSFKRLLEGIKISELEKEVSHKYNLNIRQAKDAVESARQTILSQKELIKINYEDYESKAKAIEKILNDKTKKLSDKKKTALLSKLAKRQRRLEYFKSFIDTNTISPVTFGTKEMFLRRCKGLISNQEWKDYRNNRFYSRGDKTKNGNPNLRVIIKGGMSFLEISTLEKTKSNRAIKIQIPIYLPQKLSKKTGKINGIDYRELFLNHLKTGEAYQVEMIKRNGKYYCHITFELPKTEVVYTGHNGIIGIDTNPDGFALTMIDNKGNHKWHTYLKQHELLYAKGNRRKNLCGELVKQVTLIAKTYGVGIAIENLKFKNDKDVNSKFARIKNNFIYSKLLTMLESACYREGIELLKVHPAYTSKIGLYKYCHQFGMVVHNGAAMVIARRSYKFKESVPQILIDKYVDEKHKDKFNCYHEWKRLSMMDKNIKKKVEVKKPDFWIANRKRLLGLVS

SEQ ID NO: 37749 - protein, 394 aa, unknown
  TnpB Polypeptide
VRRAYKFRAYPTRPQEGRAVRLLADHCDLYNAALEERREAWRMRKASVSYGMQSAQLREIRTADPCGQGWHSFTAQQQTLRRLSTVFTAFYGRCKRGEKPGYPRFKPRSRFDQVMFVAGDGAKWTPAAGRGWAQASFQAVGTLKVKQHRPVRGTVKTLQLKREHRRWYVIVVAEAEPAPLPAARRAVGLDVGVARFLTTSDGEVVANPRFLAVSAEVIAGLERRKARAEPGSGNRKRLRRALAREHSKIRNRRLDFHHKTARTLIGEYDVIALEQLNTAGMTRRPAPKPDPRQPGTFLPNNASAKTGLNKVILDAGWAQFAGILAGKAESAGRRVVLVNPAGTSITCHQCGRRCERPQQKTVICPVHGQMDADVNGARNIYARAGLGSGQADAA

SEQ ID NO: 37750 - protein, 407 aa, Lactobacillus sp.
MMTILGRTAKVRLYPSEIQAIQLSDESREYQRLSNIVSEWVFNHDFPMNYLKINHALYKKLRQESPLNSQMIQSVFRTVVARYKTVLEQMRQHPFRYQDVDKKWVQTPIDLTWLFKPIHFSKPQADLVRQSNYSFVNGMTEISLTTLGKRTKMSFNSKGFGQYFQSGWKFGTAKLVHSQGKWYLHIGITKEVADFEPTSQSKIVGIDRGLRFLATVHDHLGKTRFFDGKKALRKRKKFLETRRQLQSKGTKSAKKKLQQLAQRENRWMTDLNHRLAKTLVSIYGSWALFVLEDLTNVTFNTDDLPKALRSSHRSWAFFQLELFLTYKAVTVQSKVLKVSPAFTSQRCPQCGLIEKNNRHHETHEYHCCRCQYRSNDDRLGAMNIKLLGEEWLCGVKHPQIKKITATG

SEQ ID NO: 37751 - protein, 394 aa, Shigella sp.
  misc_feature (174)..(313): Xaa can be any naturally occurring amino acid
VKNVTVSQSCGTWYISIQTESEVSTPAHPSASMVGLDAGVAKLATLSDGTVFEPVNSFQKNQKKLARLQRQLSRKVKFSNNWQKQKRKIQRLHSCIANIRRDYLHKVTTTVSKNHAMIVIEDLKVSNMSKSAAGTVSQPGRNVRAKSGLNRSILDQGWYEMRRQLEYKQLWRGXXXXXXXXXXXXXXXXXXXXXXXXXXXXXXXXXXXXXXXXXXXXXXXXXXXXXXXXXXXXXXXXXXXXXXXXXXXXXXXXXXXXXXXXXXXXXXXXXXXXXXXXXXXXXXXXXXXXXXXXXXXXXXXXXXXXXXXXXXXXVLAVPPAYTSQRCAYCGHTAKENRLSQSKFRCQVCGYTANADVNGARNILAAGHAVLACGEMVQSGRPLKQEPTEMIQATA

SEQ ID NO: 37752 - protein, 389 aa, Coleofasciculaceae sp.
VTQAAYQYRFYPTPEQENLLRRTLGCTCLVYNRALAMRIEAWKERHEKLNYTHTSTLLTQWKRQEELNFLNEVSCVPLQQGLRHLQKAFINFFAGRARYPRFKRKANGGSAEFTKSGFRYRDGEVYLAKCQEPLAIRWSRLLPEGVIPTSITVCLTPSNRWYVSLRVDIDVEPLPTTDSMIGLDLGITNLVALSNGQKLGNPKHFQAKQRKLRQAQKALSRKQKGSNNRYKARLKVARVHAEIADARRDQLHKLTTQLIRENQTIAVEDLAVKNMVKNRKLARAISDAGWGELVRQLKYKAEWYGRELVKIDRWFPSTKRCSSCSHTVEKMPLSVREWECPECGTYHDRDTNAALNILAAGLAVSACGASVRRSLRSSRSLHPRDRRPE

SEQ ID NO: 37753 - protein, 362 aa, Rhizobiales sp.
VILTYKYRVKDGGASTRRALRAQARAVNFVWNYCAQIDREARARWKAGRVAKRPSGFDLVKLCTGVARDLGLHSDCVSAVCQKFADARSATFPKTPKFRSFKRNLDWVPVSTFTRAAKFNAGVLTFQKRKFYVWNSRALPDGGKPKSWSLSTDSRGRWYLNICVELPDAEKRTGNRAVGIDLGLKTLATMSDGTKIEPPTFYRKAEEELARLQRFGLKSRVRSRAAKVANQRKHFLHVVSTALVRDYDRIVIGDVSPSKLSKTRMAKSIHDAGWTGLRNMLLYKSIATGGVCEIVNERNTSRVCSCCGVIPASSPKGMGALGIRRWQCSDCGADHDRDVNAAQNILRVGAERRPPVVEILAL

SEQ ID NO: 37754 - protein, 358 aa, Senegalia sp.
VKRLKLTYIFKLLKPTKYKENILKENIIETTKHRKEIVRRLKEGKFKLTTADFPDFKLSSAVKNQNIWDVKHLYKNFKKSKSKKENIDFKPNQPLGFSNQCYKIQDNFIALSLYDKKSKRIYFPIETKNKRFKEFQENRDNLKLGKMSIYNKKGNWYAALSVTVKDEKTEATNSMGIDIGLRQLAVISIMNEEGKEINRKFFSGNESGYIRRKYKALRRELGQAKKLKKIKEISNKEQNYIRDKNHKISHKIVELAVQGEVGMIIMENLKNIRNRVKSIKQPDRNINSWTFYQLQNFIEYKAKKEGIKVKYISPKYTSQKCSKCGQVEKKNRKKNLYLCECGNRIHSDLNAARNIASA

SEQ ID NO: 37755 - protein, 404 aa, Nostoc sp.
MLVFEFKAYGKSAQLIAVDEAIRTAKFIRNSCIRLWMDVKGIGKNDLQKYCAVLAANFPFADELNSMARQASAERAWSSISHFYDNCKKGVSGKKGFPKFQKDCRSVEYKTSGWKLADDRKSITFTDKKGIGRLKLKGTRDLHLYQIKQIKRVRLVKRADGVYAQFCVDINRSEDIEPTGNTVGLDVGLKEYYTDSEGVMVENPKFLCKGERILKRLQRRVSKKVKGSKNRGKARQVLGKRHLKISRQRKDHAVKLARCVVQSNDLIAYEDLRIKNLVKNHCLAKSINDASWYQFRIWIEYFGKVFKRVTVAVNPQYTSSDCSSCSEVVKKTLSTRTHACNCGCVMDRDKNAARNILSRGLGTVGHIGTFALDTSATLSASASNAWGDETSTPVGENLLEQVIS

SEQ ID NO: 37756 - protein, 418 aa, Okeania sp.
MVEKAYKFRLYPTPEQENLLRRTIGCVRLIYNKALAIRTQAWHEKQERVGYKQTSAMLTTWKKQENLDFLSKVSSVPLQQSLRHLQTAFTNFFHARALYPNFKKKRNGGSAEFTKSAFKWKDGQVYLAKCSEPLPIRWSRQLPPDCSPTTITVKLDPSNRWSVSLRFNDNRDLKLKPLKKRVGVDVGISSLIATSDGTKINNPKYFNKLYKKLRLSQKSLSRKTKGSNNYQKARLKLARIHAKIKDSRLDYTHKLTTQLIRENQTIVVEDLAVKNMVKKRCDPATTPVARERAPRDHKLARAISDANWGEIVRQLEYKAQWYGRELIKIDRYFPSSKRCSNCGYVVDKLLLDIREWDCPECAAHHDRDINASINILAAGLAVSVCGATVRPEGSKSRRAGAMKQKAPNSDVKESRAVS

SEQ ID NO: 37757 - protein, 420 aa, Alkalinema sp.
MFGCQQILISPDSQLRGILEFLCGESNKLHNCGTYLSRQLYFKTGKVPSKFDLHRELKSNKHFQAMYSHVSQQCLTTVAESFKSCFGLLRCVKKGTVTQRPKLPNYRSPGFNLVTFPAADVKLKSEGLRFPLGNQVKAWFALAAFYLPMPSNLDFKAIREYRILPRNGAFYLELVYKVDTAQADVDGAKVLGIDPGLNNWLTCVSNVGTAFAVDGLHLKSLNQWYNKRVSVLKENQSQGFWSKQLAGITEKRNRQVRDAVNKAARIVLNHCIENRIGTVVFGWNKGQRQGINLGSKINQKFVQIPTGRLKDRIAQLCEQYGIQFVETEESYTSKASFLDLDELPIFGAKPEGWKESGKRVKRGLYRSKDGFKINADCNGAANILRKVAAKLGFNLDGVSRGALIAPLKVRFWAVQESPTL

SEQ ID NO: 37758 - protein, 441 aa, unknown
  TnpB Polypeptide
MQVVSSYGAEIKNKNIPIRHTLALYREAVRCLTEIYETVWTELSMIDQIKRRFNEAEHLVHETKKNHARFDFDARFPKMPSYLRRAAIQHALGSVSSYHTRLEQWKNGAISGKPKLVYENHAMPVFYRNVMYKPGEESEDAACLKLYDGHDWKWFRAGLLHTDMEYLRRHWSGKKSSAPVLEKRHQKYYLRFSYTEEVTLSKTPVKDQLICSVDLGINTDAVCSIMRSDGTVLDRKFINFPSEKDRLSHVLGRIRRFQKEHSSKQIGSRWAYAKRLNTELARKTARSIAEYAHENHADVIVFEYLEMKGKISGKKQQKLHLWKKREIQTMCEHKAHRYGIRVSRVCTWNTSRLAYDGSGPVSRDPKNHSLCVFRSGKQYNCDLSASYNIGARYWIREIIKTLPETERSSLEAKVPAVKRRTSCVYADLLIIQNEYGCSKAA

SEQ ID NO: 37759 - protein, 383 aa, unknown
  TnpB Polypeptide
MRTFEYRLFVNKEQSRLLMACLAESRKLYNEMLAALKAQYEQNGTFPSKYDLTAQFKGRGGEHVPATTVQMLADRLMKALKRYLAAKELGIPDAGFPRFKKPNCWHSIQLRQYGRSRDVWLDTDNKHVHVPAKLGRSLKIKLHRPIEGTPKTVHLVHRADGHWYALIVCETEPKTEHEPTTCEHPAIGIDMGLLSFLTDSEGHTVENPRFYRTSQRTLRRKQRAIARRKKGSHRCRKAARSTAQTHLKIARQRRDHHYKTAKQYAERYQVIAVEKLAILNMVQNQSLAKSIMDASWGAFLDILEDKAERAGHHVVRVNPCFTSQKCHKCGEIVQKSLSVRTHICPFCGYIADRDVNAAQNILELARPGHGLQELTYTVGCRVS

SEQ ID NO: 37760 - protein, 397 aa, unknown
  TnpB Polypeptide
MILAERHIIKKSDCRFEELQSICKLSKNLYNVALYNTRQYFFENNVFLSAFQLDAVLRKKEDVDYNALPQKVSQQTLKMVEQNFKSFFALLKLKNKGKYNSKIKLPKYLDKNGEYVTIYTNQAISKKALKCGFIQLSKSSVKIKTNIKEIQQVRLIPKGSHIVVEVLYKVEEKEILENNNRYVSIDLGVNNLCTMGSNVLKPILINGKPLKSINQYYNKKLANLKSKLRNEKKTSKRIKSLTNKRNNKVNDYLHKTSILIANYLVSNNINTIVVGKNKEWKQDVNIGKKNNQNFVQIPHSRLIGMLLYKCKLRGINVLLTEESYTSKCSFLDDEDIKKHKVYKGNRIKRGLFKSSEGVLINADVNGSLNILKKVVGKFNYNPIEVCSTPTVITVKFN

SEQ ID NO: 37761 - protein, 402 aa, Salmonella sp.
MLKRQAFKFQLRPNGQQERDMRCFAGACRFVFNRGLALQNENHEAGDKYIPYTKMASWLIERKGDAETQWLKESPSQSLQQSLKDLERAYKNFFQKRAAFPRFKKRGQNDTFRYPQGVKLDQDNSRIFLPKLGWIHYRNSREVTGVVKNVIVSQSCGKWYVSIQTEYEVTEPKHKSTSMVGLDVGVAKLATLSDGTVYLPVNSFKASQRKLAILQRQLSRKVKFSANWQKQKRKIQRLHSHIANIRRDYLHKVTNEISKKHAMIVIEDLKVSNMSKSAKGTAEQHGRNVKAKSGLNRSILDQGWYEMRRQLEYKQFWRGGQVLAVPPAYTSQRCACCGHTAKENRQSQSKFVCQICGYTANADINGARNILAAGHAALACGGAAQSGRPVKQEPAEASQASV

SEQ ID NO: 37762 - protein, 393 aa, unknown
  TnpB Polypeptide
MSAEMLKATKVRIYPTPEQAEFLNRQFGATRFVFNMALHIISSQYKRHGLKLKAKKDIKPLLVLAKKSRKYHWLKDFDSIALQQACINLDKAFQNFFDPKLPARYPKFKRKHGKQSSYHCMSVSAAENWIKIPKMGPIKARVHRALDGKLKSITLSRTVTGKYYASLLVEDGVEAPTPLRTVDTVLGVDMGLTHLVIDSEGNKTANPRFLKRAQLNLRRKQKALSRCQKGSKGRTKARLKLAKAHERLANARADFQHNLSRQLIDENQAVIVETLKVKNLLKNRKLSKHIADASWFSLIQKLEYKAKAQGKHLVKIDQWFASSKTCSCCDHKVDSMPLRVRSWICAHCGTAHDRDINAAINIRQQGIVKLRAEGLSAPANRGLRKSGHVPVAA

SEQ ID NO: 37763 - protein, 317 aa, Streptomyces sp.
MRLVVQVRLLPTPKEASALQRTLHACNAAANRASAVAYSTGKRSRNDLQKEVYAELKADFGLAAQAAVRSVKKTVDAYTTLRVNVRAGNLGPPGSQRRVRAESKPIVFRPDAAQPYDDRILSWQHDARTVSIWTTDGRLKGVCYVGHPEQVALLAKYRKGESDLVHRAGKWLLLAVCEVPEPTVAEPSGWIGVDRGVAQRTGRGIAVEDLGGIRERVRPSRDQRAALSSWPFRQLGKHLAYKCRRAGVAFLEVDARHASQRCPRCGHTERGNRPARDRFRCRRCGLAGPADHVAGVNVRERARLAWGFVNSPALQET

SEQ ID NO: 37764 - protein, 398 aa, Streptomyces sp.
MGIRVKRAFKYRFYPTDAQAADLSRTFGCVRKVYNMALAARTEAWTLRQERVDYNATSAMLTAWKKTEELAFLNEVSSVPLQQCLRHLQRAFTNFFAKRAKYPRFKSKRKSRASAEYTTSGFTFRDGKLTLAKMTDPLDVRWSRPLPEGASSPSTVTVSRDAAGRWFVSLLCDDTPASMPATAEAVGIDAGLSHLVTLSTGEKIANPRHERRDRTRLARAQRALAKKTRGSANRARARLRVAKIHAKIADRRRDGLHKLTTRLVRDNQTLVIEDLTVRHMVKNHTLARAISDASWTELRSMLEYKAAWYGRRLVVVDRFFPSSRLCSACGTLASKMSLNVRTWTCDCGATHDRDVNAAKNLLAAGLAVSVCGAGVRPQRESSRTGQSATKQKTPRRKP

SEQ ID NO: 37765 - protein, 385 aa, Streptomyces sp.
VKVVVQVKLLPDAVQAPALEATLRMVNRAASHAAAVAFHTGKTSRNDLQKEVYAGLKADFGLSAQAAVRTVKKVVDAYATLRANMRAGNLGPEGSKRHRKAESKPIVFRADAAQPYDDRILSWQYDARTVSIWTTAGRLKGVRYTGQPDHLKTLREYRRGETDLMYRGGKWFLLAVCEIPEPQVYQPVDWIGVDRGTTNLATTSDGANYQGRRLTRYRRWHTKKRGELQVKKTRSAKRRARRRARRESRHASHINHRISKEVVAVAQRTRRGIALEQLDGIRERGTASRDQRARLSSWPFAQLGAFVAYKCRRAGVPYLEVDARYTSQHCPRCGHTARNNRPSRDHFRCRRCGLAGPADHVAGVNVRDRARSAWAFVNTPVPQRN

SEQ ID NO: 37766 - protein, 183 aa, unknown
  TnpB Polypeptide
VKLEPSGRIHVIFLVEEPETQVQASKEPVKAVGVDLGIARLATLSDGRFLDNPRPLERALDRIRVLQRALSRKKFLSKNWLKAKRKLAKEHEHVKDFRRDLFFKLGALLAQEYDVLVLEDLNVQDLIQKGENKKRRLRLYDSSFSELRAVLEWQFVKRGKLFYLSPLTTLHVSVSCAGKSTRV

SEQ ID NO: 37767 - protein, 427 aa, Moorea sp.
MLLTYCYRIKPSDEQITIMDRWLELLRRHWNYALGQRLDWLNRTRSPVDRCSLLKEPIGEIPHPVNYYTQQSALKETKRLFPEYKLIYAETQQINLQRLNIAWERWRKPDTTGKRRGRPRFKKQGQLRSFVFPRVNNAKAGAKLIDGVLTLSRIGSIPVVMHRPLPIGFTLKQCTIVKKADGWYCCISMLDDTVPELLPVDAVKSTVGIDVGLEKFLTTSDGEAVEIPQFYRKATNRLATAQRVMSRRVKGSKNWQKAKQKVALLHLHLTRCRKEFHYQVAHWLCNKYDLIGHEDLNIKGLARTKLAKSIHDAAWGLFLEILQAVAVKRGLLIEKVNPRGTSIECFNCGSRVEKDLSDRVHNCSSCGVSIDRDWNSGINILNRALMAVGLPLNGCGKSIQDIVRVASASAEEQQVSFVNLRSPHHNL

SEQ ID NO: 37768 - protein, 460 aa, Streptomyces sp.
MANRISGEEAWRIKRELLGVDDRTKHRGRAIAPLKGLVREPGTQQRVYRFRFYPTADQAAQLTQTFGACRWVYNEGLALRKEAWEKHRVSLGFAETCRALTGWKRGRETAWLKETSSTVLQQSLRHLDAAFSRFFKGSAKYPKRKSRHRSKDSATYVRTGFRWVEDPECPGTATVTLAKQTTPLDIRWSRALPAGQLPVKLTVTRDRAGRFFLSVLVEEVIAPLPEVFLPGGREPKAVGLDLGVATLVTTDDGEKLPHPRLLAKYGKRLANLQRDLHRKTKGSKNRGKVRERIARVYASIGDVRRDQLDQFTTRLVRENQVLVVEDLSITGILRAGKGRNRRRKAALNRSITDAAWGELLRQLRYKCAWYGRTLVVVDRFFPSTRRCSACHTKGPKLDVSVREWTCAECGTFHDRDENAAVNLRDEGLRLYWAVAMALPPGRVPPSVIRASELVNLVSAA

SEQ ID NO: 37769 - protein, 331 aa, unknown
  TnpB Polypeptide
LISDVAWEKKTFQQFKLHRFSYHTVRGATDLSSQVIIGCISKVADGYKLDKKVKRVFKPLGCICYDSRILTYNPDHIVSIWSVGGRLKIPFVCHNPAYLDCIKGEADLLYRKGKFFLSQSVEIATEELRDAEEYLGVDMGLVEIATLSNGKKFNSIKLTAYREKRQKIRSSLQSKCTKNAKRVLKRLSGREQTTATIINHTISKQIVAIARMEGKGVAIEDLKGIRRSAKKKGKKFRSRVGKWSFSQLREFLSYKCLLSGVELVKVPPAYTSKTCHVCKHMGNRQGKEFTCSNCNAVFDSDVNAAKNIALLGMTVNHPEKPSMWYCTVQRA

SEQ ID NO: 37770 - protein, 437 aa, Microcoleus sp.
MQLAERHIIKSTENRFVEIDGLAFKSKNLYNAANYVIRQSFVYGWGYINYNEMNRLMKSHQAYKDLPAKVSQQVLMILDKNWKSFFEAIKAYKTQPTKFTGCPKLPKYKDKVKGRNILIYTIQAISSKQLKKGIIKLSGSNILIKTKVKPEQICQVRLVPKCDCYVIEVVYNEPESTLDENPKELVASIDLGLNNLVALTSNQPGFVPLLINGRPLKSINQFYNKRKAHLQSQLKGSRKTSSRMQRLTRCRNQKIDNYLHSSSRDIINLLRELKIGTLVIGKNVQWKNEINLGKQTNQNFVTVPHARLIEMLEYKAALVGIKVMVQEESYTSQSSFLNLDPIPVYGENGADRVKFCGKRIKRGLYKTSSGRLINADVNGSYNILRKAIPNAFSNGIGRGRSSAKAGQSARSKSEGGGTQRLPCHVINAYTFTSYPRV

SEQ ID NO: 37771 - protein, 630 aa, unknown
  TnpB Polypeptide
MSVSKRGKRKSGAVLVRTAPVRLFRATIGEEQVSEKLLAQRVEFLIDLTVNLTESELAKHWNDSDFKTYLTDPQPSFAYKAWGQTFGWPELKTKDSDTAYLPSRASYCALEAAGRTVRSSKFRQEILEALIAGSPVPVKADAVSLRNLTRSLNNYAKKHNKQQAKSFWELETKPPKVARQVLLAATDSQFCVLAANEINLLLPLISNPQSPKDWAWHLIPYRRPQHRSGLACKPTLRLAGHKLIADMPFEQEGVNLLSAIPKRVMGFDWGINTPLTGTPAWLSPEAVDAQGVLLPVVSGRAVRFQSDGLLWRLLRGHCRKIERLNCEIEEFSRFLRIPVETDPEDVKSKNPIAKKRAVVWREMKRTSKKYNHLLDEFAHLAARWAIEQTLANHCDSIILEDLKSLEPKIGKRNNLRMILSLQGQIAKYITEEATIEGIRVISINSRGTSSFCSRCGEKTKHYTCADSTKRKSGYVWAICPACQTSLDRDQAGAERIAGRGLVPTAKSVIRQTLPPPPVPDYRTTPKKGPKARLLREKLALIPEIPEARTLVTPPQLVGNDLPGHRPAAAETQDPQSGLQSGFTLNLGSSIPQSATLPSVWAGRAPRSLDGLRSAYLGLIKCAPIVEITSN

SEQ ID NO: 37772 - protein, 630 aa, unknown; identical to SEQ ID NO: 37771
  TnpB Polypeptide

SEQ ID NO: 37773 - protein, 374 aa, Actinobacteria sp.
IKTLKYRLYPTKKQERLLQEQLNECCWLYNHFLEERKNSWEKDKKSIGYFQQCNSIPNLKKERPSLNRVYSQVLQNVADRIDKAFQNFFRRVKNGDKKVGYPRFKGFDRYDSLTYKQIDFGWEIKDSNLKLSKIGPIKIKLHRSIVGALRTCIIRRQASKWYACFSCEVELKPLPKNDKAVGIDVGLENFATLSTKEKIANPRFFKTDQEALAKAQRKLSKQEKGSCQRKKAKKVVGRIHERISNRRNNFCHQQARKLANRFGIICIEKLNIKGMQSGNFKSINRNIADVAWNQFANVLSQKAEEAARQLVAVDPKGTSQKCSQCGTIVKKTLAARWHNCPVCNCHLHRDYNASLNILRLGLQSLGINPRSPRL

SEQ ID NO: 37774 - protein, 312 aa, Enterococcus sp.
LKEVDSLALANAQLHLDKAYKNFFRNKSVGFPRFKSKKNPVQSYTTNNQNGTVALIDSKFIKIPKLKSLVRIKLHRQPKGMIKSATVSRHSSGKYYISLLCKEEISELPKTNSAIGIDLGITDFAILSDGQKIDNHKFTSKMEKKLKREQRKLSRRALLAKQKGINLFEAKNYQKQKRKVARLHEKVMNQRTDFLNKLSTEIIKNHDIICIEDLNVKGMLRNHKLARSISDVSWSSFVAKLQYKADWYGREIIKVDQWFPSSQICSECGHKDGKKSLDIREWTCPICHTHHDRDINASINILTEGLRIQTLA

SEQ ID NO: 37775 - protein, 413 aa, unknown
  TnpB Polypeptide
MDDFRLLVNLCLRETLATQVTSRRALSRFARDRALEVRVTGSIGLAAADIARSLASGHRRRHRKNIVSRVPYVRTPFVRVPAQSFHFDPDSGKLRLSLRRGEWCSFVVPVSDYHRRVMANPDHRVTQVHVGLRQVVLLYARRPPEPYAPTSVVALDTNESSLDGVRVTPGRAEYVRVGFPEVRAIQARHVGRRRFLARKKVHDRRVSRRLLGREGRRERRRIRSRLHALTRSLIDQLAAQHAVLALEDLTAVPQPRRRRSGWRSPPRFHSRSLRRRLSSWPQGELHRQLAYKAVDRGVPVVWLDPFRTSRTCPRCGELSEHRRRVGTRFDCAKCGWSLDRQLNAGLNLGLTVLRKTAGLGGLRLDPDALSEDAVRPLYGSGNDRFAQVERREREGRGGNGKPVGTSPPGGPSQ

SEQ ID NO: 37776 - protein, 241 aa, Bacillus sp.
MQQYGVILRAITFVSLGTEAEVSEWPKTRSAIGVDVGIKDFAILSDGTKYSNPKFFRSLEEKLAKAQRIMSRRTVGGANWYKAKKKVARIHEKIANARKDFLDKVSTEIVKNHDIIGMEDMSISNMLKNRHLAKAINEVSWSQFKSMIEYKAKWYGKQVVAVAKNFPSSQLCSFCGYQNKDVKNLGLREWDCPSCGTHHNRDINASINLKNEAIRLLTAWAALCISAHLRIVRFHCWRKLV

SEQ ID NO: 37777 - protein, 400 aa, Propionibacteriales sp.
MVEHCHHARFVFNIGLEQRAMWSRDKHNRGTHPEHGNLDAARVTTTTQMRELAQLRGELDWLRAGSSSVQQAALRDLDRAYANFYAGRAKYPQFKRRDDRNGGFVVRDLTVRRLNKKWGLVTVPKVGQVRFRISRLWAVLDRASSARVTQRNGRWHVSFTTPPADKIAAGSGAVVGIDRGVKNTMATSDGRMVRAPSLTDVEQARFVRLQQRLSRQQKCSRRREHTLDRLAVLRRRLEDRRSEWVEQTTTHLARTFAVIAVEGLRVRNMVRRPKPKPDPDNEGGFLPNGAKVKAALNKAILASVWGRFLTRLDHKMPEGTVLRVDPKNTSRTCAVCGHCAPGNRESQAVFECEACGHQAHADTNAAVNILDRALGTTAAGHAVSGRGSPALAGSANQPAA

SEQ ID NO: 37778 - protein, 328 aa, unknown
  TnpB Polypeptide
VIKLLVLEYKIKAKKLQYLAIEEAIKTTQFVRNKCLRYWMDAPREAKLNGYSLNKYSTELRNEFKFVAELNSMAVQASAERAWLSISRFYDNCKKKVAGKKGYPRFQHDNRSVEYKTSGWKLNPTKRRITITDKKGIGELKLLGKWDIQTYDVKSIKRVRLVRRADGYYCQFCIGVDASDPQPIVGNEIGLDVGLESFYTDSNGYQEPNPRFFRKAEKSVKQAQRRIYKKVKKSSGRKKARGIFARKHLRISRQRTEHAKRVARHVVKSNDLIAYEDLKVRNLLKNHCLAKSISDVSWSIFRQWIDYFAGKFGRLAVAVPPHYTSQKC

SEQ ID NO: 37779 - protein, 423 aa, unknown
  TnpB Polypeptide
MKGGVRVYLTVKQKVKHLSKDEYKSIKKLSHIAKNLTNEAIYNCRQYYFNEGLYLNYEKNYTLLKNSDNYRLLNSNMAQQILKEVDGSFKSFFGLLKLAKKGKYNIKDIKMPNYLDKNGFTTLVIGFIRIKDDTLLIPYSYLFASEHKRISIKIPTILKNKKIKEIRIIPKLKARYFEIQYVYESKIEKLNLNKKNALGIDLGINNLCTCVTNKGRNFIIDGRKLKSINQFYNKRNASLQALKDTKKKIKEKIKLLQAKIAMKRNNRVNDYLSKTARMIINYCIENDIGKIVIGYNVTFQRNSNMGKVNNQNFLNIPYGKLRDKLEYLCDMYGIEYILQEESYTSKASFFDRDDLPIYNADNPQEYIFSGRRVKRGLYRTKKGKLINADVNGALNILRKSNVVDLNVLCDRGELDTPKRIRII

SEQ ID NO: 37780 - protein, 399 aa, Frankia sp.
VRRAFRFQLRPTARQVAALTAMLDDHRALYNAALQERRDAWRHPSRTSVRYTAQAGQLSEIRAFDPDQARWSYSSQQATLRRLDKAMVAFFRRVRAGQTPGYPRFKGRNRFDTVEWPKDGDGCRWDSDPYHPTRTRVRLQGVGHLKVNQHRPVRGTVKTVSVRREGRRWYVVVSCDDVPAEPLPATGSVVGVDLGVASLATTSDGVHYANPRFAERAAGRLAAAQRDLACKERGSKRRRKAVARVAGRHRAVARQRLDLAHKTALGLIRDHDLIAVEALNVGGMTRRARARPDPDAPGAFLPNGQRAKSGLNRNILDAGWGVFLNVLHAKAESAGRVVVEVNPANTSRTCAVCGHCAAENRRTQAAFVCMACGHTAHADVNAAANILRVGLARQAAQGA

SEQ ID NO: 37781 - protein, 243 aa, unknown
  TnpB Polypeptide
MEKYFDGTYTFGTAKLVYKFKKYFLHIPMTKDFIQTTPFQINKIVGIDLGVNFLATVYDSYGKTTFFSGKAIKSKRGHYKILRKDLQELGTKSAKRKIKSIGTRENRYVTDVNHSITKALVEHYGQNTLFVLEDLTNVRQSTERVCINNRYTIVSWAFYQFRKMLEYKAKLNQSIVIAVDPKYTSQTCPKCGHIEKSNRDKKNHIFCCKNCGYQSNDDRIGAMNLWRKGIEYIEKQNSKEVVE

SEQ ID NO: 37782 - protein, 361 aa, unknown
  TnpB Polypeptide
VILTYKYRIKDRSARKVLAQYAYAVNQVWNYCNAVQKDIEARYRAGAPERQWPSDFDLQKRTAGTSRELGINSQTVQEVCRQYARSRDKANHSLRFRASGGPRRALGWVPFTSQCRQIEGNSIQYLGHRFRWFGNKRRPLPDKVKGGSFVEDSLSRWYVCFHVEVEDLLPAQANEIGIDLGLKTLVTCSNGVKIPAFQYYRQYEAKLMTAQRARNKKRVRAIHAKIANTRKDQHHKVSANLTRQNQLIVVGNVSAAKLVKTQMAKSVLDAGWSQFRTMLRYKARRHGATYIEVDEKFTSQICSECGSLPVSRPKGIADLGIRVWKCSECGALHDRDVNAAQNILRLGQSALPLAGESRKAA

SEQ ID NO: 37783 - protein, 409 aa, Pantoea sp.
MYRATKVRIYPNKEQAELLDRQFGAVRFVYNKALHIRSHWYKRYGVSLGNIKHIQPLLPIAKKSRKYDWLKNADSNSLQVALQNLDLAFKNFFEKRAKYPKFKRKNGTQSSYHCSNLKVTCDSIKIPKIPSIKANIHRELTGKVKSITITRAPTGKYYASILCDDGLEAAVKPTLITSVTGCDIGLADYLIRDDGKKTANPRYLVNAYRRLRRDSKNLSRKKPGSSNRKKARIKLAAQHERVANARADFQHKLSRSIIDENQAVIVETLKSANMMKNRRLARHIGDAAWNGFVTKLAYKAEQAGVHLVKIDQWYASSKTCHCCGHKMAEMPLKVREWQCPSCLADHDRDINAAINIKQKGITDLMAAGLVVKAHGGLRKSGSEPVAAWEVGSLAVYGGEQSPLCVLFTH

SEQ ID NO: 37784 - protein, 427 aa, Cyanobacteria sp.
MKAKGRLKPAYKNLILTRERDKINILVRSEEMIVYEFKIKAKPNQYAAIDEAIRTAQFIRNKCLRYWMERLGNSRNDLNKYCALLAKEFSFAKNLNSMARQASAERAWFAIERFYENCKKKKPGKKGYPKFKKCSRSVEYKISGWKLLSPKRIKFTDKQDIGELKLVGTWDLGYYSTDQIKRVRLIRRADGYYCQFCIKVDIRIEVEPTNQMIGLDVGLKYFLADSNGHTEPNPRFYREAEKMLKRANRQKSQKYRKNKKPQSKNYQKARKRYGRQHLKVSRRREEHAKRFARSVIHSNDVVAYEDLNIAGLVRNHKLAKSISDAGWSQFRRWLEYFGDKYARVTIAVSPHYTSQECSNCGEIVKKGLSTRTHICPHCRYVEDRDINAAKVILQRGLKILWGTEEFTLQERSPLGELEQSCPLTASR

SEQ ID NO: 37785 - protein, 440 aa, unknown
  TnpB Polypeptide
MLKAIKIRVYPNSSQKIEMNKLIGCARFAFNFCLGLKIEKYEKEEKSLSRGELDKILNALKKDKYHLWLGEAHSKVLQQSLIDLESAYKNFFKNGFGFPKFKSKNNQKNSCRFPVDAISGLNGNRFNLTKKLNNILFKCSVRDEKYLNKHQDKIKSATLSKTKSGKYFLSVLIDNTVEKPIKNNENIIGIDLGIKDFIVCSDGKTFENIKTQRNNSKKLASLNRNLSKKGNQKKKKSEPKNKEKARIKLAKFNEKLNNKKEYYLHYVANQLLNENQVIVIEDLKVKNMMKNHNLARSMQELSISKFISILEYKAKEQNKFIIKVDRFFPSSKLCNVCGYKNKTLKLKDREWLCPECNTFHDRDLNAAINIKKEGLRIYNQQINDNDKIGLSKSEYKPVENVSVDDKEIIFPLKSTHSKKQEDKSAKIVNENKERKELSFR

SEQ ID NO: 37786 - protein, 457 aa, Moorea sp.
LYKTIPVRATFSEEERAFWEFQCRQANSLFNCAIYYAKHKHYKWLEEQGAYSTYWRGDELRAGWKTYKCTTKYPELDKALKMSPHYKGMAAQSAQQTLKTVGEAITSYNQLVGLYYKGQIDRPRFPRYRKSGGLAAVTFPRQALTYKKGLFYPSVSKESKPELLTQIVLYPPQFIDPDWVKEVTIRPCYGQLWIDWVIDDGKQPVTDNPSLDYSQAIGIDHGGDNWLTCVSTLGKGFIIDGRKLKSMNQGYCRLVAKHKSGKSEKYWDSHLDRIQLKRNNQMRDAINKAARFIVNRCLHDGIGNLVFGWNEGQKNCSNMGKKGNQQFVAIPTKRLIERIKQLCTEYGINLIITEESYTSKASFLDGDSLPKIGEKPEGWKPSGKRVRRGLYRTASGKFINADCNGAANIIRKVTTQSFDLTKVVRGALTLPHRYDLFTDLSKSYRNKGGAVRVHPTA

SEQ ID NO: 37787 - protein, 385 aa, Bacillus sp.
MKRAYLIEIKPTTEQINKIRQTIGVCRYVYNLYISKNKEAYESEGKFLSGYDFSKWLNNIHTKECDQWIKEVSSKAVKQAIMNGDKAFKRFFKGLSKFPQYKKKKKQDVKCYFPKNNKTDWTVERHRVKVPTIGWVRLKEYGYIPKNATVKSGTVYQRAGRYFVSVLCELEEMATKLALNKIGLGIDLGVKGFATRSDGIVHENINKTIKVKKIEKRLKREQRSLARKFENLKKRGEKSVTNKRVNIDKNVLRVQKLHTRLANIRIEYVKSIVANVVKTKPTFITVEDLNVKGMMKNKHLSKTIAKQSFFAFKKWLLTKCEEYGIELRQVDRFYPSSKLCSCCSQKKADLKLSDRVYTCECGNVMDRDLNAAINLLQAKKYTILT

SEQ ID NO: 37788 - protein, 286 aa, Microcystis sp.
NQHHVTLAKIGDLKVVWSRPLPSKPSSVTVIKDATDRYFLSFVVEIQPETLPNNGESVGIDLGIATFATFSTGEKIDAPKPLKKRLKRLRKAQRNLSRKQKESKRREKARKRVAKIPARIKDTRTDFLQKLSNKIVRENQTIILEDLNTSGMVKNRKLARAISDLGWRSFRDMLSAKSDKYGRDFRIITSWEPTSQRCFCCGNIGGKKALNVREWECFFCGTFHDRDINAAVNIKVAGGQSETLNGRVGKRKTSVKEAVSCEASTQRSVVQLSLFELPVITVRLRR

SEQ ID NO: 37789 - protein, 407 aa, Streptomyces sp.
MQLRYSLRLYPNGPQRAALARVFGCARVVFNDALRIRKDAHEQGLPYPKIGDLSKQVITEAKKTEARAWLGEVSAVVLQQSLRDLDIAYSHFFASLKGTRKGPKIAEPRFKSKRDNRQSVRFTANARWSITPGGDLRLPKVGDVKVKWSRALPSTPSTVTVIKDAAGRYFCSFVVETDLQYLPTVASEVGIDLGLGHFAILSDGTKIDSPRFLRRAEKRLKRTQQALSRKEKGSKNREKARLRVARAHARVADARREFHHQISTKLISDNQAVAVEDLAVKGLARTRLAKSVHDAGWSAFAAMLEYKAVKFGRAFRRIGRFEPTSQVCSACGVKDGPKPLHVRAWTCGACGTVLDRDINAAVNVAKAAGLAVSARGAQVRPVPVPAQRVEAGTHRDGQTTVVGIPTL

SEQ ID NO: 37790 - protein, 482 aa, Eubacterium sp.
MNSLRRTEELKMKAGYAITTYKIQLNYKHLDWFKQTQSLFDDVLAFYYKLLEKQPEALSLSNQNLLRHLELQTIKQRDGTPPETPLPFEKIPLYFRRAAINAAISMYRSYVGKLKAWQESQEKEVDSEKLIVDSLGTESQSDSESNQIGDADLHHNYQLSTINYQLKGRPSRPRRLHMSMLYYKGMYKDFADGKIMLKLYTGKAWAWVKQRYTGRPFPENAELMSPTIVIKKKKVMLHIPVKEIVEDSRTAKERVKQQESFVTVALTTSDSLAVCTTIQADGSASHPYFIKGGKELAHRRKQLLGYTKRSVAGNDMPHTVGNVALSVPQEHRPNAKYYEKITRVTDHCAHEVSRKIVDYAVRQGAKLIVMPGYSNSFAKGTLPYLKTNVMDFIGRRIIRYTSYKAWQAGIVVTFNSVGDAKKECYHCRSVIYKYNTEYQPPSQNFYGGKNFRCKEGHKGSTALNTARNIGKSFYGAFYEKAG

SEQ ID NO: 37791 - protein, 462 aa, Eubacterium sp.
MSAGYAITTYKIQLNYKHLDWFKQTQSLFDAVLAFYYKLLEKQPEALTLSNQNLLRHLELQTIKQRDGTPPETPLPFEKIPLYFRRAAINAAISMHRSYLGKLKAWEEKQIENLGTESQSDSELNQVGKADLHHNFPPESAKKGKPTPPKNLHMSMLYYKGMYKDFADGHILLKLYTGKAWAWVKHRYTGRPFPKNAALMSPTIVIKKKKVMLHIPVKEIVEDSRTAKERVQQNEKFVAVALTGSDSLAVCTTIEADGRATAPYFIKGGKELAHRRKLLLGYTKRGIAGNNTPRFMTHTVGNAVLSVPQEHRPNKKYYDKITRLTDHYAHEVSRKIVDYAIKQGAKLIVLPELKESFDQAKKPYLGKTTYDFIGRRIARYVQYKAWQKGLVAMTSKPYYASTRCYHCDAPIAKHNTEYQNPSANFYGGKNFVCKEGHRGSTALNSARNLGKGFYERFYADVA

SEQ ID NO: 37792 - protein, 490 aa, Eubacterium sp.
MSAGYAITTNKIQLNYKHLDWFKQTQSLFDAVLAFYYKLLEKQPEALSLTNQNLLRHLELQTIKQRDGTPPETPLPFEKIPLYFRRAAINAAISMYRSYVGKLRAWEEKQMENGKLKMKNSGTESQSDSDSDQIGKADLHNNLPPSTFNLPPESTKNPVGNHALVVPQSGSNKQKGRPSPPKNLHMSMLYYKGMYKDFDEKSILLKLYTGKAWAWVKHRYTGRPFPENAELMSPTIVIKKKKVMLHIPVKEIVKDSRTAKERVKQNEKFVAVALTGSDSLAVCTTIEADGRATAPYFIKGGKELAHRRKLLLGYTKRGIAGNGMTHTVGNAALSVPQEHRPNAKYYEKITRITDHYAHEVSRKIVDYALKQGAKLIVLPELKESFNQAKKSYLGKTPYDFIGRRIARYVQYKAWQQGLVAMTSKPYYASTRCFHCDAPIAKHNTEYQNPSANFYGGKNFVCKEGHRGSTALNSARNLGKGFYERFYAGVA

SEQ ID NO: 37793 - protein, 394 aa, Weissella sp.
MQQAFRFRLYPSAMQIIKLRQNIGGARFMWNALVADEMVQYKADQNSPLPNGKKHKRLTYTQIKKLQGNEWLSKVDSLALANVSQKYRMARKRFFNWLNKRNGPKVGMPKLHKKWSSKWSYSTNNQPATADIYHGSIRLDATNKHLTLPKIGGIRVKLHRQLERDWHISTATVTEEKSGKWYITLLVEVGCIPEWPKTGSIIGVDLGLARFLTTSDFEIIKRVRFIKSAESKLKQAQRKLSRRRAMAKKLNKPLAQSKNYQKQRVLVARIHEKIKNQRLDFLNKISTRLVKNHDIIGYENLSPRNMRQNRKLAKAITDVGWTSFLLKLQYKAEWYGKKVIGVSAAYTTQMDYETGEVAAKPLNVRSYTNSIGSTVDRDLNAALNIRDRALATLQ

SEQ ID NO: 37794 - protein, 384 aa, unknown
  TnpB Polypeptide
MRAYRFRIYPSEKQEEQMRQHLWLAKNLWNEMLEHSKQTYKDFGYFPTKNTLQLMVKGYGLYSQTQQEIAHRVHNAVMRVFKLRKKGVECGFPRFKSIERMKSLHYPQHETGFWLDKKLKVTPFGEIAIKKHREINGKIKTLTLKREASGKWFAVFSVDTPKEIPKENRGAAVGIDLGLMTFATLSNGEMIKNPRHLMKHEDRLAFIQRKFSKKKRRSSNRKKAKLKIARLHEKVADTRKDFLHKTSTQLVNDYSFIALEKLASQEMAEQNYGKSINDAGWNMFANMLAYKAEGAGCRVVFVDPKNTSKTCSRCGNIRDDLTLWDRVYNCPECGLSTDRDLNSAVNILIRATPGQGGSNACNSLLHEERDAAIAASMKQEAHIL

SEQ ID NO: 37795 - protein, 314 aa, Methanosaeta sp.
  misc_feature (300)..(309): Xaa can be any naturally occurring amino acid
MKAESFAMITFTPPSADISIGIHNCIRLMISYKYPIFPNKITQWKLAENLDACRWLYNRLLQNLNEAKEKGIKLKTYDTQNMIPSLKLENPKLNQVYSKVLQMVNYTLWSNIKGLFASKKNGRKIGHIRFKGYGWYNTLNYNQSGFKIDQDHGILHLSKIGDMRIKIYRKIEGCIKAVIVKREGERWFAIVQANQEPQPLPETEEAVGLDVGLTSFVVDSVGNEIENPRCAKQSADKLARLQRRLARAVRGSNNYKSLKGKIAKLHKRINCQRDDFLHKLSRTYVNNFDIICVEDLDIKXXXXXXXXXXLPGTY

SEQ ID NO: 37796 - protein, 383 aa, Crenarchaeota sp.
MELTDYTYKFRLYPTPEQEIKLVKHFGCVRWCYNRFLDQRVKFYMTAKEQDLKKKCLNYNDDAKILTETKKEFEWLNEVNSQSLQHALKHLDGSFNRFYKKLGGFPKFKKKHSKQSFRVPQHVKVENNKLYIVKFREGIAIKLHRPLEGEIRNATISRNKAGQYFVCIGVQKHIKKLKKTKKMVGIDLGVKDLATCSDGVVFPNINPYRTLEATRRIRAKALSRTQKDSKGREKARLALAKLDNKIANIRSNHLHQISYQIVNENQVIMMEDLNVSGMLKNRKLSKSIQDCSLSELVRQIAYKARWYKREFIQISRWFPSSKTCGNCNYVNDGLTLKDREWECPRCKKLHDRDLNAARNILRQGKNLTVGNTELADCPGVRLA

SEQ ID NO: 37797 - protein, 383 aa, Nitrosococcus sp.
MKAYQLRLYPTLRQRRQLEEAFSACRYVWNWALDRRTRAYKEKGESLNAIALSRALTALKKEKVFLKAASATALTYVLKSQDEAFQKFFNKQARYPKFKRRGRVHSCTFQLDKRRGEKVFMPGQLLRLPKLGPVRVVWSYQDIPVFPNSATVSCNACGQWFVSLQCDCIDVIHPPATDKTIGLDLGLSTLIAMSDGRKEKPRRFLKNALRRLRFAQRRLSKTAKGGSNRRKQRSRVARLHQRIASKRANFLHGLSTSIVRENQAIAIEDLNVRGVMANGKLARSVGDCGWYELRRQLTYKAKWYGRQLNVVPRFQRTTGVCPDCGTVGEKLPLRVRSWTCGHCGSAHDRDIAAARVIDLMGNTARSAGIDACGLAHKPEEAVS

SEQ ID NO: 37798 - protein, 195 aa, unknown
  TnpB Polypeptide
LGRDDTKIRTRIASKYGGRRTSRTGHIVHNATKAIVTIAMQRKEAIVLENIEGIRSLYRKGNGQTRKYRGRMNGWSFGKAQRQIEYKARWVGLPVIRLSRRETRGSSVPCPRCGERLQSDKRLKRKLWCTDCRIVMDRDMVAAINLARRGRVRFARSRPPIIEAQGGAVEAMKGNPTPTVIPGVDAPKLTQPTKS

SEQ ID NO: 37799 - protein, 373 aa, Clostridium sp.
MKPIMKGFKYRIYPTKEQEIQLAKTFGCVRFVYNQILAKKIDLYKTEGKSISKTICNNYCNRELKKEYLWLKEVDKFALTNSIYNLDNAYQKFFKEHTGFPKFKSKKNHYYSYTTNFTNNNIKVDFDNNKIQLPKLKWIKAKLHREFQGKILFATVSKTPSNKYFVSFNVECEHKELKQNNNKIAMDLGIKDLLITSNGTKIDNKKLTYRYEQKLAKLQRQIAKKKIGSNNWRKQRTKIARLHEKITNTRKDNLHKISHKIVKENQLIFSENLNIKGMVKNHNLAKSIHDCGWYELTRQLTYKSEWNNRIYHKVDRFYPSSQLCSNCGYKNKDTKNLSVRFWECPQCYTKHDRDENASINILNQGLKELKKVS

SEQ ID NO: 37800 - protein, 415 aa, unknown
  TnpB Polypeptide
MYLTVKNQLRGLSSHDYETLRLLCRLSKNLYNEGLYSVRQFYFQERQFLKYESNYHTCKNSENYKILNTDIAQQTLRIVDRNFKSFFALLKKARTGSYLYSQVKIPHYLDKEGYFLLVIPRIKIKDGYFAVPMSREFKKEHGEILLRIPPNLEDKNIKEVRIIPKYQARFFEIEFIYEQPEYEVSLDPNKFLGIDLGLDNLASCVTNEGASFIIDGKQLKSYNRLYNMENAKLQSIKDKQGTRKLTAQQCLNLRKRNRRINHGISVAVKRIVDYCLDNQIGNIVVGCNTGWKQNINIGKRNNQNFVQIPHGTLRLKLQYLCALYGINYVEQEESYTSKASFFDNDDIPIYNADNPQKHEFSGRRISRGQYRIADGYILNADINGALNILRKCNLIDLTALQDRGCVSQPQRIRVF

SEQ ID NO: 37801 - protein, 423 aa, unknown
  TnpB Polypeptide
MLTKNQQIKATLKDTKARRKHMKCRVYTVKLDRSHLNHDSLARLRLLFLEAKWLYNYCVGHPNVFSIDDKITAVPVKVKDRFEQRQLRHLSSHMRQSIITRTQQNIRGLACVKAKGHTVGRLKFKSYVNSIPLKQYGNTYKLINRKYLHIQMIPQKLRVNGLEQLSSDCECANATLLHQHGEYYVAITTYTSRERKPAMVAPAKSIGIDFGVKHQLSLSNGVRIQYTVPVTRHIKQLCKKLSRKQYRSKNWWKTLYKLLKAYAKTTNIKRDIRNKLVHFLHTNFQMVCYQTENLGAWQRLWGSRMLSTSLGGIIRMLEVKVQTPVEIDRFFPSTKTCSRCGHQRAMSLEERTYVCHHCGLVIDRDYNSSCVLEHEGHRILGRGSTEVTPAETNTSTLTLDYLNQIAYIDASMVAETGSLTALA

SEQ ID NO: 37802 - protein, 399 aa, unknown
  TnpB Polypeptide
MPRYRLLPTPAQEAVMREHCAHARYVWNLAVEQHQHWHPGRKSAPGYLEQCRQLTAARAEYPWLTAGSQMVQQQALRDFTKAMAAFFDPDNPAGRPSWRKAGRNEGFRIVGRRGQHWDVRRLSRKTGEVWVPKVGWVRFRWSRAVAPGVKSYRVTRDRAGRWHVAFAAIPEPIAGPGTGQVVGIDRGVAVSAALSTGELLHAPGPTVPERKRMRRLMRRLARAKQGSNRRARLKLAVARMRTRERDRRKDWAEKTSTDLARRFDVIRVEDLQIRNMTRSARGTRENPGRNVRAKATLNRAILRSGWGLLVRRLEEKAPSRVEKIKPHYTSQRCWSCGQVDGKSRESQAVFRCTACGYACHADVNAARNIAAGHAVTARGGDGVARPANREPQLLLIGRE

SEQ ID NO: 37803 - protein, 417 aa, Nostoc sp.
MFKVVKVRLYPDAQQQLLLAQAFGSCRWLWNYCLNLMNQTYKETGFGLSGYEVKKLIPRLKKEYEWLSLTYSQCLQQVCLNLGIAFNNFFEKRAKYPRFKSKHGKQSIQYPQNVKVADSYLTLPKIGDVSALIHRAVEGKIKTVTVSKNCSNQYFAAILFDDGKEKPNSNTEGKAIGIDLGLTHFAVTSDGSKFDNPRILNKHEKNLKLKQQQLSRKQKGSNNRIKARNKVARVHRKIANCREDFLHKLSRRIVNENQVIVVENLNVKGMMQNHKLAKSIHQVGWGMFCTMLKYKAQMDGKIYQEVDRFFPSSKICHVCLNQVGSLPLDVRFWTCDNCQTRHDRDINASINIKDEGLRILNLSAVVRRADAPEGLTSGTGDKACRPDISRSKGGRKKSTTALSVGQEAHTDLTVQCG

SEQ ID NO: 37804 - protein, 325 aa, Geitlerinema sp.
VAVKAFGSSTIQKNNRMRSFVFPQMLKNCVSDKGIKLPQLGWVRVRWSRKIPDLFQVKQAQIVRKASGYFVVLSLQADVDIPAVAPHGHPVGIDVGLEYFLSTSDGEQVKRPRFFNNLHRKLKSLQRRLKKKQKGSANWLKLQKKIARVHQRIADTRKDWHFKLAHHLCDGAGMIFVEDLDFRIMAKGMLGKHTLDAGLGQFVNQILPWVCWKRDVFYGKVDARGTSQECPDCGVEVRKDLSTRIHHCHNCGSTKPRDVASGQVICTRGQRGIETACGGEAAGTEVTQSSWHLLKQEIFGATQGISLHTRNGLLGEDVNPDRPAA

SEQ ID NO: 37805 - protein, 272 aa, unknown
  TnpB Polypeptide
MYFVKNNPKDCRCERHRVNIPSLGWVRIKEKGYIPTTKEGYIIKSGHVSMKAGRYYVSALIEIPDNKTADPSNEGIGIDLGLKDFAIVSNGKTYKNINKSARLKKLEKRLVREQRCLSRKYENLKKGESTQRANIQKQKLKVQKLHHKIDNIRTDYINKTIAEIVKTKPSYITIEDLNVSGMMKNKHLSRAVASQKFYEFRIKLKAKSKENGIELRVADRWYPSSKICHCCGTIKKDLKLSDRTFRCHCGYVEDRDFNAALNLRDVKTYKIA

SEQ ID NO: 37806 - protein, 487 aa, unknown
  TnpB Polypeptide
MLCRSVAVELEVTKGLSKLLYSVESAYLSIVREVVEYAVANNVLSAKQLQGLFYSKYRGEYPSLHAHLVIQAIRQASEIAKSFLRRKRKGLANKPYPEVRSVSIRFTEKAWSYEQFIHSIAPIRLSLSLLGGRREVWLRLHKRFWQYWWRVLTGEAELASTLMIKRRLNKWYAIFIFELKPKEEKPQSVISFDINENTVAVGRIDIKTTVGKVADWNRQHVTPELYMIRTDFGRLARRYERVRNAIIERLKPEFALPSGNYVNVTSTREFRKRVKRLRERVRKVGRVRHVANELTRTPAIIVTEELGNNPQESMISDVGKGELRHRIKQIPFKNIEEAVEDKALERGSKLFHVSSYRNSRVCPIHFTKLEKTDDWHTLQCSLGHYVDRDYASVANMMWKVTPEGWVKGVWWNLRREINWREYEDKSNPIIPYEIVILLQHIMENTKASLKQSPAVLARGKPMNPTGEADEGGGEETTQKKRRRPEGG

SEQ ID NO: 37807 - protein, 361 aa, unknown
  TnpB Polypeptide
MKILKAYKYRMYPTGDQKVLINKTFGCCRVLWNRCVELFNQRQDIPSSTIIKSDYEWMSEVSAAALQQKSNDFREFQRQFFNTGRKRRLGSCRFKSKYDRQSYRLPGQKFTLGSSFIRLEKIGKLAIKMDRRPKASAEFRSVTVSKNSDGKFYVSVLVREPHRDLPETGRTLGIDVGLNHFATLSDGTKIANPRFFRESQAELRKAQRRLSRKKKGSVRRKKCKLKVARLHRKTTDQRKHFLHVLSSRLIRDYDRIGIEDLNVAGMLRNRKLAKSISDASWSLFASFLEYKARWSGRTVQRVGRFFPSSKMCNCCGLVKPIALNDRDWICDCGNLIDRDTNAARNIRDEAIRLLAQGVACA

SEQ ID NO: 37808 - protein, 465 aa, unknown
  TnpB Polypeptide
MSVTRTARQPLVGVAVWQDTAFQRTNAVSKRVEEHYLTLLHAHVGDGWLATASAALQARLEEATIRTQGHPDVLDEWDLDRVAPRFPSYLRRAVMRHAIGQARSWWTRYQRWLSKRDRHNRHQAERLARGKPASAFEEHPPTFPEASGKNYTMYFTQTCQVLGHNEAGFDLTAGYVRTVALKVLDEHGQWVWTTVHLRVPTRLYRPVDGWVIDPPKLINKGGLWRLHIPYHRKVEVYRFAEWHALHAPVLGVDLNERRHARAVLVEVKQNRTTGRSRFVREAELGTPRLHDLLQHIRAAYKSQGQWDLPRHFCLAQWRHIRRVADEQAHKLACEIVATARRWGLMVIVLENLASLAPARWRRGTRNQRLTYWLHRRTARYVKNNARAAGILVGVINPAGTSSTCPHRTIVPGVHWIVRGDYGRHVRCSCGWFHDADRAGAWNVGIAWWDRQDSRAISTPPIRQAA

SEQ ID NO: 37809 - protein, 353 aa, Hydrocoleum sp.
MAFKSDTERPLDTKSGCIIVVLWKNWCYNKKPQQVKADMRTAYQYKLRPNKDQIATIELWLDLLRRQYNYRLGERFSWWSENRCPVNACSLVMPIPQLRDNPDYYSQKKDLVNTKDKFPEYKLIHSQVLQDCIKRVKLAFDRWFKVDKNGLRLGKPRFKGKGRYRSFTYPQIKQDCIEGNRINLPKIGKVKLIQHRLLPNGFQIKTVTISRKADGYYVTLSLEDKSVPKLNSDVKPTSENTLGIDMGLKDFLVTSEGESVPSPQYYRKSLHRLKTLQKHLSRKKKGSKRWLKAVKAVAKQHKKVADKRKYFHFKTANELLSKADIIAHVDAERRAILSKISASTKNLTKTFIS

SEQ ID NO: 37810 - protein, 393 aa, Lachnospiraceae sp.
MIKTIRVMLIPNNKQKTKLFQYANTARFAYNWALGREQDNYKNGGKFISDGDLRKEFTQLKKTEEYAWLNKVSNNVTKQAIKDACEAYRDFFNGYTRFPRFKSKKHSMPKFYQDNVKIQFTDTHVKVEGFAASKKKNKQKLNWIRLAEHGRIPIANVKYMNPRIKYDGLNWWITIGMEYEDSSAFPSNEGIGIDLGIKDLAICSNGHKYQNINKTQKVKKLEKRKRRLQRSISRRYEKNKKGENYCKTSNLIKSEQELLKLNHRLTNLRQNYLHQTTSEIIKREPSFICMEDLNVKGIMKNRHLSKAVQQQCFGEFRRQMEYKSAWKNIPIILADRFFPSSKLCSCCGNIKKDLKLSDRIYKCECGNVIDRDYQASLNLKRYGKTTLEQQSVS

SEQ ID NO: 37811 - protein, 370 aa, unknown
  TnpB Polypeptide
MKIERAYKYRFYPTPEQEALLVRTFGCVRFVWNTVLRYRTDAFYQRQEKIGYNDASAFLTQLKKQPDSAFLAEVSSVPLQQCLRHQQTAFKNFFSKRARYPRFKSKKHRQSATFASSAFMYRDGQLFLAKSKVPLNVRWSRELPSAPSTVTVSKDSAGRYFISCLCKVDAQALPVTPKMVGIDLGLKDLFVTSEGHRTGNPRHTAKYAAKLAKAQRRLSKKTLGSANRAKARKKVARLHAKISDCRMDGLHKLSRQIVNENQVICVESLTVKNMVKNRSLAKSISDAGWGEFVRQLEYKSAWADRQLVAIDRWYPSSKRCSSCGHVKDKMPLTVRAWTCPECSTEHDRDVNAARNILQAVTALLAGGESS

SEQ ID NO: 37812 - protein, 423 aa, unknown
  TnpB Polypeptide
MQLVEQHVISKADPRFAPIDAAAFKAKNLYNAANYLVRQAYIFEHRYVGYAELFHLLKHHEAYTALPRKVSNDILRQLDKNWRAFFAECRAYREDPGRFVGRPKLPKYKHKTKGRFLLIYDMQAISRRALARGALRPSGLNIEVQTAHGRVKQARIVPRAGYYVVEIVYEQAEAAPSGNPALYAAVDIGVDNLAAITSNKRGFLPRLVNGRPIKSTNQFYNKRKAELQEALGHPGTTARMERFTVKRTRRITHYLHTASKAIIALLVAEDIGTLVVGKNAGWKQEAALGRVNNQHFVGLPHARFIAMLAYKAKLAGIRCVLQEESYTSQASFLDGDAIPTYDPKQEDKHVFSGKRVKRGLYRARDGRTLNADVNGSYNILRKALPTAFANGIEAVAVRPVWLTFAWSVQPRALAAAGAIPTRA

SEQ ID NO: 37813 - protein, 422 aa, Cyanobacterium sp.
MLKAYKYRIYPTDEQKVLLAKTFGCCRWFYNFALNLTNETYKATGKGLSRNEIINKLPQLKKEKEWLSEVPSQALQQVALDLSSAFLNFFEKRAKFPKFKKKGNKQSVRFPQGIKLDGDYLTLPKLKKVYCKVSRLPEGKLKSATVSMTSSGKYFASCLYDDGQDLPRQNSEGKAVGIDLGIKDFAITSDGSKYGNLNHYRKYEQKLAKKQKRLAKKQKGSNNRRKARKAVAKVHEKITRCREDFLHKLSRKLVDENQVVVVENLAVKNMVKNHKLAKSISDCGWGQFCTMVKYKAEWEGKTYIEVDRFFPSSKTCNHCLHQVDSLTLDIRSWQCPKCGTIHDRDVNAAKNIRDEGLRLLKGLCLDFPSKPCRLPRAVGHIASASGERVRPSKGCSFAIRSGLKAFVRHFSVKEESPVTPQG

SEQ ID NO: 37814 - protein, 374 aa, Vibrio sp.
MKKTLRYNYRLKPTAQQEAKLIEFGSYARGLWNFLLSENKRQYEVDKTFIFYNEMASKIKEIKKLPEFAWVKAFDSGASQQVARDLDTALKKGTSKTSHQHFPKFKISYRVKKQHNDSYRSVNNNNCIRIEKGAITLPKVGAVPIVLHRCLVSKIKTATVQLRHGKWEVSLTQEVACDEAKKVLKSITGYDINSNQTVVGSNGLIVDNPKYLKAEKQKLTRLQRQLSRKKKGSVRWKKAKSRLNNLHGSIARKRMDFAHKTAHRIANESDIVVFEDLNVAGMQKFNGKMVADNIMGLISDLTKYKVELRGGIHHEIGRFERTTGVCSVCGQHHKLTLKERHFTCVSCGTFSDRDYSSAIAVQKIGESDLITMTG

SEQ ID NO: 37815 - protein, 430 aa, unknown
  TnpB Polypeptide
MIRTSKHKTSYSNTHKLENYDAFLKEMRRVAKLYVDYLWNTHYEWKDKKDILRTMDITKEKLEVPPYFDYNSIPIETNLSGRAKSSLITQCCGIVKACTEKQRRRLYLLEEKKSNNEVISEKLLENIEKFKPQKPNTENINIEVSSKCSDFEKIESDFFEGFLRLKCLGDDFEMIKIPIKFHKQSNKWKGKAEMLNSFLLCNDKIEIRWKLEVPLKKEGIEVGADQGKDDVLYLSDNQVTPKTNKHGKSLDSIMDKLTRRKYGSKNFKQSQEERKNFINFCINRLNFSHIKKVNLEKIININFGRRMSRKMKRWVSTLIRDKAMRLLEELGVQVKEQSSAYRSQRCSHCGIVLKKNRKGKEYFCHNCGFMIDADYNASINHEVELPDVPIWLSILHLNRTKGFFWKPEGFFGVDGEELRVPHSQEKEVIC

SEQ ID NO: 37816 - protein, 386 aa, Limosilactobacillus sp.
MTEAIKGIKLRLYPNEKQRQQLWQMFGNDRKVWNLMLGMVKKRYKNNPSSQFVNEYGMNYLLKRLKQEYPYLRTSDATSFLVVNHNLAQSFKMLFKHRGGYPRFKSRHALRQSYTGRSTCKVIAKRRIQLPKLGGIRTSKTSYIGKAKIKQYTVSYDPTGRYYLSLQVKTEINELPKTGKAVGLDVGIADLAISSDGIKYGTFHTKWLEKQDTKWQSKYSKRKYRVTVAVRQWNHNHEDIKEDISDYQNWQRAQQQKARYQQKIANQRKDYLHKLTTNLVKQYDVIVIEDLKTKNLQKNHHLAKSIANASWYQFRTMLEYKCAWYGKQLIVVKPNYTSQICSTCGYHSGKKPLEVRAWTCSKCGTNHDRDINAAVNILHKGLKAVG

SEQ ID NO: 37817 - protein, 427 aa, unknown
  TnpB Polypeptide
MLVQRALKIRLYPTQKQANYLNQVIGNSRFIYNQMLNERINYYNEHKENKEELYKHKYKTEKQYKEEFEFLKIGDSIALQQSRINLELAYKNFFKSVKGKRKGKSGFPKFKSKKNGGSFRTVNTNNCLKIDFENKTIKIPKCESIKFRHKKIKKHFLNGKVCNITVTKTPSGIYEASVLMEMEQWWKSYQEIPKIPKVVGLDMSLSEFYVDSFGNTAGFTKPYKKLEQKLVDSQRKLSRKQKGSKNREKARIDVAKIHRKISNLRKDFIEQTSMRLIKNYDVVVVETLSLKSMAMNKHGKSVSDIGYGNFVSRLKTKAIENDKTVLEASKWFASTQTCSVCSFKNKETKDLSVRKWICPECKTHHDRDVNSAINLKKLGLNHILSERQEFKSVESKITELALLALNLDVETENLAREGKKHSDLQSQ

SEQ ID NO: 37818 - protein, 252 aa, unknown
  TnpB Polypeptide
MKLQAYENSYYGNGAISMDINYDHFALAEINETGKLLDQKLIRFDLVKKSTGQITNILGTAVKEVFNWCAEKDKRLIVEDIDLTIKLASRKYGNRKGNHHMTLFAYQRIASSIENQSLRREIAFCKIDPAYTSQMGKFLFMRRYGMSIHQAAAYTIGLVGMSLYDKLTPDLRMLNLLKTKEGIVPEFSQETYKTIWARITKTFSGIQKHFFYRSISYEVLEERKRPSLRTLAAEMKVRYMPKLTNYKSCELV

SEQ ID NO: 37819 - protein, 427 aa, Escherichia sp.
MHQENTMLPRRISVSLFIDQSIIWPVKRLQAFKFQLRPGGQQEREMRRFAGACRFVFNRALALQNENHEAGNKYIPYGKMASWLVEWKNATETQWLKDSPSQPLQQSLKGLERTYKNFFQKRAAFPRFKKRGQNDAFRYPQGVKLDQENSRIFLPKLGWMRYRNSRQVTGVVKNVTVSQSCGKWYISIQTESEVSTPAHPSASMVGLDAGVAKLATLSDGTVFEPVNSFQKNQKTLARLQRQLSRKVKFSNNWQKQKRKIQRLHSCIANIRRDYLHKVTTTVSKNHAMIVIEDLKVSNMSKSAAGTVSQPGRNVRAKSGLNRSILDQGWYEMRRQLEYKQLWRGGQVLAVPPAYTSQRCACCGHTAKENRLSQSKFRCQVCGYTANADVNGARNILAAGHAVLACGEMVQSGRPLKQEPTEMIQATA

SEQ ID NO: 37820 - protein, 439 aa, unknown
  TnpB Polypeptide
LIFAKNGIYLYYIVAVDMTFRLEVPPLRFVAVSRCKGKTMYITKTRKQKRTQHLDNLARESGRCYSKVVSLVRKTHTKKGFWIPKGGVQKYMRHREYNLHSQTVQACVDSYFDSLDSYFEARKSNPDARPPKRTPRHFKVRWKSGAIRIKDRQLILSNGLGREPVILDGITEKPNYIEMYFKRGHYYFALVYKVDTLPKSETGIIVAIDMGEIHPIVSFDGDRATLYNGRFLRSLVRYRNKFKAQIQRAMDTCKKRSRKWYRLLKVKRRTLEKLAAQIKDAEHKITSRFISDCQRAKADTIVIGDIKGIRNTAKFSKKSNQKIHQWAFSRIQQKICYKAALVGIKVVFESEAYTSQTCPHCGHRKKPANRNYHCKKCGFKYHRDGVGAINLYNKVSGVLNTPVSRDIGNPLSVRFNWHLSSLGLTPRNLAISKERIFAL

SEQ ID NO: 37821 - protein, 235 aa, Mycolicibacterium sp.
MKRQRLLAKSLSRKKKGSCNRKNAAAQLARHHRHVANTRHHFLHQVANEMVKNHDQLVIEDLNVAGMLRNRRLARAISDAGWTEFARLLKYKQAWRGGHVVEAGRWYPSTRQCSQCGEVNHKLTLADRVFVCGCGHAVDRDTNAATNLARWGSTHHGLRRSPDPQAGGRANNAHRRDGADQHPLCPGETNPDDAGTDVRTATSGEPRRRPRRAVPQSPLVGHALAAQTHFDLNDR

SEQ ID NO: 37822 - protein, 523 aa, unknown
  TnpB Polypeptide
MFVSLQFKLELKREDKEKLIKLMRKQSSAIRAAYNMLKELEKEKIRNAHAQIYQRLRQLFPDLPTKYIDSAIYKAKQYPTDKPVVFGGKKLFEKLCKNHLTGKLRERLKKQWRELRQGTLISIGSKSDRGNRLTRFEDLNGQLHLRITTGNREYIYAKVLREPSNSKDKWITFMIMLLESWQTKNYFAYTVELKLRNGEVYGSVSFELPTSEVKYTKENGVIAIDTNASPIHLAVAELSKTGELVSYQTIILHNLLGLSQNSKDHQEWILAHKIVDTAIQKNKAIAIENLKKLKKGKRGDGKVELRKRLHHWNAKKFLQKLKRVATLKGVEIVEVNPAYTSVIGMLKYAPQLRIDKDIAGAYVIGRRALGFKEDTPENYEKLLKDKAYLEFALKRYEERERELRELLEEETNQYKRNAIKSELKSVENAKNLLVNLIQSLQSESSSCEGANGRNPEQGETKKVSQSAWQVLKVALLFPILGQIPPRDLSPLKPVLVEGVWDRVRRFNGLVPLEAGGTVPIRDF

SEQ ID NO: 37823 - protein, 432 aa, unknown
  TnpB Polypeptide
MSELMRLAFKYKLCPNRRQEQAFRNFSGCCRFAYNALLVKEKEDYQEYLEELESRRCFGEALNEDEAKALCVKPTLNQYSFNYALKKLKEEYPFLKEYCHSQVLQQKVMDLYEAFKKFFKGKGGYPKFKKRHSDDGFRYPQGFKVEEDNGRIFLPKIGYVRYRNSRKIEGIPKNVTVRQEADGWYASIQCEFALNNHVIVPNLNTAIGIDMGVKRFLTLSDGNFIESLETKLKPLENKIALLQRRIKHKVKGSDNIKKAYVKLALLHKRKADTRNNFLHQVSTLLIKNHDLIVIEDLKIKNMSKSAKGTIENLGKNVKAKAGLNRSILNEAWHKFFTYLEYKLKLKGGILIKVDPKHTSQTCIQCGHISKESRKEQETFKCIKCGYETNADVNAAQNILKRAGLARMACQANLIRGQQQEPSEAYNSSNIVV

SEQ ID NO: 37824 - protein, 385 aa, Lactobacillus sp.
MNLMMRTQKVRLYPNRHMMKVLNSLCDYRRYCWNEGLATWNDMYDLHTIEPSSSRPSAYSVRNELVANKSDWQYALSARTLQLTITDLGNAWQNFFDKTQPNWGKPRFKLKRAPRQGFKTDRARIVNGKLRLDKPHGTKVWYDIRLSKHADLTGTLKVVSVYCENGRYWASLPFEVGLNAKVKTSKNTAVDVNVGHFNYTDGVINTLPKRLNRLYRRIKFYQKRLARKRVVNGKRATKGNNYRITRAKLQRDYCRVTNIQHDIMQKFTTQLVTDYDKIVIENLAVKDMQMTHVASKGLQRSMFGYFRQVLSYKCDWYGKALILADKYYPSTQRCSECGHIKSGIDKITLQGNTAHKTKHHEYICYNCGVTLERDKNAVANLLTLI

SEQ ID NO: 37825 - protein, 470 aa, Paraburkholderia sp.
LCAAAVDIRGHRRFGLWHELPQEGPQAPPGCRHRGECWAGDHYGLQCAAVRIALTQEPEVARWHSAGRGASLMLIAHRIALDPNNVQATYLARAAGTARFAYNWALAEWKRQYEAHKLDNTQPKPSQMALRRQLNAIKREQFPWMLEVTKNAPQMAIIQLGQAFQNFFAGRARYPQFRKKGLRDRFTLTNDQFDLDGTRIRIPNLGWVRMRETLRFAGKIMSATVSRVADRWFVSIAVEIPDSSHLPKAENQGAAGVDLGVSALATLSTGETIAGPKPHKAMLDRLRRLSRSLSRKQKGSANRRKVKARLAKLHARIAAIRSDALHNLTTELTRRFHTIGIEDLNVSGMVKNRHLARSIADMGFFEFRRQLEYKGAMRGGQVVVAERFFASSKTCSACGHKLNDLPLAVREWTCPACGGTHDRDVNAAVNLKVMAVSSTVTASGEEGSGSGRKTRAKPASAKQEVSFVPV

SEQ ID NO: 37826 - protein, 410 aa, unknown
  TnpB Polypeptide
MSKCKNNQQKKTKSKDVDTMVEKFPLHLTPEQISLARDLQREAAKAWNTICTVHRTVYIKHHCWLDEGAMKAFVKGKYGIHSQSAQAIVETYFEACERTKNLHNQGLTDWRYPHRKKHFFTVTWKPLGITHEGQALTLSNGRGREPLVLNLPERLSNAVIKLVQLVWHRNQYWLHVTVEKPALQKVQGNVTAAIDPGEIHAATITNGKEALVISGRLLRSLHRLRNKVLRWFQKAISRTKKGSKRRRKLLTAKYRFLNNIERRIEHAMHTISAIVAKWCLKHNVKTIYIGNPEGVRKKDCGKKHNQRISQWAFGELRRMLEYKLKRHGIKMMSDDERGTSGTCPACGEYTKQTGRTYKCGKCGFTGPHRDVVGASGILDKSINGKFTKGRKLPEKVEYMRPKVVTPKKAA

SEQ ID NO: 37827 - protein, 342 aa, unknown
  TnpB Polypeptide
MSEGSVFHRAYRYRLRSNRKAEAVLRRWAGCSRKVWNLALAEQQARRERGEKYAGLVGMCQWVTAWRKAPETAYLAEVPGHVLQNVVCALDGAVQRLRRHQRAVARKLEAAKVAAGIPGGKPFPKGFRLRPSNRLRKARARVAKIHQGIARQRADFLHKLSTQIAREHALVCLEALRVRSMSASAAATQEAPGKRVRQKAGLNRAILDQGSGLVAVQGAARLQARMARRRARTRPSRLYLAALSRLRSHPCGQPQGRSFSVSVLWLHRPCEPQCREEHTGRGTRGSGRRRPSARGGTGAVRPPSEARTHRGATPCGLAQQESPPFPKRGERSERAGRMSKRR

SEQ ID NO: 37828 - protein, 404 aa, Methylobacterium sp.
MHRRSGGGDGRITNTLQGGAAVEALFDGSLSQIMVRPISARAWLSEIRGERRRLQRTFLSATVFVRDGERRTVTWPMIMHRPIPANCRVKEVIITRRRHGNSWRWAASFICTQQADRAVPEPTGAKRIAIDVGWRRVPDGLRVATVVISGQSPSFIVLPASMLESFSLIDELRSRLQASNRLGIEMLQSANLGSFAQPFQDLLRDFQSISEKRPVDLAKFCESDFFLLQARENVGMDLWAWRKGHKRLTEWLRNHHRKTVGHRNHFYQNKIIEALDQASEVIVNDVKVGEIAARRTSRSESPFVPNRVGHYRRIAAPSELIRALKLQAEKRKIAFNKLEAESPVRCPTCGSLSRKTRADALPQVCANCDSSFDQDVVACESLLSPAPTARTTRSVKARSAAATT

SEQ ID NO: 37829 - protein, 506 aa, unknown
  TnpB Polypeptide
VSRIRKGEASMRAQTSSYVISVKLKVTESIKHRLEKSFHIAASAYNEALSFGLRRFEAMKQNSRYQELLELRRSNKAYKEYDQALFELRKSYDLTEFGLSNRLGQQRKKPNSPYRQLNSGELQVIAGQAYKTLEKVLFYQVKPSSVRFRSKYDLNVSYRNRVNTTGTRLVPSDRKGYAYRLYIHKMSTFIDIPIKAFNNYQQMSLLRSEKIKYVQIIRKTIRGKKVYSLQIVCQGLPLSKVTKGEGILGIDPGISTIAYASKENVALIDLVPKDINRKEKLMRHLDKSIERSRRVNNPDCYNADGTIKKGAKFKRPSKRQMRLQVRRLKAYRSLSEERKKLQGQLVNHLLSQASIIKMEDLNVKGLQRRSRELRINPKTNRPFSKKRFGKSVFRAAPSAFRQALQTKTHQLGVIVEIISPRDLKPSQYNHLTQTFEKKTLLTRMYDLSEDVTGVQRDLYSAFLIGHIEKGSYQQEQLTQDFPDFYRQMKKFLQEPRTSSRLDWYLR

SEQ ID NO: 37830 - protein, 524 aa, unknown
  TnpB Polypeptide
MTAKENIGEMLNYIRFSTRKGENKTLIEIRTAKDCRLDAVIESVSYPFFECAYSLTAEHGEEWLLRIADLHMENWKEVYMPSDAIPDEDDENWEVAYCEQGEKEKKSVGRGVYPDNWKEFLKIMDEIVPTSIPGQINKITLEYQRNVRFTQKNEEGTQNETVNWDYKEEMILDRYEETLTIRQVIAPGRELTKEYHMRDEIPELMDKCMEYLGKLKSTSGQQEPDSAAFKLSLECGASTSRVVTGTYNRRGLPEGWDAFIREIAGYIRFYESYEDILNPYIYRRGRRQGEQIICSVDLGINTDAVCTIMRADGTVLGRKFIDHPSEKDRMYRTLGRIRRSQREYGSAQTQGIWAYTKRLNTELGKKIAGAIVRYAEENHADVIVFEYLEMQGKISGKKKQKLHLWRKRDIQKCCEHQAHRKGMRVSRICAWNTSRLAYDGSGAVTRDWENHSLCTFQTGKRYNCDLSASYNIGARYFIRELLKPLPATERSLLEAKVPPVKRRTSCVYADLRKLHSEMELLKAA

SEQ ID NO: 37831 - protein, 316 aa, unknown
  TnpB Polypeptide
MSRYRLLPSPVLEAVLRDHCAHARFVWNLALEQHRHWRPGRTSAPGYLEQCKQLTAARAEHPWLAEGSQMVQQQALRDFAQAMANYFGGRHGRPSWRKAGRDEGFRVVAVKPEHVRRLSRRTGEVWIPKAGWVRFRWSRAVPAGAKSYRVTMDRAGRWHVAFAAIPDPILPPGDGEVARRFDVIRVEDLKIGNMTRSARGTRGDPGRNVRAKAGLNREIMRSGWGLLVRRLEDKAPGRVEKMLAAYTSQTCSGCGHRDPESRESQSRFRCRACGLTANADVNAARNIAAGHAVTARGGDGVTRPVNREPHLLLQSA

SEQ ID NO: 37832 - protein, 407 aa, Halorubrum sp.
MNYNYRYRLHPSDALEDLLVWTVDTCRQVYNHFLHRLNRIDDASAYSEQKRLPDLKEWWDDLKDVHSKVLQKVVQRLYDNLSTLRSRKENGYHVGTLNWKSPSEYRSFTYSQSGFKLKNTSGRARLWLSKLGEIPITFHRDLPDDAEIKTVTVKQEPTGKWYAILGVETPDDPPEKPENPERFVGIDVGILKYAHDTDGTAVESPDLSDERERLESAQRDLSRKEHGSANWEKQRRIVAKRHDDLKRKRRDFLHKLSNYYATEYDLVAMEDLDAKGLVELPGNSRNRAGAAWGTFLWMLEYKCEREGTHFVAVDPAGTTKECASCGVETEKPLWVREHSCPACGFEADRDANAAWNILSRGMKQLGAGRPESTPVETAFPTDTDSVSAKRVVEAGSPTLKREPAGER

SEQ ID NO: 37833 - protein, 459 aa, Sulfurihydrogenibium sp.
MDTITLTLNIQISKKSAVNKLSKASKTFQHFKNLIYITAYEYFKHTKNITPFLSVNFLEKYIKGKEKLPFENQKIKDMQKQLIDLWQNKIGSDTAKMLINVIVRECKSIIAKWKTEEKANLPLPRKLSKLHFYTIETNPNMIIDKRNLKRGKSNHIVVRIGKSFGSIKIKVPEGINTNHLKIIWRKEGFIDVFLTYQQPLEKLKLNKDNFLSIDIGINNFISTISNKENVRSFIINGEPLKAFNQWVNKLSAKLQSENKEKEHKLLWNYRDKRISQFFASVSNLLVSLALKENIGTIVISKGLMEEYQKESDKGKRFNQTFRAIPFGKFIQMLKYKCQIAGIDLIITEDESYTSKTSSITGDLKAKEFNGKRVKRGLFKDHITNKVYNADLNGALNVAIKGIGRKIREQFLKLPNWLDKLSRPIKVNLFNKYSASVLKDIADSISLSKDRRRTPLETVC

SEQ ID NO: 37834 - protein, 505 aa, Sulfurihydrogenibium sp.
MLSGKRVLTVRVSGKERKKKVRTLLLDLAHFRNLLIILIRKYKEFYGTYPLHQSILYGLIAKVYTGKYKQEFEEVLRNIHQKEGLRDLLESLKVQKERIDNSHYIQYLIRQVIKDFTSFFKSFKSYKESPHKFKETPKPPKPKKMRYLINLSVEGNINTFRQEKDKLVIRLKKGAYLKVKLPRNFSYRVSSIRLKLFGDDLYVDVVYEQEVKRIEPKGQYTAGIDIGLDEMLSVVSENPRLKSFIVSGKEIKAFNQWFNKERAKLRTQIDYLKNEIKSESYENTERLERKLKELEIKEKVLSAHRKRWLENNLHKLSRKLVDLLYETGHKVIYIGKNALESKNGINLGKKTNQNFVFIPFRRLAEIIKYKAKELGIEVVEVDESYTSKTSPFADIFKVRKTKDKTLCQGERKGNTFKDNVLNKVFHADLVGALNIMRVGAKLLKLGFYESLKIFFVKLCNPVRLKLIDFFYKVSSESMWIGGSKREVLALAGWMEKLGHLDAFSV

SEQ ID NO: 37835 - protein, 399 aa, unknown
  TnpB Polypeptide
MEFKDYRTQTYLIDMTDEVYEMCLASKSLYNQALYLLRKHFFETDKTLSISELDKLVKKTNEFHYRKLYVQSAQATIINCRMNIVRYFKAMKTFYENWDASQKLPQFPTYLGNQDLYDVILTNQLIKLVGDEVYFSKRLGLPPLKLKHVDGKLLEVRLKPLSLHEHSSRKRMLEAQVVFLKEMDVDFLENGNVAGIDLGLHNIVTLVSTSASPILISGDKMIRYQHRFNHKLSRIRENGGTDSIRAHKLFYKRKQFMNDELHKITKTVITYCLENDISTLVIGRNKTLKNDTYHRIFKQLPIHRIVEILDYKTKEYGITLHVTEESHTSGTSFLDDELPTSTYYDKSRRKHRGCFISNDGIRINADVNAAFQIIRKVFPDVQFDMQTKVRSLNPKLLKI

SEQ ID NO: 37836 - protein, 369 aa, unknown
  TnpB Polypeptide
MTIRQKSYKFRLYPNQEQQQLFAKTFGCSRAIWNMMLADKIKHYKDTKETLHNTPAQYKKEFPWLSEVDSLALANVQLNLQTAYKNFFRSGFGFPKFKKKSHRQSYKTNNQKGSIALLDGKVKLPKIGWVKVKEHRKINGVIKSATISMTPTGKYYVSIPCETEIALLPRTNSSIGIDLGISDFAILSNGEKIANPRFLVSLSKKLAKEQKILSRRGLLAKKNGRKLSDSKNYQKQRMKVAKIYEKIANQRNDFLNKLSTNLIKNHDVICIEDLSSKNLMKNHKLAKSIGDVSWSEFVTMLEYKANWYGKQISKINRWYPSSQICSDCGFSSGKKPLSVRNWTCTNCGSHHDRDINASINILNEGLRLL

SEQ ID NO: 37837 - protein, 405 aa, unknown
  TnpB Polypeptide
MKLNYQVRLYPNNTMKHVLDSLCDYRRYCWNKAISCWNDQYESRLIGLSESVIDKLKNDVNSLTLEEQELVNQYPIPSHYSVQSELVSQKEDWQYNFSSRVLQQAVKDVAKSWKLFFNNQDAAGRPTFKAKKSNKQGFKTDRACIKGGKLLLDKPRGYQGKWYTIKFKGLTIPDSKIIFCSVTRVNNKYIATFTLDVEPTLLPKTGKKTAVDANVDHFDTTDGRTTLKPETLNPLYDRVKHYQRVLSRKRCKNPKAIHSKSYQVTRTKLQRTYERITNIQTDLLHKFTTDLYKQYDTIVIEDLDVKKMQMSKKAKNLHRSLFGAFRQMMEYKSEKFGKTLIVADRFYPSTQRCSACGFIKTGDDKITLSGNQKHGTRHNEYICYHCGYKDDRDRNAVLNLLALAN

SEQ ID NO: 37838 - protein, 398 aa, Kribbella sp.
MSRFRMYPTPAQQIALLEQCGHARYVWNLALEQWSMWTPAKGPTPGFAEQCRQLTEARAVFGWLRAGSQTVQQQALRDFDQAVKNFYAGTHRRPTWRKAGLHEGFRIVGAQTSRVVKLNRKWAAVKLPKIGWVRFRLSRAVPDAKSYRITCDRMGRWHIAFAVIPPPVPAPGTGEVVGVDRGVTVSAALSTGELLTCPGLTDREQARLKHLQRRLARCRPGSKRRRRVQAAIAKLHARAADRRRDWVEKTSTDVARRFDVIRVEDLRVAQMTRRPKPKSDPQRPGRYLPNRRRAKAGLNRGILANGWGDLVTRLEHKATGRVEKVNPAYTPQTCSVCGHCAPGNRESQAVFRCVACGHQANADVNAAVNIAAGRAVSARRETPPRVSPKREPQHATSA

SEQ ID NO: 37839 - protein, 404 aa, unknown
  TnpB Polypeptide
MKINLAYKTELDLNNQQKSMVNQAAGGARFTYNWGLDRRIKLYESEKKVTNAINQHKELNKLKKTDYNWMYNSSKCVFQEALRDLDKGFKNFFRNIKQGKKAGFPKFKSKHNAKQSFRLTGSIHVFNDKVQLPRLGKLRLKEKGYIPTDEKILSATVSKHCNKYFVSISVEKDVEISLNASTEIIGVDLGIKDLAITSDDIHFENPKTYKRFLKKLKRQQRWFSRKTKGSNNRRKQKDKVAKIHYKISNIRKDNIHKMTSQVVKTKPQTIVIEDLSARNMMKNHKLAQSIADSSFGEIRRQFEYKTKWNNIQLVIANRWFPSSKLCSNCGHKKEELKLSERVYVCESCGVEIDRDLNAAINLKLYTVSSTGINASGEDKVHASNSRWSSLKEEFNIKTRELVTC

SEQ ID NO: 37840 - protein, 159 aa, Methanobrevibacter sp.
MIHKYQRKLNRQKYMSNNYKKTLQKYYKWLNRKNNKIQNAYHQLSKYLVRNYDIIAMEDLNIKGMFKNKKWAPKLQRISLYKLVKMIKYKAEWYKKTFIQIDRFYPSSQLCNNCGYQKHDLTLGIREWTCPVCKTKHNRDINASKNILQKAIQENIVNS

SEQ ID NO: 37841 - protein, 405 aa, unknown
  TnpB Polypeptide
MMCYIVFMIIRQGFKFRLDASPGQNARLRVLVGHARFVWNQALARCNDAYQAENQRVPRYEIMAKWITAWKREPEMEWLKEAYTDNLQQKLKDLDAAWQRCFDPKLQAQRPRFKKKGRDRDSIRFVNFAKYCQLDGRRVKLPSKLGWIKFRQSRPIVGTIKNCTVSWEAGHWHISFQTEREVSAPVHPKPASWIGIDLGIVRFATLSDGTFTAPLDSFKLHQQALAKAQQQMSRKVKFSSNWYKAKARVQRLQRRIANVRRDYLHKTSTRISQNHAMVVIEDLQVTNMSASAKGTLDTPGRNVRQKSGLNRSILDQGWFEFRRQLEYKAGWAGGEVLAVPAHHTSQTCPACAHVSRDNRLSQAQFACTDCGYQNNADVVGALNILARGIKTCAKGGTSPGSPVSA

SEQ ID NO: 37842 - protein, 531 aa, unknown
  TnpB Polypeptide
LNQSKYELLEAYAIEAKNFRNIVSEIVYNNYRQKIFYNEVTAYDLHKKLKHLNKQTKVSAIDCQLAISDVYTKYKTNLDMFIKKHYKIDMYSHPYRFLFNYMVRYFKDQQEFEDFLEKKYLKEKKELIKIQKQNKELMYNEFIHLHFYMYLRKIYNDIKTKNFFKGQTNLNFISMVRYTQDFIIKKITKVTYKSLTFNHMNVIGKTMNVSGMLEKSHINLTNTIVHINLPKIATIDLPVRHSKKYHGIFKDYKYNLNKANGQKQYQIQISFDEVKKEVKITLVRDIEKNISDNYKGKQILGVDVNTKHNIFALSNYETQEIDNHLVNKIVKEKKKLKAIQSQRDRLKLPTKYSKRQKRIQNKINKQVEYLQNYACHQLLSTHKDSILVMENLERNLKKCKFNNKQYEEELNYNELFSLLRIYSMKDTVIKMSRNYNVNVVLVNPDFTSQMCPKCGHISKKNRKSQETFCCEKCGHENNADINAAINIKDRFTNPKFKEEFQKEVADTQLISEPKISNRFKFKQKLFEITNN

SEQ ID NO: 37843 - protein, 389 aa, unknown
  TnpB Polypeptide
MIRTSKHNISNITNQGKLSYLDCLFIDYKNGLEIYINYIIDGVLPLKTMMSSSLLPNEKIIHSRFKQLIYKQASEIIRSQIDKCKKKRYSSYKKVYSYFKKNERQLNFINKKFSKLQLKDILTSRYFTKPNLNNISINLDERFFDIKYGKHFDNFVKIILPYFNEKGTRALQIKVPLKYHKHSLSLLKDNFSLRKNIQIKKVNGSYYINLIWFKDVLPRTEGSSLGIDLGYNKLIATSNGETIGSELKQIYNKISNKKQGSKSFKRSLNERDNLINYYVNKIDLTELKTIVIEDLNNVKSGKKYFNNKIQRWSYVKTIDKINRTCEVNGIGLVKVSPSYTSQTCSCCGHTDKNSRKLEEFLCVSCGYESDADINASVNILNRGIYSSSN

SEQ ID NO: 37844 - protein, 369 aa, Nocardiopsis sp.
VLTGFRYRLALTDEQAELCQVYGDICRAVWNTGLDQRREAVSRWQRGQRLPYCGYHLQARELAEAKTEETWLKAAPSHILQQTLRDLDRACKDHGTFKVRWRAKDRWKPSFRFPDGTRMSIERLSRRWGRIKLPKLGWVRFRWSRAPRGTVRSATVSRDGAHWYVSLLCEDGQATPEEHERPDSAVGVDRGVVVAVATSDGDLLDRTFQTRKEREREQRLRRRLCRQRRGSNNRAKTKAAQTAHTLCAKNAVVVLEKLQTKNRTASAKGTVEAPGVNVRQKAGLNRAILAKGWHGLKLACQNAARRTGSRIVEVDPAYTSQTCHSCGYVAVENRESQSVFRCGRCGHTAHADVNAAQNILTRGWTNPSG

SEQ ID NO: 37845 - protein, 304 aa, Nocardiopsis sp.
LPAPLAHLANAPRGRYVLSGRVAFAHRGTEWADRVEADGAVAYRLHLDADRGRWYVSASWTPAPVPQVPWEAALARGVVGVDANVDHLAAWRLDTHGNPIGNPRRFAFELSGNSQHRDAQVRHALSRLLRWATAQGVRAIAVEDLDFSADKSREKHGRRKRFRQLISGFPTARLRSRLVSMAHTLGVAVIAVYPAFAFGGGWGAQHWQQPLSTTTRKVSRHDAASIAVGRRAQGHPVRRRTAPPPHHQGDGVGHRTIQAASGSSGREGNRPPVTERARDARGRTGQERGDPAHPAPFGMGAVPV

SEQ ID NO: 37846 - protein, 441 aa, Anabaena sp.
MTFRLYPNQTTESKLRYHRKLHKDLYNAAVNNRFTQYQKFNHKVDYFEQQNCLPAFKEVWVEYKELPSHALQATLKRVDFAFERWFKGLGKRPRFKSIRHYSGWTYPDSAGFKVESNGENGYLNLSKIGKIQMRGQAKYWGKPTTCTIVFRNGKWYASITVNVLEQALKPKTLPIGAVGIDLGCKSALSITDGENHQQIDAPKFYRIAEQKIKKASKEKRRKRAPNRNKKIKASRRYKKAQLKVSKLVARVANQRQDWVHQVAVEIIGSNSFIATEKLEVKNMTSKAKKGKRKKQKAGLNKSILDVGFGMLRASIKYKVEQIGGVFVEVPTRQVKPSQTCPKCGNQHKKTLDKREHQCGVCGYVQDRDIAAAEVMLYWAKGTLPGLGTSLVDADLSGSTSRTRKKAGSMRQLGEKKRQKSQGDFANNKLEDVETSSSSEAN

SEQ ID NO: 37847 - protein, 510 aa, unknown
  TnpB Polypeptide
VKFYDTVTRHRFTTENGIDADSVSADLAQMVVWMAQAEREVIASTEFHDLAVKALEGDRPTGSLHSWGRKRLSRYDFEFQKYNMNEMLVNNVLSTLELYAMSVGLFQVMSTHPKETKPEKILFHYRSTYPKAPQPTSGMVRAHLRRYHIKGERKASLPGVSAKLNLAVCDMKFAPKAPRSNSDPLNVIIQVKTPSYGLTKLYLDLPNSTERFGIGKVCRPTIRLNNKGQVVFDIAIEHEVKQRDTNKVVGVDLGKVEPFVATVIDPETKYRSAPYHARYKGRLGSLVKTEKKRRDLASYLYERADLCDKYNRIDHANVLRTEAKRVSTKATKIKHEINQCIASQVVEIANQNDAHVSLENLSWLDSRGGKWPHSEIQSRIENAAKRYGLSVVKVSARDTSRTCSRCGGKVSNNLKSRVGACDVCGFSLNRDVSASREIALRATSPSSRSRERMRSLLRQRREKQSSAVTRQPKPVTALSGNQGHTGTSEYLSEATLMMVRENLDSRGSPT

SEQ ID NO: 37848 - protein, 477 aa, unknown
  TnpB Polypeptide
MAEAEREVLASAEFHDLALQALKGDRPTGSLNSWGRKRLSRYDFSFQKYNMNEMLTTNVMSTLELYSMSVGLFQVMSTHPKESKPEKILSYYRSTYPKAPQPTSGMVRAHLIRFHKKGEKKASLPGVSAKLNLAVCDTFFAPKAFRGENDPLNAVVQLRTPHHGLTSIYLRLPENKSRFGNGRVCRPTIRLNNKGQVVFDITIEHETQQRDTNRVIGVDLGKVEPFVATVIDPETKHRSAPYYVRYKGRLGTLVEKEQRRRDLESHLYERADLCDRYNRTDHADNLRTEARRVSAKATRIKHEISQCIASQVVEIADQNDSHISLENLSWLDAQGGRWPHAEIQSRIESTAKRYGLKVVKVSAKDTSRTCSRCGGKVSNNSKTRIGSCATCGFSLNRDVSASREIALRATSPSSRSRERMRSLLRQRQEKRSSAATRQPKPVTALGGIQGHTGTSESLSEATLMMVRENLDSRGSST

SEQ ID NO: 37849 - protein, 151 aa, Clostridium sp.
MNKKGGSYQKTKNIAKIEKKIKKLHRKLQNIRLNHIHQTTSKMVKAKPSRVVMEDLKVSNMMKNKHLAKAIANQGFYTFINQMNYKCEKYGIEFIQTPTFYPSSKTCSNCGTIKKDLKLSDRVYKCECGFTCDRDKNASYNLANYGLEKAS

SEQ ID NO: 37850 - protein, 367 aa, unknown
  TnpB Polypeptide
MKTLKLRIRDKHIDQLNRLSGSVNFVWNYVNDLSYKHLQKTGKFFSAYDLNDYTKGSGELLGLHSQTIQAINETHAKARKQFKKAKLSWRTNNPNSKRKSLGWLPFKQSAIKHIATHQTGKKGLKSTLQLSLAKGQKLVIDLWDSYNLSLYQINTLEIVQDSRNRWYACITVKDYPKQSCGTGSVGIDLGLKDSATASNGDKLTIKQTLKYAKQLAIAQRSNNKKRIKAIHAKIKNTRQDLIHKFTTQLVKDNALIVVGDIQSNQFNSKKGKLAKSVYDAGWFELKRQLTYKCENAGCRFEIVNEKYTTQTCSCCGDMSSSLSGRAGLRIREWTCATCGTRHDRDINASKNILAVGLNRLAEGIPER

SEQ ID NO: 37851 - protein, 520 aa, Thermus sp.
MERSLFQGVQAKLNFPRKEDKQAVLDLMRRFSSARRYAYNRLVEGIPREKLWSVEGPLGTFFGLNSYYIQGALLKAEMALRSAKELGIDPEKVVFGGRKLFLDLRKKHDLKAWKKRKQEWKERRQGLLYCRGKKREGGNPNLRLEVNNGVLRLRISLGNKTYAYALVQTTHPNLGQLLQRVYAKESYNVELTLKEGEVYANFTWEEKAPPLTSTRENGVLALDVNAEPYHLALALVGPDGSLRHYFTLPLDQVDRAQGRGAKETLLWMVAHEVTDFAVANGVAIATERLKCLRKSKRGDGSGRAFRRIQHRFAYASLLNKIHSLAKKKGVETIQVNPQDTSTIGMLKYAPQLSLSKDVAAAYVIGRRALGFEEKLPKSYRALLDDPRFREEAEAFYRERVEELKEGIKAEKNPYLKRRLFREVAKAQRALVLLSPRSSPGSRKGSTDGRNPYGANPWRVLRAGLFLPFLGREVPRDLSPLKSILVQGPPLYRDRGRGKEGGPRSLLPGRAHGTHTGAVRD

SEQ ID NO: 37852 - protein, 404 aa, Escherichia sp.
MKRLQAFKFQLRPGGQQERQMRLFAGACRFVFNRALARQNENYETGNKYIPYTKMASWLVEWKNATETQWLKDSPSQPLQQSLKDLERAYKNFFRKRAAFPRFKKRGQNDAFRYPQGVKLDQENSRIFLPKLGWMRYRNSRQVTGIVKNVTVSQSCGKWYISIQTESEVSTPVHPSASMVGLDAGVARLATLSDGTVFEPVNSFQKNQKKLARLQRQLSRKVRFSNNWQKQKRKIQQLHSRIANIRRDYLHKVTTIISKNHAMIVIEDLKVKHMSKSAAGTISQPGRNVRAKSGLNRSILDQGWYEMRRQLEYKQLWHGGQVLAVPPAYTSQRCACCGHTAKENRLSQSKFRCQVCGYTANADVNGARNILAAGHAVLACGGMVQSGRPLKQEPTEMIQATALT

SEQ ID NO: 37853 - protein, 243 aa, Clostridium sp.
MCYAASKLWNVCNYERRRYKELGLEKYPDWYYQKKAHKGDLWYRQLPSQTAQETCKQLDKAWKSFYALKKTGGIKVPNPPRFKQDNIPITYMQMGIRHEKGSGQLRLSLSKDLKSYMEETYGIHEKFLYLENKIFRNMDHIKQLRIYPPEDGKCDLIVIYEVKEPELESDTSQCSPFSPEISKRYAEASNRKERGMYITDGVRYNADAVGAFNILRKHLSVSGKQKELSVTGLKNPEIIKVAV

SEQ ID NO: 37854 - protein, 334 aa, unknown
  TnpB Polypeptide
LAYRKEIYEKEKKSVSKTDCNNYCNRELKKDYEWLKEIDKFALTNAIYNMNTAYQKFFKEHAGYPKFKSKHDNHKSYTTNFTNGNIAVDFETGKIKLPKLKAVKARLHREYSGQIKSATVSHVSSGKYYVSILVETEHKELAHTNHNIGIDLGIKDLCITSDGKVYENLKIIKKYEKQLVKLQRQLSHKGKRSKNYYKTKKKIALCHEKIRNIRKDYLHKVSHEIISENQVIVSENLQIKNMVKNHHLAKAISDVSWYELTRQLEYKAKWNGRKYIKIDTFYASSQLCSVCGYQNPDTKDLSVRTWICPKCGAEHDRDINAAKNILTEGLRQIA

SEQ ID NO: 37855 - protein, 379 aa, unknown
  TnpB Polypeptide
LYIQRQNYLEGNPYIKEYDMAKLLREQKNSDYYSLPSTPANYVVKQLDWIYKSYFYLSKLKKEGKYNKKVKLPYYKDKVKGRNIATFYKQNLLKRTYIKEGLIHLSKTNIKFKSKIPFEQIQEVKVVPKNECYEIQVIYKVEEEKQIVSENYAALDLGLNNLATIVTNISSPMIIIGRPLKSINNHWNKRKAKLQSKLSKGVRTSKQIRNITNKRNRRINNYLHQTSKTLVNELRKLSISKVVIGSNKGWKDGINLGKKTNQNFVQIPHERFIHMISYKCKLTGIEVIVKEESYTSKCSFLDNETIEKHDIYAGKRIKKGLFRSSNNILINADVNAAYNIMKKHLEIEISSLDSVQVCSMPKVLKVNYGLNRKRLSNKF

SEQ ID NO: 37856 - protein, 408 aa, unknown
  TnpB Polypeptide
VLKSLKVRLYPSQEQEKMMYKTSGCCRFVYNYFLACAKENKNFNYNNYSKKLTALKKDENYSFLNEVPSQPLQQSLLHLNNAFSRFFSKQASFPVFKKKFVNDRFTYPDGVKLNPSFTNFFLPKIGYMKFKTSKKYLKLLKTHKFKSCTVKLEAGKWYVSILVEDNTVPQPLVSINKTVGIDLGLKKYLVMSTGYSISAPNILNKLKEIDRLRSYLSKKVKGSNAAKKLQTKIQRKQKYLNDLKEDFINKLVNYLIKNHDCIILEDLNIRNMIKKLGSWKSSFNRLMTMISMYKFRQKLQYKAKIAGKYCVAVNPAYTSQMCSACGNLDKRNRKSQSIFECTRCGMSANADYNAAINIHNVGLKTLLAAGHAVKSACKKANLLAISRVPLALVLKGIYTFQGVGGCQN

SEQ ID NO: 37857 - protein, 506 aa, unknown
  TnpB Polypeptide
MTKSTVSRTYPRAPYAAFSKNGEPLDLNDVLNGIRADAELVSHYALQEMTEQNLALVTHFDRFNPAEAGRQMGLFLPDEVKGRFRSGASRLEKMFQEQVVTNLRSWAARARVVNQTYSGYVSVGWRRTANDSKPKSLQPRLALSATDRGYHKNFHITPERISLDMVVQGRWVTLHFSTPPQLLEHGCEPGVPGIWIDSRNRVVFGFHGKTDPGRPNFSERYVIGVDVGVTNPAAYVVWDKKNKEIVEKSLLGQRARSLSNKIKRTQTQIASLQRKNRAEEAVPHRKHLSNRRHELSIIVAQEITDAAWRYGNAIVSFEDLSHIRNTMMFGCWFRGEVHRRTQDMVEADGGRVMKVNAAYTSKRCHVCQTNLDMSDYSSPVCHSCRVTHHRDVNAAANIAQRVNLEKAYQTRKRHATKTKRIRRSKCRIKPLKHPGTKNRPTPKAPQNQPKTHTTSSGKKEVSKRMCPADSRVSAVDHIEWFQTTSGTTVPKGSQATSMVDVVYPKE

SEQ ID NO: 37858 - protein, 432 aa, Thermococcus sp.
MKRAVTVKLQPSKEQEKTLKKLVLINFKVWNRVNYLRRQEFFEDKPVDFNKTEKVVYEEFKKEIGSATVQQIVRKNAEAWRSFFSLIRAKRNGELPDWLKPKPPNYIRERGLIVLRNDQYRIENNKLVLKGLGKFKELEVQFKGRIHLKGKQGRLEITYDPIKRKWYAHVSYTVGEKLINGEWVKLPRQLLGDLSAGIDLGVNNLMAVYVGNGESFLVNGRPLKSITFYWRKRIADYQSKLNKSGAKKSRKLKRMHERVKLQAKHYINTAVRQTVEGLYHLGVSRIVVGYPKGIARNSDKGRRQNFILSHVWRFNYVIKHLKEVAGEYGILVVVVGEAFTSKVCPVCGRPHEGARFVRGLYSCPAMGLVFNSDLVGAFNILKKVVKTITPSLSGLTAGRGNWGKTLPEGFSEPPSKGVMRITPQTSPPLAGG

SEQ ID NO: 37859 - protein, 445 aa, Thermococcus sp.
MKRSVTIKLQPSKTQEKILFELAQATAVIWNKLNYQRLKQFKEFGKIDFNGTEKKAYHEFKNWTGGSTVQQLARKNAESWRSFFILNKKKKSGELPEWFKPKPPGFVREENGKKIFIIPIRNDQYRIDGNVIELRRLGKFGRLRIQFKGRIYLKGKQGRLEITYDAVKRKWYAHVSFTVEEKLINGKWVKIPRQPLGNLSAGIDLGVNNLMAVYVENGESFLVNGRPLKSIAFYWRRRIADYQSKLNKSGAKKSKKLKRMHEKAKLQAKHYINTAVRQTVERLYCLGVSRIIVGYPKGIARNSDNGKKQNFLLSHVWRFNTVIKRLMEVAEEYGIQVLLVNEAFTSQFCPLCGQRHPNGRIFRGLFKCRGEGVVLNADLVGAFNILRKVVKTITPRLPGLTGGRGNWGKTLPEGFSEPPSKGVMRITPQTSSPLVWGFLDGNPVL

SEQ ID NO: 37860 - protein, 437 aa, Thermococcus sp.
MKRSVTIKLQPSKEQEKILSELAQATAVIWNKLNYQRLKQFKEFGKIDFNGTEKEAYQEFKNWIGGSTVQQLARKNAESWRSFFSLNKKKKSGELSEWFRPKPPGFIGEENGKKLFIIPLRNDQYWIDGNVVELRRLGKFGRLRIQFKGKIHLKGKQGRLEITYDEVKRKWYAKISLTVEEKLIGDEWVEVPRQPLGDLSAGIDLGVNNLMAVYVENGESFLVNGRPLKSIAFYWRRRIADYQSKLNKSGAKKSKKLKRMHEKAKLQAKHYINTVVRQTVERLYHLGVSRIVVGYPKGIARNSERGKKQNFILSHVWRFNTVIQRLKEVAEEYGIQVLLVNEAFTSQSCPLCGQRHENARFVRGLFKCHGEGVVMNADLVGAFNILKKAVRTITPSLPALAGGRGNWGETVPEGFSEPSSKGVMRITPQTSSPLVWG

SEQ ID NO: 37861 - protein, 384 aa, Thermoplasmatales sp.
MFRTIKLKLPYDPSLLETGRQFREACQIVLDYGFSEKTFNRNRLNRGTYSEVRGKIPTLPSALVQTARDTASESLKQTKFKTPIHRKSITIRYDRRTFKFYPDTRILSLATVKGRLSFPVANSPLIDKYRGQYTNAQVVIDEHRKRMFMMVQVEVDNKVENKVVNEDVKVIGIDRGIRNIAVLSDNTFFNSKHLREVKGRYRYNKKRLQHSGTRSAHRKLKNLSGRERRFVLDTNHTISKQIVNLPHDVFALEDLNASSMRNGNGRRFNNKLGSWSPFQLQRFMEYKAEDLNKTVVYIDPRFTSQTCSRCGYRDRNNRHGSVFHCKRCNLEIHADLNASRNIEVLGKSEYFRLLSTSQSLRFSETVPTGMAEDSSKPQPSGWSS

SEQ ID NO: 37862 - protein, 382 aa, Escherichia sp.
MRRFAGACRFVFNRALARQNENHEAGNKYIPYGKMASWLVEWKNATETQWLKDSPSQPLQQSLKDLERAYKNFFQNRAAFPRFKKRGQNDAFRYPQGVKLDQENSRIFLPKLGWMRYRNSRQVTGVVKNVTVSQSCGKWYISIQTESEVSTPVHPSASMVGLDAGVAKLATLSDGTVFEPVNSFQKNQKTLARLQRQLSRRVKFSNNWQKQKRKIQRLHSRIANIRRDYLHKVTTTVSKNHAMIVIEDLKVSNMSKSAAGTVSQPGRNVRAKSGLNRSILDQGWYEMRRQLEYKQLWRGGQVLAVPPAYTSQRCACCGHTAKENRLSQSKFRCQVCGYTANADVNGARNILAAGHAVLACGEMVQSGRSLKQEPTEMIQATA

SEQ ID NO: 37863 - protein, 543 aa, Sanguibacter sp.
VAAVSDVLREWGGVKVIAAPGGTATTTRLRTSLADDAVLTAVAEHVSKIRRRDLAERTRAPGDPVSKARRKREMTPAASSRWAGTIMRGNDAQYQLARRAQRADMRSLRAGIAAITARLAQPVVTAGSGAPAPVERRRVKGYRSLAERYGKQERLQVLQGRLVRVAVDYAAGHVHVVAGGKRLLKVRANLDLAGLSVEQWREQWTASRDRIEANGGRDEPFGNLTLTVTPAGEVSIRLPRPLEHLANAPRGRYTLSGTASFAHRGGEWAAQITTPGAVAYTLARKAGRDGWYLTASWTTTAPQPPADDVLTGGALGVDLNADHLAVRRLDAHGNPVGAPIRIDLDVTGTSARRDAQVRHAITQLLHLAARYKVPAIAVEDLNFADARETGREMMGRGARGKLFRRTVAGIPTAVFRDRLAAMAATAGVTVFAVNPAYTSQWGGQHWRKPYGITRHEAAATVIGRRAQGHKARRRVGVTRARPEDRTARATTQAVPAPVGITDGHHRNGTGATKAPGPHRSSTRPPGRATVTPAQLTNNGQLLP

SEQ ID NO: 37864 - protein, 376 aa, unknown
  TnpB Polypeptide
MQTTYKFRLYPKKEDEKKLLSVLEICRLLYNSFLAIWNDSEKIPSRYKLQAMLPAMKGEHEGLKRVNSKTLQMVLFMLYNNLKALRELKKKGRKVGKLRYKKYGQFKSFILSQSGFKVIKTGKRLDRLYISKVGDIPIRIHREIEGKIKQVIVKRYKSGDWYALISVDKEVPLVTKAIEKVIGLDMGIKFFLSDSDGRQIENPKFYKKTLERIKIAQRKLSRKKKGSNNCKKQILRLAKLHQRLTNQRDDFLHKLSRFYVDNYDLIAVEDLNIKGMSKNHHLAQSILDASWSKFFKMLESKAEIAGSIVPKVNPRGTSKEHKYGTGIDRDYNASINILERGLLGQGLPFVPSEVEPLRELMPISASSIVEAGSPLL

SEQ ID NO: 37865 - protein, 360 aa, unknown
  TnpB Polypeptide
MKLTLQIKLLANEIQAEHLKNTLKEANAACNYISDMMWKNRVWNQFKTHTLVYYNVRERFNLSAQMVVRCIGKTTDAYKLDHKKKRKFKTLGSIAYDSRILSYKKGNIASLWTTDGRQKIPFVCHNPKYLPYVKGEADLVFKKGKWFLFQTVDVPENNIKDVEDFLGIDFGIINIATTSDGVITSGKTLNQYREKRQRIRSSIQAKGTRSARRLLQRLSGKEKKTASIVNHTIAKHIVKTAKDSNRGIVLEKLKGIRQNGNKKGKTFRSRLSKWSFYQLKEYIAYKAKMLGIPVVFVDPRYSSQTCSQCYRIGSRKGESFKCSCGYFEHADKNAARNIRTLGLLVNQPEKSTMFCMLRHS

SEQ ID NO: 37866 - protein, 409 aa, Euryarchaeota sp.
MPAARQVSIRSVSLPLHLPPLLRDALLDVRSAVNSLVPDWRAHPWESRFDATKRTYAWTRAHYPHLASGWAVCIANETSATLNSWDRQLRRAKRLDVRKWQRLRHQLPRRIRLKVSLHAELYRLRGRRLDITLHRDRHLLIDLSRIPHPLFERYGAASNWKFGLTVTDRYLVFHFRVPQTGTLAPNSVGVDVNMPSADFVTSDAQVGSVDLRPITAIQGSMARKRHSVQRRIPKDLRLQRRVLRRYRGRERRRVEPLLHRAANEFLAKAGGRNIVLEDLSKTQEELMRTTRGRDARRRLSAWTQGRFQRFVEYKARTQVVHVDPRGTSSECPRCGGRLDHPEWRRSVCVNCQGDWQRDRAAATSILSRGLVTLWGAAPPPKALDALLELSRWGSGTDFTDRRGRETKRS

SEQ ID NO: 37867 - protein, 353 aa, Acinetobacter sp.
MKTLKLRIKDSKHCKVLSELASEVNCVWNYVNDLSFKHLKRKGEFLSAYDIDKYTKGTSKLCNLHSQTIQAVNEEYVTRRKQFKKAKLKWRVSNKKSAKCSLGWIPFKKAAIKYADGYVQYGKHQFKLWDSYGLSQYKIKTGSFVEDARGRWYVCLVVDTPKQNKSTATKAVGIDLGLKDLATCSDGTVIGNPQYYRQYEQQLGIAQRANKQKRVRAINAKIANCRKDHLHKASTQLVKENALIAVGNLSAEKLVKNKMAKSTLDAGFAAFRTMLRYKCEYAGVLFEEVNESFTTQTCSCCGEITASSPKGRAGLGIRVWECENCLSVHQRDLNSAKNILALGHKRLAVEIPT

SEQ ID NO: 37868 - protein, 426 aa, Natronomonas sp.
MDYSPRFRLLPTSRQRELLGWQRDTVRQVYNHALYRLDQLPERADQTVRQRVWSVRDELPDWKTKWEEWSSVYSTVLQAAVERIYHSITGLAQQRDNGHKIGDLNWKKPREFQSFTYRQRGFELDNKSGPEGRGLLTLKKVRGKTLEIPIRIHRDIDPDDIKHVTVKQEATGAWYTSFSIDRDEPEKPDPEDIDPEDTVGLDLGVLNFIHDSDGRSINRLGLSDDRERLEREHRSLSRKEYESNNWEKQRQRVAEVHMDMRNKKRDYKHKLAHAYTTEYDAVFVEDLDVKPMLEDDGNARNKAEVGWRDFIRILKHHGRKHGCHVVEVEPAGTTKECASCGVETAKPLWVREHSCPACGFELGRDFNASLNVLSRGLAKLGVGHSEATTPAETATAVDSVSVSASRVVESGSPCLKEPAKQASRQG

SEQ ID NO: 37869 - protein, 443 aa, Natronomonas sp.
LFDWLAAQPPLWNQITYRRRQAYFSDDGDVWDADYTDLYDEYAPIIGKATCQQIARKNSEAWRSHFRLLEQYHDNSNTTVTEKPSPPGYWGNRKEGYELHGLVRNDLYTLDWDEDRSTLEFGVGDVLKDRYDFEHNERVTLEIKGNPQWNGDDSRLELIYDDHADQLRVQHPVRIQPDKIREQREDAFTHTLNTENTTQAAAIDVGANNTLAVVTERGDTAVYHARPEFARFQRYSERIATLQSGLPADKYTSSLIQRLYDTRSRSRDHSRDAAVKHVAEWLLERNVDTVYVGDLTDVLDTHWSTDVNEKTHNFWSHRQLLNRIELTLGDVGICVAEVTEADSSSECPECGSSDITRRGDSFRCHDCELDAHSDVAGAWNILQSEAGPMARPAALSAERDRDAPQEGAYWQWNEHDWIPADFGEQSRSVDQPSFSKPASSQPG

SEQ ID NO: 37870 - protein, 420 aa, Natronomonas sp.
MSNQGVTRTLKASISNHSQVCDDLDSHGFAASKLWNVGRWTISRVWDAIGHIPDADELCSYLKSHERYADLHSQSSQRVLQELGEAFVSWYEQDDPDANPPGYRKHGDDHPRSTVTWKNQGFKLDTQYNRVRLSKGTNMKESRYAADYILCEYTLQTDEQTLNAVESVQTVRAVWTDEQWELHFVCKMRVETPETPGEKTAGVDLGICNTAAISVGDETLLYPGNALKEDAHYFRQQEYETAGENGPSDHAEWARQKKSRRQAHFLHAVSKDIVEQCAGRNVGTIAVGHPKNIREDEDWGRHGNKRLHDWAFETLLSHLEYKAQERGIDVERVDEAGLKTSKTCCECGTEADSNRVERGLYVCANCELVANSDLNAAENMRATVTPNPTQDRSNGCLAQPSVRLFDKSTGRVAPQEQVVP

SEQ ID NO: 37871 - protein, 369 aa, unknown
  TnpB Polypeptide
MKTEKYEFYHQSNVIQIGNLLDDLHSVHVHLLLLQRRYYLIYGKYASFARICRHITKLKARTKPHWNQLPSQVIQQVAKRIHLGYEKFFDYLKDKKRGKSVRKVGRPQIKPNHKYNSLTFTQAGFKIEGNRIYITCLKKSFTFWKHRDWTSTIKTVTIKRDTVGDYSLYITCEDCEPSEKRPLTGNVAGADFGMKTFLTLSDGTKIESPEFYKQGLNAIRSANKALSRKQKGSHAWYRAKRHLAGVHKEIASRRRDWFFKLALRLVRKYDTIAIETLNLEGMKKLWGRKISDLALGEFAMILQWTCAKYGKTFLTAGRWEATTKPCHRCGHHNENLSLDDRQWICSECDSHHDRDINAAINILQAGVPA

SEQ ID NO: 37872 - protein, 516 aa, unknown
  TnpB Polypeptide
MSKNKKEDEKTYRTIQFVVKSGHPLNEYFMDMMYKSNNLYNATNFHLRQLWTALKVEEGKSIHPLQQEVVDLFKSTIPKVNKNNTEKFEKLATKDILEAKVFDSRSKRKVTRFNMPTRDNSFCSYELMDAVFKTSNNKDYKSLPSHVNQGVMKQVYSDWSSFIEGAKEYKLNPSKFKGRPKPPRYKTKGATNSVIFSNQVCKIKDGKYLRFPKTKEVFNLSKHLLQRIDNAKLVQVRVQKFYDDVKLEVVLDCSKEAKPLIKKEDIKNVMAIDLGVNNLATCVSNNGMKPIIINGRALKSINQYYNKLRAKLYSDLRLNKNPNEGSFTSKRLEYIDMKRHFKVKDFLHKASKQVVDLALCNNIDKVIVGYNSSWKEDVEMRKDNKQTFINIPFSTFLDMLEYKLNAEGIHFEKFEESYTSKASFLDNDPIPTYGDKNIPKFSGKRVKRGLYISKNGIAINSDVNGACNILRKHFKEDIEISHKILSNVRKINIANGSKKIKSTLDILFNKKKLSLT

SEQ ID NO: 37873 - protein, 415 aa, unknown
  TnpB Polypeptide
MRSQKIRLKLTKEQERIAWWYSKVSRNYWNLLVDIDKRNNKGEFDEILSKNGNESFYSNFHGRIIYKLNQSDFMNLAKIVVGKSSEENSNEWSWYHQPNQAFIYSFVARELVAIRMQNKGRLNFRSITKIQPSFNVRCDATYNNRGGNRVSRIYLKDNGKLQIPTIGEVRFGSTRADFDLSCKKQVAKVSFDGKYWYLTYVEDVEVTVSELPDYTDGIGVDLGITPLATMSDGTIVPNIKTFRRFRILNKRLKRLQRKLSRKYLINKCNKHNKTKNIIKLERQIKLIYRSIKNIRINHIRKFVSDLVKKQPQYIAIEDLNVKGMLKNKYLSKDIVNCSFYTIREHLIRKAKERRIVVRLVDRFYPSSKTCSNCGSYKVDLKLSQRVYQCEHCKMQIDRDFNASLNIAQTDRYTLA

SEQ ID NO: 37874 - protein, 408 aa, Halococcus sp.
MDLTLRFRAYPDDPTASEAWRHIDIHRQIRNHAVRDYYHAEWNDRPSAYDQHSKLTDWKREWPTFAEVSAHAAQQTVSQIHRNLTVLKEHRQNGRKVGRLKWQGAGDFRSVAYQSEGYDVDHNTGRDRYATLHLSKIGDIPIRTHRNLPETDAIKRVALKKETTGEWFATFVIEADEPEKPDPKEIDRSDCVGVDLGILSYIHTSDDCSVEPLALSDEYDRYAREQRSLDRKEHGSANWEKQRRAVATARRHIKRKVLDFQHKLSSWLVTEYEVVCVEDLDVKPMLETSQSAKNKQDAAWSQFLSLLEYKADLHGTHIVSVDPRNTTKECNRCGVKTDKPLWVREHSCPACGHEEDRGLNAAKNILDRGLEQIGAGCSESTPVQTALPAFTRVRVDAKRVVEAGSPAA

SEQ ID NO: 37875 - protein, 374 aa, unknown
  TnpB Polypeptide
VREMKGYSLRLFPTRSQEAKLWQSAGVARWVWNWGLNFNQDLYAKEKRILAEYDLKKEFTKVRNSGEFPWLKDVSRQVANNALIDLGQAYKNFYRGLKKGQSVGLPRFKSRVKSIPSFCLNSDRVYDDGKGALQLEKIGHVRFKSDLNLSGVRLWNTRIKFLRGKWILTFALENESRKPKLSEHSMGIDVGVKSLAVVSCGGRKRRFKNINRSHKVRRLEKQLKHQQRALARKEKGSKNRKKALMAVQNIYGKLKNVRHDYTHKVTTKIIRMLPKVIILEDLNVHGMMKNKHLAKRIAEQNFYKFRSFIEYKATELGIEVRLADRFYPSSKTCSCCGYVLSELKLSDRVYKCPECGLELDRDFNAARNLEKLAV

SEQ ID NO: 37876 - protein, 255 aa, Symploca sp.
MLKVLVLECKAVVQKTQVIAISEAIRTSQFVRNKVLRYWMDHRGIGKKELYQYNTQLRAEYSFVKELNSHACQASVENVERAINRFFDNCKKGKPGKKGYPRFKKHSRSVEYKQSGWKLHPTKRRITFTDKKSIGEVKLLGKWDIHTFDKKLIKRVRIVRRADGFYVQFCVKVDNTQLAPKTNAKVGIDVGLQYFYSDSNGNHEENPRFLRKAEKDIKRSQRNIYKKTKGSSGRRKARGVYARKHLRVTRRAIRS

SEQ ID NO: 37877 - protein, 367 aa, Blautia sp.
MLKAYKYRIYPNMEQRVQIAKTFGCCRFVYNRTLAYRKEMYEKEKKSVSKTDCNNYCNRELKKENEWLKEVDKFALTNAIYNMDSAYQKFFKEHAGYPKFKSKHDSHRSYTTNFTNGNIAADFERNKVKLPKLKEVKAKLHRNFSGQIKSAAVSQVPSGKYYVSLLVETEHEELQHTSHSIGLDLGIKDLCITSAGKKYINPQIIRKHEKKLIKLQRKLAHKEKRSQNYYKIRKKIALCHEKITNTRKDYLHKISHELISENQVIVSEDLQIKNMVKNHHLAKSISDVSWYELTRQLEYKAKWNGREYVKTDTFYASSQLCSACGYQNTETKDLSVREWICPVCGTKHDRDINAAKNILAEGLRKTA

SEQ ID NO: 37878 - protein, 419 aa, Nostoc sp.
MLTMNYRYRIYPNITQKQSLFEWMDICRVAYNYGLREIKDWCNSRKCMVDRCSISHEYIMAADLSFPSEVKQLNALPNAKKVFPRLTQVPSQVLQQAIKQLHRAWEGFQKIGHGFPRFKKFGQFKSLLFPQFKQNPVQGLHIALPKLGLIPINLHRPIPNGFVVKQVRIINKADIWYASINIQCNVNVPDPMPHGHPIGVDVGIEKFLATSDGVRVISPKFLKVMQSKLKLLQRRLSRKNKRSLNYEKQRIKVARLHHTIDNTRKDFHFKQAHALCDAGDMVFMEDLDYRTLNQGILGKQMLLSGFGQFRTITKYVCWKRGKFFGEVSARGTSLECPECGAEVRKELSVRVHHCRFCGYKTDRDVASGQVIRNRGIALISTAGHVGIESACADGLPGVEETQSRQVSKPRKGKTKKSKK

SEQ ID NO: 37879 - protein, 344 aa, Enterococcus sp.
LALWNEEYSKNGKGLTYNSCSAMLPQMKKNEATSWLKEVDSIALQSSVKNLSDSFSRFFKKQNRRPQFKSKKNPVQSYTTKNVNKSITIIENIIKLPKLGQVKFAKSRELNGRILNAIIRKNPSGKFFVSILCEEEIPDLPETGLEVGIELGITDFAILSNGQKIDNNRFTSKMEKTLKREQRKLSRRALNAKKAGKELLEAKNYQKQKKKVARLHEKVINQRVDFLNKLSTEIVKNHDIICIEDLSTKGMLKNHKLAKNISDVSWSSFVAKLQYKAEWYGRIIIKVDPWFPSSQLCSVCGHKDGKKSLSIREWSCPVCHTHHDRDINASKNILAEGLRLQALA

SEQ ID NO: 37880 - protein, 461 aa, Streptomyces sp.
MIRHRLSLPIGTKGAKKAPGGYRTRQEWHAKSRRLRVLEDRLAAAQADAAAGRVRVVRGGKRLARSRHNLEAARLTEAEWRARWEAERWFCQADGEAGKRYGNDTIRVSPDGEVSIKLPTPLKHLANAPRGRYALPVRVRFAHRGGKWADRVEANGAVAYRIHYDVARGRWYLTASWQIPVAPTVLLATALADGVIGVDMNADHLAAWRLDPHGNPVGHPRRFPYDLTGSAGYRDAQVRHALTRLLHWAQTCRVRAIAVEDLDFAAEKTREKHGRKRRFRQLVSGMPTSRLRARLTSMAVATGIAVIAVDPAYTSRWGAQHWQEPLTSPTRKTTRHDAAAVAIGRRAQGHPIRRRTAPPPHDRWGLPCSNEVESLGKIVQGIGPSRPDQAPSGVRNPATASPDHGPDPRRPDAERTRATRASNTVRDVRLSTSPGNRTHSRSVLRNGSSTQGSSETLSAPI

SEQ ID NO: 37881 - protein, 408 aa, unknown
  TnpB Polypeptide
MVTKSWFSAKQVTVHNKNSQNNYLQTFMPSHAECLASDAVITKVRRIRIYPTQQQKKLFTQWFGVGRKVYNTCVNHLNKKDIEIKGWMKMSTLVLHSLTEDYIKSVPCQIKNMAVKESYTSWRTNCKKTKKTSKQFKLRYKSRKSPIQSCYIPKQAVSENGIYHTISGKLKFSKKEWLKNDICDCRLINDHGRWYISVPQKITTMPTENQGGIVALDPGVRNFLTYFSEDGQFGWLGIHAFDRILNLNLKRDKLLSRLSLTKDKKKKGKLKRTLNRTYHRIQDLVDELHWQCINYLVHNFYVIVLPPFEVKGMTKKGRKLRKSVIRSMLSLRFFDFKERLKQKCKECGVLYIEQNESYTSKTNSFTGELMNNLGSKEWFVYDGIKVHRDLNGARNILIRAMRDSSAAG

SEQ ID NO: 37882 - protein, 396 aa, Sulfolobus sp.
MDSPVFKYFFVKISLMARRVKAIRATVSMKIALSDSLLVLVNNYVKALRFTLFWLKENVPNPNEKGILGKVHEELYEKLREEYNLPSKVAEDCYRDALSVYKGWYNNPRRGRFPRVYKPVVWLTPKASYNVDFEAMTVRIASVGELPILGYPRNLKDYMSWRMREARLVIRNDKVFLKVVFEKKKESVEPKESVAVDINMNEIVVGKDDKNYVRIPTRLYEVHHWKSLAERLQKKYPKRWKENKRILHRIRSFHLKAKKVMEDFARKVGKWVVEIAEDFGANVIKLESLKNLIKNVSKLPKEFHDKFYLMQYRRLQYWIEWQAKKHGILVQYVNPSYSSVSCPKCGRKMREVSHRWFRCSCGYENDRDVIAIVNLNRRGSLTLSTAPQMRDVVPNR

SEQ ID NO: 37883 - protein, 400 aa, Sulfolobus sp.
MDSLVFKYFFAKISLMARRVKAIRATVSMKIAVSDSLLALVNNYVKALRFTLFWLKENVPNPNEKGVISKVHEELYEKLREEYNLPSKVAEDCYREALATYKGWYNNPKKGRFPRVYKPTVWLTPKASYNVDFDKMIVRIASVGELPILGYPRNLEEYTSWRMREARLVIKDGKAFLKVVFEKEEEKVEPKESVAVDINMAEIVVGKDDEHYVRIPTRLDEIHQWKSLAENLQKKYPRRWRENKRILYRVRSFHLKAKRIMEDYARKVGKWVVEIAEDFGANVIKLESLKNLVKNVDKLPKEFRDKLYLMQYRRIQYWIEWQAKKHGILVQYVNPSYSSVSCPKCGKRMEEKGYRWFRCNCGYENDRDVIAIVNLNRRGSLTLSTAHQMRDVSPNRWWER

SEQ ID NO: 37884 - protein, 371 aa, unknown
  TnpB Polypeptide
MLVLRAYKTRLDINRRQASQLWQCCGAARWCFNWGLAAMLKAHDEGRKTSAYAEKKRLNAIKDDIAPWLRDVPYTVLQGAFDNLGTAYQNFFRRCKNGDAKKGFPKFKSRKNPVQSFNLRGVKATDTEIRAPRLGWLRLKEHGYLPRSDQQDTRILSATLSRRAGEWYVSLQVKQDVPDPESPSGPPLGIDLGIKTMAYCSDGRAFGNPKATYEAKRKMARLSRELSRRKRGGENWKATKVKIAKQHARIADIRRHHQHEVSAYATKKSGARTVVVEDLNVSGMLKNHHLARAVSDVGMYELRRQITYKAEWNGVEVVKASTWYPSSKTCSNCGVVRDDLTLADRLYVCPECGATMDRDLNAAMNLAALAH

SEQ ID NO: 37885 - protein, 460 aa, Richelia sp.
MKTTYQYQFYPNTNQKLELNHWLRICRYWYNRQLGDRFDWWQMNRTGIDACPLISSIATPREKPNYYNQKALLPSLKKDLVKIFHSGELLELKQVDSTVLQDVSKRVDKAFERFIIGDSKGSKSGKPRFKTEADYRTMTFATASDDWIKLVRNDWLYIRLPKLGVVKVRMHRPIPDGFTVKQASVTRKADGWFIQLMLEDPSVPKFISDKLTPDWGNSIGLDAVLHEDVYLATSEGDKLPSLKPLRKNQFKLARISIKRNKRKRGSRARRKLAKREARLHQRIARSRQDFQYKTAHKLARTGAKFFFYEDLNLQGLTKRNKIKQDDDGTYLPNGQSTKSGLNKSWLDAAFGQFFKTLDYIAVKAGAVVVSQKPAYTSMVLSYRNEIIFTDCSMRDYWDEQNSLMVDRDINAAINLKKLGLDIFPSIKRRSGNLSVVGTIDNSITQEILHTLHRAAKTPTS

SEQ ID NO: 37886 - protein, 398 aa, unknown
  TnpB Polypeptide
MKRRWTFRAYPTPAQAEHLARTFGCCRLVYNGMLAARTVAFQRGERLTYAGSDKKLTALKRDPELSFLNEVSAVPLQQALRHLQTAFVNFFTRRSAYPTFKKKGRTRDRATYQRNAFRFNCASQRLTLAKLGLLELRLSRLVPSDPSTVTVSRHPSGRYYVSMVVEVKAPVARVKTGQSIGIDFGLSRLATLSNGEPVPNPKHLFRRTALLARAQRRLSRKQKGSNRRREQARRVGRLHEKIADARRDSLHKLSTMLVKRFDSICVEDLHLRGLVQNHSLARSLSDASIGTALRMIEAKAEAAGVSVVKIDRWFPSSKQCSACGHLLDALPLGVRRWICPRCGTDHDRDVNAARNILAVGQTVSARGAGVRTARTSVRKATRRRSVNHSRIKHAHVSS

SEQ ID NO: 37887 - protein, 653 aa, Asgard sp.
MNSVSVQEVQKPEAIVIRTYHMGVKFHGSKEDKRIQEIEANQRIKGLQVQQEDIAFNRLAKKTAMDLARKYPRAEAKRVPSEISKTTKNSRNITKSAYYWLFVAAKGAYDREKKVADFFNYLLQNQDQALEWAIFGRSPRAELYFTKKWKASRLYVINLINRTRRQIDKFCPPQLKFNTKLPLLTQKEIEGAIQKCNKYMSMQLTTPDMTNQAQTFVNTLRLLAINTSIVAPHLTAWNNLEHTSRWRSIRLLNKTIAEAIGKPHRVLFSALRTIIVFALFPDIGKTAIKLIKSTRPEEVVNPPFHKKKKGRIPIILLMKDRLVVMRPGNSEHMTFLAKANGEFDIGFLLKDHPRITATLVISKKVLRYLANGARIRVLYIRSSPAPSYKVRVAVVLEGPVEVFLSTKLTKQFAKRMRPPKEDEIGLDVNRIGKHMLALSNGVKLAKEFDLLIEKYQELTKKTIPEMHHNLTMKGQKKKSNAYIKAKGELARIYQRKFRIKKEIFNMIPHFLASVMIKSKCKTFFVEDLEIDQRGRKGALAIAISSMPKNMQMIEKAVQLASNVLGYEVKLVKVDARGTSRKHNICGGTIERTLKRYDRAKCRKCGKTIDTHINSAKNVRDKGVELLRLKTHPSTHTRGMGSNQASESEQSAEV

SEQ ID NO: 37888 - protein, 443 aa, Actinopolymorpha sp.
MNVHRRNHMSATPILSLYSHRPNDTIMLVQLRYNYRVYPNAPQRRALAQAFGCARVVFNDGLRARQEAHAAGLAYLKDTDLQKQVITAAKQTPERAWLADVSSVVLVQSLRDLHAAYRNFFSSLTGKRKGPKVALPRLKSRKDRKQSIRLTANGFSLRPNGRLYVAKVGDLRVRWSRTLPSAPTSVTVTMDASGRYWCSFVVDADPDILPELDTDTGMDLGLNHFAVLADGRKVDSPKFLRRAEKKLKRMQKALSRKAKGSNNRDKARKKVARQHARVADRRRDWQHKLSTQIIRDNQAVFVETLSARGLGRTRLAKSVHDAGWARFVAMLEYKAVKHGRTFAKVDRAFPSSQVCSACGFRDGPKPLHVRAWTCENCGTMHDRDHNAAKNVLFEGRRIVAAGRAETQNAPPSAGKTRMPVPAQRVEAGTHQDPQMRVVGIQVL

SEQ ID NO: 37889 - protein, 363 aa, unknown
  TnpB Polypeptide
MNKGVKFRAYPTKEQQNLINQTFGCCRFVYNWGLAVRKDAYKANKRIGYVQTSAMLTQLKRLNEFAFLKTVDSAALQQSLRDLDRAFKNFFEKHARYPRFKSKRIHRQSYRTVSLNNNIRIEGKYIKLPKIGYVKIKQSMKVEHINNVTVEVTPTDKYFVILNVDFEPERRTNNGCAIGIDVGIKEFYSDSNGRVVTNPKYLENSVRKLVRAQRKLSRKKKGSNNYNKQRIRLAKVHEKIANQRNDFLQKQSTMLISENQTICIEDLDIGRMVHNHKFAKSISSASWGKFFMMLRYKAMWYGNDVIEVPTMYPSSQICSCCGYKNPVVKNLAIRRWECPKCHAIHDRDVNASINILRKGLSII

SEQ ID NO: 37890 - protein, 399 aa, Symploca sp.
VFIYEYKVNPKLPQIAAIDEAIRTSQFVRNKVLRYWMDHRGVGKAQMFRYNTLLRKQFKFVEQLNSHACQTAVERVLKAVNRFYDNCKKQIRGKKGYPKFKKHTRSLEYKVSGWKLSQDRKRITFTDKKGIGTLKLIGTRDLNFYQLEQIKRVRIVRRADGYYVQFAVKLDPRDTVKPLTPSQKAVGIDVGIKYFLADSQENIEPNPQFYHQGEKHLNRLNRRKSKKYRKGKPQSQNYHKARERYALKHLKVSRQREEFVKRVALRLIKSNDLVAYEDLNVQSMVKNRHLAKSISDAGWSRFRQWLDYFGYKYGKVTVAVAPHNTSQNCSNCGEKVQKSLSNRTHVCRECGFVKDRDVNAAINILQKGLSTVGHTGALKLGEFDPLASLEQSCGVTIGL

SEQ ID NO: 37891 - protein, 326 aa, unknown
  TnpB Polypeptide
VVVHPQYWRLDSDSVQIAVESDGRRCRRVTVEFKAHEHFSRYYDDPEWELCKELRFKVRRNSVLLYFAFQREKSEAYEPKGWVSVDINENSIAFLVNGEVYLLKTGISAITKDYFWKRRKIQSYYDGKYGRSSRAKRKRMRKLREKRRKKDWRYKVARLIVTEAYRRRYGIILEELTLRGVWSMLRHIKNKKLRLRIARAAFLGIIRAIKEYASLYGVPVVEVNPAYTSRLCPLHGCELKYDGNRTASCSVGGKVWHREVAGTFNIMKRGGAPIPDEPIVPVVIPREVWTRARNLNHALELARHEKPKAVKLAAKYERYIEALRKA

SEQ ID NO: 37892 - protein, 211 aa, unknown
  TnpB Polypeptide
  misc_feature (7)..(14): Xaa can be any naturally occurring amino acid
MITLEKXXXXXXXXSIEEKRLSRHGLKNSRKLEKLYKKRSLLLKNAREGLAREIVETLYDKGVGEIKIGYPNGIAQDKGNERNSNFWSYLAIIKRIKNVAEEYGIKVKLVDEENTSKTCSLCGEIHENGRIKRGLFKCPHTGKVINADLNGAINILHIPESVEDRGKWLKAQPVVYRLTNGAGWVTTSYEAMMMKAVNHKPMIRLEGTIAF

SEQ ID NO: 37893 - protein, 407 aa, unknown
  TnpB Polypeptide
MKVKRTEQIWIKPNKQLGDLCHISKNLYNESNYSIRQEFINNGKYISYNSLYPEKRSSENAIQLPAQTVQQILRNLEKNWLSFFRSIKEWKKHPEKYKSMPRLPGYKKKDGEHILFFTNQNCHIKNGLLKFPKKCNFMGVRTRIKNEDLQQVRILPRGVGYLVEIVYWKHVKPEELDGTRRLNIDPGLKNLVTLVNNIGQQPIVIKGNIPKSINQYFNKKYAKILHQFDMQGIKEAKRFYRLINKRNRKIKNFFHVVTKHIIDYCIKNNIGVIVIGHNPDQKQKINIGKKNNQKFVQLPFTMLTQQMQYKGEEVGIDVIIQEESHTSKCSVLDKEPIEHHDVYLGKRISRGLFRSAQGKIINADVQGGYNIGFKAFPNTFTQVEVDRIEDVGLHPLKHSFIKNKWTC

SEQ ID NO: 37894 - protein, 330 aa, unknown
  TnpB Polypeptide
LILAGISITILLQNEVHSQVLQNTLKRLDRSFKNFYNGFGYPRFQGRNRYNSFTYPQFGFSIEDGKLNLSKIGNIKIILHREIEGKIKTCTIKKDIDQWYVSFSCEIEKPVIPVEIKTETGIDVGLSSLITMSNGGQIEPPECLRKKEKKLIQEQKRLSRKKKQSGKRNKQRIIVAKVHRKIRNQRSDFAHKTSRKLVDSFDRIVFEDLQITNMMQNHHLAKSISDAGWYQLMCFTKSKAEYAGKVVELVNARNTSQNCSKCGNSVPKDLSKRVHSCPFCGLVLDRDHNAAINILNRSNSTVGTTGINARQGLLNRGSMQRDAQSSSGFG

SEQ ID NO: 37895 - protein, 575 aa, Halobacteriales sp.
VQLTEQFHIPDEHCEACDRLTTLVQKHTRRLLADEYWHDHHLNGISNHAGQSYTYIRDDNHDAFDGVEEYVYSRFKRCVYHRVTHVLDAHIDEYHAFQFVTNTVAERKIKRIGWHRLRNRLFDENSPYIEWGVLESVVEQLNDYYDTHGRFPDSYTDLVGRPIPNGTLPYAPDKGDYHIHELSVEDTALVVTLNAPESLSPDSHHDWTAHELHFPVYDRFREMLNNGEVKAPTLHASDHGYTLDVPVDIPETDCETVEGRVLSIDLGVKKQVTCVPVQQDDRLTQVAPPTFIDHPGKNKLFRLKSDADGINDRLAELRRHGNAHTDHFDHLLAEYRRTRRKERRLRQQIQHDVANELVWLAVDSDCEQIVFESLGQMESPDTDGAAAWSISSWARGELLDLVEYKAELFGIDVETVNPWGTSRYCPRCGEPGRTVKAPDDYTECRHGGHFHCPGCGYECDRDVVGAVNVGRKHLAEVKMEEANPAAYTEAGKHASFPSPQGARSAGVQSATDHLEQDSASGRQTQLPQFRAPSLTVKRREADTGGLHESLGRDTGLRRPSGSVTRHILASATDCG

SEQ ID NO: 37896 - protein, 348 aa, unknown
  TnpB Polypeptide
MITMNYRYRIYPNAAQQDTLFGWMEVSRSAYNYALREIKDWCNSRKCMIDRCSIWQEYIQPADLKFPSEVNQINALPDAKREFPRLGEPPSQVLQQTIKQLHRAWENFQERRFGFPRFKKYGQVKSLLFPQFKESPVTRLHIRLPKIGAIPINLHRPIPDGFMVKQVRIIKKADRWYASVNIQCDVSVPDPMPHGHPIGVDIGLEKFLTTSDGVLVKPPKFFKHLQSGLKVLQRRLSRKQKRSKNYEKQRIKVARCTRAFDNTRKDFHFKQAHALCDSADMVFMEDLDYRVSAKGMFGLHMLDGGFGQFRSLTKYVCWKRGKFFAEVDARGTSQECPECGAEVRKDLS

SEQ ID NO: 37897 - protein, 397 aa, unknown
  TnpB Polypeptide
MQLRYCYRLCPTPGQRAALARAFGCARVVFNDGLRARQAAFDEGRPYITDAELSARLTSSKADPERAWLGEVSAVVLQQALADLNAAYRNFFASVTGQRKGPRVAPPRFRSRKDHRQAIRFTRNARFAITPGGKLRLPKIGNVTVRWSRRLPSGPSSVTVIKDAAGRYFASFVVDVEPSTLPETAPVIGVDLGLTHFAVLSDGRKIASPRFLRRAELKLKHAQRVLSRKQKGSNNRDKARVKVARAHARVTDTRREFHHQLSTALIRENQAIAVEDLAVRALARTRMARSVHDAGWSAFVRMLEYKAQRYGRRFYRISRFEPTSQVCSTCGARDGPKPLHIRTWQCAECGAWLDRDVNAAVNVARAAGLAVTACGAQVRPGFVPAQRGEAGTHRGVA

SEQ ID NO: 37898 - protein, 345 aa, Kitasatospora sp.
LTRSRVAAERSPEVLTYRNFFDSVSGKRAGRPIGLPRFKSKRDGRQSLRFTRNGFRLRGNGKLNLAKIGDVRVKWSRALPADPSSVTVVLDAAGRYHASFVVDVEPGHLPEVDAEAGIDLGLTTYAVLSDGSVIDNPRFLRKAERKLKAAQRELSRKAKGSKNRAKARRKVAKAHAKVADTRMDWLHKQTTKLIGEAQAVYLEDLNVRGLAQGRLAKSVHDAGWATFRRLLEENAARYGRHVGIVPRAFPPSQICSECGHRDGPKPLHVREWACGACGVLHDRDLNAARNILAAGQADRLNAPGGPARPGVAIPRRARPVERGTRLGDPPRTGARATGAGGIPVQ

SEQ ID NO: 37899 - protein, 393 aa, Microcystis sp.
  misc_feature (254)..(299): Xaa can be any naturally occurring amino acid
MEKAYSFRFYPTPTQESLLRRTLGCVRLVYNKALHLRTQAWYERQERVGYVQTSSMLTDWKKQEELNFLNEVSCVPLQQGLRHLQTAFTNFFAGRTKYPNFKKKHQGGSAEFTKSAFKFKDKQIYLAKCTEPLPIRWSRQIPESCEPSTVTVRLHPSGRWHISIRFDDPTIKPLPVTDKAIGIDLGISSLVITSDGDKVSNPKHFKKHYRRLRKAQKNLSRKQKGSKNREKAKIKVARIHAQITDSRKDHLHKXXXXXXXXXXXXXXXXXXXXXXXXXXXXXXXXXXXXXXXXXXXXXXKCRWYGRNYIEIDRWFPSSKRCSNCGYIAEKMPLNIREWDCPDCGTHHDRDINASKNILAAGLAVSVCRATIRPEQSKSVKAGAKNPSGKQAET

SEQ ID NO: 37900 - protein, 383 aa, Proteobacteria sp.
MKRTVRLKLHPTVDQATALCETLAMVRDCFDTVAAYGWKQGMKNGVALHKATYYPLREKHPRVPAQLVCAARVKATEALASAFALKAKGRKAHCPRTKVGSIRYDARSHRILPGEASLASAAGRLKVVWTANSHAAAILAKAVEFDSSDLLYRDGTWWLHAVLTLPDEPFFPTGKGVGVDLGINRPAVTSGNEFLGEARWKEIEKRYFRLKRNLQAKGTASARRHLRRVRHRQQRFRRDCDHVLSRRIVDMAGNGSVIVLENLKGIRSTTKQRGKRQRRRHHGWSYEQLKAFLEYKAEAAGCRVETVDPRKTSQRCSKCGYTARSNRKNQSLFVCGACGFSLNADLNAARNIAWKYLAQGGMPALSGSPVNRPIVTHVEAKAS

SEQ ID NO: 37901 - protein, 432 aa, unknown
  TnpB Polypeptide
LLEAVKVALDPSPVQGRRLLSHAGAARFAYNAGLVHVKEAIGAGEKPEWHFFSIVNWWNASKNELAVDADGKPWWSENSKEAYCSGLRSLASALSNWSKSRKGDRKGRKVGFPKFKSKAGSVPRFAYTTGFKLIDGDPKALKLPRIGRVHCMENVAERVGDAKVLRITISQRAGRWYASLTVERDDKPVMNPPKGGAVGVDLGVKTLATLSDGTIIENPRYLKKSERKLKKAQQALSRKIKGSNRRAKAAAKVARIHARVANQRLDGLHKLTTWLTEKHSDISIEDLHVAGMVKNHHLAKAVSDAAFGEFRRQLEYKAARTGARLHVVDRWYASSKTCSRCGSVKAKLSLAERTYRCDSCGLALDRDLNAAINIQVAGSAPETLNAHGETVRRGGQTGRRARVSVKCEPSGGANRVRLGAGGRKGALQATVE

SEQ ID NO: 37902 - protein, 404 aa, unknown
  TnpB Polypeptide
MPEQEVYFRKACGVARHAYNWALARWKEARAKGERVKMKDLKAEYNQIKGEQFPWCYEVTKCAPEQAFVDLGQAFSNYWRMKKDQTQPKLKHPRKDGEEAGFPHFKSKKRDRLSFYLANDKFSVHGHTLHVPKLGDVNMTEELRFQGKIMSACVSYRAGWWFISIAVEVEHETPTHSGGTVGIDLGVKTLATLSDGEKFENQKHYRKSLGRIQGLSKGLSRKGEGSQNWWKQSKKLAKAHYRVACERSDVLHKMSTKVARTYALIGLEDLHTKGMLANHSLAQAVSDASFFEVKRQLLYKAEQYGSSVQLVDRWFPSSKTCHVCGWAKEDLTLADRVWVCEQCGAIHDRDLNAAIMVETEALRLVTDVPVVASSERKFACGAERSGSLCAESETVCCEAGTTVL

SEQ ID NO: 37903 - protein, 474 aa, unknown
  TnpB Polypeptide
VLNLRLVVSPADERVLVNSIEASRHIYNSTLGTALKRLENVRRDSDFASARAMPKGKPRNDAFRAVNDKHGFTKYALQKVAERDRNACWIGDHLGSHDTQQAAARAFTAVEQYAFGVRGRPRFKSVRRVRALEGKSNAAVLTYRDGAIRYRGLRLPVQLDGRRKEREWQQAALEHRIKYCRVLWKTVQGERRWYAQLVLEGKPPVKDKHKAAFAAAEGKVVGLDLGPSTIAIVAGEHAAHLRIAADVEQPWAAQRRLRRKLDRSRRAMNPQNFRLDGTIKPGPKVWRTSSRYRAVARELADVERVLAARRRTSHGRIANTVRAMGSEIKTEDVSHKAWQKCFGRSAKVRGAGLLQSLITRKAESAGGTVSLINTRATRLSQYCHMRDAYARKPLSQRVHRFPDGRCVQRDLYSAFLATCVHKDRLDTHQVNVIWPDVDSVLQRAVSSLDQLASVAREGGHDGVVGASRPQTPCA

SEQ ID NO: 37904 - protein, 429 aa, unknown
  TnpB Polypeptide
VAKKIKKKRNNFKLHKAVTHIKLDFANDGKLERLNEVGAGFMLLVQAYIDHIFDNALKTVSKFDKIPEIETKLSARYQRCAWQQAVGIMQSFFSNERENKPVLKNITIQGNANVIKLEQSETSEFDYWLKISTLEKGSPVFIPVRIYKYGAEILQSGKLCSGVTLNCKNGKWYAAFIVETEKKKEEKSGDIIGVDLGIKNLLTTAGEHFGQFSDKLVNLVKKNDEKRRRKQKQNVCLIKKDKPVIPLHNRKLESTIKNEIGRAINNFINSISETTTVVMERLSVSDMKFKSKAMNRVLKASKIGYALNRLKQKLDSKHIHYSTVAAAYTSQGCSKCGYVDKKNRPTQEKFFCKFCEHTENADVNASKNIAKRFGDDELNGLTDFRKVKSFLLERFFKRFPDARSASGGLELGFTLREISGQPLTVNQLT

SEQ ID NO: 37905 - protein, 223 aa, unknown
  TnpB Polypeptide
MSVFCYKYYIIDHGVNLKLPGRKERLYLSNVEADSVLKEVKIKPYYGRYILCLTLESENFAADNTDMPNICAIDFGVSNFAAVVCNDGSSMLYKGGAVLSECQWFHKKRAKAVSIITKGHEHMHASSRYLSALSRHHADFIKDQCHKISRSIINYCMEHHAGTLVLGENKRWKQDCDMGSQNNQNFVSMPTGLLKQMIIYKASDAGIKTIMPHHFIAQILFCL

SEQ ID NO: 37906 - protein, 320 aa, Okeania sp.
MYLTQKNKIRNLSSQEFKALRQLCRLSKNMYNVGLYSVRQFYFAEGGYLRYESNYHHCKNNENYQLLQTDIAQQTLKVVDRSFKSFFGLIQKAKEGLYRFEKIRIPKYLNQEGYFPLKIPRIIIKNGYFNIPMSRKFKAEYGAVKIPFPQRLVNKNLKEVRIIPRFNASFFEVEFITEEIPKSAVKSNNALAIDLGLDNLATCISNTGSSFILDGRKLKLINQWYNKENARLQSIKDKQSIKNLTQKQISITVNRNNKVRDYLNKAARYLINWCRDNNISDIVVGVNPGMKQNITHPHPLQGGEQEGWVSKICTNTTQYF

SEQ ID NO: 37907 - protein, 525 aa, Actinobacteria sp.
VAVRTRLKCLTSDDEKVLRLVGGHLGSLASKDLKARCRDGLSHSGEGWAVRKRELTPLSSSRWAGSITKASHDQWALARRCQLAHIQNLETGVRTIEDRLALPVGQKGTKKAPGGYRSQREWHAKSRRLRVLQDRLASVRADREAGLVHIVRGGKRLVRDRQHLEAAQLTESVWRGRWEAERWFCQADGESGKRYGNETIRISPDGEVSIRLPAPLAYLANAPHGRYVLACRVVFAHRGAEWADRVAADRAIAYRIHLDTGRERWYETASWQIPVTQTVPIEAALAHGVIGVDMNADHLAAWRLDGHGNPTGSPRRFFYDLSGTREHRDAQVRHALTRLLHWARACGVKAVAVEDLDFTTEKTREKHGRRKRFRRLISGMPTARLRARLASMADQTGIAVIAVDPAYTSRWGAQHWQKPLTTTTRKTTRHDAAAVAIGRRAQGHPIRRRTTPPPQHRSDAVGHRTVQAALGVSGREGTRPRILGPRTRSVGAGRGTNAGNQNAQHRPGRSAEHESWKQDSLPLSP

SEQ ID NO: 37908 - protein, 458 aa, unknown
  TnpB Polypeptide
MKTITCSNRIYYSELSSEEANALHQDIQLYHAMMHTAYHLLCLKSQGIPFPFENSLEKEMKRRFHTNDYFPLSAIQEAKQHLSNDFANHENQKKALKAQCKAIEKKIKEVEINILKIDRQLKELFRKTKQGKQTEADYLLEVQPLRPERKRYKNRRSHLIYGLNRRKQKLEALQRKMKFTCFGGKKLARARTTVYAGQHETWLKAYQSARNRTMMIQGRRQGKFSNNLFQYHIEEGVLIYRCSSEKREIPLKIEFHQYKEELERAVRLPHNTPGKAVAYVLEDHGAYFIIKAIVEMEEKAKSEDTEQGVIGIDINVNHIAVSETDGCGNCVLLKTVKMPLDGKNRKQRKHQIDQTVKEVVLECVRSHKPLVMEDLDFQKTKSKMRYGNRRQNKMLSDFATRKIEEAIVRRCWKEGYGVKKVNPANTSKIGKEKYSKRMGCTVHMAAAYVIARRGMGME

SEQ ID NO: 37909 - protein, 381 aa, Erysipelotrichaceae sp.
MKLIKRTYRFRLYPNESQKDLIEKTLGCCRQVYNELLSLCKKEYEKDHNYKINKYDLIKLLPKYKEKYPYLKEVDSIALQQSVIHLYTAYINFFRHNSNFPVFKKKKNDYGYITMNINNSIRIIGNEIQIPKIGRVKFVYHRQLPESFKYSTVSVSRIGKYYYVSLSGEEEYLDYQEHSKDSLILTNSIGLDFSLANLFVSDSKTKSNMPKFYEKSLTKLAKEQRRLSHMEKGSNNYKNQLLRITNLHERISNQRKDYLHKISRYIANKYDYVFVEDLDLKSISERKEEMKLGIFVADLAFGTFLNQLKYKLEWLNKKLVKVDRYFPSSQLCSECGYRKTDLLLKNKTWICPNCGVKHNRDHNAAVNIKKEGMRMISNPSN

SEQ ID NO: 37910 - protein, 379 aa, unknown
  TnpB Polypeptide
MLISYKTEINPTSSQIDKINKTLGVCRFLYNTYISENIKAYKNNKPFITGYDFDKYVNHTLIPNNLWIKNAYSKARKKAIMNAEMAFKRFFKNKSKFPKFKKKNKCNNNFYFVKNNKTDCIIQRHRIKIPSLGFVRLKEKSYIPVDRVIKSGYISKQANKYFVSVIIDIDIPKLMPIYNNGIGIDLGIKEFAVLSTGKTYKNINKSKIVRNIEKHLKREQKRLSKKYINKKKGIATLNKNIYKKISRIQKLYYKLSCIRTDYINKIVNEVVKTKPQFITLENLNITGMMKNRHLSKAIANQKFYEFRTKLINKAKRLNIEIRLADTFYPSSKLCSYCNNIKHDLKLKDRIYKCNYCGLEIDRDYNASLNLMKCQNYKLV

SEQ ID NO: 37911 - protein, 425 aa, Actinocrispum sp.
MIVMKQVVKVRLLPTPAQASALLVTLHICNQAAIWLSKQMHRDQVWHKRDAQKHWYRTLRDRFGISAQPTIRVIGKVADAYATLRANLRARNYGPKGSERRRMVEAKPIVFRLDAAQPFDARCLSWQLPELGREGTVSIWTATGRLRSLRVLGSPAYLTLLRTSTIGETDLVYRDGQWLLHATIDVPQAPLQEPAGFLGIDLGIVNIATTSDGHRASGSRLNRYRKRQQRIRKRLQSKKTSSARRLLKKRRRKEARFAADLNHQISKNIVAEAQRTGRGIAVEELTGIRARVRLRKPQRATLHTWSFAQLGQYLADKAERAGIAFVQVDPAYTSQTCSQSECNYVDKNNRRSQASFVCGRCGFVGHADHNAARNIATRGGACWGEVMRPHAAPTLAASWGTAAANLSVGPKRGDRQRAVPAATGA

SEQ ID NO: 37912 - protein, 244 aa, Streptomyces sp.
VVLERDLRGPRGPHEHRSGGLGVDLGIVNIATTSDGEILAGRELNRVRLRERELRTKLQRKNTPSAKRRLKKRRRKEARRAKDINHKIAKHVVAEAERTGRGIALEDLTGIRERVRLRKPQRATHSSWSFHQLGAFIAYKARKAGVPVVHVDPAYTSRTCAECGHIDKANRVSQAWFVCRSCGVVAHADRNGSRNIRARAWELWRCGALSTAPDPPPRQRGGLDANAASSPVMPVVQARRSAPG

SEQ ID NO: 37913 - protein, 543 aa, Streptomyces sp.
MADLRTIAPSFVALGPTGVAIRDRLKGLTHEDEKVLRLVGAHLGSLAASDLKTRCAQGLEHSTQTWAVRKREMTGASSSRWAGAITKATHDQWALARRGQGAHLHNLEAGIKTIAHRLSLPIGEKGSKRAPGGYRTRQEWFTKTRRLNILEDRLAAVRADREQGRVRVARGGKRLLNTRHNLDTAQLTEVEWRQRWEAERWFFAADGESGRRFGNDTIRVSPDGEISINLPAQLAEYANSGRGRYVLASKVTFPHRGQEWADRIEANRAVAYRIHLDPERGRWYLTASWQYTPTKTMPIEAALAYGVVGVDTNADHLAAWRLDVHGNPMGRPHRFTYDLSGTAAHRDAQIRHALSQLLHWAKSCNVAAIAVEDLDFGAEKTREKHGRRKRFRQLISAIPTGRLRARLTSMADATDITIIAVDPAYTSKWGTQHWQKPLTGTTRKTTRHDAASIAIGRRAQGHPIRRRTAPPPAHRSDEPGHRTVQAGSGALEREEPRPRIPGPRTRFDGTGHGANAGNQNTQNRSGCSTERESWQQDSLPLSL

SEQ ID NO: 37914 - protein, 189 aa, Ornithinibacillus sp.
VDRGLKYIAVAGDKETGKYIHFSGKHIGHIRRKYYRLRRIFMKNKNMKALKRLENKEQRIIQYWNHVISKEIVRFAQKQGASIIKIEDLKSIRSMKKIWKRSDRNINSWAFFDLEEKLTYKAQLAELEVVKVNPFKTSQECSNCGNVVKKNRRGSLYTCSCGYKKDADVNASFVISTRPSNEEKAITAT

SEQ ID NO: 37915 - protein, 426 aa, unknown
  TnpB Polypeptide
MRLTRAVTQIHLCAANHAKIAMLDALATEYLRLCQQYTTFFCTQAQPDKYAAPCFDSPLSQRWQRVAIQQAAGIAQSWRSNYANAYQDYLDAQAAYAEEHESDEAPPTWREWHTPVLKEKVIQANANVALLQPSQDSSFDYWLRLSTLEKGRPLFLPVQLATYHQHALADHIPNSSVTVARKPDGWWLTLSYDEVVPLTTPPEAPVVGVDLGIASFLTTSTGKQYGTFHGMLAERHKRDRAKRQRKAKLRACLEKKGIAKLPSLRNKKLARHVRQEINRAVNEFYRDHPNSQVAHEQLSVASMRFKARRMNAYLYASNLAHLPKQLAWGAAKRGMRARKVKSAYSSQECHQCHFVSRQNRPTQQTFCCVVCGHTTHADVNAAENLASRLYDQELAACADREAIKALLASRYHAWQEQQEQQISGWP

SEQ ID NO: 37916 - protein, 365 aa, unknown
  TnpB Polypeptide
MYTYKFRIYPKPEVAELLVKWFGCSRYIWNWGLDRKTQYYKNTGKSLSYLQLAKELTLLKKEQTWLKEAPSQPLQQVLKQLETAFARFFEKKSAYPKFKSKKNSTQSLQIPQGFKIEGNKLYLPKLRKTPIKIKKHREIKGNIKRIVISMNKIGQFFVSIVTDYTPQKLPKSNKKIGIDLGLKHFLITSDGRKISLPKWFKKTETLIKRVQRQLSRKQKGSKRYEKTRQRLAKLQLKIANQRLDYLHKLSKQLIDENQVIAVESLCVKGMIRNHKLSKYIANASWGIFLEMLKYKAEWYGRQIISVDRFAPTSKMCNKCGYIKQNLKLSDREWTCPRCGTHHDRDINAAQNILELALTTAGTAGS

SEQ ID NO: 37917 - protein, 252 aa, unknown
  TnpB Polypeptide
MNCVKIKREHLFNNAIHGIIESVESLRLKSVTVSMESSGKYFASLLYEGYSCENQAAGPDYSTAKILGIDYAMQGMAVFSEKVETEEAGFFRKNEKRLAREQRKLSRCVRGSHNYELQKKKVARCHEKIRNQRRDHLHKLSRKIADGYDAAAVEDIDMKAMGQCLHFGKSVQDNGYGMFREMLDYKLAWKGKKMIKVDRFFPSSKKCCKCGRVKKELKLSERVYHCVCGNKMDRDRNAAINIREEARRMLTA

SEQ ID NO: 37918 - protein, 402 aa, unknown
  TnpB Polypeptide
MKINCAYKFELLLKPEQRAKCAQFAGNCRFVYNKAVDLQLRQLESGQPFFTYSELASQLVFWKRNTETVWLTESPSQTLQQTLRDLDQGLKRFSQHKGNMVYFKARGDGDSFRLPQLLEGDFDEANARIRIPKIGFVRYRKSRCIQGKVKHLTISVEAGRWYVSVCTEIEDFQPQPTRNGEVGIDLGVARTVQLSDGTVYQLDVDEIKRLEERIAVYQKQLDHNKIARQKLAKLGKADDFDKKIPSRKRRRLKARISSLYRRIRNIRKDFMFKTARAIAQRFGWVAIEDLNVKNMTKSAKGTIEEPGKNVKAKSGLNRSLQRVSPGMFRRVLEWQVFKAGGYVDAVAPQYTSQTCPCCGHVARENRPTQAVFTFVICGYSSNADVVAAGNILKKSRAGSDRL

SEQ ID NO: 37919 - protein, 381 aa, Streptosporangium sp.
MMCAMAQRVKRAFTYRFYPTPEQAEQLARTFGCARLVYNKALEERSRAHTLEGRRVSYGESSAMLTRWKRTEELAFLGEVSSVPLQQVLRHLQTAFTNFFAKRAAYPRFKSRKRSRASAEYTRSAFTWRDGQLTLAKTSAPLDIVWSRPLPEGAQPSTVTVSRDAAGRWSVSILCEDTIRPLDPVEGVVGLDAGITSLLTLSRPIPGLTDAAGKVANPRHERADRNRLARAQRALARKEKGSSNRAKAKVQVARVHARIADRRRDHLHKLTTSIVRENQVIAIEDLTVRNLVKNHRLARAVSDASWRQVRTMLEYKARWYGRELVVVDRWFPSSKLCSACGAVAAAMPLEVREWVCAACGAAHDRDVNAAKNILAAGLAER

SEQ ID NO: 37920 - protein, 409 aa, Halobacteriales sp.
MLMEVQRTAVVKLSIPDERHDDLKRTMNTFRDATQRFADRGWAGDDDGYVITSRSRLQPLVYDTIRDNTGLHADLTVAAVNHAVAALDGCVEKMKDGKRTSRPVFTSNTAVYNTNAVSYFDGYCTLAAYGSGRVHAEYVYPEDSPQADYMEGDEWTKQGAKLRYDRQSDTYYLHVSIKQEYDELPAEAESRTVLGVDRNVDGYLAVTSTGAFVGNADLLNHKRREYERRRARLQQQGTRNAHLTIQSIGDTFADWSEDFLHQASKWLVEEAVAHDCSVIAVEKLSGIRERISNASKFQQWAFNELLRQVRYKAKAVGIIVETVNPAYTSQRCSDTECGFTQEDNRDGDEFCCQKCGKKLHSDYNAARNISHKFIQNWRTSGSGGATHHLALKSGILNGNGGYTPATTGG

SEQ ID NO: 37921 - protein, 400 aa, unknown
  TnpB Polypeptide
MRTAYQYKLRPNKDQVATIELWLELLRRQYNYRLGERFSWWEENRCSVNACPLIMPIPQLRDNPDYYSQKRGLVNTKEKFPEYKLIHSQILQDCVKRVKLAFDRWFKADKNGQRLGKPRFKGKGRYRSFTYPQIKQDCLKGNKINLPKIGKVKLIQHRPLPEGFQIKTVIISRKADGYYVTLSLEDKTIPDFNPDIEPTLENTLGIDMGLKDFFVTSNGETVPIPQYYRKSQKRLRTLQKRLPRKKKGSNRWLKAVKAIAKQHKKVADKRKDFHFKTANELLSKYEVIAYEDLNIKGLAKTHLSKSINDAGWGQFLSILTVKAEKAGRLTIAVNPNGTSQDCSNCGQKVPKELSERIHSCPHCSIVMCRDQNAARNVKHRAVGHSVLKAHGVRRDTETEK

SEQ ID NO: 37922 - protein, 443 aa, unknown
  TnpB Polypeptide
MQKHKFTVVTQLHEKNNLDLIKYAESSRGEYAKAVRETFYAIKYDKFNKSKYNAYLQHKYGVVSRTAKNIISDAQGRFNSLKELKQYEANQLKSKICYLEGQLIPKLVEKRNNNSKLLQTGTPISLIKQRNLRLKIVAKKAKLNRLKQKLVNLNYQLESGRLKLCFGTKKLLKQNYDKFIEQRDGQITFIGAKAEVCCNQNLQLIYNRKNNQFSIKLRKDIGGYKLANIGDKFVYGKLYFNHHKNKIISILKNKDSPLSYKIIKKNDRYYLYCTFEIQADTNSFATCSDYGTIGLDFNKGFVTLSETNQYGHLVKTRLLPYRFKAGNKTKTDLQCIANNIVRLAQQTGKGICIENLNFKTKKSKTETKQGKQYNEMIHSLAYRQFTDIIESVTYRNKVTLIKVNPAWTSWLAEKLYCPTMKLNVHIGASYVIARRGQGYKDTV

SEQ ID NO: 37923 - protein, 406 aa, Moorea sp.
MRSAYQYRLRLTRLQVEKIEKWLDMLRLQYNYLLGERFSWYERNRCAINSCPLVCHLPELKNNPDYFSQKKSLPLLKKNRPWYAEIHSQVLQDCVKRADLAFKRLTKGDSKGKRSGRPRFKGKNRYKSFTFPSLGKNPINGNLLTLPKFGQVKMIYHRSIPDGFKVKTATITRKADGYYVTLSIQDDSVPDIVPIDSVTNPIGIDMGLKSFLIKSDGSEVPIPQYYRKAQKRLKKIQKAVSRSKKGSSNRKKAVIKLGKAHKKVADTRKDFHFKTAKDLLDNHDLVAHEKLNIKGLARTRLAKSVLDAGWGQFLSILSTKAENAGLITKAVNPRNTSQNCSNCGKKVPKKLKDRIHSCHHCGYVECRDVNAAKNVLNLAVGHPVSSKAYRVTEPLGSFGKKPALSR

SEQ ID NO: 37924 - protein, 338 aa, Methanohalophilus sp.
MILTYKIKHNRDFSDELLKARRIAEYVVAHKPSSSKLTSRDVKHLGLKSVISNQIIRKYGRNKKIKKVNRVNLIIPNQGIQIKEDNIIYISSLKLNLKYQFTANFKKINQIEINNEYAFVSVTIPENTEYEPEHWIGVDRNTTGHVVVAGEPDSGKVMKLGKHAQHTHNKYKHIRKRLQKQGKYRKVKQLKNRESRIVRDLNHKMSRKIVDTAKSDNSGIKLEDLKGIRKNRKHAKSFKYSLNSWSFYQLQTMIEYKAKLLGVPISYIDPAYTSQKCSRCGHIGDRNGKQFECPACGHVDHADVNAAFNIALSPCMSQSSAERDVLEGSTDTPEVAMA

SEQ ID NO: 37925 - protein, 425 aa, Thermoplasmatales sp.
MVRVVKTIKLNILPLTNKKHSQLHELEKQYLKTAEHLSETIYWWDGFADIPLTRFNLHSFEYKHVKEFSNMQSQIIEDVIKDCFASWQNGGVVQSASIPYNIPRSADFRVTKRKNPVISIATFKGYERMGLPIAQDGAWKRLIKFLRKGWKTTAFRLKRVGDKWQILVSIYKDIALENSYDAVIGVDIGSRTLATISILGKNGKIIKQLYLGRDIWDKQRDTSVRRSKLQKIRDTANADGRYKAIKKLKKLRGYESRFVKTRVYEIAHSIVDLAKEYNAVIAIENLNGLKDSRLHRKANRRVKRLPYNLFRVALEQVAWVNKIEVAVVNATYTSQRCSKCGMIHKTSSVVFKCPHCGFTVNRDRNASVNIAHVAGVFFKTLTIAQYNMGDATVNWHVWKDDGVLNACWQHIQTSDFKPPTPIGGS

SEQ ID NO: 37926 - protein, 238 aa, unknown
  TnpB Polypeptide
  misc_feature (42)..(51): Xaa can be any naturally occurring amino acid
MSAPLILVRITSQPSYVMIIHQLFTKAELSYPIPNGFINSGXXXXXXXXXXMNATSARLKDLSFHHANFTKDQCHKISRNIIDFCLEHQAGTLILGVNPLWKQRTNMGTASNQKFVAMPISILRTMISYKALNAGIRIIEQEESYTSKADITMNDYLPTYGKDDNNATFSGARITRGLYRCADGTLLNADCNAAANIMRKAIPDIWKDTSDYTFLSSPKVYGFHELNPKSIPVKRIVA

SEQ ID NO: 37927 - protein, 376 aa, Bacillus sp.
MILAKKVRLIPTPEQEKVLRNHAGAARFAYNYCKRMSDRYYKLFGKSVSQLALQKRFTKIKKRKRYEWLKDINAQVPKQASKDFDTARKHSFKKYKNGSHTSYKSKKDLIQGFYANYERLVIGKKVVHIQSIGEVKTSQQLPRNKKPSNPRVTFDGRHWWISVGFQEDFESQELTDESIGVDVGLKELFVASNGMKERNINKDAKVKKLLKRKKSAQRDMSRRFKKGVKIQSAGYEKAKAEHLRLSRKITNIRNNHIHQATAKLVKTKPMRIVVEDLSISNLLKNKRLSKAFSFQKLNFFFQCLSYKCEKYGIAYVKADKWFASSKICSCCGVKYDHSVQPEGQWSLKIREWDCFGCNSHHDRDINAAINLSRWVK

SEQ ID NO: 37928 - protein, 440 aa, unknown
  TnpB Polypeptide
  misc_feature (103)..(103): Xaa can be any naturally occurring amino acid
  misc_feature (187)..(187): Xaa can be any naturally occurring amino acid
  misc_feature (235)..(235): Xaa can be any naturally occurring amino acid
  misc_feature (272)..(272): Xaa can be any naturally occurring amino acid
  misc_feature (306)..(306): Xaa can be any naturally occurring amino acid
  misc_feature (321)..(321): Xaa can be any naturally occurring amino acid
  misc_feature (386)..(386): Xaa can be any naturally occurring amino acid
MKVTLTAKLKLHTTPEQFQALRQTQLAYRDALNYVSTYAFEHGKMSNKVRLQDGTYDEVRARYKIPAQMACSIPRQVGATYKTLWTKVKQNAAQRKAGITKKXYKGLDQPPKYVSPTLTYQLGHDYSFKTEQRVSILTLQGRVILPYTGYDKHIALICADTHIGAAKLWYDKARKQFYLLVSLEIEXADPTPETHTQVAGVDVGVRYLAVTSTTKGEATFHTGKSIVPKANHYAXLRKRLQKKGTRSATRRLVVISGRERRLKADANHMVSXRIALRHPHSLIGLENLTDIRERTKRKRGKKATHXQRRANATYSKWSFAXLQSMIAYKALLRSSMAIKVDAHYTSKACPVCGHTCDANRPHQGLLFVCQNCHYTLHADLVGARNXTMRTLLARQDWARTGRLSIVPDASDAETKAARLRRYAELRWSLDASPLPLGGGN

SEQ ID NO: 37929 - protein, 596 aa, Rhizobiales sp.
MSRAERLLLAHLKAGRTWTGDLKVSFYQPLGISAVHLDMAYRQLMAKLASVSELAKEHARDLVHKVASKKTDMKRKTLALARANKVRVKLVEELAAITFKLETRRESMMVATEKHRADELFALKQLLIKHHARRAASETAGLEIQELRFALHQHKRRLAILETKLAKARSQADDPTICFGSKKLFRGQFDLHGNGYADHAKWLGAWKAARSAQFTLDGNSSMSGGNQFARLRLRGKGRFDLELRLPKALAHLATRTFKVSGQTIACVDFRGLSFNHGNEVIEQALTNHKPVTVKFLRDAKSWKVMVSVDHATEWKKPNFSAGALGVDLNAGHVSAALVDRDGNPVEVFNFPCVTYGKTSDQLQDAIRKVAAEIASLADRLGVPVVCEQLDFSEKKKTLKDAKDARYARMLSSFAYSAFSKALACACARQGVALRRVNPAYTSIIGRVKFARRYGLSVHEAASVTIARRAMGYSERLPRSSTGTVKVPTNGCDHVTLGLPVRKDASEQAPKSRHVWSRWNGLNKEYQKALAALGSSRRKPRPKRGKSQAWGRQLSRAGDGTLAGGAENRSMVLRRRRDVPAESRFSHAARGGKRAGN

SEQ ID NO: 37930 - protein, 571 aa, Scytonema sp.
VAESTKTYTDQINFWHWGELFAISNLMDSARHYCLSMILAGKSKLDCNKELQAKFNINKRYSSSIYSEVQGIVTNVNKNRANHIKVLEGQLKSIKSDIKKRSKQIKEFAKQEKKLTNQKNSAKKGFKTSKTKIKKACSVYAKPRETTQLQDAKFGLHQKKRRLYVLESQLAHLKSKSPKYTLPDIANSFVLVGSKDESSGNQLAQFDYIEKTDQFVLSIRTPYALEERLGGDYIRIDGLNFKHGKHDLVESISERCYKVKTKDGTEKWAIGCSAVTLRFYWKDNCWYVAATTDTNLPEITSEYLSGYVGIDLNADSIGWAVCDDSGNLLEYGDYKLDLHSKTSNQREAILCDAATFVALKAQQYNFPIASEQLDFSAKKRQLKEKGKKYARMLSSFAYSQWNEALDSACSKYGIYHKKVNPAFSSKIGMLKFMSMYGMNSASSAAFTIARRARRFSERLPKQHHLLHSKSAYPIGKHVWSQWSKLSKNLKLVPRHQYFNARLNRTRVVTSNRHSTYSIGGDGLLLNPVQLELFELGVNPRGNDAVTVAVSRSRKPRRCTKNSFTQISLDLN

SEQ ID NO: 37931 - protein, 367 aa, Halorubrum sp.
  misc_feature (293)..(297): Xaa can be any naturally occurring amino acid
MLETTRTYVARITNHQQVRDDFDQCGFSASKLWNVGRYYIQQRWDDDGEIPDEAELKSVLKDHERYSDLHSQSSQRVLEELAEAFTGWYNSDDGNNPPGYRKRGDRHPRSTVTWKQKGITHDAKHNRVRLSKGWNLKESRSDFILAEYETRPDVRVENIQQVRAVWNGDEWELHLVCKKEIPVEDAPGDKTAGIDLGISNYLAINYEDGSSELYPGNVLKEDKHYFTREEYQTEGENGPSKRARKAQQKLSRRKDHFLHTLSKHIIHRCVEEGVGKIAVGDLSDIRKAENGGXXXXXTGVRRGTRSYTGGSSTGSRPCWNTRRKNTGFSLTVWTRRTPRRRVRVAGRFEMRTGWSAGCTSVRRARRR

SEQ ID NO: 37932 - protein, 404 aa, unknown
  TnpB Polypeptide
MLVRGVVFSLDSGLPTEAKFLLEDFRLAVNNAVRAGLQARVTSRNALVKIAYRDFRVQHPRMYAQHLVSAFEVAGGVLKNHRRLVRKGVTCRIPYVERLMMKAENQAYKLDRESGVIDLPIRAGCHVELKLVVSQFHRKYLNDMALSLGSLTVHPDRVIVAFRKDAPKPFVPESALSLDTNERSLDGVFVEGDVAKAVKAEFPEVAIIQQRHHDRRKRLQKKKAHDRRTSRNLCRREGAREHHRIDYRLHQVANSVLKFAEERRSAIVLEDLKGFKSKRSKVLNRRLSSWPRRKLHQIIEYKAQWRGIPVVKVDPRNSSRTCPICGRIQDSRMGAEFACECGWHLDRHINASINLLQTAISKGMAGGLRFDPGAFQQDVMMILYEPAMAARSEPNGTSGIVGAT

SEQ ID NO: 37933 - protein, 450 aa, unknown
  TnpB Polypeptide
MTETVSLINDEIVSRGTTSDKRVDTMYRTNTVELVVDKETHKKLVEFGELSAKCWNEVNWLRIQQFKNGKRVDFKTTHRVVYHKYSGKLGADSTTQVIRANTGAWKTFFTLIKKKKRGELPNWLKPRPPGYWKNKDGSYKLIILFTHKRYELNEEDRSIYLKHFKMTLKYLGTLRWHGKLRGLAIVYNPARKKWYAYIRVEVKKPEPAKAGKKASVDLGIVNLATVYIEDGTWMLFKGGSVLSRFEHYIKKISRTDKLLARHKQKTSRRLKLLYDKRKRFMRHVINSMVRKIMTELKQRGVAELIVGYPMYIATDTRNWRNIHFWHYRYAVDRFKMVGEELGIRVVPVNESHTSVTCSLCGEVHPNGRIYRGLFKCPHTGQVINADLNGAINILHIPESRGATDKETPVVRDRGNGPKARPVVYRWTNGAGWVATPTSNEVVRVKAVNHK

SEQ ID NO: 37934 - protein, 385 aa, unknown
  TnpB Polypeptide
MKIRAHKIELQCNNKQATYFAKACGVARKAYNWGLDEWQKEYQAGGKPTEAALRRKLNSIKREQFPWMLAVTKNAPQMAIIQLGQAFKNFFKKKASYPRFKKKWVNDSFTITNDQFTVKDSRIRIPLLGWVRMHESLRFIGKIVSATISRVAKKWFVSISVEMLDENPRSANENQVAVGVDLGILSFATLSTGEIIEGPKPHKRLLSRIRRLSKSLSRKQKGSNNRHKAKQKLSTLHYRISNIRRDAQHKLTTRLVNDFDIMGIETLHVKNMMKNRKLSRSIADMGWFEFRRQLEYKAAAEGKAVIVADKWFASSKICSHCTHKRESLPLSVRTWICPDCATTHDRDINAAINLKNMAVSSTVSATLLKQSDAHACGAPANGIAA

SEQ ID NO: 37935 - protein, 323 aa, unknown
  TnpB Polypeptide
MTRRNNAIRATVSMNIAISETLLVFSKNYLEALRYVLYWLKEKRINPNKNNVISIVHKKLYNILKSFNLSSKIAQDCYRNAISIYKGWYNNPNKGRFPIVFKPTVWLTPKLSYTVNFNEMFVKISKIGEFKILGYPRNYKEYLSWKMRESRLVFRNGKAFIKITFEKFIQKIEPKDSIAVDINMQNITVGKDENNFVKIPTRINEIYHYKLLAENLQIKYSKRWKSNRNIKRRIMVFHIKAKNIAEDFAKKIGKRIINEAIKMNANVIKLENLRNLIKNVKRLHKKFRDKLYLMQYRKIQYWIDWQAKKHGLLINYVYAAILQ

SEQ ID NO: 37936 - protein, 489 aa, Mycolicibacterium sp.
LIVVARFEFPDGSTVQAYRFALDPTPAQARALASHAGAARFAHNHMLTLLKAVMNQRAAERSYGIAEEELTPAVGWSLPALRKVWNQRKVSCAPWWSENSKEAYNTGLDSLARGLEAWSTSRRGRRAGKPVGFVRFKTARARRSVRFTTGTIRCEADRHYVTLPRVGTIRTHESTRKLARRVEAGTARILSATVNQDSSGRWYCSFQTIVATKTRPAHARRSPHPVVGVDVGVKADSLLVVATPDGREVARVAAPKSLTAAQRRLRRLQRRAARQHGPYDPTSRSKRQPSKRWRATQARIGTTHAHVAAVRRDVLHKATTTLAQQHQVVVVETLNAAGMRAKGGARKRGLNRALADAALAEIRRLLEYKSRWYGSELVAADRFYPSSKTCSACGRRKPNLTLADRVFHCDGCGVRIDRDLNAAINLARLGEPADAGEQGPAGSGPVAGRGATRETDPAKAGDAAGCEASTPHHHQVDQTGTASPQGEAA

SEQ ID NO: 37937 - protein, 418 aa, Okeania sp.
MTLTINYRYRLHPDPIQEQTMLHWLEISRKVYNYALREIKDWVNARKCSLNYCSLSKEYIIPANKSFPTYYNQQNALPLAKKAFPELREVPSQVLQTTIRRLHDGWNYFQQRGYGFPRFKKFGQMKSMLFPQFKTNPITGWQISLPKIGIIPINLHRPIPEGFVVKQARVLRKADRWFVVLTLQSEVSRPEAQPHGEAIGIDLGLEKFLTTSDREFIARPRFLTSLYRELELLQRKYGRTKKGSKNQEKVRLQVARFHNHIANVRKDWQFKLANHLCSKEGIGMVFVEDLNLKAMSRGILRKHTLDAAFGQFLNVLEWVAKKHQIYFSRVNPDGTSQTCPKCGTHTGKKELSERRHRCSECGYETDRDHAASEVIRLRGLEKLSTQGLWGIENAYAVGLPGTEATQSRSEAKPRREKN

SEQ ID NO: 37938 - protein, 410 aa, unknown
  TnpB Polypeptide
MYKKTVRYNFRLKPTTEQEAKLIEFGAYSRGIWNLLLSENIRRYQYDKTFIFYNGMAKLLTELKKFEEFKWIKDFDSAAAQQVARDLDDAIRNATSKSRLQKFPAFKVSYKSKKQHNDSFRCVNNSNCIRVENGFVSIPKVGKVPIVLHRGLVSSIKTVTVGLRHGKWEASFTQEIYCKPKKKSLNAAIGYDINSHYSVVGSNGWYVPNPKLLKESATTLKELQVQLSRRKKGSGRWIKTKDRINKLHGLISRKRKSYAHEVSNSIAKSSDIVVFEDLNVKAMQQFNGTMVADNIMGMITGLVKYKVELNGGIYHEIGRFVKSSGICSECGENHKLDLKDRVFTCINCGTSQCRDWSAAMSIRDTGERDLMEAGTVTRVLPITQKKSADKTKVFEFTLKFAVGHEKKEAA

SEQ ID NO: 37939 - protein, 470 aa, unknown
  TnpB Polypeptide
MKKRQRRARPGELQHITKAVTHIRLVEVNPGKLAALDTLASVYLALCQQYVTLFCTDEPPNKLRDPLYQTPLSERWHRVAIMQAAGIARSWLTNRAVAYQQYQADLERYQHKRADGTLPPRTKEPQWNEWNIPTLREPCIQANVNVVKLEPSHDSTYAYWLTISTLEKRQPIQVPVKLAPYHQRALIDPRTQQARKLNSSVQLNRRKGVWWLTLSYDEEVTPDPVSGAPVVGIDVGIANFVTTSTGKQYGSFHKSLRARHKRDRAKRRRKAKLRACLQKKGCKKLPSTSSRSGQRLLRYVKQEINRAVNQCFTDPEHQGAQFAYEQLSVASMRFKAKAQNAYLRASNLGRISQQIVWNSQKRGVKATPVISAYSSQECSVCHYTDRKNRPNQQTFCCRVCGFEAHADHNAAINISRRLGDNALRACRDRNAIKAVLMQRHEAWKQQQGMEAASPVKRRRRGKSSLPVSPL

SEQ ID NO: 37940 - protein, 233 aa, Glycomyces sp.
MGTGEASEVRLGVVSDVPPARRGGEVRDPQPGRQTLVRLQRRLARSQRGSNRRQVVKHQISDLYRRARYRRADFNAQCSNRLTRDFALIGLEKLNTKAMTASAVGTVEQPGTGVARRRGLNRSILNKGWFGLETALRSKARYTGTQVILVVAADTSRTCSAPDCGKVDTASRKSQARFVCTACGFSEHADVNSARNIEHQAIAAAGRAVPGRGDLQAPAGSAKRQLLRTRQGE

SEQ ID NO: 37941 - protein, 387 aa, unknown
  TnpB Polypeptide
MTRSDLSKRKSCINISGIIWNHITALRKRYYRRFGKHLGASRLQNHVAHLRMKTKRFAYWRMVGSQAVQDICQRHDKVYERFFNKEGGLPRFKKVRKYTSFTLKQTGWTRGEDTHPRGSQKHPKWTGRVTILGHEYKFVKHRPLNGKIKTVTVKRDGAGRLWVCFSVVETMELEDTTSTGKSGGFDFGLKTFLTTHEGISIHSPLFFSQDLPRFRTIQSRVSKKANGSHNQFNGQRHLARRQIRIADKRRDFHFQLAHELCQHYDILVFEDLNIEGMKRLWGRKVSDLGFAQFMKIVQWMAIKHGKRVIIIDRWERTTGTCSRCGNKQKLDLKDRVFQCERCGLELDRDHNAAINIVEAGHRLILSQSEEVPALSTASGVHGRSPRL

SEQ ID NO: 37942 - protein, 401 aa, Clostridiales sp.
LLKEAGSNSCDIQRPIHEKVTRSSAKLLHDVPLHDTIRKRTYVRRGLMKRICRFVFNHYLEMKQTIWKECHGSLSYTDTSKDLSHNLKTDNPWLKESDSIALQQTLRHLDRAYDNFFKKRGGYPKFRSKRYSQSYRTMNVNYCIRINGDRIRIPKAGEVRIRNTRDFEGRILSATVSLSSGGRYYITLQVEEEWEILPNKGGETGIDAGLSVLYTDSRGNIVPNPGTLKKHEKKIAVLQRRLSKKKKGSKNREKARKRVAREMEKVSDIRRDCLHKVSYKLANENQVVCVEDLDVKGMMKNKRLAKSIGDVSWGEFYRMLEYKMADHGGKMVKVPRTFPSRQQCSCCGKKEPKIKDLSVRRWKCASCGTIHDRDINAAINILKKGKERSRDPEKYRGSHGN

SEQ ID NO: 37943 - protein, 463 aa, Nostoc sp.
MPKVKKLMGVQQILLHLDAETKAILKYLCEQSGKLYNNGVYFARQTFFKTGKILTGKFDLDFEPSVAKSIIAQSLPSTPAQQTLHSVIEAFKSFKELRQLHFQGQLHFKPRPPDYLKGSKLFKVAYPNSGAQKPKLVDGQLKFSLGLTIRRWFGVSDFQLPMPSNFDYSKVKEFTILPKNGAFYLELSYEVEKKTHELDVNQAFSIDLGTADNLAACVDTLGNSLLIDARVMKAMNQLWNKKVSTRKEGKPEAYWDNWLDSVTRKRNHQMRDGINKSAKLIINHCLKHGIGTLVIGWNDGFKANADMGRLNNQKFVQMPLGKLKDRLKQLCELHGIRYQETEESHTSKASYLDGDSLPKYGEKPFGWKASGKRVQRGLYRSANGYIVNADLNGAANILRKVASKLGLDLSQLSRRCLTTVARVRLWTLPKALCPQNLSVFRPESVNERSYSYFTPPPIFFADH

SEQ ID NO: 37944 - protein, 399 aa, Limnoraphis sp.
VFIYEYKVNPKPQQVAAINEAIRTSQFVRNKVLRYWMDNRGVGKTEMFRYNTLLRKEFKFVEDLNSHACQTAVERVLKAVNRFYDNCKKQIPGPKGYPKFKKNTRSVEYKVSGWKLSENRKHMTFTDKKGIGTLKLIGTRDLNFYQIEQIKRVRIVRRADGYYVQFSVQLDPRDTVKPLIPSQKSVGIDVGIKYFLADSQGNIEPNPQFDRQGEKRLNRLNRKKSKKYQKGKPQSRNYHKARVRSARKHLRVSRQREEYVKRMALRLIKSNDLVAYEDLNVKGMVKNRHLAKSISDAGWSKFRQWLDYFGYKYGKITIAVAPHNTSQNCSNCGEKVQKSLSTRTHICPYCGYTEDRDVNAAINILQKGLSTAGHTGSYKLGELDPLGPLEQSCGVTIGL

SEQ ID NO: 37945 - protein, 380 aa, Lactobacillus sp.
MTYKGIKLRIYPNQEQQLKIKLNFGYNHFVWNQMLNMMIKRYQNNPDAKFLNAFALNNLLPALKTEHDWLKDAESTSLQATNHDLVEAYKKFFKLHKGFPKFKSRKYPKQSYQSKMGIKLVDDHHLKLPKLGVMYFKSGRQPVGKIKSVTIRLSATGKFYAIVLVDTDIKPLAKSNRVIGIDMGVKDLMITSEGVKYPTIRFDKKLSKKKHYWEKRLARRRLQAQKEIAWDKHNKVIEPRELSDFKNYLKAKKMVAQYNEKIANQRNNYLHNLTKSLVGQYDVIKIEDLKTKNLLKNHKLARAIANQSWRELRRMLEYKCVWYGKQLVTVNPRKTSQICSSCGYDDGKHTLDIRQWTCPNCGVNHDRDINAAVNILQATA

SEQ ID NO: 37946 - protein, 578 aa, unknown
  TnpB Polypeptide
MAFGSKNSTPSFVLTLPLDISLNEQDYLYKEFKKCGVIYNQLVSATTKMWHQLRKTRKYRELMAAIAKATPDSDEQKTLFKQREKMLKEYRFSEDAFHKLVVPYAKHFAINSHVAQNVASAVWTAWEGFFFSKGKAVHYKKLEDVASISGKNNATGIVLRPANLTTSNIESAKRKAQKAVEKRYDDMYGWPDPKDDKKVVLPDEVKPQMEAEIAAAIAKIKPTIGEGSLRIVYGKHEFPVVLRNPKTQTGKYQQETLKCGVKYCRITRKWVCNKWKYYAQLVLEGYPPVKCDSNGVMKHPVNQGRIGLDIGTQTLAISGKDICDLRVLAPSARAQAKSLVNEIAATLRAMDRSRRITNPKYYNPDGTIKRLKRQHGQKQKREWKYSKRYYRLRAKLRNLYRKLADIRKMEHNILANELLEHGNEFVVEDMNYKALQKRSKETKINEKTGRAHTKKRFGKSLSRCAPAMFIAVLTNKVTRYGGKVVKVSTFETKASQFDHTDESYTKKRLSERMARLRSGNLVQRDLYSAFLLEHIDIESLQYNMETLNSAFPAFLEMHENTKHRLQAVESSLPASIGF

SEQ ID NO: 37947 - protein, 405 aa, unknown
  TnpB Polypeptide
MATCSYNIQLKPSDKVFRHWLGLLTHAKHAFNTCCDIMRSENTSLTLKAVHEAVYDTLREAYPALPAQAVIKVYKDALAAFKSIRKNKHANAKVPRKKHLSMHLDKRLYGRLSMDGITLSNGEDTFRENVPMKLYPKAVEMFSTCMWGEPLLFFRDGVMWLSVPFELPDRPVVRETACGVDLGMRQLFVTSEGRSFRDAKYLKAKRLVRYKKRMLNSVGTKSARRKARKMSRRERNLTKDMCVRAANALLSSTDAGVLVLEDLKKLKKNTSRSKSGYKRRGHNNRMSQVPFAEFREVLSHKAPRCGKRVETVSPTYTSQTDSRTGKRDGERRGRRYVCSDGVVLDADWNAAVNIALRSRHPVSSGAAPLDGGLTPLAGRPMSTGRMRCKPTTDTHPAWFRKLLSL

SEQ ID NO: 37948 - protein, 521 aa, unknown
  TnpB Polypeptide
MGVRVAKNKTYKAFVARPSHVLDLHGELLDSPSVLAQLTSEIRGISAYATFVVRNDLKLGSDLGQVGAIQPTTAGRRAGVTMPDFLVTGKSGRSRKEFLVQYNVVTSHRSWRERINAANGESSKYVSLGWKRTVNVSAPTYGEDTINLGAVDKQYAVIENNPFIDGKIVLKMVIQGKRYRLIFNFDNTRFREGKVTLPVVKIENGAPVFIFTVATDNPVVQFSGDYTIGVDVGINNYATVVVRNSKTGEKVQESTLSQRVHSLWNSVKASEKQVKQLRKKAKSLLYDRQARMSALDEAQLHREAASRKKRELAILAAQEIAYLSHFYDNAVVAVEDLGWVSNTMQNGWWNRGAFTQWLTHYISQNGGWVISVNSANTSKVCHLCGSKVTHPVHKISCCPVHGVMDRDVNAAANIAARAASRVEKARKTRAKNPKLQKKPAPLITPPTRGSLRYPGRDRSKNKPTPKRKKQVVREVNLPPRPARVNMTTVLADQDAHGILGTSMAALKQGYTTRRCRLYNPN

SEQ ID NO: 37949 - protein, 395 aa, Nostoc sp.
MEKAYHYRFYPTAEQEQILRRTIGCVRLVFNRALAARNEAWYSRQERVDYVQTSAMLTQWKKLDDLQFLNEVSCVPLQQGLRHLQTAFSNFFAGRARYPNFKKKRSGGSAEFTKSAFRWKDGQVYLAKCSDPLPIKWSRQLPKNCEPTTITVRLEPSGRWFVSLSINDPADEIMQPVDSAVGLDVGVSSLVTLSTGEKIANPKAFNKHYQKLRRAQKSLSRKQKGSRNRDKARLKVARIQAKISDSRKDHLHKLTTRLIRENQTIVVEDLIVKNMVKNPKLARAISDAAWSELVRQLEYKAKWYGRNLVKIDRWFPSSKRCGHCGHVVEKLPLNIREWDCPNCGTHHDRDINAAKNILAVGHTVTVCGANVRPARHKSKGQLRKSSHGRKQKLKS

SEQ ID NO: 37950 - protein, 348 aa, Escherichia sp.
  misc_feature (259)..(347): Xaa can be any naturally occurring amino acid
VKRLQAFKFQLRPGGQQEREMRRFAGACRFVFNRALALQNENHEAGNKYIPYGKMASWLVEWKNATETQWLKDAPSQPLQQSLKDLERAYKNFFRKRAAFPRFKKRGQNDAFRYPQGVKLDQENSRIFLPKLGWMRYRNSRQVTGVVKNVTVSQSCGKWYISIQTENEVSTPVHPSALMVGLDAGVAKLATLSDGTVFGPVNSFQKNQKTLARLQRQLSRKVKFSNNWQKQKRKIQRLHSRIANIRRDYLHKVTTTVSXXXXXXXXXXXXXXXXXXXXXXXXXXXXXXXXXXXXXXXXXXXXXXXXXXXXXXXXXXXXXXXXXXXXXXXXXXXXXXXXXXXXXXXXXK

SEQ ID NO: 37951 - protein, 401 aa, Vulcanibacillus sp.
MIKTYKVMLKPNNKQRTKLFENSGVSRWAYNFALARQKENYDKGGKFLKDSVLRKELTILKKTKEYSWLNNYSNNITKQAIKDACDSFTRFFNGYSKFPKFKSKKRSKYSFYQDTEKIKITATHVKLEKLTTSKKRNKQKFNWIKLAEKGRIPTGKNIKYINPRITYDGLNWWISIGVKEEKENNTSYQTEGIGIDLGVKELAVISNGEKFKNINKSPKMKKLIKKHKRLQKQISRKYDMNKSKIEGRENRYKYHKTKNIVKAEKKLNRLYRRIKGIRDDYIHQITTSLVKAKPKYIVIEDLNVSGMLKNKKLSKAISEQSLREFRRQLEYKCEWYDINLITADRYFPSSKICSNCGHLKLDLKLSNRKYQCDSCGLEINRDLNASINLKDYTIKHRKSVA

SEQ ID NO: 37952 - protein, 222 aa, Ornithinibacillus sp.
VSYYRSENTLRFPGRLVSLLVLRTVGSHRCLSSSRSLHVFSPLYSSLSIDNISFLVFYRTWARRLLSQNATVFRWEMKNMKALKRLENKEQRIIHYWNHVISKEIVRFTQKQGASIIKIEYLKNIRSMKKFWKRSDRNINSWAFFDLEEKLTYKAQLAELEVVKVNPFKTSHECSNCGNVVKKNRRGSLYTCSCGYKKDADVNVSFVISTRPSNEEKAITAT

SEQ ID NO: 37953 - protein, 447 aa, unknown
  TnpB Polypeptide
MTLLAYRYALDPTPAQERALRSHAGAARVAFNWGLARVKANLAQREAERSYGIAEADLTPCISWSLYSLRKEWNAAKDTVAPWWPGCSKEAFNTGLGQLARALKNWDDSRKGKRKGKAAGFPRFRSKRKARLSVRFTTGAVRCEVTHAVLPRLGRIKLHERAATGDARILSATVRHERGRWFVSFTAEQDITRPAPRLPGAVAGVDLGVKTLAVVATSAGRTFEVPNPRHMSRAMRKLRRLSRTVSRRQGPDRRTGRKPSNRWRRADGARNRALGKVADQRRDSLHKLTTRLAAEFGTVVIEDLHVAGMMKNRRLARHVADASFGEVRRQLEYKTAWHGGRVIVADRWFASSKTCSGCGAAKAELPLSDRTYVCASCGMVADRDLNAALNLAGYGNRQVAGSGPETENGRGADRKTGPARQVAVKRQPGTAHAGKTGTAPAQAGAVA

SEQ ID NO: 37954 - protein, 448 aa, Lactobacillus sp.
  misc_feature (238)..(319): Xaa can be any naturally occurring amino acid
MMVLRTQKVKLYPNQTMKKVLDGLCDYRRYCWNQGLALWNDMYDASVILADKKQRPNERKVRDELVANKADWQFQLSARCLQLAISDLGKAWQNFFDQAQPDWGKPHFKSKRAPRQGFKTDRAKLVNGCLRLDKPRGVKTPWFDIKFKGARNLTGELKVVSIYRENGQYWASLPLEVAMGPKAKTGAKTAVDVNVGHLDYTDGQSKTLPSHLQAIYKRIKHYQRQLARKRKVNGKQAXXXXXXXXXXXXXXXXXXXXXXXXXXXXXXXXXXXXXXXXXXXXXXXXXXXXXXXXXXXXXXXXXXXXXXXXXXXXXXXXXXANVQHDLMQKFTTQLVCTYDQIVIEDLAVKRMQMSHVAAKGLQRSMFGYFRQVLTYKCEWYEKNLLVADRFYPSTQRCSVCGHIKQGDDKVTLVGNHKHHTKHDEYICYQCGATLDRDANAVANLLALL

SEQ ID NO: 37955 - protein, 429 aa, Coleofasciculaceae sp.
MFGCQQVRINPDQELKAVLEYLCSESNKLNNCAIYYARQLYFKTEKVVNKFALINELKQNPHYGAMYSQVAQQTVMAVAESFSSFVGLLKGIANGSVTQKPRIPSYKKKGGLALVAYPSQAIKLKKEGLRFPLGNKVKAWFGLDAFYLPMPSNLEYKNIREYRILPRNGEFYLELVYKVETNQAQVDGSKVLGIDHGIDNWLTCVSNVGTSFIVDGRHLKSLNQWYNKRVSILKENQPQGFWSKQLARVTERRNRQVRDAINKAARMVINHCLENQIGTVVFGWNKGQKDSINLGSNTNQKFVQIPTGRLKDRIKQLCEQYGIKFVETEESYTSKASFLDSDELPTFGEKPEGLALSKVEVWQESGKRVKRGLYRTANNWYINADCNGAANILRKVATTLGFNLDGVGRGALTTPLRSRFWTLKESHAL

SEQ ID NO: 37956 - protein, 382 aa, unknown
  TnpB Polypeptide
MRLTYKYRLFPTNAQRTSLERVLELCRWVYNDTLAARKNAYEQEQKSLGLYDTNKLLTEWKANRPALKEVHSQVLQNVQERVDLAFKAFFRRVKAGEEPGYPRFKGRGLYDSFTFKQSGFKLVNDKLTLSKIGDVAIKLHRPICADIKTLTVQRDAVGNFYACFSCECDTQPLPTNHNVVGIDLGLTTFAYFSNGEKIERQRWMKQDAADIARLQRKKEKFTKGSPERRKVVHALCHAYERSANRRNNFAHQESRKLVNEYQFIAFEKLDIQDMQSTGNKNITRGIADVAWGQFVQFTTYKAANAGRGVALVNPRGTTQACSGCGVIVPKDLSVRIHDCPHCGLKISRDHNAALNILARGLASISADSSDVAVEAPGFSRGE

SEQ ID NO: 37957 - protein, 348 aa, unknown
  TnpB Polypeptide
VHKQYIPSAFEVALAALKLYRRRIRKGKRATTPFMRRLMLKAENQSYRFDRETGDLRIPLRRGEGVQLRLTMSEWHRSFLSNPSWGLGSLTVVPGKIIIVVRKETPKPYEPNAAIALDTNEDSLDGIVVDGGISWVATAPLDGVRRVQAIHFSKRRRIARKKASDRRVQRTLLEREGVRERDRVRQRLHRVSKMLVRFAKARRAAIVLENLTIGGAGGRSRKMNRRLASWPRGVIHRQIEYKAALEGVPVIKVNPAWTSKTCPVCGARRRDRVGRDFVCLMCDWEMDRQINAGMNILKTALTSNEALARAVRFQPGALRHDVVSPLYDLLREGRGAREEPSGVECLAQ

SEQ ID NO: 37958 - protein, 382 aa, unknown
  TnpB Polypeptide
MWKTIDHYCFQAKNVYNAANYIVRQEFINNKKWIRYYKLDKIMRNNSVYYELGSQASQMVLRLLDKNWKSFFNGIKIYSKENKNNFLGKPNLPKYKNQNGRSPLMLTNNLFKIKNGEIYFSWKPLNKFSGIKTRVGKATLQLRFIPFGSCYYMEITYKENVKEVKNYKNIIGIDLGINNFATISNNIGLQSIIINGKIIKSMNQNYNRLKSKIQKETGLKWCNKLQNINDKHKRKMDYFMHCSSKYVVNYCLRNDVDTIVIGKNDGWKQFSKMGKKNNQNFEYIPYEKFISKLKYKCENQGINFIQTEESYTSGTSFLDNELPIKENYDKIRRKKRGLFISNDGIKINADLNGSYQIIKKVFPNAFEQRDRGCSLHPVRINV

SEQ ID NO: 37959 - protein, 379 aa, Streptomyces sp.
LRGAPDVHARKEPHPGADCAEPPGLWSGQRAHTRPCVLLVQVIHFERAVAVRAGVYVRCRSAPAHIRHGQVPLGPGCAGRPARHQEDVRRVHHVEGEPEGRKPGTSRLRAPPSGDREAGLLPPPGRAALRRPHAVVADPGPHGVDLDHRRAGRERGVHRLPGAAGHPDPVPQGRVRPAGAGRHVVLNATCEVPEAPLDMEPVDFLGIDLGIVNIATTSDGEILAGRELNRIRSRERGLRGKLRKKNTPSAKRRLEKRRRKEARRAKDIIHKIAKHVAAEAERTGRGIAPEDLTGIRERVRLRKPGGTSHALRAVGEGHPRQLVLPPAGAVHRVQGPQSGGAGGVRRSGVHLPHLRRMRPHRQGEPGLPGLVRLPGLRIR

SEQ ID NO: 37960 - protein, 394 aa, Richelia sp.
MFAIKRELKLNNKEGSLMRGIAGFKRFVYNYGLELITASWDFDGIELTDSKRIDTIKKVFTQVTMKLPEYGWMKKYPSTVYQSAFIALKNAFRRWRNGLGQFPKKKSKKKGDSFTVYKTSGVYHQIGQPALPFTNRVVINASNKIKLPGLKTFRLKENIEFTCSSQTFTVSRTAHRWFVSFAIDAEKIPPLFHPVEKVGVDLGVKCLATVSDGTYYAMPATTKKAKTKLSKLQWRNRNKVLGNFKLGIKASSNARKYYMKLASNYAQLSNIRRDTIHKMTTDLSRRVYCIRIEDLNVSGMIANHKLANAVSNNCFYEVRRQLVYKQAHYGSKVEIVDRWFPSSKMCSLCGHIQPMKLSDRVFCCQKCNHTLDRDENASINLENAPDKLVRSARP

SEQ ID NO: 37961 - protein, 400 aa, unknown
  TnpB Polypeptide
MFGIIKNGQTNCGNSLNDLQAIITVIMKVANSIIQKAFRFRICEPSKIVQANLEQTLNLCRDLYNAALQERRDAYKLNRISINYYDQANQLSEIKQTNPEYKDVHSQVLQDVLKRLDKTFKAFFGRVKKGQAGFPRFKSQSRFDSFCYPQSGFSLIGNKLTLSRIGTVKLKLSREIVGKVKTLAIKRECGKWFAVFTVETKAEILPETNKVVGLDVGIENFVTLSDGTQIDNWKYFESSKKQLRRAQRKVSRRKKFSNRWRKAVKQVKKIHLHIKNQRNDFQHKLSTHLVREFQTIVCEDLNIKGMSRGILSKQIHDVSWASFFQKIEYKVANTDRRLIKVNPNYTSQTCLCGHREKKTLAVRWHNCLKCGLSIHRDILSAKIILSLGLSGKDLTKAVGL

SEQ ID NO: 37962 - protein, 377 aa, unknown
  TnpB Polypeptide
MNVKRAYKFRFYPTPAQEITFARTFGCARFAYNYMLRMRTDAWFNEQKRVGYHETSALLTKLKENPEFKWLNEVSCIPVQQSLRHLQSAFGNFFAHRVEYPTFKKKDGKQSAEYTTSGFKWDGKKLRLAKMDDPLNIRWSRSIPTAAKVTTCTVSKDCSGRYFVAMLCDDSVSAKTEVDGQVGIDLGLTHFAILSTGEKIESPKIFRKNEDKLAKLQRRLAKKKKGSSNRTKAKQKVARIHAKIADARKDFLHKLSTWLINENQVIAVESLAVSNMQKNHCLAKSISDASWSEFVRQLEYKALWYGRTLIGIDRWYPSSKRCNDCGYTIGSLPLNVREWTCPECGVIHDRDINAARNILAAGLAVSACGESVSPVCL

SEQ ID NO: 37963 - protein, 377 aa, unknown; identical to SEQ ID NO: 37962
  TnpB Polypeptide

SEQ ID NO: 37964 - protein, 261 aa, Methylacidiphilales sp.
VSFDNVCKLIAEKYPGDFVRWLIGGQSVNIRILKTELSLEPIRADSLIFIQADALILHIEFQTLTQSKPGIPFREVKFRQSRSIPDGGIIKQARVVKRVSGWYVMLTVQWDVNPPQPLPHGEAVGIDVGLTSFVAISNGLLVKRPRFFVDAERKLKLLQQRVSKKRLGSNNWKKAQKKVAKLHEYVANCRKDWHRKLSHQICNDAGMVFVEDLNLIGLSRGMLGKHCLDAGFGQFFNILEQTCFKRDVYFQRCSIRFFKCV

SEQ ID NO: 37965 - protein, 516 aa, unknown
  TnpB Polypeptide
MQVRRNYKLQPNKIQQDLMSEWLVTLRKHRNYCLAERKRGYEGNNLEASQAVEYGFGSYCDIESRIEYGSFCPLTCAVVKHGVLPDNFQLDRAIKFSKSNKNTGKIKVFWDSVSGIQSKRTTQLRYQNYFYGRIDSQVLQQNLAKLDNAYTGFFKHQRGFPAFRKVSNFNSFQYPPNRCQFIINDSSPKNRFYSHVYLPGIGTMRYLDNRKWRIPSDAEVRTVTVKKLADGWYISVLLNTANTLPELVSIESVSSAVGIDLGINRLVALSDGSFIENPRHSTNKKTRRQLKIRQRRVSRKVKGSKNRAKAGIEVAELHKKIADKRNDTNWKAAHKVVRTAEAVVREDLNVKAMKSRCKPKRVKGRFMPNGQSAKRGLNRSISDASWGDLIQKIEWIATKFGKPVLAVNPKYTSQECSNCGHVSKDNRDGEKFICQECGHIYHADTQASRTILRRANLKFVTKDVKKVSRDSRKLTLVRHDSACKGKRNQGKNCTSKAMPEKQILVKVRQLSTPFLG

SEQ ID NO: 37966 - protein, 248 aa, Okeania sp.
LVLTRGITSLVTTSDGEKVTNPKNINKLHKKLRLAQKSLSRKTKGSNNYQKARLKVAKIYAKIKDSRLDYTHKLTTQLIRENQTIVVEDLAVKNMVKNHNPPPSPPGRGARGVGSDASWSELVRQLEYKAEWYGRKLIKIDRYFPSSKRCSNCGHIVEKLPLNIREWDCPECAAHHDRDINASINILRMGTRVGVRRKGTPTLEGCGTRSVSLWSALLDLKGVNLGRRVLRNRKSLTVMLGNPGLSRV

SEQ ID NO: 37967 - protein, 436 aa, unknown
  TnpB Polypeptide
MLRIKGKGSNSMQLTEKIRIHPTPEQEEVLWHLSEQCRLLYNFALAERRKEWVLNNLRDSFQVFPWGKTEYKVNYKKQQNDLPAIKEKYPRYSVVYSKVLQMVLRGLDGDYSSFIEQRVNGDKNAHPPGFKGKPYFTTMIYNQSGFKIKDQTISLSHFYNEIPLVFELLRTYSRVYQVTVFQKDGKYYLGIVHEVTEKPYVDNGLYQAIDLGITKTITAINTESKFFEATNPRPDKYWNPKVDELQARRDHCIKGSKHWHRLDRAKNKLTRKCSNQIKDIQHKLTRKMVDNTRANTIIIGDLDVKKMAQSKKTKTKLPVKAKKSLNRSTQNNGYLSQFVRFLTYKAELIGKKVIEIDERKTSKRCYVCGKEHDMPLWKRTMNCDCGNVIDRDRNSSIYIMLRFLSQNAMWTGYQQFVGNLRQTGLMVPKLAPQAYS

SEQ ID NO: 37968 - protein, 410 aa, Helicobacter sp.
MTLTERHIIKPAHPLFRRIKDFCHLSKNLYNYANFILREHYFAGFKLPTAYDLMKRLTQENQRDYRALPAQSAQQVLMLLAQNWKSYFQAMKAYKKKPSSFLARPKIPKFKPKGQEGVAVGVFTNQQTSFTKGRITKIKFPEKANLKRLITKINPQTSRLKQVCLIPKTTCFIVEVIHERTTQTPQVQGDGIMGIDLGLNNFVTAIDNQSSPFIIKGGGVKSINQWFNKLKAHYQAKAKTSNKRFWTKRLGKLALWRECKLNDFMHKASAYVVGHCLKKGISTIVIGKNDGWKQELKLGKRTNQNFTNIPYESFIEKLAYKCALVGITLHTTEERFTSKCDHLANEPMQHHEQYLGKRVKRGLFKSSIGKSLNADINGAIGILRKVFPDAVKTLRDSGVVFTPVKISLAF

SEQ ID NO: 37969 - protein, 374 aa, unknown
  TnpB Polypeptide
LLLTLKAKLHPDDQQRQMLLRTIETFNRACDDISKEAYETKTFNQYKLHHRLYYRIREKYGLPAQLTVRAVGRVVDSYKTERKHLHLFDPHGAIIYDERIMRFLRLERVSLTTIEGRTIIPLLVGAYGKLDQRRIRGQVDLLYVRGEFYLCLVVEQPEESPLTPEGYLGVDLGIVNLATTSDGVIYSGDGVEETRRRYTGLKAELQRVGTESAGRHLRKLSGREARFKRQTNHTISKDLVAVAKGTKRAIALEDLKGIRSQTTVRHEQRGRHGKWAFGQLRAFVGYKAKLAGVPVLMVDPRDTSRRCSVCGHTEKANRVSQSEFRCRACGHRENADINGAKNIRWGAEVNQPIVVCQPHAGLEVEPQAHSFRGG

SEQ ID NO: 37970 - protein, 367 aa, unknown
  TnpB Polypeptide
MVVNKAYKFRIFPNKTQEILIAKTMGCSRFVFNHFLAKWNETYKTTGKGLSYGACSSELPNLKKELPWLKEVDSIAIQSSVKNLADAYSRFFKKQSAAPRFKSKKNRVQSYTTKHTNGNIEIVENKIKLPKLGYVRFAKSREVKGRILNATIRRNPSGKYFVSILCETDVQPLPKTNKEVGIDVGLKDFAILSNGEVFENPKFLRNMEQKLIHEQRILSRRVKGSSNWNKQRMKVARIHERIANARTDYLQKISTHIVKNHDMIAIEDLQVSNMIKNHKLAKAISEVSWYQFRIMLEYKAKWYGRTVVAVGKTFASSQLCSCCGYQNKEVKNLNVREWNCPECHAHHDRDRNASQNILAEGKRLLSA

SEQ ID NO: 37971 - protein, 390 aa, Filamentous sp.
MLRVTKFRIYPTNEQRVHLAQSFGCCRFAWNYALNLTNETYKATGKGLNRFAIQKEITKLKKEHEWMSEPYSQCLQVVALNLSRAFINFFEKRASFPQFKSKHHKQSISYPQNVSVVEDGIKFPKMGVVYAKIHRPIEGTIRTVTVSMNCKGQYFASVLVDDGKDLPEKSGEGKAVGLDLGLTHFAITSDGSKFDNPRWIAKHERNLRAKQRRLSRRQKGSNNRNKTRKQVAGVHNKISRCREDFHHKLSRRIVDENQVIMVENLAVKNMVKNHCLAKAISQVGWGQFCTMLKYKAEWYGKVYLEVDRFFPSSKTCNVCLNQVRSLPLDVRSWRCQKCNTKHDRDINAAKNIRDEGLRILSSGTGEFAYCPDVRRDSRGRKKSTTSQPVG

SEQ ID NO: 37972 - protein, 384 aa, Filamentous sp.
MFTSLKIRLYPNPEQRLQLLKEFGCARFVFNRFLDEWNKAYEKTGKGLSYTKCANQLPALKQELPWLSTVASQVLQQSLKNLDTAFKNFFRGTGRHPRFKSKHRKQSATYPQGFKLNERSIKLPKLGEVRAKVHRKIKGKVKSVTVSMTPSGKYFASLRIELPGEFPEQSTEGKVIGIDLGLDALIVTSDGEKIKPPKFYRKYEKKLAKHQKRLSRKTKGSANRNKARLKVAKIHNKIANCRKDSHHKLSRKLVDENQVIVFENLNIKGMTRNHCLAKSINDAAWGLLQTLTEYKAREQGKVVKFVNRFFPSSKTCNCCGHRVKSMPLQIRTWECPNCKKLHDRDINAARNLRDYFLASGSGVLACGDDVRPKLEFISGRGNCH

SEQ ID NO: 37973 - protein, 363 aa, unknown
  TnpB Polypeptide
MRKTYKYRLFPTDTQEQTLETQLSEACRLYNAALQERRDAYRRGGVSLNYYDQANQLKEIRQAGDSGLANFSASQDILRRVDKTFKAFFGRCKAGKKAGYPRFKSRRRFDSYTFPSYGDGCRLTGTRLYLQGIGHIKVKLHRPVDGVIKTVSVKREAGKWYVCFSVEYAVEALPGIETKVGLDIGLTDFATLSTGETIANPRHSRKAQGQLRIAQRRVARRQRGGRNRRKAVLLLRKAHAHVKNQRADFQHKTARTLVNTYGVIAVEDLNIKGLASGMLAKSVNDAGWSGFLTKLAYKAAEAGRTLIPVDPRGTSQTCLCGAEVRKTLAQRWHQCPDCGLSAARDHVSAQLILGLGLSLLGVT

SEQ ID NO: 37974 - protein, 344 aa, unknown
  TnpB Polypeptide
MHAFNDACNAIAETAFKQQLANKFELQKMVYQSARIDFGLSSQLAIRAISKVVNSYKRDKSIKPTFRREGAVTFDERVMSFKGLHEVSLLTLQGRVLVPFRVGGYQASGLDQIKGQADLLYRHGTFSLAVTLDVPTPEPLDTTDTLGIDMGIVNLATDSTGETFSGKVIDRTRARLSAHRQRLQKRGTRSAKRRLKQLAGKEARFRRDVNHSISKRIVEKAQAKGQATAIEELRHLRQRTERTVKRSQRQRHSTWAFAQLRLFLSYKAALAGVPLYTVDPRNTSRTCSVCGHCEKANRQSQALFCCVQCGFSCNADGNAAKNISRASVMKPLVAGRAQLQALAL

SEQ ID NO: 37975 - protein, 448 aa, Halophilic sp.
MKRSNTFAVRPLSETGEQVLRDLLDASAALWNEVNYQRLMRYNDEDGFEGDVWDADTGHLEGKYKGNLGASTAQQVIRKNSEAWRGFFRNKDKYYDEPNTSVTDHPNPPGFRGNEDEGRVLKTVIRNTSYTVEWGDRSRLEILVGSELKDRYDHTGRLRLEIAGDPNWPEYDKQGRLDLWYDETDSTFRASQPVTITDARDTPLADHKAALDIGANNLVACTTTTGEQYLYEGRQLFKRFRETTREIARLQAKLPEDQDSSERIRCLYRKRTRRRDHAQEALCRDLLERLYTEGVDTVYVGGLTDVLDTHWSVETNAKTHNFWAFLQFTKRLMCTAEEYGISVEVRSEAWTTQECPHCGSTDRTTRHQDTLTCPCGFEGHADLTASETFLERHTEKAVRRMAPPVRFEWDNHDWLVSPRSHESPKERRTDPSTVHHSGNVASGESRSG

SEQ ID NO: 37976 - protein, 200 aa, unknown
  TnpB Polypeptide
VQAARNRAAEAVKGCVERWKKGKKASKPHFTSRFASYDARTGTVNDDHATLATIDGRVTADFILPDERRDTPHSAYLFNDDYDVNGATLHYDEVEDCFYLHVRTKPAVENDEAEQGDAKHVSVLGVDLGITNIATTSTGRFWSGGELNHWHREYEKRRGDLQQTGTRWAHENVQRVGRKANWALRAVSSHDLERTCEGSS

SEQ ID NO: 37977 - protein, 350 aa, unknown
  TnpB Polypeptide
MDVRRTAVVKLTVSDEQRDALHRTAEQYLYCANRTADYCWSDTSYTECKTNKREVRDALYSKLREETDLQAQLVQAAIKRAVEAVKACVERWKNGQRVSQPTFTAETMDYDTRSATFYRNKVSLATVEGRVEPSFVLPADSPTPYERYVLSENYEFRESTLRYDAATDEFYLNISMRRTDGDDEVSEDTGHPDQTVLGIDLGVNSLAVSSTGTFWQGDDYDHWCREFEKRRGEMQHCGTQAAHKALLRLGKREEAWRKQYIHTIANELVSEAIEHDCDVIAFEDLNDIREGFRKLNGTTSGRSDACLSMSRTKPLNRVSPWNRSSRTTRPNVVLGQTVGLRTRTTARRTL

SEQ ID NO: 37978 - protein, 399 aa, unknown
  TnpB Polypeptide
MLVAHRIRLDPNNVQATCLARAAGTARFAFNWALAEWQRQYEAWEADSSLPKPNEGALRRQLNAIKREQFTWMLDVTKNAPQMAIRQLGKAFENFFAKRAAYPTFRRKGRDDRFALSNDQFCIQDKRIRIPKLGWVRMREPLRFAGHIMSATISRIADCWYASITVDMPALSLPPAENQGAVGIDLGITALATLSTGEKFAGPKALHSLQDRLRRLSRNLSRKLKGSCNWIKAKRAIAKLHSRIANIRRNGLHQLSTGITRRFHTIGIEDLNVKGMLANRHLARAIADMGFRELRRQLMYKSAWRGGQVVTADRWYPSSKLCSCCGYKLDKLDLGKRQWTCPGCEASHDRDVNAAINLKNLAVSSTVSACGGEGAGLARKCEAKPALVKQESNGKAASV

SEQ ID NO: 37979 - protein, 364 aa, unknown
  TnpB Polypeptide
VNKNFKVRIYLTEEQQALVEKTFGCKRYIYNFMLNLKQKLYNFYDINLSYNNMSKILTELKKQKPWLCEVDKCALQNSAKDLDFSYQRFYSGMSGFPNFKSRRGKNSYRTNGCLKLDQDNKMIRIPKVGWIKFRDKTNFSGLTKINNITISKNASGKYFASISAEVDIIAFAKTKKRCGVDLGLKDFCILSDGIKFANPRFLVRSEKRLRVLQKSLSRKVYGSKNYEKARIKLAKFHEYITNCRKDYLHKISIYLVREYDIICTETLQVKKMLMKKDNSKNIADVSWYEFVRQLEYKCLWYGKILSKINTFYPSSQLCSNCGYRNYALRGNTSIREWDCPKCSIHHDRDINAAINILNEGLRLI

SEQ ID NO: 37980 - protein, 411 aa, unknown
  TnpB Polypeptide
MRLVERHIIKSTDSRYKDLDELCLKSKNLYNHALYRVRQQFFADKTYKNYYAINREMCDENQFDYRALPANTSQETLKLVHHNYLSFFNAFKNGIKTTKIPKYLDKNKGRQVVVYNHMTLQSKLLKEGIIKLPKSELFFKTKKTMVKQVRIVPKNNYIVIEVVYEANEKELLKDNERYMSIDLGIDNLATCVSNVCESFIVNGKPIKSINQYYNKKKSKLQSELETKNKTKTSKRIQNLSLKRNNKINDCFHKASRYIVNHLVSHSINTLVIGKNNGWKQETNIGAVNNQKFVSIPHDRFIDMLKYKCHLEGINVIVTEESYTSMCSFFDNDYIPTYGKDDDKFSPSGRRVKRGLYKTKDGMLVNADVNGSLNILRKQLNVVCDDIICPTDRGFVMNPLKINFHKLKTNKV

SEQ ID NO: 37981 - protein, 410 aa, unknown
  TnpB Polypeptide
MPDVGLRFRAYTDEQTLRALKAQLRLACEIYNTLRWADIYFYQRDGKGLTKTELRQLALDLRKQDGQYKQLYSQVVQQIADRFYDARQRFFDGLARYPKEKKAHKWYSLVYPQSGWKVLKEGEIRTKSKKNKKKVMTLKLSNLGIFNVIVHRDFPLDRVKRVIVKLTRSERVYISFIVENYEFPKLPSTGKVVAIDVGVEKLLTTSNGEYVPNQRPYEKALNKMKKLHKALSRKKFLSHNWFEAKIKLARAYEYLKNLRKDMYMKLGKWFAEHYDVVIMEDIQVKQLVEKSERKLRMRLHDVAFHELRSIMEYQLRKYGKKLILVNPAFSSMTCARCGYFKKDLTLADRVFVCPRCGWVADRDYNASLNILRNAGWEPPLVPVELRPLPVAKSYGQGGAVKQEAPPFRAG

SEQ ID NO: 37982 - protein, 411 aa, unknown
  TnpB Polypeptide
MDSQYTRNAKVWGIEITTEFKEAQDKTFATLNRISKQIRKEIKSGKIVNISKEGYVTLDNGTEYTKAGYKNYLNSLGIFDTNPDIKNESLKRELVIYMLERYAGYFGRNGNEKVPTITIKGKSLYYRDAFVSIDKKKKTITLPTIYGKFELKFSGSINLSRLHKEKFGGNYIVKQRAFVVAVDVPFKPKYERASSILSFDLNKTAKDWIVFNDGMVIARPQVIDQLCDDIRESNKLLDADKKKPVAERQLRSKQRRPIRLKWKRLHKKLKNEIRKVCESIVQKAEDSKSLLSIDSVKTGQTNGTFGQDHLIPLLQTMCENKGIPFYVIPCKNTSRRCNSCGYIDKNNRKDTDTFKCISCGYTVSAHSNAADNIAHQAQRLYDVTCPYGNYARRSVDTLVTEYNTPTTKASS

SEQ ID NO: 37983 - protein, 368 aa, Nonomuraea sp.
VAQLVKRAYKYRFYPTPEQADELGRTFGCVRLVYNKALEERTRAYTLEGRRVSYVESSAALTAWKKTPELAFLGEVSSVPLQQALRHLQAAFANFFARRAKYPTFKSRKKARASAEYTRSAFRWRQGRLFLAKMDAPLDIVWSRPLPEGGEPSTVTVSRDAAGRWFVSILLEEKIAPLPPIEASVGVDAGVTALATLSTGEKIVNPGHERADRRKLARAQRSLARKEKGSSNRARARLRVGKVYARIADRRRDHLHKVTTRLVRENQVIAVEDLTVRNLVKNRSLARAISDAAWRELRMMLEYKAAWYGRTLVAVDRWFPSSKLCSACGTLQEAMPLTIREWTCGCGAVHDRDVNAAKNVLAAGLAES

SEQ ID NO: 37984 - protein, 289 aa, Nonomuraea sp.
MKRAYKYRFHPTPEQADELARTFGCVRLVYNKALEERTRAYALEGRRVSYVESSAALTAWKKTPELAFLGEVSSVPLQQALRHLQAAFANFFARRAKYPTFKSKKKARASAEYTRSAFRWRDGRLFLAKMDAPLDIVWSRPLPEGAEPSTVTVSRDAAGRWFVSILLEEKIAPLPPVESSVGVDAGITALATLSTGEKIVNPCHERADRRKLARAQRSLARKGKGSSNRARARLRVAKVYARIADRRRDHLHKVTTRLVRENQVIAVEDLTVRNLVKNRSLARAVSDAA

SEQ ID NO: 37985 - protein, 406 aa, Nonomuraea sp.
MRRAFKFLLRPTRHQEITLTAMLDDHRALYNAALQERREAWRRCKVSIRYGDQSAQLKEIREADPEGQGCWSFTSQQQTLRRLNKAFEAFFHRVRAGETPGYPRFKGRGWFDTVTLVEGDGARWDSQPHHPAATYVRVQGVGHLRVHQHRPIAGRVKQIEIKREGSRWYVICSCDDVPAVPLPATGREVGVDMGVTHFATVSEPIDGLTDEGGHVANPRYLKTVEEELAAAQRAYARTRRGSTRRKRAAKKIGQIHRKVARRRTDHAHKTALGLVRAADVIAVEDLRIANMTKSPAVKPDPERAGGFLPNGSAAKAGLNRSILDAGWGVFLAILTNKAESAGRDVIAVDPRNTSRTCPECGHVSGANRTTQAGFVCVTCGYAANADVVGASNIKRAGLVLRDARAA

SEQ ID NO: 37986 - protein, 368 aa, Nonomuraea sp.
VAQLVKRAYKYRFHPTPEQAGELARTFGCVRLVYNKALEERTRPCALEGKRVSYVESSAVLTAWKKTPELAFLGEVSSVPLQQALRHLQAAFANFFARRAKCPTFKSRKKARASAEYTRSAFRWRQGRLFLSKTDTPLDIVWSRPLPEGAEPSTVTVSRDAAGRWFVSILVEEKISPLPPVEASVGVDAGVTALATLSTGEKIVNPGHERADRRKLARAQRSLARKGKGSSNRARAQLRVGKVYARIADRRRDHLHKVTTRLVRENQVIAVEDLTVRNLVKNRSLARAVSDAAWRELRMMLEYKAAWYGRTLVAVDRWFPSSKLCSACGALQEAMPLNVREWICGCGAVHDRDVNAAKNVLAAGLAES

SEQ ID NO: 37987 - protein, 398 aa, Nonomuraea sp.
VRRSFKFLLRPTSKQAAAFARCLEDHRQLYNAALEHRRTAYRKAGVAVRYGEQSAELKHIRADDPGGQGRWSFSSQQATLRRLDKAYRAFFDRVKAGRTPGLPRFRGRGWFDTVEWPKDGDGCRWDCQPEHPTAAFVRLQGVGHVRVHRHRRVLGTVKTISVKREGARWFVVLSRDDVPAHTLPATGAVADIDMGVASLATTSDGDHLDNQRHLATSASRLAAAQRNLAGRKRGSKRRGKAVARVAALHAKVRRQRLDAAHKAALALVRGYDVIVHETLNVAGMTRRAAPKPDGEGGYLPNRQAAKSGLNKSILDAGWSAFLTILSHKAESAGRQLIAVNPANTSRTCSRCGHCAKDNRVTQAVFRCTGCGFCAHADVNAAINILRAGLALREAAQAA

SEQ ID NO: 37988 - protein, 331 aa, Nonomuraea sp.
VSSVPLQQALRHQYTAFANFFAGRAKYPRFKSRHGRQSATYTRSAFRWKDGRLHLGKMEGPLEFVWSWPGIDPASIEATTVTISRAPDGRWYISLSVEADDKGMRLPPTGEAVGVDLGVRDFAVTSGGERIANPRHLERKARNLARYQRRMARKQPGSANRARAKLKVARAHTEVRDARSDFLHKTTTRLVRDNDVIVVEDLAVTNMVRNRSLARVISDCGWGEFRRQLEYKTAAYGRRLIVIDRWYPSSKTCSCCGHLLVELKLGVRHWRCPACRTWHDRDVNAAKNILAAGRAVTACGADVRHSGSRRVRSAVKQETQPARAGTPAFGL

SEQ ID NO: 37989 - protein, 409 aa, Nonomuraea sp.
MAIRRSVVKQRGLPSVVQLLLSPTPAQADALANAVRVCNQAATFVSRLAWQQHTFTVLELHRLAYYPARAHLPELGAQAAVRAIARVAGAYANRRASKKRAHIFRPLGAISYDARLMSWSRDTRTVSLWTPTGRVHVSYAGRQEDLKALDTLPIGEADLICRRGMWLLQVAVTLPKPAVREPVNGFLGVDQGVANLAVTSDGVVLPGPVLTGTIGGNHHARALRERRHRQRQRLQEKGTSSARRVLRRLSGREHRMMTDVNHQISTYVVREAERTGRGIALEDLQGIRGRVRAHRLQRRTIHSWAFAQMIDFTSYKAARAGVALLLVDPAYTSQACPRCGCVARENRPARGRFVCTGCGLAGHADHIAARNIATRGAAGWAAVNQPHATGLPSARRDRESKPPASAGGS

SEQ ID NO: 37990 - protein, 484 aa, Nonomuraea sp.
MRLLISYISHLLAVWAAQPLVLGARTAAGSGSHVEVTRHSGSTPVPGLAQVAGVPGELLRGRLGVVGAVRGAIGRAVADGEQFPAGVCRGEFLLRPTGKQAAALAQCLENHRELYNAALEHRRTAYRKAGVTVRYGEQSADLKHIRADDPGGQGRWSFSSQQATLRRLDKAYRAFFDRVKAGRTPGFPRFKGRGRFDTVEWPKDGDGCRWDSQPEHPTATYVRLQGVGQVRVHQHRRVLGIVKTISVKREGARWFVVLSCDEVPAHPLPATGAVAGIDMGVAWLATTSDGDHLDNQRHLATSASRLAAAQRDLAGKRRGSQRRGKAAVARVAVLHAKVRRQRLDSAHKAALALVRGYDVIVHEALNVAGMTRRAAPKPDGEGGYLPNGQSAKSGLNKSILDAGWSAFLTILSHKAESAGRQLIAVNPANTSRTCSRCGHCAKDNRVSQAVFRCTGCGFCAHADVNASINILRAGLALREAAQAA

SEQ ID NO: 37991 - protein, 368 aa, Nonomuraea sp.
MTQPVKRAYKYRFYPTSEQAEELARTFGCVRLVYNKALDERTRAYALQGRRVSYVESSAALTAWKRTPEPAFLAEVSSVPLQQALRHLQAAFANFFAKRARYPTFKSRKKSRASAEYTRSAFRWRDDRLTLAKMDQPLAIVWSRPLPQGAEPSTVNVSRDAAGRWFVSILVEERISPLPPVETPVGVDAGITALVTLSTGEKIVNPRHERRDRRKLAKAQREVSRKTERSNNRAKARLKAARVHARIADRRRDFLHKLSTRLVRENQVIAVEDLTVRNMVRNHRFARAISDASWRELRSMLEYKAAWYGRTLVAVDRWFPSSKLCSACGALAGSMPLTIREWTCACGVVHDRDVNAAKNVLAAGLAES

SEQ ID NO: 37992 - protein, 660 aa, Nonomuraea sp.
LLVRRRLLLVKGQTARTAGARVPLRGGVEEKTGEVLPAAVLAERVGWCAALVSGIVARLLAEHWVDADVALLAGGLDAGGRKLPSNAWMAMRRLGWTAGAPEGVTVNDRIVRMAQEQAGRLLRAANWRVQLTAGVLATWPVDVRKRTAEEWEQVRAAIPGGRHLPSGVIKARTRQITAYLRAGGRLPTDVFELEDPPRAARMLLLAACDRQQATIERSDADPRRALLRLQLPTRPDPRKYADWTWVACPIMLPPTIPANAVLHLPTLCLHGGDVRAEVAYTHAVPQAQRLGHTVALGVDWGLNTLLSAGAVRLHGDGRLTALGGGAQFRAAGVLAKQHRLRRHSEQLRAKVDHYQRLIDGRGPDPALAGKRALLAEEIRHLSKRRKYLNDALARAAARWVVDHSIAAGATVIYLEDLRSLEACRMGRTLNTRLSQQVRGRIVDHVRSIAAEVGIAVVIVPAKNTSRHCPNCLTVLRHCKAPDQPAVAGWKWASCLGCGWQGDRDHGAWLRIAARGLSHQATTAVDRATGEMVIRSVRDELEAQAVIASPASKTIRTDRSKTGPTRHRTPRPVPRRRRAPSPARPAGQAGQRPEGLEPTDRSRLPRAAHRHQVGMTISTPTRRHQPRGAALGAGFHLHAHASPPRWDTIAGVISTKGRLAD

SEQ ID NO: 37993 - protein, 256 aa, Nonomuraea sp.
LPSDPSSVTVIKDSAGRYFASFVVETSDEPLPETGSEIGIDLGLTHYAVMSDGQKVDNPRTLRRAAKKLCKAQKALSRKEKGSANRAKAKVKVAKAYAKVASTRRDWAHKLSTTIIRDNQAVYVENLAVSGLARTRLAKSVHDAGWSQFVAMLEYKAVRYGRHFGKIDRWFPSSKLCSACGTIAESMPLNIREWTCPCGAAHDRDVNAAINVLAAGQAERLNDCGAQVRPGLVPAPREEAVTHPGPHAWQTGISVH

SEQ ID NO: 37994 - protein, 406 aa, Nonomuraea sp.
VTTRQGFRVELAPTLEQRARLGRHAGLSRVVENFCLEKVKAALAQREAEKTYGVLDKELTPVPWSAPALERLWRREHGERFPWFDAEGMSSRVPKEACRVRAAAFKNFFDSRSGKRKGRKVGFPGWRKRKHGSRFRYDADRARPESARVMRLPGVGKVRTLEDMTWLTDRISDGRARVIGATVREQAGRWWASFQLEIDRADINTRRAVSSDAPACGVDVGVKTFATVVDDDGTVSEIHAPKPLKAALRKLRKAGRAVARKKPGSSNRVKAIRHLGKVHLEVGNRRADFLHKTTTELARSKRAIAVETLNVAGMVANRRLARAISDLGFGEFFRQLEYKTAWYGSAVWAADRWFPSSRLCGGCGTINRELTLADREWTCGCGLVHDRDVNAARNLLEAMNLERQAA

SEQ ID NO: 37995 - protein, 716 aa, Nonomuraea sp.
LFAACDARLRCAASLTGLRRPDRHLDAFIAFDRVEGAARSASARAEARCRVPMGAADVMRAGEPVKRMPPLAAGQTCRTAGAHVVLRGGVEDKTGEAVSPGALAMRVGWCAELVSGMAARLLAEHWNGADVALLAGGVDASGRRLPSKAWMALRRLGWTTSAPAEVTVNDRIVRMAQEQAGRLLRGAQWRAELTAAVVTTWPTDARRRTTEEWERVRAPLPGGRHLPSSVVKARTRQIAKFVRANGRLPMDVFELEDVPRAARMLLLSACDRQQARIERSESTPQRAVLRLQLPTRPDPCSYADWTWVTCPITLPPTVPASAVLHLPTLRLVGGRLQADMAYTHAVPATRPTGHTIALGVDWGLNTLLSAGSIRLHHDGRITALGAGAQFRAAGVLAKQHRLRRLSEHLQAKADHYQRLIAGDAQHELTGKHAVLRGEVRHLSERRSNLNDALAWAAARWAVDQAIAACASVIYLEDLRSLEARGMGRTLNTRLSQQVRGRIAGHIQHLAAEIGIAVVTVPARNTSKHCPHCLTVLRHRKAPDKPTITGWKWAVCPNPPCGWQGDRDQGAWRRIAARGLAHQAKTTTERASGTMVIRSVTDALEAQAVITPPPAKTLRSDRSKTGPTQHRSSRPAPRRRRAPSPARPPGPAGQRPEGPAPTDRHRLPRAAHRHQDGTTISTPTRRHQPRGAALGAGFHLHAHASPPRWETIPAEYA

SEQ ID NO: 37996 - protein, 1299 aa, Nonomuraea sp.
LAQRQLVATPAQDPGPGKWRFGHRARLALTPAQVRVIDDQAHAARSLWNLLHEWWTMLPTCRRSLATADAAIRQARQDIDWLAVLPAQAAQAVLKTYVQAWKNCWQGRAGSPTFKGRLRSVMAVDIPQGRDLHVTRVHRRWGMVTIPKVGRVRFRWTKDVPVGKKADVSNRITGARLVKDALGWHIAFRIQTVAPEPRAPPGAGRRHRRRSGRAAGPVGWQPSHPREMEGHQGQAQRLADRQGTGRAAGSGAAGGPPQELPEAGRAHLAPVAGHLRPDRAPACKSQAPGDRLAASDHHRDRPHLRRHRGGRPAHHEHDQERQGHRREPGDERRAKDRPEPLHQPGGPGPHRDDADVQGRTLWRRAVQGCRCGHFPALLGLRVHHPERPGESGRVRVQEPGLRLVRQCRPQRRPEHLASVSDGPCARPGCREGSRQARSPRQARHRKVGGNLLRAPHGGEHFNRWCPGTDAVRHELPVRAGTGGASGAAGARLLLGLHLRLPRAIGDVRAADRAMTARAGLPSGGPPPPLRDDPVVRGHPARVVEHVERDRRRQVVVHAVRERRAALPRQLQRGHDAGGGQQRAAGEGGGGARVGVADQHGRHLRMPPEQLFQRLGPVQPDAVDHRAVQRGGRVVEGHEHRPVRARKHVVQPGQRLVVQVARVVAGDGGVAHGVDGPVRAQDLVDRARAAVPVAQQDAAELLPYVVVARADQDGVAGGEQLARLLVLLGEAVVGDVTGDEHGVEAGVEVGGERVQIAHDGGGAVDALGRRADVDVAQVSDHDHVDVVLPGSACSPTVGPGTGPCVRSGFVRKDWAGFGVDLHLEVSTGGGRRRGLEEALRQAVRDGRLPRGTRLPSTRSLAAELGLSRGTVSAAYDQLVAEGYLATRPGSATEVADVADVSPTPRSRPGPPSESSPGPGHDLRLPSDPSAAPLHDLRLPAGPPGAPLHDLRPGQPDVSAFPARAWLRATRHVLSTAPAEVLGPCDPRGRIELRAALAGYLARTRGVLTTPDLIVVTTGFVQALNLIAQVIDGPIATEEPGHDFYREVLRRAGRETVPLPVDGLGAQVDTLTGATAAAVVTPAHQYPTGVPLHPARRRALREWGGLVVEDDYDGEFRYDRQPVGAFQGTAPDRVVYVGTTSESLAPALRLGWMAVPPSLIGPVAEAKLHADAHTEVLGQLVLARLIETHDYDRHIRAARLRYRRRRELLLARLGPGPGQPLPGVALPGVAAGLRALLLLPEAGPTEAELLAECERRGIALRPASPLWRRDGPGGLLVGYAAPSERAYPHALEALARTLAGT

SEQ ID NO: 37997 - protein, 380 aa, Nonomuraea sp.
VVFNDALRLRSDVRAAGLPYLSDADLSKRVITAAKQTPERAWLGEVSAVILQQALADLNTAYRNFFASLTGKRKGRKVAPPRFRSRKDSRQSIRFTKNARFTVTESGRLRLPEIGDVPVRWSRSLPSDPSSVTVIKDSAGRYFASFVVETSDEPLPETGSEIGIDLGLTHFAVMSDGKKVDNPRILRRAAKKLRKAQKALSRKEKGSANRAKAKVKVAKAYAKVASTRRDWAHKLSTTIIRDDQAVYVEDLAVSGLARTRLAKSVHDAGWSQFVAMLEYKAVKYGRHFGKIDRWFPSSKLCSACGAVAESMPLNIREWTCPCGAAHDRDVNAAINILAAGQAERLNDCGAQVRPGLVPAPREEAVTHPEPHAWQTGISVL

SEQ ID NO: 37998 - protein, 236 aa, Nonomuraea sp.
VAVPLALSDGNHHTHERWKATKDKPNAWLTDKEQAALLALERRAAHRKSFRKPGERTSRRLRATYGQIARLRARAKRRAIDWQHQTTTEIARTYGVIVVEDLPITNMTKSAKGTVENPGTNVAQKTGLNHSISQEARGRTVTMLTYKVARYGGALYKVAAAGTSLRCSACGFTTPSGRESQAVFVCKNPGCGWSGNADHNAARNTLHLYRMGLALVPAAGRAVVRRARRVKPATAR

SEQ ID NO: 37999 - protein, 315 aa, Nonomuraea sp.
LRRLDKAFVAFFKRVREGRAPGFPRFKGRGWFDTVEWPKDGDGCRWDSQSEHPTATFVRLQGIGHVRVHQHRPVKGQVKTISVKRKGQRWYVVLLCTDVPTEHLAGTGAVVGIDLGVASLITTSDGRQVANPRRLSAMADRLATAQRDLARKTQGSMRRRRAVARISHLHAKIRRQRVDDAHKTALALVRGYDVIVHEALKIANMTRSASGTMETPGTGVAQKSGLNRSILDAGWGVLLTILAHKAESAGRELIAVNPTNTSRTCSRCGHCAKENRISQAEFRCAACGHEAHADVNAAINILRAGLALRNAAKAA

SEQ ID NO: 38000 - protein, 429 aa, Nonomuraea sp.
MLTGRKYRLDLTPDQAEFAERIGGVCRSVWNTALEQRRTYRRRDAWIGYHEQARQLAEAKQEFAWLAEVPGHCLQQTLIDLDQACSRHGTWKVRWKSKARTRPSFRFPEGAKIAIERLNRRWARAKLPKLGWVRFRITRPLGGAVRNATVSRDGTHWHVSFLVEDGALTPQRHDHPGSAAGIDRGVAKVVTRSDGIFHHQVFAREREVEHAATLQRRLARTQKGSTRREHAAAKLAKALAKVRRRRADFAAKTAHTLATGFELIVFEALPTKNMTAAVAPKPDPGQQGAFLPNGAASKSGLNRSILDKGWHRIELATRGKARYTGTCVITVNPAYTSQTCNVRTVVDRKSRQSQAVFRCTSCGHTEHADVNAAKNILTAGRAEHARPRPGARAGARKPRNHVGRKANRQATAAQGHATASPELAGIPRP

SEQ ID NO: 38001 - protein, 396 aa, unknown
  TnpB Polypeptide
MRKLIKGIKVMLVPNNKQNTLMFQNAGTARWAYNWALGREKENYADGGKFISDNDLRKELTQLKKEEKFSWLNSVSNNVPKQAIKDACTAYQRFFKGQAKFPKFKTRKKSPPKFYQDNIKIQFTSTHVKFEGFAKSTKKNKQQLNWVRLAEHDRIPFGKDVKYINPRISHDGLNWWISVGIEYPDSLETPLNEGIGIDVGIKDLAICSDKVAYGNINKTKKMKRLEKQKKRLQRQVSRRYEANRDGLKYIKTKNIIKLEHKIKSVQHELNGVRDNYLQQTTTEIVKTKPSFVSLEDLNISGMMKNCHLSKAIQQQSLYEFGRQIKYKAAWNHIEVRIVDRWYPSSKTCHDCGKVNKLLNLNDREWVCTGCGSILDRDYNASLNLRDTDKYKIFKVA

SEQ ID NO: 38002 - protein, 421 aa, Crocosphaera sp.
MILTFEYRIKPAQKQAECIDHWLELLRRHWNYALGQRLDWLRRTRCTIDRCSLISEPIGEITEKVNYYTQQSDLKQTKILFPDYKDIYCEVQQMNLQRLEKAWKRWLVPNKKGKRGGRPRFKKAGQLRSFSFSRVNHPKAVIKFFNNCIWTKKWGAIPVVVHRPIPDGFILKTATIVKKADGYYVCLTAEDDNIPNIIPIDNIKSAVGIDVGLKEFFTTSEGDTVAVKKIYRNRQNHLARQQRKLARKVKGSKNYDKQQKRIALTHQKIQRYRKDWHYKTAHWLVNNYDFIACEDLNIKGLVRTKLAKSILDVAWGNFLIKLEAVAVKRGVWFVKVSPHGTTVNCSSCGHKVPKTLSVRLHECPRCNLTMDRDENAAVNVLNKALQMHGVGLTLSACGGLVDGQPVKQETSEKEYVQLSLL

SEQ ID NO: 38003 - protein, 285 aa, Escherichia sp.
VPTIRFNGTSVHFDKKTYSLRDNSLSLYTLNGRIRVPMIIGEHQQRMLSSGHPKEAELVFRKGLWFFNLVVEITDTTMVVSEKTMGVDMGENNLAAHSLGKLFGGEQLRDERDRHLALRRRLQSNGSQSAKQKLRQVSGKEMRRVKQTNHETSKVIVAAAAEAGIGTIILEDLTHIRDRIKAGKRVRSRLHRWAWRQLQTFIEYKARAVGIMVKYVNPAYSSQSCSCCGCLGKRHKHRFECPHCGFRAHSDLNASRNLAWIGETAVLPRASVNTPDVGSPSLAPQ

SEQ ID NO: 38004 - protein, 589 aa, unknown
  TnpB Polypeptide
MLMGRSNGSIISVKVPIRWDAMTEKQKIRLSRITGRDTRVIKAYLGVIERHEPDLLTGKRKNRIHAGKLDEYTLTATRGNASRVSVPHGFKARFPNLSVNEFQECRDTAIAMWKSYLERGGARPLHSKKYTTRKIPRFAFKQRFKFLYTPHQTIKHWLALRDSLDSALKGKRVHDKILIPLSVSSYHLNKMREGDLKTVRIFKDGSRKWWTIFTVTLNTDSIETNGKPPAVLSIDLGIKKAACSVLLTQKGYKQVRYWLQKDKLPQMQRYDQMIASLQRKKEDHIAQGKDPSGVTKGLRVLRSRRSNLSKEYDKKLVKDITKHIFELIQHFNLYVSIGQLRGIRNIARRGNYKGRAYRGMIHRWSFARVREMLSHKLAALGFDVKKFLAVPEHWTSIKCHKCGKKGIRPKQNLFICSCGYRANADLNGAINIGRRLIMLIPHLRDENTGLGMWLLPREKTTPKARKSSGSKRKSSLPQKPLASFEGESVADCIDQTTLVLSESGEDPAMVNTVEDPSATVKNSNHSTQMQWKEAKHQQRSNTPMMLDKAHITVSNSGLTQAGDSSREKGGTQKFLCVSSVTNRRIRSYL

SEQ ID NO: 38005 - protein, 424 aa, Moorea sp.
MRIAYQYRLKPTKEQKNKIDNWLSMLCAQYNYLLADRFTWYEHNRCSVNACPLVCHLPELRNNPDYYSQKKTLPNLKKTHPWYKEIHSQVLQDVVKRVKLAFDRFIKGDSNGKRSGKPRFKKRHRYRTFTYPQMKEKCLEGNLINLPKIGKVKIVLHRPIPVREASATPNGFNIKTASITKKCDGYYLVLSLEDKTVPEIKPDINPGSIVGIDVGLKDFLTTSEGETIEIPQYYRKSQKRLKVIQKRVSRRKKGSSNRLKAIKQLRKQHKKVADKRKDFHFKTTNYLLSKYDVVAHEKLNVKGLVLSRLAKSVLDAGWSSFLTILTNKAVRVAWPTALNAGLLVIPVSAQNTSQNCSSCGKKVPKKLHVRWHDCPHCGCNLDRDHNAAINIKNRAAGQSALKAQRLLRDARIGWEAYTEPVRSV

SEQ ID NO: 38006 - protein, 397 aa, unknown
  TnpB Polypeptide
MVKATKVRLYPTVAQQAALTFQFGAVRWVYNYALNWRSTAWKARGESITQRMTLDKLVELKRLEDTAWLRDADSQALQQSLLHLDTAFERFFKKQARYPNYKRKHGKQSLSYPQRVNVVDGNSLYLPKVGTVRAVLHRELVGKMKTVTVSRSWTGKYYASVLCDDGEPLPAPIGSMDEEAVIGLDMGLSHLAITSDGYKESNPRFLKQAQANLRRKQASLSRKQKGSANRNKARVLVAKVHEKVTNARNDCQHKLSKRLIDENQAVCVETLKVRNMLKNRKLAKSIADASWNELLRKLGYKARWTGKHLVQVDPWFASSKTCSVCGVRADVMPLSVRQWHCGSCGHEHDRDINAARTIRQQGILKLKAEGLSVSACGGLRKTGLFPAVACEAGSSVL

SEQ ID NO: 38007 - protein, 474 aa, unknown
  TnpB Polypeptide
VQLAYKYKLKPTAQQLDIFKIWIELCRRQYNYRLGERFSWWESTRTPINACPLTCSITPIQEIYKNIPEFRVQTRDGRKKDINGKPITKTGDKHPNIVNGYVQWQAVQLADQKHTKKLFPEYKELDSQVFQDVVNRVESAFARFTTPDQNGNRSGKPRFKGKHYYKSFTYTQLYNSDVTKDESGRFCVNLAKIGLVPMVFHCPVPDGFKVKTGTIIREADGWYINLTLEDKDVPVTTVAEIQPTERNSLGIDLGVENYAALSTGEMVEHPRFLKTSANKLAKLQQRLSKHKKHSKPWKIIKVKIAKLHQHIACQRLDFQFKLAYWIFGKCDVLFIEDLKLKHLTRRAKAKIDNSGRWLPNGQAAKSGLNKSMLDAAHGQSVQVLKFVAWKLGKVVSVVDPRGTSQHCWDCLEEVSKELKDRWHSCQCGQELHRDDNSAKLIKKIGLICANSGDGTASLKTALGLLTERSQRSVA

SEQ ID NO: 38008 - protein, 465 aa, Fibrobacter sp.
MLTAKISVHRAFSLSMIQQCGRKIELRLNDEQKRICFRSCAAARRAYNWKLAAQNTAYEFAKQNTPEGQKVKCKLGSPIDWHREWVEYKHLEGNEWLMVLSKCCGQEALRDLGTAWQKFFKGTGKHPQFHRFGELDSFRLTGSVYIGRDFVQLPSLGRVKLKEKNYIAIPDGVDKVPIPMATVSRQGSHWYVSFAYKTDIIPLYENVDITDEEHDVVGVDLGVKDLAITSFGEVIVNPKPYKKHLQRIKRWQRKISRRKKGSKNRKKAIRKVADLHRRITNIRINSAHQCTTSLTRKLAPKMLVIESLKPKNMSRNRKLASSVLDANFNRIATQLEYKCKWLGIKLVKAPQFYASSQYCSKCGCYQKKDLKLTDREWTCPHCGCHHDRDVNAARNLRFYGLWLLGYANQQTAASYAVAACPSCGRLTEGSGSEPRPKDLRLQFFETQEQCRSLKQEIISSIRHCA

SEQ ID NO: 38009 - protein, 228 aa, Salmonella sp.
LCDDGASAPEKPTYLKEEKITGLDMGLEHYAITSDAVKVPNPRHLINAGRNLRRKQKALSRKQKGSANRKKARIRLAVLHERVANARADFQHKLSRAIVDENQAVIVETLKTANMMKNHNLARAIGDAGWHSFITKLEYKTATKGVHLVKLDQWFASSKTCHCCGYKMPEMPLHKRIWRCHECGAEHDRDINAALNIRQKGILELKAAGLVVSAHGGQRKSVAQTVAA

SEQ ID NO: 38010 - protein, 406 aa, unknown
  TnpB Polypeptide
LVLRAYKYRAYPTREQVEFLSQNFGCVRLLWNKLVSAFHSWSPTGPNPYVSEKSLKDNPEFAFMNDVISYALQQKRMDFDETKKQYFNKKRKVKIGKMKFKSKSSNRDSFRIPGQALGFSACVNFDLGTIKLPKMSPLKIIIDRKFTGTLKSVTVSRNPSNQYFVSVLVEEEIELKRNTGRSIGIDLGLTHLAILSNGIKFENPRWFRESQAKLKKAQQHLARKTKGSNRRKKQRIKVARIHQKIANQRNWFHHNLSSWLVSNFDVICTEDLSVKNMVKNHCLSKSISDAGWSSLVSMISYKSSWYGRTFHKIDRWEPTSKTCSCCGAKAEQMNLSIREWVCNSCGASHDRDINAARNILNTGLKDLYSLTSAELADYRRREAVSPEVEIPMASSMKRLADLYRKA

SEQ ID NO: 38011 - protein, 402 aa, unknown
  TnpB Polypeptide
LRLSETIYVNPSVQLSKLCHLAKNLYNLANWYVRQDFFKLNNFLNYYDLDYILKDKRAYRKIPSQTSQQTLKLVNRNWRSYFRALEEFRANPKKFKNKPGIPHYKKKNGESIVIFTNQQCRIKEGYLRFPKKVNLKLTKTRIKEKLKEVRIIPLGIKYKIEIIYEKEEQDLGLNKNNLLSIDLGLNNLITAVNNIGLDPIIIKGKVIKSINQYYNKQLAYYRSIESKKGNFQDTKRIQKLHLKRNNKINAIFHRISRLLIDYCIKNNFGTIIIGYNEGWKQNINIGKKNNQKFVQIPFLRLINQVKYKSELIGITVMAINENHTSICSFLDNEEIRHHKRYIGKRISRGLFRTSNGTLINADVNAGYNIMKKAFPNSVKVDGIEAFGLMPQVIYQKIFDTII

SEQ ID NO: 38012 - protein, 366 aa, unknown
  TnpB Polypeptide
MIKAHKKFKIKHMRRTSRIFLNDLNSSKVKTALDFLTKSRNGIQYFTDLFWQRGDFSSTLADKKTIHRGIEKMQIPSSRLAQCLAKQAKEIIRSAHSLNGSKPQVKKHTITLDNRFIQIESFKGHFDYAIKLGGAGVPKVLLPVHSTKHLNEKLKDGWKIGKSIRLGQINKKLFIDFLLEKPLPKLRKTGKVVGLDSNYKNGLILSDGQQVGQNLYSKIATFSKRQKHTYQEAKSITFQAIKQIDLTKVKMLVVEDLRYIKNGTRGKFPRTLNRRLSHWLFNSITDRLNQRCEEEGTQLQRKSPWKTSQRCSICGKWDKRNRRSDRFNCVHCKNSDHADFNAAKNLEFLGLAGIYSFRSLEKLKTK

SEQ ID NO: 38013 - protein, 498 aa, unknown
  TnpB Polypeptide
MAIRKKQEPDEYQKALRKFHKKSNRHVVVFEADISEDEKRRIFSDADHLRQCGNELLGIMERNLEQLLRTKRYRALQKLYGKVSDPIHALEKKEVLSDEETQKLNHLKKERAELTNSMNQMRESYQVTWDFCRTKMMELKEKYHLQSIFALSRAEDIWAAIETILYSSGRKLHFKKRGDLPEILAKQSTRGLVIDSSQSGLIVKYGKVAIPCKYKAKDLWLQDEEKAILAYLEGPEIQDAHAVDQMSKGIITDTYRPCFASLVCKKIRGRLRVYVHITVEGKAISKRRKDSTPRHYYGKGNIGCDIGTQTIAYTSNTEVGLENLAERGNSIQHVERQEALILRAMERSRRAMNPNHYNENGTVKKGHKQWNFSKRYQKLKQRHQKLCRIAAENRALAIREQVNHLRSLGDCFITEPPNAKKLQKRANPENPVDKNGRMKRKKRFGRSIKNRCPGYLQAKAKQLFESTGGMYVEVPILYRASQYDHTSDSYIPKKFSYV

SEQ ID NO: 38014 - protein, 482 aa, unknown
  TnpB Polypeptide
MAVHQAFRFELDPSTTTRAALSSHVGASRFAYNWGLALVKDRLEARRVLEVLAMRQGAGGIKARAWADETAGPVPWTLYSMRREWNLVKNEFAPWWQENSKEAYNSGFDALARALKGYFDSRGGARAGKAIGFPSFKKKGRQQSCRFSTGVIRVLDDRHVALPRLGVIRTKEHTTALLDQVVADRARVLSATIKEEAGRWFVSFGCEVERHDSVATYQDAIVGVDLEVHHLAVLSTGELVENPKAVSRYARRIARLNRALSRAQKGSKRRAETRAELARCHRRVANVRQDTLHELTTHLATAYGTVVIEDLAVKNMTACPKPKADPENPGHHLDNGHAAKAGLNRSILDTAPGALRRQLTYKMGWHGGHLVLASRFFPSSKKCSSCNETKATLSLSTRTYRCEHCGLVLDRDLNAARNLAAYGKEHLVAGSGPETRNGRRGDVRCTSDTGAQSPKSPRGRKRQDGSGQPAKAVTASSQGEAA

SEQ ID NO: 38015 - protein, 366 aa, Cyanobacteria sp.
MERAFKYRFYPTPEQESLLRRTLGCVRLVYNRALAARTQAWYQQQQRIGYGQSSTMLTAWKREQELSFLNEVSCVPLQQCLRHLQKAFTNFWTGHAKYPNFKKKRNGGSAEFTRSAFRYKDGQVYLAKCTEPLPIRWSRQLPKGIEPSTITVNLEPSGRWTVSLLVDDQTIQPLPSIDAAVGIDAGITSLITTSDGVHIANPKHWDKRFKQLRRAQKVLSRKEKGSRNRDKARLKVAKIHAAIRDSRKDFLHKLTTRLVRENQTIVAESLAVKNMVKNPKLAKAISDAGWGELTRQLAYKALWYGRNFVQLDRWFPGSKTCSKCGHIVEKLPLSVREWNCPKCNAHHDRDENAAINHLAAGLAVLV

SEQ ID NO: 38016 - protein, 352 aa, Natrialba sp.
VTTITKTLQATFAPPTAHKQSKLNDLLETYRDGLQEAFNAGASTMSAVSDIVTPYDLPYQAKAALCNYVPKLRKTYNAEELDDEHPIRLTNQAAKFDHSEERDYEFTWWVPRPGRGTNFWIPLRINPEQENLWHDLVSEDAKAGEIRLQKHRKSWVLHVTVEYPVEQPTTNGDATHIGLDIGETALITGCALKDGSPTDPFVCSGSRAKHLRKEMHTILKRLQERDASEWRIDDRFNHYQNALTDIVEKASRQAVEYATQFENPVLVMEDLTYIRERLDYGKYMNRRLHSWAFARLQRRIEDKATEAGIPVEYVNPAYTSQTCHSCYRIGRRGFTSRVPVFERRLPRFDASG

SEQ ID NO: 38017 - protein, 416 aa, Thermoplasmatales sp.
MKVRRTEQIFLRENETISHMCHLSKNLYNQVNYILRQQFIDKQKLTTYGDLVKLFQEPSDRDEYNNYQKLPAQTAQWTIRKTKQAWDSFFRAIKAWKKYPDKFMGRPGSPGYKARDGEFLLVFTNQQCSIENRILKFPRIMGVEVKTRLSENEVKLKEVRIVPQGTGYMMEIVYEKETADISGMKPERVMGIDIGVRNLVTMGNNIPEKGIAVKAGLLKSINQYFNRELARYRSINDLQGNERKTTEKIQKLFMKRNRKVKDIMHKVSKSIVEYARSHNIDTIVIGHNSGWKDSSNMGKRNNQNFVQLPFNMLITQIKYKAQEIGINVMIQNEDHTSKCSFLDNESIEHHDTYLGRRIKRGAFRSANGKLIHADLQASYNIIKKAVPEAFANGIEGIGLYPRSLSISQMITSKGGC

SEQ ID NO: 38018 - protein, 414 aa, Thermoplasmatales sp.
MKVRRTEQIFLRENETISHMCHLSKNLYNQANYILRQQFINKEKLTTYGDLVRLFQVPSDRDEYNNYQKLPAQTAQWTIRKTKQAWDSFFRAIKAWKKHPDKFMGRPGLPGYKAKDGEFLLVFTNQQCSIENGILKFPRIMGVEVKTRLNDVKLKEVRLVPQGTGYMMEIVYEKEIADISGMKPKRVMGIDIGVRNLVTIGNNIPEKGIAVRAGLLKSINQYFNRELARYRSINDLQGNERKQTKRLQKLFMKRNRKVKDIMHKVSKSVVDYAKIMGIDTIIIGHSKEWKQSANMGSKNNQNFVQLPFNMIITQIKYKAEEAGIKVMIQNEDHTSKCSFMDNESVENHDTYLGRRIRRGTFRSANGKLIHADLQASYNIMKKAVPEAFANGIEGIGLYPRSLSISQMITSKGRS

SEQ ID NO: 38019 - protein, 366 aa, unknown
  TnpB Polypeptide
MKLIAQVRLNPTPEQANYLLQTLEAANALCNTISVFAWDKKVFGAFGLHKALYHQLRGDTGITAQVVVRMFAKVSDAYKLDKKRKRTFQPHGAIAYDIRILRYYTEKQAVSIWSVAGRLHIPYSAGERQKELLQYQQGESDLVYSKTTKEFFLLATCDIPDPDQRQTDEALGIDMGVTNIAVSSDGDVFSSETIEYTRKRYAKLRKALQSCGSKSAKRHLKKMGSRQQRFQKDTNHVISKRLVIQAKDTNRSIKVEDLTHIGARTTVRGADNRAKHKNWAFAQLQYFLAYKARMHGVKLESVDPRYTSQRCFECGHVEKANRKTQDTFLCCRCGHSAHADVNAAKNIAFWATVKTPIVASRPEKSG

SEQ ID NO: 38020 - protein, 391 aa, unknown
  TnpB Polypeptide
MSQRAYQYRFYPTQSQVHTLACTFGCCRFVYNWALKLRTTAYFEHDTRLYHHDLSAALTALKREEGTTWLAEVSSVPLQQSLRHLDKAFVNFFEHRTDYPTYHKKHQKQSATYAASAFVWNGSTLTLAKQKEPLDIAWSRSLPEGCTPSSVTVSKDNAGRYFLSILVDEQIATLPITEKNLGIDVGLKSFLITSDGETIDNPKYYVRNEKKLAKLQRHHARKKKGSKNRDKARKKVACLLARIVDTRRDFQQQLSTRLIRENQTICLESLAVKNMLKNHCFAKAIQDVGWSEFARQLEYKAAWYGRTIVKIDRWYPSSKTCSGCGFLMEDMPLEVREWVCPQCGVCHDRDINAAKNIVTEGLSALNACGGTVRRGRRKSGHAGSVEAGSPS

SEQ ID NO: 38021 - protein, 366 aa, unknown
  TnpB Polypeptide
LSTWRTNRGEISGTRPPHKRKRFFRVVWVQNGIYTEFLPGQTSLMLSLGKDGNRLRDPIVISLPDYFIPFGTPSKVEIGWRKGARGGGYEVRCTYTRQLVLPGQQVTPVGEVGGCDQGEVHPFVITSGWSTTIYNGGILRSKRRYRNKVQGHLDEIISRTKPGSKRRRKLVKSKQRQLRKLNCQIRDIEHKLTTRAVSDLLEAGVKELAIGDLRSLRQNSPSSSKATKAHPTKGRLYNQRIHQAPLGRNRHYLIYKCHRVGIQVPPLVNERETTMTCPRPGCGGKIKPSNRVYRCKRCGLRAHRDAVGSWNIRAKYLGIEPWGTVSIDENRVVGAVAAPIGVKYRPHMRVLPQVNVAGVDTTCSCG

SEQ ID NO: 38022 - protein, 359 aa, unknown
  TnpB Polypeptide
MIRRSVIPLNNITKAKKDKINLLISNYVKFEQKVINTLWNHKINYSRFVDKKYFQKIKTPLTERYKQCASKQALAVVKSQNKKENKRKPVIKNKSLELDNRFIKIENGKNSFDLWIKLSILGERPIYLPAKKHYHLNNYLNSDWNLKDSCRLRRNRKGLFLDLFFEKEQELKEKGEIVGLDIGYRKLAVLSDGEIIGKDLREVIKKFYNRKKSHLIVKEYINKELKKINFSNINVLVVEDLKNVKKNKKHRFTRHINRLLSNWAYRQALFKLEMLCEENRVYNPQVNPFGTSQVCNQCKVRDKTNRKDERYECRHCGWRADADYNSALNIRDFWLVQGEYGILSENRSCIPMVNRDILL

SEQ ID NO: 38023 - protein, 379 aa, Sutterellaceae sp.
VEPFIVWRKHVMPYMKPDTGYMKEARASDRHVKYCRIVRRTLNGVKRWFVQLVVEGLPPVRKVYASKCEVVGIDPGSSRIAYFHERHAAIVEVAPHVDLKEPKIRLLQRRIDRSRRANNPDNYNPDGTVKKGSSTWNTSNRGRRTAAKLAEHHRCLAATRKRDHGELVNDLLQIGGTIKIEKNNYRSFQRCFGRSTNRRGMGEFVEHLKRKAESAGCEVIELNAYKLKMSQYDPATDAYRKKPLKERWHRWGNTGTLVQRDAMSAFLACHATEKGHDRALLLEKWTTAEALLSGSGLCRHEPCSDPEVSKDASGLTKPNCGSKAEREYMVSSPFASVRGIFWGTTPPGGRAHARPPSNTWRSHTTKFVKSDYGIEKAFI

SEQ ID NO: 38024 - protein, 385 aa, unknown
  TnpB Polypeptide
VFRLRPTARQHVALAACVDAHRELYNAALQERRDGWSHASKTRISYGDQSAQLTQVRAVWSFSSQQATLRRLNKSFAGFFRRVKTAKPGVRAGYPRFKGKARFDSVEWPKDGDGARWLPEQRRVYLQGIGQVKVNLHREVAGRVKTIQIKRQGRRWMLVLSCDDVPPNPLPVTGRQAGIDVGIVNFATTSDGQHVDNPRWAHASAARLAAAQQRLARAKLRSINRDLRRQTVAARHRKIANQRRDFHHKQARELAVRNDLIVVEDLKIANMLRRAKPVADPANPGHYLPNGARAKSGLNRSISDAGWGQFVSILRAKAEEAGRAWIEVDPRHTSDGCERCGHTARANRITQAEFACQRCAHRAPADEHAARNILRAGLAHHAQAA

SEQ ID NO: 38025 - protein, 383 aa, unknown
  TnpB Polypeptide
VLKGIKLRLYPNQIQQGQLYQMFGNDRFVWNKMLAMATARYQNNPKSKIITEYGMDALLKPLKMEYPFLKQSDSTSLQVVNHNLDQAFKRLFKHCSGYPKFKSRKTCKQSYTGKSSVKVISKRYIRLPKIGYIKTSKTDCLQDCKIKRYTVSLEPTGKYYLSLQVEIDIKLLPKTGKQVGIDMGIADLAITSDQKKYAKFSAKWYEKQVIIWQSKFFKRKHNAFAKACQYNHTHKNTKQTTDDYVNWQKARKRKAVYQTKIANKRKDYLHKITTKLVKKYDVIVIEDLKTKNLMKNHHLAKSIANASWYLFRTMLEYKCKWYDKKLITVDPKYTSQNCSNCGFCSGPKPLQIREWTCPICQVHHDRDINAAVNILHKASAVRF

SEQ ID NO: 38026 - protein, 374 aa, Alysiella sp.
MLILKAFKFELMPNGEQIRKMKQFCGCSRFVFNRALAYQNEQYQQDNSFKFSYTKMANLLPEWKRELLWLKDCHSQVLQQSLKDLESAFKNFFAKRADFPKFKRKGEKDSFRFPQGCRLQQQNNRIYLPKIGWVRYRNSRHVSGCLKNVTVSSKCGKWHVSIQTETEQTIPQPNGGEIGIDMGITRFATLSNGQFFEPINAFKTLKSKLAKLQKQFKHKTKFSKNWQKLKAKISKLHHKIANIRKNHLHQISHQISQNHAIVYVEDLQVANMSKRATEKNVAAKSGLNRAILEQSWFEFRRQLDYKLLWGGGHLVAVAPQNTSRCCPACGHTAKDNRKTQANFECVQCAYQNNADVVGAINVLKRGQGILAAQK

SEQ ID NO: 38027 - protein, 281 aa, unknown
  TnpB Polypeptide
VRYLWRRSWEIARDQVDLEMMEGKLVPRINSVSLWLVDDHVWKPIDATKIRINGFKHIFFTSVAINTHRGWVYLDLEPSKEFYKLLARGFKPSSHSKIKLDRRSRRVLFHLSLEKEVEIYRPGNIKPIDVNENSMATLYGAFATIFETDLAKTTLGYSYRKKSIQKRNGSGGKEARKAMEKLREGKKKRDYRMKTANMIVRDALRTRGVIVIERISEKDIRVMIARYRDKQLRHRIYQSALKGELNAIIDKAREYGTPVLMVDPRNTSKICPIHRAVIEYG

SEQ ID NO: 38028 - protein, 300 aa, unknown
  TnpB Polypeptide
MASGGEGLLTLSIGMRVSPEPGAVELLRRYNVALNYAVNKILRLDLRSIGSVHNALYRELREWFGLPSRVAVDCYRDALANANAWRNNPKKGKRPRVKKLSMLLHPGSGYRVKDGYMEIIGGIRLKIIGWDRRYDGYENGEARLVYRGDRMMLWISKKIPRPEPCKPRDVIAVDINERKIVYGDDKINKERDTKIDEAHRWKKLAENLQKRYSSTRYPAWRRRRGILNRIRSYHRKARNILEDWARKTSLRIVGLAKRLGYAVAREDLTGLINSLRKIKNKDHRTKLIIMGYSRLEKWID

SEQ ID NO: 38029 - protein, 408 aa, unknown
  TnpB Polypeptide
MSSKMKNKAENIKTSLAKTQERRKRQDGKAYTLKVDKSHLGSKRARLDRLFLETKWFSNHVLEKGLRVDYKTRTVMVKAGNRFEERPINVLPSQVRQELVDRMKDDVKSLHAKKVKGYRVGKLKFKRTVNLIPLKQYGVTYLVLGCRVRVQGVGWLRVNGAEQIKNAEVTSATLIRRHGDYYLHVNTFAKKEKNKNGLAVGLDLGIKNQATFSNGVRVNYAVLLPKRLRGLYKKWSRTEKGSKNRKKVIVAVEKEFARHTNLKRDIRNKMFHFLKANYQYVAFQNDCIQGWQRLWGRRILASSIGGFRSTLHRVDTPLEVPRSYASTQTCSGCRHKQHMDLNERVFKCKRCGLVIDRDLNSAIDIEQYGLRSVGVTPAEKETSTRMWKYFNSIPGVRASFIVEAGSSL

SEQ ID NO: 38030 - protein, 406 aa, unknown
  TnpB Polypeptide
MLRLQAYKYELMPNGGQVRDMRRFSGSCRFVYNKALALQKENHEAGNTFIGYVAMAAKLPIWKREAGTAWLKETPSQALQHALKDLEKAFKGFFAKRTGFPRFKKKGSGDSFRYPEPKQIQLDPINNRVLLPKLGWLRYRNSREALGQVRNVTVSQSGGKWFIAIQTQRELAQPLPTSTTAMGIDVGIARFATLSDASYIAPLNSFKKHQQRLARYQRRMSRKQKFSNNWKKAKANVQKIHTEIANARKDFLHKTSTTISQNHALVCIEHLQVKNMSRSSKGNSEQHGKRVKQKSGLNRAILDQGWGEFRRQLEYKMTWQGGMLLAVPPQLTSQTCPACGHVSRDNRQSQAKFLCIDCGYENHADVVGAINILERGYRLLARGESVQSDRSLKQEPTEVTQAPAFA

SEQ ID NO: 38031 - protein, 381 aa, unknown
  TnpB Polypeptide
VNLGAVDKAYAIIENAPFADGEIILRMVIQGQWYRLIFDFDNERFTEGKVTLPVIKVEDGSPVFIFTVVTDNPVVQFSGDYTIGVDVGINNYATVVVRSIETGRIAHETTLSQRVHSLWNSVRASERQVRYLRKKAATLLRNRQARMVVLDEAQFHREAASRKKRELAILAAQEIADLSHLWGNAVVAVEDLSWVTNTMQNGRWNRGAFVQWLTHYVSQNGGWVVAVNPANTSQQCHMCGSKVTHPTHEVSVCPEHGVMDRDVNAAVNIASRAVPRVTKARATRAKNRKLRPQTPLKTPVARKSLKYPGRDRTKDKPTQKRKNRRLVSREVILPVCPARAQAPCLEARVLADGGTHRVAGTSQAALKQGNTAYKCRLCYLI

SEQ ID NO: 38032 - protein, 434 aa, unknown
  TnpB Polypeptide
MGSYEAVKVRLDPTPKQERLMASHAGAARFAYNAGLAHVKEALENGEPADWSHYGLRRWWNANKDELAVNQTTGEVWWSQNSKESYSGGLRDLAQGFSNWSKSRKGKRKGKRVGFPRFKSKNHAMRFEYSTGFTAPTAGDPYGLKLSRIGRVHCMENVYRLLGGARLIRISVSRRAGHWYASLTVEREPTTNSAPKCGVVGVDLGVKSLATISDGTVIPNPRSLSKKLKALRKAQQSLSRKTVGSVRREKAQGRVARLHARVADVRSDAINKATSMIARNYGTVCIEDLNVAGMVKNRHLARSLSDAALGEFRRQLEYKTARTGAVLRVVDRWFPSSKTCSNCGVVKAKLSLSERAFRCDDCGLSMDRDLNAAVNIMVAGSAPETLNARGGDVKRTNSLLGNAVPCEARTKQSPTGGVRLGAGLGNEAMQPRVD

SEQ ID NO: 38033 - protein, 414 aa, unknown
  TnpB Polypeptide
MQLSQRIRIFPTPEQEDVLWHLSERCRLAYNFALSERKTAWEKDSRSVGYMKQQNDLPMLKQKYPEYGWVHSKVLQMTLRILDADYKSFYALRKKGDEEAQPPKYKGKNYFTTMVHNQSGFKVENNVVWLSQSYNKGITLNFAIPDKFKFKKVTQVTISQDDRDEYYLSIVHEVPTKPYDSNDMYQAIDLGVSKTVTAVNMLGKFFEAKNPRPDKYWNPKADAIQSKRDHCRKYSRGWNKYNLAMNVCTKKRSNQIKDYQHKLSRKMVNNTRAKTIIIGDLNVKSMAQSPNTYARLNRSTQNNGYLSQFAGFLTYKSELVGKKVIEISEYNTSKMCCSCGKIHDMALSKRRMRCDCGNDIDRDRNSAVNIMVRFLSQNAKWTGYQQFADNLRQTGLTIVSNSQEAMTSNHPQVV

SEQ ID NO: 38034 - protein, 336 aa, unknown
  TnpB Polypeptide
MMLTFKIRHGKDLSKELRQAKQVAEFALRTRSRSSKDVKHIGLKGVIANQILRKYSCDKRAKQVKRVKLAVPGQSIKFDKENREIKISLLDLTMPYQFRNDFKKINQIELGNEYAYVSVTIEEPAVTPVTNYIGVDRNTTGHCVVIANPATGKVLKLGKSAEHTHKKYSKLRRKFQKAGELGKLKAVKRREHNIIKDLNHKISKKVVEVAKENNCGIRMEKLEGIRKTKKQTRSFRYSLNSWSFYQQQSMVDYKAKLQGVPTFYDEPAFTSQVCSRCGLLGVRSGKEFECPGCGHVDHADSNASFNIALGSERMSRLNAERDAFNGRTDAPREATA

SEQ ID NO: 38035 - protein, 391 aa, unknown
  TnpB Polypeptide
MMLTYKYRLYPTRQQEHSISSTLETCRQLYNTLLAERKESRASYYEQKRALTERRRYDRYLRSVHSQVLQDVVLRLDKAYRAYQAGLVRRPAFKRRERYHSLTYPQLGGFKLLGQRLRLSMIGSVKVKVHRKMQGIPQTCSIIRDVHQWYVCISANVELEEPDRTFGDARSAVGVDLGVQTLATLSDGTAFPNLKALPKAAEKIKKLQRGLSRKEKGSRKRLKARVALAKAWRKVRRQRDDIAHKVSHHLAANYGTIVFEDLRVGNMVKNHSLASTILDATWAKLRRLTVYKAERRSGRVIFVEPSGKSQVCSGCGETVPKDLSVRTHRCPHCGLVLDRDLNAAKNILGRGLEQAPAETRPLLAPIVRISKFSSRKREAYPFRGQVVHAPR

SEQ ID NO: 38036 - protein, 368 aa, Planomonospora sp.
VARIVKRAYKYRFHPTPEQACELARTFDCVRYVYDKALEMRSRAYTIEGRKVSYVETPATLTAWKRTEGLEFLPEVSSVPLQQALRHLQAAFANFFARRAKYPVFKSRKKSRASAEYTRSAFRWRDGTLTLAKMDTPLDIVWSRPLPEGAEPSTVTVSKDAAGRWFVSILAEETIRPLEPVDASVGVDAGITSLVTLSTGEKITNPKHERRDRRRLAKAQRNLSRKAKGSSNRAEARLKVARAHARITDRRRDVLHKLTTRLVRENQTVVIEDLTVRNLVKNHNLARAISDASWRELRSLLEYKTAWYGRDLVVVDRWFPSSRLCSACGALQETMPLGVREWTCACGAVHDRDVNAAKNILAAGLAER

SEQ ID NO: 38037 - protein, 359 aa, Shewanella sp.
MKTKLHTKTLKIRVRDKHVTTLNAMARSVNFVWNYCNDLSYRSIRERNKWLSGYDLQDYTKGANKELGLNSATVQMIGHEYATRRKQFKKARLNWRKSGGARRSLGWIPVRKDCISFKDGHVYHNRNHFHIWDSYGLSQYTFKSGSFNEDGRGRWYFNVVVEVEAEQSTGTGSVAIDLGCKTAATNSNGDEVTGRHYRKLEVKLGLAQRAKNKHRVKNIHAKIKNRRSDELHKYSRKLVNENAAIFVGNVNSLGLVKTKMAKSVLDAGWGILKTMLEYKCDHAGIVFEEVNESYTTQTCSSCGVIPASSPKGRAGLGIREWSCSHCGTTHDRDINAAKNILAVGHGRLAVGIPHYNQAT

SEQ ID NO: 38038 - protein, 383 aa, unknown
  TnpB Polypeptide
MMPVEEIKLTARFKVDLTDVDEATISEIHRLFKEYQRIVNELIEYAHLHRITSFISLHHAKYRELRQRHSTLPSNYIFTACRLATSIYESFIELKKMGVCEKERPTFKGQVIWLDNHLFKLDVEGWRASIAVHGGRWIALRLLHGRYHDKFKDMKPGEARLMLKDNDNLYLNVAFRRAVVLPEVGADAKVIAVDVNENVIVYGNDDFIERFETNEGIIRTRYFLKRRRIQSKIRKRELQARLLGKYRGREKHRVEEIYYRAAKEIISKAKEVGATVIVMENLEVYKEDKDSRELNGRIHRWGYKRFQRILEYQAKLHGLNVKYVDPAYTSSICPICGDELEESLNGRRLMRCRRCGLEEDRDAIAVRNLTRRYYEEYMDAKTP

SEQ ID NO: 38039 - protein, 410 aa, Actinoplanes sp.
VQLRYQFRVYPTPGQQVELARAFGCARVVFNDGLRLRQQARDAGQKYISDAELSKQVITQAKATEARAWLGEVSSVVLQQALADLNSAYRNFFASISGKRKGRKLAPPRFRSRKDNRQAIRFTKNSRFKVLDSGRLRLPKIGDLAIRWSRTLPSDPSSVAIIRDAAGRYFASFVVRTSQDEAFPPAESEIGIDLGLTHFAVLSDGTKVAAPKFLRRAARKLKRLQQGLSRKQRGSNNRKKAVVKVARAHARVADTRRDWQHKLSTTLIRENQAIYVEDLCVVGLGRTRLAKPVHDAGWASFTAMLEYKAARYGRAFGRVDRFFPSTRMCSDCGRINDEIALNVRAWNCSCGAAHDRDVNAAINIKAAGQADFNDRGAQVRPGLVPAPRGEAVTHPDAARSTRSVEGISVL

SEQ ID NO: 38040 - protein, 445 aa, Bacillus sp.
VLKVATREDGTHIKGTKKSLPDGWTTSGFRFSIVPTEEQATRLEQAFGCERKVYNEYIAGLYEYLEGIGFAGGFIRYQVPSYTTITAQYDYLDKSNDSFVYNDAKMRFQAATQKYNEEYAKKPMQYKKSVRKKMKTIGYIPTFRDIKGVPKFHSKKQGKFSYTTNQTNGNIKIRQENGECFLCIPKFKEGISMILHRDVPADGVIKKATVKREGTRYMVSLSIDYPFQVPQPQEDLSPDDVIGLDYSQEQLYVDSNGHIAGYTRYHKIMENRQRRMNKSLARKKNHAKTDENGNILYSKNYQKQVRKYQKVMAKVKNKRRDTLHKMTNQITNDYQAVVVEDIDLRNLAQCLRLGKKLHDNGFGLFRTMLKYKCERKGKYYIVADTYFASSKICNCCGHKKDQLSLSERIYRCTECGTKTDRDYNAALNLKQYGTRVLKEMRVLSA

SEQ ID NO: 38041 - protein, 404 aa, Micromonospora sp.
MRTRRVKRAFKYRFYPTEAQAAELSRTFGCVRKVYNLALAARNEAWKLQQERVTYNATSAMLTAWKKTEDLAYLNEVSSVPLQQALRHLQTAFTNFFAKRAKYPRFKSRKRSRKSAEYTTSAFRLRDGELTLAKMAEPLHIVWSRRLPEGAQPSTVTVSQDAAGRWFVSLLYEDPSVQPLPATDRAIGIDVGLDHLLALSTGEKITNPRYEQRDRARQACAQRQLSRKVKGSANRDKARRKVAKVHARIADRRRDHLHKITTRLVRENQTIVIEDLAVRNLLKNHTLARAISDAAWREFRSMLEYKAQWYGRKVIVVDRWFPSSKLCSTCGTVRDTMPLHVRTWTCACGAIHDRDVNAARNILAAGLAASACGAGVRPQRETSRTRRSVTKQETPRATVGIPVL

SEQ ID NO: 38042 - protein, 411 aa, Micromonospora sp.
VQLRYNYRVYPTPVQQEALARAFGCARVVFNDGLRARQQAHEAGEPYVCDGDLSKQVITRAKLTPERAWLGEVSSVVLQQALADLNVAYGNFFASLSGKRKGRKVAPPRFRSRKDNRQAIRFTRNARFAVLDNGRLRLPKIGDVPVRWSRTLPAEPSSVTVIKDAVGRYFASFVVQASDEPLPPVASEVGIDLGLTHFAVLSDGTKVAAPKFLRRAARRLRRLQQDLSRKQRGSNNRAKAVVKVAQAHARVADTRRDWQHKLSTRIIRDNQAVYVEDLCVVGLGRTRLAKSVHDAGWTQFTAMLEYKAARYGRTFTKIDRFVPTSQTCSMCGRIDGPKPLNLRSWTCPCGAVHDRDVNAAINVLAAGRAESLNACGAQVRPVFVPAPRREAGIRSDAVRCSTRTVEGISVL

SEQ ID NO: 38043 - protein, 405 aa, Bacteroides sp.
MSKIRKAYKVRLKTNDELERKLVRISGSTRFLWNKSLAMNLERLERDQGILWYNELAFWMKVWKGSEEYGFLGECPSQILQQKLMDLERAFRDCFDRKQPLKRLPVFKKKGMADSIRFPQGFKIDNRRIFLPKIGWVGFYKSREILGKVKNITLTRRAGRWYASIQTEQDIEIGKHPSDSVIGIDAGIKCFAAFSDGTLVEGVNSFRRHEQALAREQHRLARKQKGSENWNRQKRKIARLHHRIANVRGDFLHKLSTEVSKNQARVYVENLNIRGMSGSARGTEEEPGSNIKAKAGLNKSILDQGWFEFRRQLVYKLAWQGGSLEEVDARNTSLRCSCCGHIEKRNRKSQAEFVCLSCGKEQHADVNAAINILTVGQTGMACGSNRNSGRKQELARNREGVLPVA

SEQ ID NO: 38044 - protein, 322 aa, unknown
  TnpB Polypeptide
LAKSEKPVINRVSIWLDDHLWRRVGYTTILIYTHKGWIPVELIPHKLYWRYINSGWILRTQLKIKLDHRYKRLLVYFVFVKSVNVDENNVKHVISIDVNENNVTVKLLNKVYILETGIKRITVGYAKYREAVQSVKGNGYVGRAVHGRERRRKKDIRLKIANIIANIAKNLNAIVVLEKLPKHCPKNMIENVKDSMLRHRIYQAGFRGMIKAIEEKCLERGVPVVKVDPRNTSSKCLFCGSKLMRGDAPRQLKCPRCGFKAGRDVVAVLNLERKYLTLKGLVPLAPMPSEPTLEVAVLPMKEWMRRKSLDATNKHKLMRMNI

SEQ ID NO: 38045 - protein, 435 aa, Natronomonas sp.
MRRTNTFAVRPLSEQDERLLRELLDASASLWNELNYERRQNFFDGDSVWDTADYRKRYIGVLGSATAQQVIRKNSEAWRSFFAAREDGEDTAPPGYWGNEDDGRELRTYIRNDQYTLETCERSRLEIPVGQDLKDEFGLGYHDRLRLEVCGAPKWDGEPGRLELYYDEVDDTFRAFQPVTVPDSRQDSPVADESAALDVGANNLVACTTTTGQQYCYEGRDLFARFRETTEKIARLQSKLREGRYSSRQIRRLYRKRARRRDHAQDALVRNLLERLYDEGVARVYVGDLSDVLSEHWSARVNEKTHQFWAYRSFIDRLGTTAEEYGITVEVRSEAYTTAECPACGERDETVRTGDVFWCPCGYEGHADLGASRTFLEAQAGTHFEVGSMARPVRLTWDNHEWRPTTPAPLQRTNSNEERTNRSTGDGNLASVGSV

SEQ ID NO: 38046 - protein, 414 aa, Natronomonas sp.
MEKRRTVPVKLDMDSDDAALLRDTVDEFLWAANYVTRHAFDGEYVTTSKTTLNDDTYEDVRDETALHSNHVQAARNKAAEACKSVVEKWKRGKKASMPHFTSPHVVYDHRTATFHDEYVSLATVDGRIEADYMLPDDERDTPHAEYFFSDEYETTGAELHYSNDNWMLHIHCKRDVESDTPEQATTENGTVLGVDLGVNNLAVTSTGTFWTGDEFEHWRREYETRRGDLQACGTRWAHKNMQAVGRKEEDRFKMTLHRMANELIEEACDHGCSVIAFEDLMDIRDRTGASWGHKWAFNRLYEYVEYKAAEYGITVEQVDPENTSRRCSECGFTHPENRESDSFNCLKCGYENHADYNAAKNIGLRYLRRNQTGSGGGAPVGVRLNSGTLNANGEYEPPADDSARAGVHAESPRF

SEQ ID NO: 38047 - protein, 413 aa, Natronomonas sp.
MEYSHRYRAYPSGKVGERLEHHLDVHRQLYNHVRWDYEQAPEDDKPSEYDQNNKLPEWKRRWSVFGELHSKAAQATVARFHRNVSNLRKKKEKGYDIGRLKRQVPTDYRSVTYNQSGFDLDEKRGHDRFAYVRFSKIGWVKIRYHRPIPDHAIINEVTFKKETTGEWFVSFGLEADDAGLPEKPDVGSLDASNSVGVDLGIQNYIHTSDGQTVDWLDLEDEYERLQREQRNLSRKEHGSANWEKQRDEVAKVKRHIKRKVLDYQHKITTGLVREYDAVFVEDLDVKGMLEQSYSARNKQDAAWRQFITLLEYKADLYGCHVVQVEAQGTTKECASCGVETAKPIWVREHSCPSCGFETDRDANAAMNVLQRGFDELGLGWPEDTPVETVTATDTTQFESVSASHVIETGSLGA

SEQ ID NO: 38048 - protein, 388 aa, Natronomonas sp.
MLDKCDEQWNAFYTQLDNYHDPEHDRTEKPGLPDCWKEDDDRVLKPCIRNDAYTVEWGERSRIELALGSELKEKYGIPLNQRLRVPIRGNPKWDGKGGRLELVYERTTESFTTRQPVTFLHDTTRATDSSDEECVATVDVGANNFVAVTTTAGHQAVFHARPLFDRFHEYTERIAELQSQLPDDEYTSQLIERLYSKRKAHRDHAQDALVRYLARLFGEWNVGEVYVGKLDDVREKHWSAAVNEKTDLFWAHGRFRRRMRKVLEEECGIRVHEESEAGTSSRCPRCGEEKHVGRSGDVFQCGECGFEGHSDVVGSENFLQDVVSDDVALAGPMARPAVSGQNRPENGHADVLRLEWDDHRWQHRDHSSKEEPANRSTREGNFASGVSA

SEQ ID NO: 38049 - protein, 393 aa, unknown
  TnpB Polypeptide
MVKHLRAYKVELKSTDEQIQIIERTMGVCRYVYNLFIGTNQDNYRNGIQGYMSGYDFSKWLNNDYRKANPDKLWIWEVSSKAVKKAIMNADTAYKNFLNGKSGFPNFRRRNGRSVSMYLPRNNPGDLKIERHKGKITTLGWVRFKEYGYVPCKAKAVSVTITKRAGRYFASCLFEISRAKSINSVQSESIGIDLGVKSFAVVSDGRNYQNINQSERAKKLKRRLKREQRKFSRKIQKLLQRKEKAAKKCKRSNLDKQRQKVQRAYVKLTNKRHDYINKTVHEIVIRRPEYITIEDLNISGMMKNRHLSRAVAESEFYYFRALLERKCFEYGIQLRIANRFYASSKKCSRCGYVKKDLKLSDRVYECTECGLIIDRDYNAALNLRSCIKFSTAG

SEQ ID NO: 38050 - protein, 435 aa, unknown
  TnpB Polypeptide
MALIMNYTYRIYPDTAQEELMLSWLETCRRLYNRCLRDLKDWMNSRKCAVDRCSLNREYIMSPDIPFPGYRSQKRQLTQWKKTESDLKEVHSQVTQDVIKRLHTSWESFRQRGKGFPRFKKYGRYQSFLFPQFATNPIKGDQIKLPKIGLVDLRLHREIPEGFQIKTVRVVSRCRGTKWFVVITIQADVCVPENQAFGRAIGVDVGLIDFLATSDNLTIPRPRFFIDLQRELKLLQRRASRKKKRSKNYEKAQIKVARLHHQIGNTRKDFHLKVAHQLCDQADSIFVEDIDYRVMAKGFLGKHSLDAGFGQFRELLKWVCWKRGKFFAEVDHKGTSKQCPECGTEWDNNLSIRWHTCDECGYSNHRDVASAEVMRNRGINKYPRTIGERKLSADKSVSAEASSAVHTGRSVLSGVLYLDKCYAETLNREVKKPAP

SEQ ID NO: 38051 - protein, 397 aa, unknown
  TnpB Polypeptide
MEQIITCKLKLVLTEEQKADLLYTVQQYNKAMNFVLQDNFTDKLTNDKKLHPKYYSILKENFHLNSQTAINVYRHSGHIYKTRWTRAKTKRDYSIFDKPPIYKALTMKYTFNRNISIFKVGMLLSISSLNSRIKHIQLKGWKKHYDLIQYCKLSDPMLKYDKNKKEFYLLLPITVNVEEQKHKSIIGLDSGIRNPIVAASHNEVKFYDKPEIIKERKTKIQEKRRELYSKGTRSSKRRLKSMSRRERLFVSDWSHCLAKQIIADFPSALFIMEDLTDIRQNTLTFRKEKEDRRQREQWNFAEIQDKIAYKSVLYSGIRTEKIDPAYTSQACPDCGYVSEDNRSKGSEIFTCQNCGLTKNADEVGAINIRFKGLTVSQPHCSGRQTSSNKPTNSFVGS

SEQ ID NO: 38052 - protein, 398 aa, Streptomyces sp.
MTAPHVKRAFKYRFYPTNAQAAELSRTFGCVRKVYNLALDARTEAWTRQERISYNQTSAMLTVWKKTEQLAYLNEVSSVPLQQCLRHLHAAFTNFFGKRAKYPRFKSRKTSRKSAEYTTSGFRFRDGRLTLAKMTEPLCIRWSRPLPEGAKPSTVTVSQDASGRWFVSLLCEDTSVVPLPATSAEIGIDAGLEHLVTLSTGEKIANPRHERKDRARLALAQRRLAKKAKGGGTNRAKAQRKVAEIHARIADRRRDGLHKLTTRLARENQTLVIEDLAVRNMVKNHRLARAISDVAWRELRRMLEYKCAWYGRNLVVVDRWFPSSKLCSACGTLQGKMPLHVRTWTCDCGTTHDRDVNAAKNLLAAGRAVTACGADVRPQRSSPGGQSAMKQEVSRREP

SEQ ID NO: 38053 - protein, 353 aa, Nocardia sp.
LRYNFRVYPTPGQQVALARAFGCARVVYNDALAARKTALREGLPYATDAELSKALSAAKKDPDRVWLSEVSLVVLQQALADLNTAYRNFFASVSGKRKGARIGPPRFRSRRDHRQAIRFTKNSRFAVTAGGKLRLPKIGDVKVACSRDLPSEPSSVTVIRNAAGRYFASFVVRVDDQSLPHVDTEVGIDLGLSTFAVLSNGKMIASPRFLRQAERRLRKAQRALSRKQKGSQNRVKARVRVAKAHARVADTRRDWAHKHSTRIIRENQAVYVEDLCITGLARTRLAKSVHDAGWGCSPACWRRKPTGTGGTSRGSTAGSSPPNCVPPAERWVGRNRCTSGNGHAPVASRMTAM

SEQ ID NO: 38054 - protein, 473 aa, unknown
  TnpB Polypeptide
MSRHTTFRFCVDPTVEQCDVLARHAGASRFAMNQCLRIVKTALTQRKTNPTFDVPWSGFDLINAFNAWKKTEEGGRMFSVNTTGDAQIVVTGLAWRREVCQQVFEEAAVDLGRGLKAWSESRSGKRTGKRVGFPRFMKKSGAVVSFRLRNKHSQGCRPLIRVGDNNRPRSITLPGVGAIGVHDDTRRLRRMIAKNRAKILFATITCHGGRWWVSLNVEAADLHTAHQHPPRPDGDRGGWVGIDRGLSAFLVAATAGGTEVARITDAPRALASGLKRQRLLAKSLSRKQKGSANRRDVAARLRRHHHHVANMRRHFLHQVCNKLVKTHDRLVIEDLHVSGMLANRRLARAISDAGWAEFARLLGYKQAWRRGELVVADRWYPSSRLCPACGALRDDLALWGQTHHDPTTDPRTPKQRGRAPMPADGTALTSTRRGPVKPARLKREPTFTPRQRPEPTTPEEGGAERLPTLFDTL

SEQ ID NO: 38055 - protein, 330 aa, unknown
  TnpB Polypeptide
MLKLRKEGKLPPFMSRINPPGYRKKTGRRILWAVLRKDQYKFEGDKLVLKGLGVIGRVELRYKGLIHLKGEQGRLEVHYDPDRKKWYAHISFETSEKAVRGAWSSVPRQPLGNLVAGVDVGINNLLAMYVGNGLVKLVNGRPLKSISHYWRMRIAGYQSTLNRYGLKTSKRLRAMYSKWRKQIKSYIDGKVRQAIEWLYSVGVSIIKVGYPKHIAQENGDFNNVHVWTYGYLLKRISEVAEEYGITVDYVSEAYTSSKCPLHGDCCGKRIKRGLFKCTTLDKVFNADLVGAYNILATITPSPERGRGKGPETRPGIESPSRGDVIPNPPH

SEQ ID NO: 38056 - protein, 562 aa, unknown
  TnpB Polypeptide
MPKKLEKDKFSFTVCGEFFPEVYPTFRSSKWSRGEEDPLVTEMRLFCSCMRWAFNRLLEGTSRDEIKKLGQELFGLNSRYADDARLKAQAVLDSQRELLELEIEETEKKLARARKKLGLAMKKLAKAEEKGAPPEAIAKLRLVVKGRNSRVASLEKKLAELEAHREDGTIPKVVFGGKKLWKKVCKGRAAREEWQAARKNRLYSRGDETKGGNPNIKVTCREGEFHLAVTVSHLSEKIGEDALGRPKMSRAPRVEGRLWLPEKYRDLVRMWVAMKLPYTVELIRTLEGRYIVHLTFDLGGAREPDTASGCLSLDTNPDGVALCNLNPSGRPEPWPEGLSLPYPANLGKYQGEFQVITYPNGFLYIRVPDLAYASGFRRNYLIGVLAKAVVDIAFLLGKPVALEDLKFSKDRLDTNKKFNRMASDFPFAKMVEAVCRRAVKEGVSFKLVSARHTSTIGYWKYTERYAVPVHCAAALSIGRRAMGFKERVTKELKQRVTQIKQNLTQKGKPNTPGEGEGMTRGVRACLRRLDRKLLLHNGLAPWQQEAYYSVWHDLKKLALSLR

SEQ ID NO: 38057 - protein, 384 aa, Archaeon sp.
VVLKLKKPDKGIRKTMEKYTEGMNFASNVVYEYGEPLSANKLQKLTYKHLRENIGLLSQMSCNVARQVSGAYKSLQEQIEKGKAEWKQIEFEPTNIKFSYRRDYKINQEKLSITTLDGRKEYEIINYSYAKQYFSDEWKYLASELVEHRDGEYYFHLSCEREVEEKPMEEASNFMGIDVGINYLAVCTTTDKNQAFFGKGMAKDLRKTYKKMRERLKTKGTFSALKRLKALSGKEKRLMKQHNHKVSKEIVEYAKEQNVDVIGMEDLTNIRDNTEVRKRDRYCHESWSFKQLQKYIEYKAKERGIRVKYVDPEDTSKTCSRCGHINRNNRRGLDFKCQSCGYELHADLNGARNIEHRVKDFRHDLESQGSCQPPDVDANETTSA

SEQ ID NO: 38058 - protein, 390 aa, Endozoicomonas sp.
MLRATKVRIYPTAEQADFLNRQFDAVRFAWNKALAIKTHYYKVRNQNLSPRKHLKPLLATAKKSRKYSWLKNADSIALQQAIINLDTAFQNFFNPKLEARFPRFKSKRGKQSSYHCMSVAVGENWIKVPKCLPIKARVHREITGKVKSITLSKTTTGKYYASILVDDGLAQPNPLTDLNASQVLGIDMGIADLAITSTGHKTGNPRFLKNAQRNLKRKQKALSRCKRGSRGRAKARLLVAKAHEHVANARNDFQHKLSRQLIDENQAVIVETLKVKNMLKNKRLARSIADAGWHSLLTKLEYKAKQEGKHLVKIDQWFASSKTCSCCGLKQETMPLTIRTWVCPCGAAHDRDVNAAKNIQNQGILKLKAEGLSVSADGGKRKSGVLSVAA

SEQ ID NO: 38059 - protein, 462 aa, unknown
  TnpB Polypeptide
MDINTCYVCKIQNQLDAIPDKKANKLAVFGKHPVDDKLMRQTADVCLEALKFCASVIQEGWYRIMSVDSKLRRRLIDTLIHKTKTDTPKYPEFDRRFPNLPAYTRRAIIADAFGMVKSYKSNLKNWEETTPTERGAKPTIGFPSRYELTFYEQERKMSHLADGQIGLKLFDGHSWNWYYFQISKSDAKYISQMNQTRKMLSPIVYKVRGRYQVRFAFQETRDLVQDENKLAYRILAVDLGINAAASWCVMESDGTVHAKGVIHLACEEGRLNHMINRKRMYQQAGKKSRCVYRWVTEANRQLSIKTAKALMDTAVLYSVDCIVFEHLDSSGKIRGKKYRERIHMWRKNDVQNRVELQAHRYGMRISRVCAWGTSKYAFDGSGLVDRHSIYRYVHGRKVYNYSVCTFQNGKVYNCDLSAAQNIGARFFLREYEKSGVEGLPSTPRRTLSTLRLLVSNGLPLAA

SEQ ID NO: 38060 - protein, 431 aa, unknown
  TnpB Polypeptide
MIGIEVSQRIRVFPTSDQEEVLWKLSEKCRLLYNFALEERINTWKNGVKGINYYKQQNDLPELKEKFPEYKWVYSKVLQYVLRILDANYKSFFALWKRGSKKARPPKFKGKKYFTTMVYNQSGFKIGNRFIKISHKYNNVPLLLEIPEKFQFENVKQVSISQDNLSKEYYVSICYEIDDKDYVDNGMYQAIDLGITNIVTAVNMEGKFIQIKNKRPDKYWEKKVEDVQSKRDRCKRLSKRWYKYNEQLKHMKRKCANQIKDFQHKLSKKIVENTKANTIIVGELDVKEMASRKKGRANHKGKRSLNRAIQNTGTLGRFVQFLTYKAERVGKRIIRISECNTSKMCCVCGRIHDMPLWVREMNCDCGNEIDLDKNSCVNMMKRFLSQNAKWTGYQEFLGNLRHTANGKTRAPSPIFGYSSEDSQEAHEFIRG

SEQ ID NO: 38061 - protein, 260 aa, unknown
  TnpB Polypeptide
MLVFEAKLRGTDEQYVILDEMIRTARFVRNSCLRYWNRMVGIDVGLNHFYTDSDGNKVENPRFLRKSEKALKRAQKRVSRRTKGSKNRLKAIKQLGRTHLKVSRRRKDFAVKTARALVQSADLVAIEDLKVPNMVKNHHLAKSISDASWTLFRQWLEYFGKVFDVPVIAVAPHYTSQNCSNCGQEVKKALSTRTHKCYHCGYVDDRDVNAAINILMKALQGLAQLPRGTRKVTPGDEMTRCLEEETPKSKVARRTRKPHQ

SEQ ID NO: 38062 - protein, 384 aa, unknown
  TnpB Polypeptide
MQRTHKIRLDPTCRQRKYFVHASGTHRFVFNWALAELNRRYEIGKKTNANKLKTQFNALYPETFPWIREVHRDCHSQPFSDLQTAFGNFFAGRGRKPVFKSRNKTRRSFYVANDKFSLSDKMIRLPRIGKVKMREALCFAGKINSARVVEDCGEWYVCISVDIGDIKTPRTDNGIVGVDLGIAMLATLSTGEKIENTRPLRKAQRRLRRANRKLHRRVKGSGNRNKQRKVVARIYQRIGNIRHDNHHKLTTRLCRQNRAVVIEDLNVRGMVHNHQLAQSISDASFGKFRSLLTYKAEQYGTQIVVADRFFPSSKTCSSCGLIKDKLSLGERIFVCECGLRIDRDLNAALNLRSLAEAFGEVTPVEMSTGIVEAGTKPCSLVGTL

SEQ ID NO: 38063 - protein, 414 aa, Enterococcus sp.
MSHLKIDKYNKEIEGDKDVSGVQNRNSSNRRTKKIINRTIGVARFVKNFYIYHNQEVYKSGGKFVSGIDFSKWLNNDYIPNHPDKMWIKAVYAKSTKHAIMETEKAFRNFFQGKANFPKFKKKKHQDVSMYFVKNDKKTIIRCERHRIKVPSLNWVKLKEKGYIPKHDDKHSIKSGTISQQANRYYLSVIVEQDCTAQVLNDTPTEGVGIDLGLKDFAILSTGKTYKNINKSGKIRKIEKQLKRQQRKLSRKYESEKKRVNEKQSKRGEATRKNVEKQVLKVQKLHKRLTDIRRDRVNKIVSELVKTKPAYITIEDLNVKGMMKNRHLSKAVREQSFYAFRKKLADKCKVSTIELRLADRFYPSSKLCHECGHKKVALKLSERTYRCENCGYVADRDYNASMNLKDVKEYNVIA

SEQ ID NO: 38064 - protein, 498 aa, Vulcanisaeta sp.
VFFLPLLLRRAVAVELEVTRELNKLLYSVESVYLGIVREVVEYAVANNVTSATQLQGLFYSKYRGEYQGLHSHLIIQAIRQASGVAKSFVERKKRGLVSKPYPEVRSVSIRFTEKAWGYGKFIGSTAPVRVELSLPGGRREVWLRPHKRFWLYWWRVLTGEAELASTLMIKRRANKWYAIFIFELKSREERPQSIVAFDINENTVAVGRIDVKTTVGKVADWNRQYLTPQLYTIKTDFGRLARRYEAIRNKIIEKLKPEFALLNGKYVNVTSTREFRKQVRKLRERGRKVGRVRQIANELTKTPAIMITEELGDNPQESMIEDVGRSELRHRIKQTPFKSIEKAVEDKALERGSKLVRVSSYRNSRVCPIHFTRLEETDDWHVLYCPLGHYVDRDYASVMNMTWKITPESWTKAFWWNLRREINWREYEDNSNPIIPQNIIQLLWFIMRNAKASEQSPAVLARGKPMNHHRIQNEGGGEETSQKREEASWDVILNYYC

SEQ ID NO: 38065 - protein, 420 aa, unknown
  TnpB Polypeptide
MVGKSQELKENEIHKAFKFRLLPTKEQEILLAKHFGCSRFIYNHFLSEKQKHYLENKTTLNFNQCAANLVKKKKDEEFQWLKEVNSQVLISTLMNLETAYGNFFRKKAKFPKFKSKKNKNSFQIPQHISLKTSNTIQVPKFKEGLKFVRHRELKGQIKSATISKNPSGKYYISILCVVEKPTKYKKTGKNIGIDLGLKDFIITSEGQRYCNPKFIRKYERKLAKKQRILSRKQKESKGRYKARIAVAKVYEKITNSRNDMQHKVSSKLVKDYDLIAIEDLNVKGMVKNHKLAKAISDVAWSSFVSKLKYKAEWYGKEVVVIDRFYPSSKTCSCCDNVKESLNLDERQWTCSKCNTIHDRDVNASKNILRRALAIQSAGTADNRNGAKVRPEVVSKATKGTGDEVLKKRGRTYALKPLCLS

SEQ ID NO: 38066 - protein, 499 aa, Actinomadura sp.
VKKFRPRPGFVVQAYRFALDPNAAQEAALRSHCGAARAAYNWAVAWVEASWWQRRAEESYGIPEEELTGWRPWSLPALRKAFNAAKHTDPRFAAWWQENSKEAYSTGLANAAAAFDNYARSKQGKQRGKRVGMPRLKSRRTARLACRFTTGTIRAEPDGRHVTLPRLGTIRTHEPTCKLLTRLQAGTARILSATVRFERGRWFVSFQTEVKRDLMKVSRPDAAVGIDLGVRTLAVMADSTGRVRREPNPRHLDTALKQLRRASRVVSRRQGPDRRTGRKPSKRWEKANAVRNRVHHRAANLRQDALHKLTAKVTAEYGTVVVEDLNVAGMLRNRRLARHIADAGFAEIRRQFTYKTKRNGCRIVVADRWFPSSKTCSGCGAVKAKLPLHVRTFECDACGLVIDRDAGAALNLAALAAAAATGTGVAGDLGTPMVPKPRGADQKTRTTRPNRKAGTGRAGGATLPHQRQTETRDRTQTKAPRFGDVTDLPGRNALNTQSH

SEQ ID NO: 38067 - protein, 274 aa, unknown
  TnpB Polypeptide
VPENTIDQDFNTRWSANGIGQWIEFDLGSIQLVDTVKIAYSKLLSSSGEGDPIYLITTTGSRPVLVKGKIIKAINQYYNKTKSHYMSILRHGKAPKEGPHTSKRLERLHGLRYRKIKDLFHKASFHIVQLALQQNTGTIILGQNQGWKQESNIGKRNNQSFCHIPHHLLTSMIRYKAAEHGIEVQLTEESYTSKASFLDLDPLPVYEEGKQACFSGKRVHRGLYRSPRGTLNADVNGAANILRKVVPTASAHGIGGLDGNQSVNVSTPQVLSIR

SEQ ID NO: 38068 - protein, 448 aa, unknown
  TnpB Polypeptide
MGCDRVIWNAKVDESNYYRKFALKFCPREHYYATQDQSYSQFKSSELTPYLSQVPSQVLRNAAVRWYQTLQKAIKGLCGFPKRKRKGNHASVYLTRELFRFEKAGKGYRLFIGTPKFPMGELRFSSYRSFKIPNSITVTHHNGRFYLSFGYENNTKCLTLQQQFDRLRGMDTDTLTQGLVGVDMGVTIPACSELANFDYSPSQKAHFKRADKKAKYLQRRLSKQRCMAKTKGQPPSKRSNRTQQRLNAQHGRKANIRQDFAHKTSRQLVDSATLGLVMEKLNIKGLTKRPKAVRDVNGRYLSNKAKAKAALNRAMLSVGMYQIRLFSQYKALSQNKAVFTIHPAYTSQECAVCGHIHPTNRTTQSKFVCTSCGNIDNADHNAAIVIKNRGVIKLLDSGTELSGNHLSDTGHGGKVRRVKGKSLARTTDEVPKKMGRHTVLEATSLRTG

SEQ ID NO: 38069 - protein, 433 aa, unknown
  TnpB Polypeptide
MNKAAKSWMPHAGNRTFRAYKVELDPGKGQVSVFIRYADVARWTWNYAVARHREIRQWNRLPTVHMKYPNGQALHKEIVRLKRTTHSWLANVSKCVPQEALRDFDQATRRMLDSRFGHPKFKSKRWAKRSFTLTYIDPNQPQIHVEERRIKLPTLGWIRLKEHGYIPTEGARTVNATVSETAGRWFISVQVADSVKPVPLPEDPEIFGVDVGVMKGNLLVVSNASGTKVRVFSSPRALRTNERRLRRLQRSVSRKQKGSSNRGRAVRRLQRLHFRVTNVRKDALHKATTQLARTKAIYVVEDLAVRGMMGNHRLAKSLADAGLSEAVRQLRYKGGWYGSGVVVANRSYPSSQLCSGCGNKHPEMRALGLRVLRCQCGMVLGRDLNAARNLARWPTVSRTLETPVRADRLQAVEWPLVIGDEAGKNLPTRGRFL

SEQ ID NO: 38070 - protein, 398 aa, unknown
  TnpB Polypeptide
MCGNVYKVLFFLVCSLGAVLGGGSQTTLVESAPLGSSMPSKVAPSRLKRSSVVVLAVDKVAEAKLKLLCSLSSKLWNEVSYARRRMFFETGRVDLKSTYKEFYEKYKVLIGSATAQQVLNKNDEAWRSFLSLLKLKKERKLPQFMSKVNLPGYMKKGNRRELWAVLRKDQYRVEGDRIILKGLGAIGWIELRYKGLIHLRGKQGRLEIHYDKARRRWYAHIAFEASEKAVRGEWTPIPTKPKGNLTAGIDIGVNNLIAVYIESGLAKLVNGRPLKAISHYWRSRISGYQSKLNKCGSKTSRRLKAKYSRWRSHVKSYVNSKVRQTIEWLHKAGVSVVKVGYPRYIAQENGNFNNTHVWTYRYQLKRIKEVAEEYGMTAVYMGEAYSSTTCPVHRDGNA

SEQ ID NO: 38071 - protein, 358 aa, Oscillatoriales sp.
MLVLLSIKTKLKLTSAEKQLMSKHAGIARFTYNWGLATWQNLYQDGLKPNKYILKKFFNNYVKPELEWIKEKGICQKITQYAFDQLGNAFDRFFKGLGAYPHFKKKFQHDAFTLDAGGKPMRVGGVRIKLPTIGWIRTFEGLPNVTTSKITISRIADDWYLSFAYEQSQQVIAKQYEVVGVDLGVKTLATLSTGVVFENPKYYYQEAAKLKRLQKQLSRKKKGSNRRFKARMKVARQHSLIANLRNNTLHHVTTYLSKNHAKVVIEDLNIAGMMANHRLAKAIADCGFHEFRRQLKYKCRKFGSELMIISRWYPSSKTCSSCGNIQDMPLKKRTYDCCSCGISIDRDLNASLNISRLA

SEQ ID NO: 38072 - protein, 447 aa, unknown
  TnpB Polypeptide
MSLTFFRQWLEYFGQVFGVPVVAVPPQYTSQDCSNCGTTVKKTLSNRTHQCPNCGHIQDRDWNAAINILNIALSILSEMLENTVGQTEINASGENDLCLVGATQLSKPTRRKRKPKEQSLESPAIFGTPTLRWEDVNCKYSLNQMSDKTKPNVSVPKYLPLHIARATWSMKSGLEALQLSNWIDIDENFVPELNIKAQRLKESYSDVVATLPGSHAGQQEILELLLAHLLEYFPEYYRLEGTKIENLKTGQVWEISDYEDVPIALAGQLVQEDLCLMQPTSEGHVLKAISSTFPLFWRVPDKIGLPLYKIHHPVPEFPEKLKHPLELYFERLRPDRPGTRIAWGIAPTPLLVIAWYQPTEGWEKAITAENAGEHLWLRTEHQTLRRLPKSGDILFTIRSFVDPISALKDYPTNRKNLATVIRQMPPQTQTYRGMEPFLEPLLAYLEG

SEQ ID NO: 38073 - protein, 317 aa, Cenarchaeum sp.
LCEEQPYQFPHNWLYGARSFRLVQVTPKSWMHVKPCDHIYRLHITYTVSAPEQRAKTGVVAGIDREITNPTVVCKTDHDTSNIISYDTATAFRTNRTWNDEARRTISRRNKHSDSTYKIKRKREKYNQGNANDREYAEWLLAKKICEGVDAIYVEQLNLEAMTRRGGRHKKGTNRGMRFIRHSMILRKIRIVAERLGIHVIEINPKHTSQECSVCGYTNKENRDGETFKCLGCGHVTNADGNASVNMIQRGTGMKVPAGEGIALERREMGRNRKPPVCAVPDARRRRENQACNRPETSSAMKHLGRYVYVVRVYSGI

SEQ ID NO: 38074 - protein, 117 aa, Paenibacillus sp.
MKQLSKQIANACTAVAIEDLNMRGMAQGLKLAKSTNDNGFGMLKTFLSYKLAEQGKSLVVIDRWFPSSKLCRFCKTVQSELALSARVWNCSCGAVLDRDINAAINIKNEGCRMLGVA

SEQ ID NO: 38075 - protein, 424 aa, Calothrix sp.
VIVYEFKVKGKDKQYQAIDEAIRTSQFIQNKCLRYWMDNKDVGRYDLNKYCAVLAAEFPFADELNSMARQSAAECSWSAIARFYDNCKKRKVGAEASSAPNFVREKIKGKKGFPRFKKNCRSVEYKSSGWKLSDTRKAITFSDKKGIGTLKLKGTYDLNYYDIKQIKRVRLVRRADGYYAQFAIDIDVRIESQPTNQVVGIDLGLKYFIADNKGNVEPSPQFYRKSEKQLNRANRKKSKKFSLAKRKAKSRQSNNYHKARNRYARKHLRVSRQRKEYCKRLAYSVIQSNDLVAYEDLNVKGLFRNRHLAKSISDAGWYTFRSWLEYFGHKYGKVTVGVPPHNTSQNCSNCGKKVKKSLSTRTHVCPHCGYTEDRDINAAINILRLGLSTVGHTGTYATGDLPSWAVGASLLSNGESMNVESPRL

SEQ ID NO: 38076 - protein, 279 aa, Bacillus sp.
MTMLLSQKYEIFPTKEQKEMLERWLQYCRQTYNSALLDKQRKYKENKQLYTRSDMQKQQVIDKKRYPFLKEVPSQPLQEVFLRLKKAYDGFFRGDTNYPKLKKYKDYNSLPFPQFGFKSNGKHRFAMSFADNGNLYNKQLGEIEIHMHRPIEGIIKQLILKRQSKRWYAIFSVERQDVSPSIDMENAIGIDVGLNKYAVLSNGVVFENPRFLLQKEKQLRKAQRNLSKKKKDSANYKKQVERIQILHEKVANQRKDFLHKLSFHLTQMYSVICIENLDI

SEQ ID NO: 38077 - protein, 409 aa, Methylobacterium sp.
MIARGFRFKLDPTPEQDALLRQFAGVCRLVYNLGLEQRATWGRKHRIGYVSQAADLTRLRAEFDWIRAVSVSCQQQALRDLDRAFQNFFAGRASFPRPRKRGVNDSFRFPGREVETKRLNAKWSAVRLPKIGWVKVRDTRPLRGALKNATVSLDATGWHISLACEIEHDAPAPRPESVGIDRGVATTLALSTGEMMRLPESLERIEAQTRKAQKVVARRKRGSNRRRRAQARVARLQARQARIRRDFHHRATLDIARRFGVAVLEDLNTRGMSASARGTVAEPGRNVRQKAGLNRVILNAGWHLFAAILAYKMEERGGQVVSVPARFTSQTCAACGVVDARSRESQARFVCVSCGHTDHADTNAAIVIKRRANSALLDVEGLHQQPFEASTGRDLTVSENPRPSGRGRC

SEQ ID NO: 38078 - protein, 518 aa, unknown
  TnpB Polypeptide
MGSSSQYYVVELPLRIGDEESRRLAMAFEFGRTIYNATLGQALGKLTHMRQSTEWKNAFLIKKVSDRNAELKRIQKKYGLNEFGLGDMAANHRKASGKTNLIGFTEAKFIGFTVWRALERYIYAKGGRPRFKTKRRGLHSMYCCGNRGIIWKPQLQSVVWRGYRFPALVKHTAYFQEALGSEDSPRQVKICRIVRRILNCRERWFVQLVMVGLPPVRHVYAPKSETIGLDIGPSKVAMVSPNFAGFTFLSPYGEIPWAKIRNLRRKMARSLRAMNPDNYEPSGATKKGAREWKRSNHYEKLLRELADLYRRAAETRKRDHGALINSIFEQAGTVNLETISYRSYQRNFGRSAQRQASGLFVQRLKRKAESAALTVNELDTRKLRMSQYDHRTQTYTRKPLQQRWHSLGGSDTLVSRDIYSALLACCVKNGEHDPVSIERCWQAVEHQLKSAGFVRDIKLPKGPDRERFLSRLVRDPSPGFTSEAVQTKIFRVRSDVRPRESFQTCFVGKAADVSESPE

SEQ ID NO: 38079 - protein, 366 aa, unknown
  TnpB Polypeptide
MLGLQKGVKFRIYPNKEQRNLINQTLGCCRLIYNMGLDMRNKAFEDGEKINCSKTSAMLTELKRTNEFSFLRNADAVALQQSLRDLDQSFVNFFQKRARHPRFKSKHNNHQSYRTISQNNNIRIVGKYIKLPKLGYVKIKQSMEVGKINNATVVRTPTGKYFVVLNVDFEPELKQNDGGSIGIDVGIKEFYSDSNGNVVSNPKFLEKSSRKLRREQRRLSRKKKNSNNRNKQRIRVAKVHEKIANQRNDFLQKLSTMLISENQVICIEDLKIKNMVRNHKLARCISSVSWGKFFGMLEYKANWYGNDIIKVPTMYPSSQTCSRCGYKNPLVKNLAIRKWECPNCHAIHDRDTNASINILNKGLSIA

SEQ ID NO: 38080 - protein, 561 aa, unknown
  TnpB Polypeptide
MIKYSINTDKYELETKTTANGYRIESLLNKRTMTLGIDNLIKSEKTKNIIESKMKNYSSYKMKLVKDIQKGIEYKNTGKDRLHRKLAKKYNLGISEADSGLAAAIGIIKSSETWHMKTIKNLEDKIIEIAKYLEESLEQNKEKSINKKTKKHKFKSNFFKGKKKHLQYLKNKLEKLQQEQKLSIHFGKNEYRRLRYEREILKELELFPKGNEKKINKTQHNIKRLKQEYQNKRLEYFVEGTVEKGNTKIVIEYQKDCNKEDNKYQLRLIFGKSNKEQIIIKDIKIPKSHLSTFTIEQFNRQANRISYNSKGKLILNCTYNYIKPISEEIEQVIESKGTIGIDIGPHEITYVLVKNDGNPFKKGSFNISTILDKRNKETERNLSEIIEKIIQIGKDNSFYSITIENLFFDNHSYKYRSRKLNRILSKFPFELFEKLIISKTTRNGIKLNKINPAYTSYIGIKKYSNRDDVTSNHNLKSKDYSAALVIGRRGLGLREKFVICIRGFSKRFNKKISQSFSVSTLFKQSEKCLNTTNHFNKSNWSLWKNIKKNESDIRNLISSVS

SEQ ID NO: 38081 - protein, 407 aa, Staphylothermus sp.
LGVRVYATVKVEAVAPDPSSHHRLYLFLKSYRDWTQYVIDQIWFEDKTPSMRELHSRFYGLLRSMGFRAHHCHKIERRAKEIVKGVKKNNGSKPVLRKLTARIDYEDYKLDLENKVLKIAMLNNECVVLKLKWYSYINKYLNSDWKLKEILVSFRNNNIWIYLVFEREVVFRKPRTVMGVDINFDNITYTILDMNGRLMSMGTIPFKGLRKALHYKKLAEKLQRRYPRNWRFVKWVRRVRGRWLRRAKNILRDTSHYVAKKIVGIADEHDSVIVLEDLENIKKNNRSKKFNWRIHFWAYRRIQEYIYYKALMKSIPVVFIDPKYTSKKSPIGGKLIFLNYKYVKLPNGFIVTRDIVASWNLALKYLQMKGSRWSMWSPNSPHDEGMKTQPKRGKPMQVSIISKITKK

SEQ ID NO: 38082 - protein, 408 aa, Staphylothermus sp.
VRVYATVKIRAVAPNPSLHHKLYLFLRSYCDWTQYIIDNIWFEDKIPSMKKLHDKFYGLLRSMGFRAHHCHKIERRAKEIVKSVKKNRGRKPVLRKLTARIDYEDYRLDLRSKTLKIAVLDNEWIVLKLKWYSYINKYISDDWKLKEILVSFRNNNIWIYLVFEREVVFRKPRTVMGVDINFDNITYTILDMNGRLVSMGIIPFKGLRRALHYKKLAEKLQKRYPRNWRYVKWVRNVRARWLGRAKNILRDTSHYIAKKIVGIADEHNSVIVLEDLKNIKSNNKGKRFNWRINFWTYRRIQEYIYYKALIKNIPVAFIDPKYSSKKSPIGDRLIFINYRYVRLPNGFIVTRDIIASWNLALRYLRMKGSGWSMWSPDNSLNEGMKPQLKRGKPVQVSKITKITIVSKR

SEQ ID NO: 38083 - protein, 440 aa, Staphylothermus sp.
MVIFGNYENYCCFVVFIFMCSLCIFLCNILWWGLGVRVYATVKVMGVAPDPSLHHKLYLFLRSYRDWTQYIIDQIWSYNRIPSMKNLHDRFYMLLRSRGFRAHHCHKIERRAKEIVKSVKKNRSRKPVLRKLTARIDYEDYRLDLKSKTLKIAVLDNEWVIVKLKWYSYINKYLNSDWNLKEILVSFRNNNIWVYLVFEKQVVFRKPRTLMGVDINFDNITYTILDRNGKLVTMGTIPFKGLRKALHYKKLAEKLQKRYPRNWRFVKWVRMVRARLRRARNILKDTSHYIAKKIVEIANEHNSVIVLEDLENIKKNNKSKMFNWRMHLWAYRRVQEYIYYKALIRNMLTVFIDPKYSSKKSPIGGRLIFINYKYVKLPNGFIVTRDIVASWNLALKYLRMKGSMWSVWSPDSPLREGMKTRHKRGKPVQTIPKITIVSKR

SEQ ID NO: 38084 - protein, 455 aa, Staphylothermus sp.
MKPYITRLFAYLDTMVVLEIMRTIIVFVVFIFMCSLCIFLCNILWWGLGVRVYATVKVMGVAPDPSLHHKLYLFLRSYRDWTQYIIDQIWSCDKIPSMRELHSRFYGLLRSMGFRAHHCHKIERRAKEIVKSVKKNNGSKPVLKKLTARLDYEDYKLDLESKTLKIAVLDNEWVIVKLKWYSYINKYLNSDWKLKEILVSFRNNNIWVYLVFEKQVIPRKLRTVMGVDINFDNVTYTILDMNGKLVTMGTIPFKGLRKALHYKKLAEKIQKRYPRNWRYVKWVRRVRGRWLRRAGNILRDTSHYVAKKIVGIADEHDSVIVLEDLENIKSNNNGKRFNWRIHFWAYRRIQEYIYYKALMRNMLTVFIDPKYTSKKSPIGGKLIFLNYKYVKLPNGFIVTRDLIASWNLALKYLQMKGSKWSMWSPNSPLREGMKTQPKRGKPVQTIPKITIVSKR

SEQ ID NO: 38085 - protein, 352 aa, unknown
  TnpB Polypeptide
LRHLDRLIDYHCEVYNYCIALHRRYYKMYHKHLSANKLKVHLTKVRKRPNKEHWRELGSQSIQDVAERIERSYKAFFDAKKEQRCGRHSIPHFCKRKNYSSFTLKQTGYKFHDGNHTTILGKDYKYVAHRPYEGTIKTVSIKRDNCGDFWLCIVCAKPASEIIPRKGNAIGYDFGLKTFLTGSDGSRIESPRFLEKNATALRSAQQALSRKRKGSANWRRAKMDVARKYQYVRNRRKDWFYKLAADIASQYSDVCIEDLNIKAMQQLWGRKISDYAFTEFVSILQNQLSKTGGQLHNVDRFYPSSKTCSHCGHIVEGMPLDVRRWECPICHAMLDRDGNAAVNILVEGMKSA

SEQ ID NO: 38086 - protein, 395 aa, unknown
  TnpB Polypeptide
MSRYRLLPSPAQEAVLRDHCAHARYVWNLAVEQHAHWRLGRKSAPGYLVQCRQLTQARAEYPWLAAGSQTVQQQALRDFAQAMVAFFDRQNPAGRPRWRKAGRDEGFRIVGRGTQWDLRRTSRKVGHVWIPKAGWLRFRWSRAVPDGVKSYRVTLDSAGRWHITFAAIPEPVPGPGNGATVGIDRGVVVSAALSTGALLTAPGLVTREQKRLRRLERKLARAKRCSNRRRQLKQALARLRARETGRRKDWAEKTSTDIARRFDVIRVEDLQIKNMTRSAKGTRENPGRNVRQKCGLNRGILRSGWGLLVRRLEDKASGRVERISPAYTSQTCSGCGHRDPESRESQSRFRCRACGLQVHADVNAARNIAAGHAVTARGGDGVARPVNREPQLLVS

SEQ ID NO: 38087 - protein, 275 aa, Okeania sp.
LLKKGIVKLSQSNIEFSSKATNINQVRIVPRLNCYVIEVVYTVPDVDKKQSQYAAGVDLGLTNLMAVTSNRPGLKPLLVNGRPLKSINQFFNKRLSKAQSKEACRQIKELNSKRDNRIDNYLHTASRRVINWCIANDITTLVIGNNQGWKQSIKIGKRNNQQFTKIPHSKLINMLIYKGELAGIQVIVTEESYTSKASALDGDTLPKYKPNSKHTFSGRRTNRGLYKASAGKTINADTNGSLNIARKVIPNFMDGIEALPFMPLVLKLWTKNEFV

SEQ ID NO: 38088 - protein, 343 aa, unknown
  TnpB Polypeptide
MYLTTIFRILPKAEELKALESLIYNFDVEVNKVLLKYLGQDSIVDVRFLEIKNTVPWDSKIEVIKQASLNFKLIKKNEHKLIKLNNLFCVWTPRNFRFLNNQETQLLIQNRGRSSCILDINSNDYLRNVIDSHRLFSLKIKKRGRKWIGLLTYYQEPKENTFKNTMGVDLGIKVPAVAVTSTGKVRFFGNGRQIKFIHRQQRKKLKQNKDKGNKKNYSWKNKLKAIDHKISREIIDFAIQEQVKVIKLENLNRLQKRNSKVKGVPTWSYSRLLSYIKYKARKEGIIIKLIDERYTSKRCPSCKTINNVYDRNYFCFHCGYKNHRDIVGALNILNANLSQKTCL

SEQ ID NO: 38089 - protein, 367 aa, unknown
  TnpB Polypeptide
MYFSYKFRIYPTDIQKNRLSKAFGSNRFVYNWALNLKEDAYKNNKTVLIKYLQPQLKKLKEQNAWLQNVCPEILTSSLVNLDHAYKNFFNHRSEHPKVKTRYSSQSFMLHNSYNLDRTRHILHVDGIGDLRIEERCSVSARIINLTVEKTLTEKYYAIFCIQIDQENVEPPIVEKETSVGLDVGLKNLITCSDGRIFENKAFLTHSLDRLTSLSRRLDKMTKGSNNYKKLHQKFLLLQEKIRHQRMDYYYKIANELTSSPSIKTICMEDLAVSEMMQDKALRRQIVDASFFTLRRIIENKCLERNINFIPVGKYAPTSKACNHCGYINDKLTLKDRSWICPRCGMEHDRDFNAACNIRDFGISGLVD

SEQ ID NO: 38090 - protein, 327 aa, Streptomyces sp.
VEADRRHVTLPRMGTIRTHESTRKLQRRLANGTARILSATVRFERDRWFCSFQVEVKRDLERVARPAAIVGVDLGVKHLAVLADSLGEIRFIPNPKPYDTGLKALRLLSRRVCRRQGPNRSTGQKPSARWLRANEQRSRVYHRVANLRADALHKLTTALAGDYGTVVVEDLNVAGMLRNRRLARKIADAGFAEIRRQLTYKAARNGCRTVVANRWYPSSKTCSGCGAVKTKLPLHVRVFDCDECPLVLDRDENAARNLAALATACTTGTGVAGDLGAEAPNDRGADQKTRVTRRSHEATSGWAGGAIPHQRAEAVHRPQDTEALRLW

SEQ ID NO: 38091 - protein, 399 aa, unknown
  TnpB Polypeptide
MKTIFKSFKFRIYPNKDQEILLAKHFGANRFVFNYYLNKRKESYLGEDKKSLNYYDNANDLTQLKKDENYIWLKEINSQTLQSGLRNLDTSYMKFFRKQTKFPKFKSKYDRQSFKIPQNVLIKDNKLNIPKFKEGIKINLHQEIDGKIAFATISKSVTDKYYVSITCEVQHKQFEKTCSKIGIDTGIKDLAILSDGKVYENIKTLKNNLKKLKYEQRQLSKKVKGSSSRNKQRQNLAIIHEKITNVRKDYLHKISTEIIKNHDVICVEDLAVKNMMKNHKLAQAFVDVSLGTFYSMLEYKAKWNDKQYVKIDRFFPSSKMCSKCGWINQDLTLKDREWICPSCNTTHDRDFNAAKNILKQGLKILSGSGIESDIKQKQVEALSLDESMKPETHKSLACV

SEQ ID NO: 38092 - protein, 444 aa, Streptomyces sp.
MSRFRMYPTREQEEQMLLHCAHARYVWNLAVEQHSHWRRWRKSAPGFAEQCRQLTEARRENEWLGAGNADVQQQALKDFAKAKNARFTSGFGEPTWRKKFRHEGFRVIGTDRVPECNEDGTPKLNAKTGKQVMSRSVVMQKLNRRWAQVKVPGCGWVRFRLSAKGKSAVLPDAKTFRVTFRNGQWHIAFAVTPEPTPAPGTGEVIGIDRGIKITAALSDGRTLNCPQLTTRERAQIRKHERRAARAKKSSPEKAAEYAKVARLKAREADRRKDWCEKTSTMLARTYDLIRFEKLNIKNMTRSAKGTVEQPGKNVAQKSGLNRAILAQGWGLLRQRAEHKAPGRVEDVPAPYTSLRCSACGWIDKNSRKSQAEFVCSSCGFTCNADTNAATNVAAGQGGIPRPRRTAGAGGTTPPTQRSNVREPQPTWVGIPLFKRGRMSSKEWA

SEQ ID NO: 38093 - protein, 320 aa, Halomicrobium sp.
MTPSYNQSGFKLDKKGGQAVLSLSKLGDIPIRLHRAIPDGAKLKQVTLKKEATGEWFATFGVQIDHEPPEPPEDPEKCVGIDVGILTYAHDTDGTAVGSLDLSDERERLEREQRDLSRKEHGSNNYEKQRRRVAECHADLRRKRRDFLHKLSNYYARKYDLVAVEDLNVKGMMESPSNSRNTASAAWRTFLSLLQYKCDREGTHFVAVNPRGTTKECASCGVSTDKPLWVREHSCPSCGFEADRDANAVVRLRLTGSKIAQRFCDGVEYSFSRSRRHRSGTLRINACGDCAPCGYHSGVCKARRGSRKPHPQGANRASGE

SEQ ID NO: 38094 - protein, 300 aa, Halomicrobium sp.
MAVRRTAVVKLAVSDEQRDALHRTADQYLDCANRTADYCWSSTSYTECKTNKRQVRDALYSELREETDLQAQLVQAAIKRAVEAVKACVERWKKGQRVSCPTFTAETLDYDTRSATFYRNKVSLATVEGRVEPSFVLPADSPTPYERYVLSEDHEFRESTLRYDTATDEFYLNISTRRIDSDDEVSEDTGHPDQTVLGIDLGVNSLAVSSTGTFWQGDDYDHWCREFEKRRGEMQQRGTQAAHNALLRLGKREEAWRKQYIHTVANEIVSEAVENGCDVIVFEDLTDIRKRLPQAKWHHI

SEQ ID NO: 38095 - protein, 413 aa, Halomicrobium sp.
MAVRRTAVVKLAVSDEQRDALHRTADQYLDCANRTADYCWSSTSYTECKTNKRQVRDALYSKLRGETDLQAQLVQAAIKRAVEAVKACVERWKKGQRVSCPTFTAETLDYDTRSATFYRNKVSLATVEGRVEPSFVLPADSPTPYERYVLSEDHEFRESTLRYDTATDEFYLNISTRRIDSDDEVSEDTEHQTVLGIDLGVNSLAVSSTGTFWQGDEYDHWCREFEKRRGEMQQRGTQAAHNALLRLGKREEAWRKQYIHIVANEIVSEAVENGCDVIVFEDLTDIRKRLPQAKWHHIWAFRRLSEYVDYKAPEQGVSVEQVEPNHTSQRCSRTDCGFTHDDNRHGEHFECQKCGYEVNADYNGAKNIGLRYARKRKHRLRSSPKSGSGDAPVDVRVNGGTLNGESHRPIAGD

SEQ ID NO: 38096 - protein, 423 aa, Halorientalis sp.
LLTGCLEARRIRNETNRLDRQGGEWDAIKSVVVDNANHVKNTSQLIVDKALGEIETYHDNKDDDWGRPDPYIDELYPVLMNHGEGYRLFPEDDGTVRFRITATRGTHVKGELRGCSDHFDQLRTAFNDEEWRVGTAEVVHKHNEWRLHVTVTHATHRVASKNDADTIVGVDVNEDCIALVAMSQSGSVKDSVVFEYPSVKEQRHEFFTKRKRMQKAEQTAFETVVQTKERDYVHDCLHKVSRKVVGWVSQFRDPVIVFEDLKDMRDSIDYGTRMNRRLHSLPFAALQNMVSYKAAWEGIPSDKANPEYTSQRCPRTECQHTEQANRQKKRFKCKRCGFQDHSDRKAAVCVVQNWFDEQETENVPSLETLPRVRKVRRAASGPGGGTDSHGAIFASGVHRHGTSAQPSQGAREELKTVASAVQD

SEQ ID NO: 38097 - protein, 242 aa, Brasilonema sp.
MKARYQFRCYPTDQQRQALAQLFGCVRVVWNDALALCKASEKLPGYNSLSLALTQAKKTEARIWLKDVSSVPLQQSLRHLDVAYKNFFNSRNGKHKGKKVGCPRFKKKTNAQSAEFTKTGFSITGNEVYLAKIGNIKPIWSRELPSEPSSVTVLKDCANRYFVSFVVEVEPIQIEPINQSIGIDLGLKTFAVLSNGETFKSPDYSRHDRKGVWSKVVGCQHPEGILDKAEKITDNDNHREAS

SEQ ID NO: 38098 - protein, 424 aa, Streptosporangium sp.
MKGRTKEAGTRERTYRYRFYPTAAQAEQLAKTFGACRWVYNQGLELRNSSWEQHRVSIGYTETCRALTGWRRAEETSWLREVSSAVLQQSLRHLDKAFSRFFRGGACRPKRKKKGQAKDSATYVRTGFRWFEDPERPGTGLFHLAKHAEPLDLRWSRPLPAGALPVKVTVTRDRAGRYFLLVLVEERIAALPPAVTPAVKAVGLDLGITHLVTLDDGTKTDHPRLLRRYRARLATLQRQLHRKKRGSSNRNKARLAIARLYARISDIRKDMLDQLTTRLVRENQVLVVEDLDIAGMKRDRPGMQARRKARLNEAISDAGWSELLRQLTYKAEWYGRTLVVVDRHFPSTRRCSACHTLSGPKELSVRVWTCALCGTERDRDVNAAINLREEGLRLYELVVRALPTGKTLPSVIRAADFAEYAAAG

SEQ ID NO: 38099 - protein, 360 aa, unknown
  TnpB Polypeptide
MLCTVKVKLLTTPEQNISLKETMKQFNAACDFASDIAFKKKVFGQVALHRECYYAIREKFGLSSQFTVRAVGKVTESYKTDKKRLHTFKETGAVVYDQRLLSFKGLDTASILTANGRIKVPIVTGAYQQGVLAGRRIRGQADLILQNGKFFLLLVVELPDCPPGKPKDFLGIDLGIVNIATTSDGERISGEVVRGMRRRFLRLRRKLQKKGTKSAKRLLKQRHRKEQRFATDINHCISKKIVSIAKDTQRGIAMEDLNGIRDRVSTVRKAQRIELSSWAFSQLRQFVTYKSILAGVPVQFVDPRNTSRTCPECGNIDKKNRPSQSKFKCTCCGFSGHADIIAAGNIARRAVVNLPNAGVA

SEQ ID NO: 38100 - protein, 413 aa, unknown
  TnpB Polypeptide
MGKELRSVTYRLYPNKNQEKMMNHFLDCTRKAYNRLTEICKLYIEHHLPLPSEFDLNRMVIKIRQRNEWMQDVHSGCFKTVAKRVHNAFVSWRKRHSEGIGFPRFKSWKRFDSFTYSRSSEFSFSGKNNERGKKERIRLGKIGLIKYSNPYIIKGAPKIAVVFRRRVGDHFEWNVSIAFENDGYMRDVLCIDPIIRRIDVGIDLGLDNLAILSDGNIIPNDHTYKKKEREIANRDRKLSECEKDSSEYYKQLTKLAHKFKKLRNYRKDMFHKISRNISENYRNIFMEELPVKKMMEESPKCMKKSYRDAGWGIFTRMVCYKAAEAGNKVIFVNPANTSQLCSSCGEMVPKDLSTRQHICPHCGLTISRDLNAAINILNRGLRLQTKTGNSLKCHEGLKIQSADFEYLAHRSDA

SEQ ID NO: 38101 - protein, 381 aa, Halomonas sp.
MTKRAYKCRFYPTPEQEQLLARTFGCVRFVYNAVLRYRTDAFYERREKIGYVEANAELSRLKKGAETAFLNEVSSVPLQQCLRHQQTAFKNFFEGRARYPNFKSKRHRQSAEFTRSAFKYRDGQLFLAKSKEPLAIRWSRELPSDPTTVTVSKDSAGRYFVSCLCEFDPETLPVTPKMVGIDLGLKDLFVTSNGHRIGNPRHTAKYATRLVKAQRRLSKKKLGSKNRAKARQKVARLHAKISDCRMDNLHKLSRQIVNENQVICVESLKVKNMLRNPTLAKSISDAGWGEFVRQLEYKAEWAGRRLSAIDQWYPSSKRCSGCGHVVDALPLQVREWECPECAESHDRDINAAVNIKAAGLAVLALGENVSGMGQVSMSGSR

SEQ ID NO: 38102 - protein, 459 aa, Mycobacterium sp.
MAKFEIPEGWMVQAFRFTLDPTAEQARALARHFGARRKAYNWTVATLKADIDAWQATGIQTAKPSLRVLRKRWNTVKNDVCVNIETGVVWWPECSKEAYADGIDGAVDAYWNWQNSRSGKRDGKRMGFPRFKKKGRDPDRVTFTTGAMRVEPDRRHLTLPVIGTVRTHENTRRVERLIAKGRSRVLAITVRRNGTRIDASVRVLVQRPQQPKVTDPGSRVGVDVGVRRLATVATADGAVLERVPNPRPLDAALNELRHVCRARSRCTKGSRRYRERTTEISRLHRRVNDVRTHHLHCLTTHLAKTHGRIVVEGLDAAGMLRQQGLSGARARRRGLSDAALGTPRRHLSYKTGWYGSQLVVADRWFPSSKTCHVCGHVQEIGWAEHWQCDSCSASHQRDDCAAINLARYEDTSSVVGPVGAAVKRGADRKTRPGRAGGREARKGSSRKAAEQPRDGVQVE

SEQ ID NO: 38103 - protein, 386 aa, unknown
  TnpB Polypeptide
MQVCRAFSCKIDYRKLKPAQLEALNGLFRDAKHLYNDCVLSDSVFDYRIPKRVEVRMPDGSHETRELSHLSAQMSQGIVQQARDNVRGLKMLKTNGHKVGGLKPVKTVNSIPLKQPGRTFRLNGSYIHVERVPGMLHLTGVRQLDGWEIGPARLIRRASGYYVAFSCFGNRDEYEREHPRPMPANPVGGLDAGLEHDLTESDGTTTIRRYPDTAKARYWARRRSKRDKANKGWWKANRQYRLEMERLKDQRKHAAIEEKHRLEAKYRRIVIQDEQIASWRKRNSWPKAGRILQGSILGRLYATLKQHPQVTVLNKWQPTTAWCRQCGRQTKTPLSQRMFLCAYCGIRENRDVHAARNMIALADQPISHAELRKPRDVPVGPYAQAA

SEQ ID NO: 38104 - protein, 401 aa, Actinomadura sp.
MARQVKRAFRYRFYPTSEQAAEIARTFGCARLVYNRALEERTRAWYQEQRRVSYVETSAMLTAWKRTEELAFLGEVSSVPLQQALRHLQTAFANFFAKRAAYPRFKSRKKSRQSAEYTRSAFTWRDGRLTLAKTSEPLAIVWSRPLPDGAVPSTVTVSRDGAGRWFVSLLCEDAITRLDPAERAVGIDAGVTSLVTLSTGEKVTNPRHERRDRERLARAQKDLARKASGSKNRDKARQRVARIHARVTDRRRDFLHKLSTRLVRENQTVVIEDLNVRNMVRNHSIARAISDAAWRELRTMLEYKADWYGRELVVIDRWFPSSKLCGACGTVTESMPLQVREWRCDCGAVHDRDVNAARNVLAAGLAVSACGADVRPKRRKPSGQTATKQETHPAREGIPRL

SEQ ID NO: 38105 - protein, 411 aa, unknown
  TnpB Polypeptide
MNIQQVEKHIIKKSHPYYSMFCKFTHQSKNLYNHANYLVRKEFIETGKWLRYQDLDKLLKQDIDYPDYANMHAAQSAQQTLRLLDDNWKSFFKSIKDWAKNKDKYSGKPKLPKYKPKDGKLILVITNQQIKQSENLISFPKSFCGFTMKSRCVTLSNFEKLNQIRIIPQNQVFCVDIVYSIYIEDNILQDNGRHMSIDLGLDNLAAITTNTGSKPIIVNGKGLKSNNQYYNKKRAYYQGIAKQMNDKNCTNRLYRLTLKRNLKIEDSLHKVSKFIIDTALSNRVTKIVIGNNKCWKQYISLGKRINQAFGNIPHQKLIDKISYKAQKCGIQVIITEESYTSGTSFLDSEPPEKEYYNKKRRVYRGLFVSNNGASINADVNGAYQIMKKVFPNEFSNGIEGAVLHPVKVNIV

SEQ ID NO: 38106 - protein, 379 aa, unknown
  TnpB Polypeptide
MLISYKTEINPTYSQIDKINKTFGVCRFLYNTYISENIEAYRNNKHFITGYDFDKYVNNTLTSNHLWIKDAYSKARKKAIMNAETAFKNFFKGKTKFPKFKKKNKCHNSFYFVKNSRTNCNVQRHRIKIPSLGFVRLKEKGYIPVDKVIKSGYVSKQANKYFVSVIIDIDIPKPTSAYNNGLGIDLGLKEFAVLSTGETYKNINKSRVIKNIEKRLKREQKRLSKKYENKKKGVATLNKNIDKKISRIQKLHYRLSCIRTDYINKMVSEVVKTKPQFITIENLNIAGMMKNRHLSKAISNQRFYEFRTKLISKAKILGIEIRLANTFYPSSKLCSCCGNIKHDLKLKDRIYKCGYCNLEIDRDYNASLNLMNCQNYKLA

SEQ ID NO: 38107 - protein, 413 aa, unknown
  TnpB Polypeptide
VYLTKTQEKTLLDWLDHLCALQNSARHDRKVAWETESEKVSCYDQQQKLKDARKKYADFREVPQDMQVCALERTDKAFEGFYSRCEAGALKKGYPRHRKQIKSMSWKLRKHKLKTGERVRQNPIRETVWKHDRLKVPKLGEVKIYMHRPFEGDPKEVTLVKKASGWYAHISCELRDMPKVEPTAAIAVDMGTTHYLTTSEGEKEDNPRWYRQAEGLLQKHSRDLSRKQKGSHRRKKQQHKLALHHERTANKRKDFMGKLVYKLYHHKENNVLVAEDLRVSNMVKNTHLSKSIADASWATFFQWCADIAERDGLHFHQVDPKNTSQTCSCCGQKSPKKLSLAIRTFRCQFCGNTMDRDHNAAQNILLKAAAAFRGERWATTPYETRNKNEARDTGFETAEQLLLFNDLLTSPSL

SEQ ID NO: 38108 - protein, 431 aa, unknown
  TnpB Polypeptide
MSTVVRGYKTELDLNNTQITVCKKHAGCARKAFNWGLARKQETRAAGLPMPNAKQLHKELNALKASEFPYMYEVSKCAPQEALIDLDDAFTHFFRQAKLKKQGHYRGKWGYPKFKSRKKGIGGFRLTGAIHVSEKSIQLPRLGTLRLKEKGYLPTHAHIGSATITEQAGRWYIALSVHEEHPEPLPALGPVIGVDLGVKTLAVVSDGREIANPKAMRTRLKKLRRLSRWHSRKQKGSANRKKAQQKLARMHARMAHIREDALHKATAHLVAKTKSPVERPAVIGIEDLGVSGMLKNRKLARAIADVGLSELRRQLTSKAQDAGVQIHVVSRWEPSSKTCSCCGWYNASLSLAERLFVCQECGLVIDRDLNAARNLELLAYLELMSTASYAGFQASGQGSSGFLETEGETALVERGTEPVPMWLVHKCPSFG

SEQ ID NO: 38109 - protein, 417 aa, unknown
  TnpB Polypeptide
MLLSHAGAARFAFNAGLAHVKEALDASEKPEWSYYSLVRWWNSSKDALAVDADGVPWWRENSKEAANTGLRSLAAALSNWSKSRRGARKGRRVGFPKFKAKDQAVPRFAYTTGSFGLIEGDPKALKLPRIGRVHCMENVAERVDGARVLRMTVSRRAGRWYAALTVERDTPVAVCAPKGGAVGIDLGVKTLATLSDGTVIENPRCLASSERRLKRAQKALSRKVKGSRRRAKARAKVARLHAHVANQRQDAMHKATTWLASTFSEICIEDLNTAGMVKNHHLAKAVSDAAFGEFRRQLEYKTARTGATLHVINRWYPSSKTCSECGAVKAKLSLSERVYRCDACGLSIDRDLNAAINILVAGSAPETVNAHRETVSRGGQPGRATRVSLKCEPSRRGGKPRRLGADERKPVLQAKSN

SEQ ID NO: 38110 - protein, 408 aa, unknown
  TnpB Polypeptide
MEYSHRYPAYPTQQVAAELERHIDIHRQAYNYTRYEYENVDADNIGSAYKHHSRLPDWKDEFPIFSEVNSKALQRTVTRFYDNLSNLKDQKENGNKVGKLKWKSPREFQSMTFSQSGFELKNTSGRRATLWLSKIGDVKIRYHRDIPDEADIKEITVKKETTDEWFVSFGLKTDDADLPEKPDVDSLDASNSVGVDLGIINYIHTSDGHTVDWLNLEDEYERLRREQRKLSRKQEGSNNYEKQRKKVANVKRHIRRKVLDYQHKITTWLVREYDAIFVEDLNVKGMLEQSHNAHNKQDAGWRQFITLLEYKADLYGCHVKQVEAAGTTKECASCGVETANPIWVREHSCPSCGFECDRDANAAMNVLQRGFSELGLGWPEDTPVETALPTDTTTVSAKRVVEAGSLGA

SEQ ID NO: 38111 - protein, 577 aa, unknown
  TnpB Polypeptide
MKQLTLWEFASEPSDDGKPKVKSTRSKRRQDNGGTTSKSSSKKNQKTEEDAPLLSMLASLPDLKNQTLIDKLKDYQCSTQALKLLKKWEEDSILGGKDSSLFWDEFCKVMSELLWLPTKTDLRDLALILSSGCVSNLTAKSWFSTKSVSLRTKNLFKISSPSCTVSPVGFTPSEDLKTKSSRSYKLKPRHKTAKPKPNKTLKIRVYPEPELHQKWKSWLSASRYCYNKAIAALKAGEKITSAYSLRDYVLGLDLPDWVKSAPAHPKENAIFDAWDAWKQAKSAKGESSFRSCRQPVQSIKFHRVNFNGETWYPTLVKGLNFRASEPLQKTNFATQLVRDKKRWFACIPVLEEVEPKELDKVIALDPGVRTFLTGYDGESFQEFGGADIGRIQRLCSHLDNLLSRASKACRKQKRRMYQAANRIRIRIRNLVDECHKQVANYLTSQYKVIFLPTFETSQMIVKSKRKLRSKTARQMLTWSHHRFKLTVKQAANKRGVVVIDVNESYTSKTCTKCGHQHSKLGGSKIFKCPSCGHEHDRDWGGARNIMIRALRDGSFALNLSVEGIAIASDVFVHRCTA

SEQ ID NO: 38112 - protein, 437 aa, Halobacteriales sp.
MLEVHRTYRATIRNHGQVAESLDRHGWSASKLWNVANYHSRNVWEETGEIPDHEELKNELKTHNKYNGLHSQSSQRVLEELAEAFNSWYSSDDDRDNPPGYRKKNYYDQQGRRVHEEHPRSTVTWKQNGIKHDTKNNRVRLSKGANHKEHPRAWEYILIEYETRPGVTVENLQQVRAVYDQQNERWELHLVCKDEIETPNAPGNETAGIDLGISNFAAVAYSTEEADLYPGNRLKQDGYYFPKEIAKCDDSGGDRATRLHHKWAQRRTHFFHSLAKHIVRRCVEKGVGRINVGDLEGVREDENGDSKNWGRHGNLDLHGWAFDRFTKILTYKAKVEGIDVVEVSERDTSKTCCICGREDDTQRVERGLYVCEVCDGAFNADVNGAENIRLDINQSNSESSGQLSGDRSTGWLAQPGVYLHDLSRGFQPREEVVDSKP

SEQ ID NO: 38113 - protein, 417 aa, Halobacteriales sp.
MEVRRTVPVTLDVDSDDAALLEDTVDTFLWSAQYVVDHAFQGEYVTTSKTTLDDGTYDDVREATDGFNGGLVQAARNKAAEACKSVVERWKQGKKASKPRFTSPHVVYDHRTATFHDDYVSLATTDGRIEADYILPDEDSDTPHSEYLFSDEYETTGAELHYRDSAWVLHVHCKRDVESDTSEKATPENGTVLGVDLGVNNLAVTSTGTFWTGNEFDHWRREYENRRGDLQQCGTRWAHQNIQSIGRKENGRFKLMLHRISNELVAEARENGCSVIVFEDLTDIRERTSASWGRKWAFNRLYEYVEYKAEEHGITVEQVDPENTSRRCSHCGFTHPENRAGEDFECQKCRYENHADYNAAKNIGLRYLRRNQTGDDGGAPVGVRLNSGALNVNGGYSPASSEARTGVHAESHPFTGG

SEQ ID NO: 38114 - protein, 437 aa, Halobacteriales sp.
MLEIHRTHQAKICNHSQVADSLDHHGWSASKLWNVANYYARQQWDETGEIPDHKDLKHELKDHTKYNGLHSQSSQRVLEELAESFTSWYKSDDDRDNPPGYRKRNYYDQDGNRVHEEHPRSTVTWKQKGFKHDQKHNKIRLSKGANHKEHPRAREYMLVEYETRPDVTVENVQQVRAVYDNAKGRWTLHIVCKDEIETSDPPGSETAGIDLGICNFAAVAYSTDKADLYPGNRLKQDGYYFPKEIAKCDDAGGERATRLHAKWSERRAHFFHSLAKHIVERCVEKEVGRISIGDLEGVREDKDGVAKNWGRHGNLDLHGWAFNRFSNILTYKAKVEGIDVEKVDEQGTSRMCCVCGKTDENQRVERGLYVCEEHGDAFNADVNGAENIRLDINESNAESSASLDEDRCTGWLAQPAVYLYDLSCGFQPQTEVVDCRP

SEQ ID NO: 38115 - protein, 329 aa, Micromonospora sp.
VSSVVLQQALADLNTAYRNFFTSVSGKRKGRTVGAPRFRSRKDNRQAIRFTANARFKVLDNGRLRLPKIGDVQVRWSRTLPAMPTSVTVIRDAAGRYFASFVVQSTHEPLPSAASEVGIDLGLTHFAVMSDGTKVTAPKFLRRAARKLKRLQQDLSRKQRGSRNRKKAVVKLARAHARVADTRRDWQHKLSTAIIRDNQAVYVEDLCVTGLARTRLAKSVHDAGWAQFTAMLEYKAARYGRTFARADRFFPSTRMCSDCGRITDKMMLNVRTWVCPCGSHHDRDVNAARNIRAAGRADLNDRGAQIRPASVPAPRSEAVTHRELVPSGT

SEQ ID NO: 38116 - protein, 390 aa, Lechevalieria sp.
LLERVFYLGSVKIVVQVRLLPSAEQATALTATLRACNAAADRASRVAFEQNVHSRNDLQKLVYGEMRSSGLGAQAAVRTVKKVVDAYSSVRASVRTGNPHGVRQVNARSKPIRFREYAAQPFDDRMLSWQYNAGTVSIWTVVGRLKGIRFAAHSHQLATLVSHRQGESDLVLRDGKWLLIATCDVPEPTMVEPRDWIGVDRGIVNLATTSDGQNFQGRRLQRYRRWHARKRAELKVKRTKSATRRLHRRGRREHRHATNVNHTIAKKLVAVAQRTGRGIALEDLGGIRDRVRPRRDQRATHSSWPFHQLGAFIEYKARRAGVRVIVVDARHTSQMCPRCGHTARNNRRDRDRFRCRRCGLAGPADHVAGINVRNRARSAWVPVNVPEPSA

SEQ ID NO: 38117 - protein, 415 aa, unknown
  TnpB Polypeptide
VGELTRTVIVPSVKLAEKKFRVFKELEELYKQILLELVEYGFRNNIDSFTGLKGDRYRVLSRKFPQLPSHYVYTACQDASTRIASFNKLKKKRLAKSEKPEVRKVSIWLDDHLWRRVGYTTILINTHRGWVSVELVPHKLYWRYVNSGWALRTQPKIKIDYEHERLLIYFVFAKTINVDEDSARHVISVDINENSVAVKVLNEVCILETNIKRITMGYAGYREVVQSVKGNGYVGRTIHGRERKRKKDIRLKIANIIANTAKNLNAVVILEKLPKQCPRNMIKDVKDSTLRHRIYQAGFRSMARVIEEKCLERGVPVVKIDPRNTSSTCPLCGSKLMRGDAPRQLRCPRCGFKAGRDVIATLNLEKKHLTPKGCVPFTPMPYEPTLKVAVLPMKEWARRKSLDATNENKLMRMSI

SEQ ID NO: 38118 - protein, 385 aa, Actinopolymorpha sp.
MFSRTFGCVRLVWNKTLAERHRAWHAEGKKTSYRETDAALTVWKKTEDLAFLSEVSSVPLQQTLRHQHTAFANFFVGRARYPRFKNRNARQSAHYARSAFRMRDGKLFVAKTSSPLRFVWTWDDVDVAALNPTTVVISRDPDGRWYVTFAVDAGAPEPLEEAGHAIGVDLGLKDFAVTSDGERIANPRMLERRARNLARYQRRMARCQRGSVNRRKAKRKVARAHRNARTGFLHRTSSALVRKADTIVIEDLNVSGMVKNRLLARSVSDAGWGEFRRQLEYKCERAGRRLVVIDRWYPSSKTCSSCGNLLAELSLSTRHWTCPRCRARHDRDINAAKNILAAGQAVARSGPGDACGAGVRRQGSALPQSAVKQETSPARARIPSL

SEQ ID NO: 38119 - protein, 608 aa, unknown
  TnpB Polypeptide
MLQQKTCISGLKKQVSSSKSRYKPSKCGSEKESSNVFEQKEVIDGSSEMISSPTSQKNKDLSSPKKISATAESLQPPKKKIWKDKLSSSDLNSLTTKLLGILDRESTLKEKVLTPFWTPQSKEMSKRLWLPTKIDCVDSVLNLSKESFPHAPMGKSWFSINKKHPQRKNSLMTSFQSSQYSLPDSMDLGAIPSKRKSEQKPLKSVKIRLFPNQEEKEQLQMMFEQFRWYYNATITIVYNHYGYEDVPKKRKYSFETVRDLLRKYKYTEEFVKNLVIQDFVYDEDRNENPQPDWWDKEPHSRVPRGAVAKFVSSLNSAISNNRAGHNKSFTMKFRSKKSPTDYLHFEDKGYPAMIKKIRSHYWFTGKDGKKTKISFSDIESMKGLEIIYEKETGKYFLHCPVSRDWFPKEDRRSDNQAKFVSQGERVIALDPGVRKFMVGYDPAGYSIFFGDGASLELTHLLYDVDKNPSHSKWKKIKNMVSELHWKTISFLMENYDTIILPDFRVSQMIRKKKLARITKRLLCMFSFHSFKEKLMYKCATYRKKLCIVDESFTSCTCGVCGVINNIKGMETYTCESCGLVIDRDVSGSRNIFIKNATLRLGELGFYQV

SEQ ID NO: 38120 - protein, 421 aa, Coleofasciculus sp.
MNYTYRIYPDALQELRMLDWLEISRKCYNQALREIKDWVNSRKCSLDYCSLESEYIIPADKPFPTYYNQQNALPKAKKEFPRLGEPPSQVLQTTIRRLHEAWNYFQERGFGFPRFKKLGQMKSILFPQFKANPITGWQINLPKVGKMPINLHRPIPEGFVIKQARVLRKAASWEVVLTIECNLSIPEAQPHGEALGIDLGLSKFLTTSDKEFIARPRFLTSLYRKLELLQRKYARTKKGSSNREKALCKVAKFHNHIANLRKDWHFKLANHLCTKEGVGMVFVEDLNLKAMSRGMLRKHTLDAAFGQFLTRLEWVAKKHQILFARVNPDGTSQTCPKCNTHTGKKELSERVHKCDVCGYETDRDHAASEVIRLRGLDNLSTQGHCGIENAYAVGLPGIDENQSRSETKPFRKGRKTRNAQQ

SEQ ID NO: 38121 - protein, 498 aa, unknown
  TnpB Polypeptide
MKKKKVHWKSFNINMPLELIPIYDFLQDELNFILSNDETRALLDKIDLSKLRGDVWRDMRNSLKFRIKDWPLHNKTWHSYILFENIRQEIKSKQEAIIIWNELVKNDFDINKELFDSLHKLNLYPTRSRIANIKKSNSLPELSRSAVFNLDYTISEKQFFRMKTNNICEIKISKTDWIEYEIVFPSSIDSRFTGVISKPRFVKRKRDNQYIGICSYEYEVGNYDLEDKILGIDIGKIKLFSSVVMSKKGEFSDEFINTKRSQETEDKINKLYENKQILYNKIKSYEDLRLTNQAKYKIWINLYSSISNKIINTKDYQAKLLSSEIVKLALEQKCKTIHIEDLSWLNSQGGKWNHSQIHSKIIEKASMYGIEVKKVSAFNTSKEHPITKEVGVIKDRTVEFTTGKIDRDLLAAINISLRSTNIKLKKSLPKKATTKRVKPKSNRKEIKEKVNRIKGNGQIVSFLTNVLDSTIQVELGVRPLHEVLPYNSLIGYYNKLQV

SEQ ID NO: 38122 - protein, 381 aa, Mycobacterium sp.
MQLRYNYRVYPTPGQCGALAQAFGCARVVFNDCIRFRQESHAAGVRVSDTDVQKRVVTAAKATSERAWLSDVSSVVLVQACQDARVAYRNFFDSLAGKRKGRKLGAARFRSRKDNRQSIRFTRNGFSLRPNGKLYAAKIGELKVAWSRDLPSEPSSVSLIKDAAGRYFASFVVQLDDTPLAPVDCEVGIDLGLTTFAVLSTGKTITSPKFFRRAERKLRKAQQDLSRKQRGSNNRAKARVKVAQAHARVRDSRLDWAHKHSTQIIRENQAVYVEDLCINGLARTRLAKSVHDAGWAIFTRLLEEKASRFGRAFGKVDRFFPSSQLCSECGAVDGKKALNIREWTCRCGVVHDRDLNAARNILAAGRAERLNACGEPVSLSA

SEQ ID NO: 38123 - protein, 202 aa, Microcystis sp.
  misc_feature (202)..(202): Xaa can be any naturally occurring amino acid
MEKAYSFRFYPTPEQESLLRRTLGCVRLVYNKALHERTQAWYERQERVGYAETSSMLTDWKKQEELEFLNEVSCVPLQQGLRHLQTAFTNFFAGRTKYPNFKKKHQGGSAEFTKSAFKFKEKQIYLAKCTEPLPIRWSRQIPESCEPSTVTVRLHPSGRWHISIRFDDPTIKPLPVTDKAIGIDLGISSLVITSDGDKVSNX

SEQ ID NO: 38124 - protein, 202 aa, Microcystis sp.
MEKAYSYRFYPTPEQESLLRRTLGCVRLVYNKALHERTQAWYEKQERVGYAQTSSMLTDWKKQEELNFLNEVSCVPLQQGLRHLQTAFTNFFAGRTKYPSFKKKHQGGSAEFTKSAFKFKDKQIYLAKCTEPLPIRWSRQIPESCEPSTVTVRLHPSGRWHISIRFDDPTIKPLPVTDKAIGIDLGISSLVITSDGDKVSNP

SEQ ID NO: 38125 - protein, 417 aa, Streptomyces sp.
MKLVVQVKLLPTPVQAAALEATLHACNEAASWASEVAFDKDVKRNFALREHTYAEIRHRWGLGSQAAQHVIKKTCDAYRTLAANAKAGNLGKRWSKRYRRAAEKPIVFRPEGAQPYDDRMLSWRITDRTVSLWTLSGRVKGVVFTASPEQLAPLALYRKGESDLLYRDGMWFLNATCEIPEAPLNTDPDGFLGIDLGIVNVATTSDGQIMAGRALNRGRLRERALRTKLHRKSTPSARRRLKKRRRKEARRARDINHKIAKHVVAEAERTGRGIALEDLTGIRERVRLRRPQRATDSSWSFAQLGQFVAYKARKAGVPVVYVDPAYTSRTCAECGHIDRANRVSQAWFACRSCGFVDHADRNGSRNIRARTEELWRRGAQSTAPDPPPTPEGGTGRKHSTTASGARCANPGLQSRVR

SEQ ID NO: 38126 - protein, 392 aa, unknown
  TnpB Polypeptide
MRRAYRLRAYPTRPQEGRAVRLLADHCDLYNAALQERREAWGMHNVRVSYGVQSAQLKEIRAADPAGHGRHSFTAQQQTLRRLNATFAAYLKRARNTEGNARRAGYPRFKPYQRFDQVLFVVGDGARWEPADGVGWAYATFQAVARVKVKQHRRIAGRVKTLQLKREGRRWYVIVVAQTEAAPLPATGRSVGVDLGVARYLTTSDGEITANPRFLATAQERLADLQRRKQHARPGSGNRRRFRRALAKEWRKLRNQRRDFHHKTARALVDTCDAIALEHLRVAAMTATAAGTIEAPGRNVAAKAGLNRSILDAGWSQFTSILVAKAESAGRRVVLVHPAHTSMECHTCGARCTRPRQDTVVCPIHGELDADLNGARNIATRAGLGSGQASAA

SEQ ID NO: 38127 - protein, 373 aa, unknown
  TnpB Polypeptide
VQLNQGRKLHTTYRFRIKDSNCQGRLRTLAGEVNLVWNFVNEVTRRRWKESRKHICLKDLQVLTKGSTSLLRVNAQTIRAVQEELLIKLKAGKRLRFRSGRKNLGWVPFKSQTSKFLGDHVTYAGSKFRFWLDRPLPDGAIFRYGSFSEDARGHWYVNIVCEVSTTPVLDRPVAGTSVGIDPGVKTIITTSNGEKFERPSLTAKHSVRLAKAQRRHKKRQVNRINAKIRNSRRDFNHKASLKLAQNYGAIFFGDASPSRLSKTRMAKGVQDASWYQIKQFCRYKTIRRGGTFVEVNEKNSTVTCSVCLNKTGPSGLSGLRVREWICSVCGAVHDRDINAAKNILRLGHETLRVNVKTRGSPTGGRCHVPTTGG

SEQ ID NO: 38128 - protein, 378 aa, unknown
  TnpB Polypeptide
MFRWMVNDSIGIGLVNGASSLRRLSLLSYSQLARYDSPSCYKLCAISRAAGILAAQKKSVRRGFTTRTPYSFKQQLVSCYGFKIENGYLRIPVLRGKRFSIPLTKHMLEVISQPRVKVRSFTLTQNRLSLCIARDTPRIECTSTIGVDRNLRNLTVGNDEETRHYDLSKCVRMAKTTVRIVASFTRNDDRIRTVIASKYGERRTARTGHLLHNATKTIVAMAVRRREAIVLENIGGIRSLYRKGNGQGGKYRGRMNGWSFGEAQRQIEYKARWIGLPIIRLSRRETRGSSVTCPRCGERLQSDKKLKRKLWCGNCRIVMDRDMVAAVNLARRGRVRFARSRPPIIEAQGGAVEAMKGNPTPTVIPGVDAPKLTQPTKS

SEQ ID NO: 38129 - protein, 307 aa, Enterococcus sp.
MKVLKAYKFRLYPTEEQRKFFVETFGCVRFTYNALLKYREQRESAADSKPLTPAALKCSYPFLKETDSLALANAQRNLDRAFRNYYAGRCGHPKLKTKKNSWQSYTTNNQQGTIRIVEGQLKLPKLKSLVPLKLHREVKGTIRSATISAKNLREFSVSLLCEEEVAPLPKTNKKIALHFCPEHLLREKGKFDSVFSQEPLLEKIVREERRLQRRQKSAQRRKVELAAARNYQKQKARVAELHRHKRARQQNYLDELSLQIVEGYDEIFLYPARGLRGNFSGSDWQHLLQKIQYKAHWYGKTVSIATS

SEQ ID NO: 38130 - protein, 478 aa, unknown
  TnpB Polypeptide
MFVYTLKLNTTRAHHEQLEKRFRMADDIYQKTLRQILKRVRNQKKDPLYKKAYKLPKGAERNALLKELDEKYDLRGSFTFGKFANNYRNQRNYARYLPSDVAGKLGIRAWDTYSRVKFAKGAKRINLNQPLLSFEAKSDSGIIIRNGILKMGTKGAQFECPVKYNNDDYEREVFSREFKFNRIVRKFQYGRWHYYVQMIFDGVPPQKHTSKLQSSVGIDIGTSTIATSSYYQTELRELAANVSHETSRLSRLQRKLDRQRRANNPQNYNDNGTIKTGRKHWNDSKEYLKTKQTIAEILRKRAAQRKLAHQTLANEVVQMGDRFVVEQMSFKGLQARAKETAISEKTGRFKRKARFGKTILNHAPAMLIEMIRYKALFQNKEFIIANTHKIKASQLDHVSGQYNKLSLSTRTKTIDEELVQRDLYAAFILQHVENDGVTVNLDDCDKEFTNFVRNQNITMATLETTLQSTGQKRFNKLN

SEQ ID NO: 38131 - protein, 443 aa, unknown
  TnpB Polypeptide
MQKRKFTVVAQLHEKNNHDIITYIESSRNEYAKAVRETFYAIKHDEFNKSKYNTYLQHKYGIVSREASAIILDAQGRFNSLKELKWYEANQLKRKISYLETHLIPKLVEKRNNNSRLLQDGIAVSLTKQRNLRLKIVAKKAKLNKLKQQLDNLSYQLDSGKLKLCFGTRKLLKQNYDKFVEQRDSQMTFIGAKAESCCNQLLQLRYNRKNNQFVVQLRKDFGGYKSTKGDDKYVHGKIYFNHHKNKLISILKNKNSPLSYKVIKKDGRYYLCCTFEIQADTDNFKTRSDYGTIGLDFNKGFIALSETNQYGHLIRTQFLPYRFKAGSKTKTDLQHIANDVVKLAQQTSKDICIENLDFKATKSKTETKHGKQCNDMTHSLAYRQFVDTIESATYRNKVTLIKVNPAWTSWLAEKLYCPTMKLNVHVGASYVIARRGQGYKDTV

SEQ ID NO: 38132 - protein, 208 aa, Bacterium sp.
LPPTRKVVGIDVGVENLLALSDGRFIDNPKWLRRIEAKIAKKQRILSKKVKGSKRWKHMCKQIAKLHLKVARQRRDFYFKLAAELVGDHDLICTENLNIKGLAQGNLSKSVLDAGWSVFLRHILPYKAWRVGREVVYVPANGTSQTCANCGALAPKDLSVRRHDCPHCGFSVHRDINSALLILQLDLERARRDRVNAWSCLQEAVGFS

SEQ ID NO: 38133 - protein, 421 aa, unknown
  TnpB Polypeptide
MSEEKNLKIKESLHNTKERRSHMDCRVISVKVQENRLSRAKYEKIVHCFLEGKWLYNAVVATDTLSLEDTSSVQIKVNDTFETREIKTLSSQMKQSVVDSAKTNVSNLAKTKKVGLKVSRLKFKKECNEIDLKQFGQTYAIKGKNKIRVQNIGVLTVSGLEQINLDEVEFANAKLIQKPSGFYINITFYSKKQPEILTEKEILGLDMGIKDQLTFSNGVKVNFYLEESEQLKGLMRKLNRQVKCSNQYKQTLNRIKRIYEHYNNKKNDVVNKLNSILSKHYIICFQDELLRQWQQKKSKRKFSFGRKVQHGILGRIKDKLKKNSSNHILESSVPTTQTCPVCGCLTKHCLDKRIYHCSHCGFENQDRDAHSANMMVLLSGYGTYRSLNTDTVNTERMVGFLNNLSNLSVVVTTDSMEASCL

SEQ ID NO: 38134 - protein, 408 aa, unknown
  TnpB Polypeptide
MITRAFEIRLYPTKYQEVKLNRTFGACRFLYNNVLSIQTEYYKEYKESANQKEIVKKLKKENEWLKDIGAQALCQSLNDLNRAYKNWWNSLKGKTKQKAKAPTFHKKNGKQSYRDCMPIKDFFKLIDLENRKISIPKIGKVTFRQGYDFSKYGITKVHNITVKKSKSGKYFCSICVDCDDIQSLPQNNYNYAFDLGIKDFLIDSDGCVVENPKYFRTSQEKLAKEQRKLSKMTKGSNNRKKQVIKVARIYEKISNQRKDFQHKQSRRIVNENQVIISEDLKPSNMLKNHKLAKSIADASFSSFCNMIAYKSAWYGRQYIKIGSFYPSSKLCHCCGYKNTTLTLADREWECPNCHTLLDRDKNAALNILNEGLRILGQELSVERVDTDDNSHLEREDSTLKGGVSSLIC

SEQ ID NO: 38135 - protein, 373 aa, Bacillus sp.
VCFVCGKIIVGGERQMQTITLKLELKKPTKEKASMYQKMTEVNTSFSNWLLNFDGLNTATSKVFRLFSDRRLPSAVVNQTIREVKSKKKHQKTKKFRRFWCGFNYQNLHIEKENDLYKVSFPTLKKRIGVPVITTPYQQGWLDRLLTGELKQGASELYEKRGRWFVAVSLSFKVEQKLPETQQKIMGVDLGLRQLAVASIGTSSLFFRGKEMAFKRRRFASRRRKLGKAKKLIVIRKSKRKESNWMRDTNHKVSRQIIKFALENGVHLIRMEDLTGIRHTGKSRKEAGRNLHSWSHYQLQRFIEYKAKMEGIAVEYVNPEHTSQTCKCGHIDKRNRHLNQFHCILCGYQSHADVNASINIAKAVSGISKKKRC

SEQ ID NO: 38136 - protein, 412 aa, unknown
  TnpB Polypeptide
MTVQRVERHIIKTSNIHYALLDHFCFLSKNLYNHANFIMRHEFIRNHKAVAYGDLDKILKADEAYPDYRAMPTAQSAQQVLRLLEKNWKSFFKSIKDWTKNKDKYTGKPKLPKYKKKNGRNILILTNQNVKLRDGVLKFPKKFEGFSIKLKCCRKNNFDAFHQVRFIPKHSYIIAEVVYSISIGEAKPDNQHYCSIDIGIDNLAAVTTNAGYWAYIINGKGLKSVNKYYNKQMAHYRETAKRMNGMDFTKRMAQMAAKRNRKMDDYMHKASRQIVKDCVDRDICTIVIGYNKGWKSGTGLGRNVNQSYAGIPTQRFIEMIQYKAQEAGIHVILTEESYTSGTSFLDGEEPVKKNYKKSRRIHRGLFKSNNGTQINADINASYQILKKVFPAAYANGVEGVVLHPFRVNAAFV

SEQ ID NO: 38137 - protein, 469 aa, unknown
  TnpB Polypeptide
MPTGSIKFTKYSKVNLFLTNIGGCMQKRKYTVITQLHEKNNSDLIEYIEKSRHTYAKAVRKTFHAIKGSKIFNKSNLNTYLQNSYGITKRTANSIISDAQGRFNALKELKEYERKQLERKIAHLENTIVPKLVEQRNYNSTMLRAGGLISLVKQRNLRLKIVAKKAKLNQLKQKLNNLSYQLDSKKLKLCFGTKRLLKQDYKHFIEQRDGQMTFVGAKEETSCNQNLQLAYNQKNNQFLIRLRKDFGGYKSVNSKDKYVYGKVYFNHHKKHLISILRSKTSPLSYKIIKRNNRYYLYCTFEIQIDKSDFITRSDYGAIGLDFNKGFVTLSETNKYGHLVRTLFLPYRFKSGNKTKTDLQDIAHYVMRLASQTGKDVCIENLNFKTKKSKTETKQGKKYNEMIHSLAYHQFSDMIECVTYRNKVNLIKVNPAWTSWLAKRLYCPTMKLNNHVGASYVIARRGQGYKDTLK

SEQ ID NO: 38138 - protein, 398 aa, unknown
  TnpB Polypeptide
MSRYRLLPTPAQEAVLRDHCGHARYVWNLAVEQHSHWHPGRPSAPGYVEQCRQLTQARAGHPWLAAGSQTVQQQALRDFGQAMAAFFDPANPAGRPSWRKAGRDEGFRIVGRRGRQWDVRRLSRKTGEVWVPKAGWVRFRWSRPVPPDARSYRVTMDRAGRWHVAFAVIPRPVSAPGNGQAVGIDRGVAVSAALSTGEMLHAPGLTARERTRLRRLQRSLARAERGSNRRGRVRHAIARLRARETDRRKDWAEKASTDIARRFDVIRVEDLQIKNMTRSARGTRENPGRNVGQKAGLNRGILGSGWGLLVSRLEDKAPGRVEKIRPAFTSQRCSACGHVDRDSRESQAVFRCTACGYACHADVNAARNIAAGHAVTARGGDGVTRPVNREPQLLLQSA

SEQ ID NO: 38139 - protein, 260 aa, unknown
  TnpB Polypeptide
MGIGGLKVRLHRPIQGILKAITVRREGRRWWVTIRCVDVPAEPLPVTGRQVGIDLGVTVLVATSDGAMLANERFGARAAGRLAAAQRALATKQRGSRHRRRAVEHVAAAHRHIRNSRTNALHQLSRRLVDDQDLIVHEKLAIVNLVRRPRPRPDGTGSYEPNGAGPKAGLNRCIHDAGWGQLLAMISYKAESAGRTVIAVDPRNTSRRCAHCGHVSAGNRRGAVFRCVGCGHEAHADTNAAINILRAGRALQHTAAQGRN

SEQ ID NO: 38140 - protein, 410 aa, unknown
  TnpB Polypeptide
MKVRRAYMYRVCPNKGQTDKLTWTLDRCRELYNAALEERREAYRMCGVSVSYYDQKRQLPAIKEVRPEYKQIGSQVLQDVTARLDKAFAAFFRRVKEGIDPKKVGFPRFKGRYRYNSFTLSQAGWNLPALDSGRLYVAGIGHLKMKWSRPIVGMIKTVTLKRDADQWYVTFSCEVEIEPVAPQDKPAVGIDMGLEYYASMSDGTHIENPRYYRKAQATIAHRQRAFDRTKKRVKLKDGTYRYGKNRARAGILLKRAHRHVANQRKDMQHKAARKIVQTYGAVAVEALSIDNMTKRPAPRPNDDGTYAPNGAAAKAGLNKSITDAAWGQFLSILAHKAEEAGVVMVNVNPSGTSQHCSGCGAHCPKTLAVRWHQCAACGLSLQRDVNAALNILYRAGLARCVAGAQESHRL

SEQ ID NO: 38141 - protein, 481 aa, Mycobacterium sp.
  misc_feature (362)..(455): Xaa can be any naturally occurring amino acid
MPKFEVPDGWTVQAFRFTLDPTEDQAKALARHFGARRKAYNWTVATLKADIQAWHASGTVTAKPSLRVLRKRWNTVKDDVCVNTETGVAWWPECSKEAYADGIAGAVEAYWNWQTSRAGKRAGKRVGFPRFKRKGRDQDRVSFTTGAMRVEPDRRHLTLPVIGTVRTHENTRRIERLIKAGRARVLAISVRRNGTRLDASVRVLVQRPQQPKVVHPGSRVGVDVGVRRLATVATADGTAIEQVENPRPLGAALRELRHVCRARSRCTKGSRRYRERTTQISRLHRRVNDVRTHHLHVLTTRLAQTHGRIVVEGLDATEMLRQKGLPGARARRRGLSDAALGTPRRHLSYKTVWYGSALVVAXXXXXXXXXXXXXXXXXXXXXXXXXXXXXXXXXXXXXXXXXXXXXXXXXXXXXXXXXXXXXXXXXXXXXXXXXXXXXXXXXXXXXXXXXXXXXXGASRVPLKITHLQRSPRRCSSSASSP

SEQ ID NO: 38142 - protein, 397 aa, unknown
  TnpB Polypeptide
MAKQVFKKTYKYRLYPTKKQQEILEKHLSLCRWLYNHFLDERKTLYQKKKIKVSCYDQIKEIPKLKKEKPVLKEIYSQVVQDVVRRLDKAFQNFFRRVKESQNGKKQKPGYPRFKGYWRYDSFVYPQSGFKLENNKLELSKIGALKIKLHREIEGNIKTLTIRRTRTNKWYACFSVETNKELPKKKEIKQVVGIDVGLDNFLTTNQGEKIDNPRYLIHSEEKLAKIQRWHSRKKLKSKNRSKSRLKVARLHEKVANQRLDFLHKLSSRLAKSFQLIAFEKLNIKGMVRNKYLAKSIVDASWNRFLQQLRYKAAEAGIWAVEVNPKNTTQVCSGCGSTVPKTLAVKKHKCPRCGLIIDRDINAAKNILQLALNTVGTTGINACGVGGLLSTTKQKTTF

SEQ ID NO: 38143 - protein, 383 aa, unknown
  TnpB Polypeptide
VNLTKTVRAKVYKPTSRKYAALLALHAEWNRALDLPRNYKILRKETKLSSYCCCDLAWLVKPGHRAAVLLGKKNLNLKRGDGFVPWFASLTTPKGRVNLPLSMSYRHARLLDDPELHLGVSRLVKKGHDFFIHIVIDKEIPDPQIPVNAPVLAIDLGEKIIATSVTLGSDGQLKAPPRFMGRRVRSIRRHYARLIRDLGQRKALRVIKRIGSAEHREVAAELHRISRELVNDAKRTGSVIAIGDLSGIVQRVPPRGRRVNHKRNRMPFGWLTYMIQYKAAWDNVPVMLVNEAHSSHECHVCGQDGLRPSRGRFVCPACGEGSADLNGALTIGKRALGYMSIAGAPRIAPERTASSDGRPSKADHHGSCQSSTDILVAKFPYLD

SEQ ID NO: 38144 - protein, 392 aa, Caldilineaceae sp.
MTTTIVRAHKIRLVPTGQQERHFVQACGTARFAYNWGLAEWKRQYQAGMKPSARQLDKRLNAVKRERYPWMYAVSKWAAQMAIQNLGIAFRNFFSRRGKYPRFKKKGKAALSYVCAVGIQEIKVRDKRLWVPKLGWVRMRQRLRFEGKPLRVTISKTAGQWYAAIAVEMPWVVPVRENQADGGLDVGISPLAVESDGTRWENPKALDKELRKLRRWSRRLSRRTQGSRGHQEAQRRIAAIHKRIADMRADCHHNLSRSVVDKYSRLGVEDLNVSGLLKNRRLSRHLADAALGDLLRQVRYKAEQYGTEIVEANRFFPSSKTCSACGRKNESLTLSDKRWVCECGVQHDRDRNAAINLRNYCRAGHARTTPMDSEALAARTFGGETALGEVGI

SEQ ID NO: 38145 - protein, 184 aa, Bacillus sp.
MATKLALNKIGLGIDLGVKDFATRSDGIVHENINKTIKIKKIEKRLKREQRSLARKFENLKKRGEKSVTNKRVNIEKNVLRVQKLHARLANIRIEYVKSIVTNVVKTKPTFITVEDLNVKGMMKNKHLSKTIAKQSFFAFKTWLLTKCEEYGIELRQVDRFYPSSKLCSCCSQKKADLKLSGRV

SEQ ID NO: 38146 - protein, 281 aa, Acinetobacter sp.
LILRHKAHRIILKNGNVEVHSTYDAVETQDCGQETVGVDKGYSEAFVDSDGEVYGNGLGKLISSESDYLNQKYKRRNKLRAISKAKPHKKQKIELNNLGRKKLDKRQDTQKAKLKTLIFTATHKLVDKAKVIVAEDLTSPIQSKRNYGKNTNRRLNTWAKGLLANALTSISHRRGSTVHLVNSAYTSQSDSFLHGLLIGTRKGDRFHRFNGEVVQADWNAARNVLAKLNDNEISRYTPYKTVKRILQERTDRYKSELTDSGSSYTLGNKTLTECELVLEYV

SEQ ID NO: 38147 - protein, 422 aa, unknown
  TnpB Polypeptide
MRIGDATARLWNELNYVRLVQYRETGRVDFESTEHEFYYKYNDVLGVNAGVVIQLNNQDWSSYFELSRLYKQGELPKFYGKPSPPGFWKDKVLGRRELIILVRNDKYYIEPISGGEGYIVLKTWGLRIKYAGRIKWSGKQGTLVIKLEGNRWFAYVPITVGEKPAKSNPKGYVRGIHEKIQIENPRGGNKAFIDIGLNNLFAVVFNHTDVAILIKGSTIKAEYYWWKREIKTYQSVRDWLKNHGFESWKKYHTYYLHAVYKQHERLRHYYRTSIRFLAETLWEMGVNEVFIGYPYLVSQDNGNEYNTNIWWYAKTIKWFSEVLQEYGIKLHIVNEYGTSKQCSICNASHENGRVKRGLYVCESTGIKINADINAARNIAKRAGYEVPMPRKILSYIVTSNGVKPLTPKEGVTPETPRIKPAH

SEQ ID NO: 38148 - protein, 399 aa, unknown
  TnpB Polypeptide
MFLAHRFQLDPNNVQETYLSRAAGTARFAYNWALAEWGRRYAACKADPSLPLPNEGALRRQLNAIKRDCFPWMLEVSKNAPQMAIMQLGRAFQNFFEGRARYPTFRRKGRDDRFTLTNDQFRIEGHRIRIPKLGWVRMRESLRFAGRIVSASISRIAERWYASITVETANPILPYSDSQGAVGVDFGVTTLATLSTGETVTGPKALRTLLDRLRRLSRGLSRKVKGSRNRAKAKVALAKLHARIANLRRDSLHKLSSIITRRFDTIGIEDLNVKGMLGNRRLSRAIADMGFSELRRQLAYKAAQRGRQVVVVDRWYPSSKTCSCCGYLLKELDLGARHWTCQGCGTQHDRDVNAAVNLRNMAVSSTVSACGGEGAGPVHQAQGETGPGKAGIQQQASVA

SEQ ID NO: 38149 - protein, 514 aa, unknown
  TnpB Polypeptide
LELRYRCRSRLGHELSQEGPEAPDRRHSRRERRTSRFDPQRPPSAVWRRTYLCAVRSAERRSRHLEPRGRRDLRRRPRERRSGNHYRLQRKALRQPFAEEQGNHRRHAQGRRGVLMLIAHRIALDPTNKQRTYFARAAGTARFAYNWALGEWQRMYEARKADPSLPQPTDALLRRQLNAVKRNTFPWMFDVTKCAAQEAIIDLGSAFRSFFEKRGRYPRFKKKGISDSFCAANEVGTFRIDGRRIKLPVIGGVRLRESPRFDGVAKRVTVSRTADRWFASILFETPDAPALVQSVAAVGVDLGVTDLATLSDGTKIAGPKPHKQLLVRLRRANKALARKRRGSRNTLKAKRCLARLHARISNIRKDALHKLTARLVATYRRIGIEDLNVRGMVRKRRLARSIMDASFFEFRRQLEYKARMRGATVVVVDRFYPSSKTCSCCGSVKAELDLSQRVYSCENCGYEADRDVNAARNLEKLAASFAVTACGEDRSGARRKPRVKRASTKQEPDNRHAA

SEQ ID NO: 38150 - protein, 383 aa, Bacillus sp.
MLVNKAYKFRIYPNKEQEILIAKTIGCSRFVFNHFLAKWNDTYKETGKGLTYNACSSQLTQLKKEFVWLKEVDSIAIQSSLKNLADSYTRFFKKQNKAPRFKSKKNKVQSYTTKHTNGNIAIVGNKLKLPKLGFVKFAKSREVEGRILNATIRRNPSGKYFVSILVETDVQELPKTGSSVGVDVGLKDFAILSTGEVFSNPKWFRKLEEKLTKVQRVLSRRQELAVKRKCKLDEAKNYQKQKRKVARIHEKITNARTDYLQKISTEIIKNHDVIGIEDLQVSNMLKNHKLAKAIHEVSWAQFRTMLEYKAKWYGKQVVTVSKTFASSQLCSVCGYQNKDVKNLNLREWDCPSCGTHHDRDMNAGQNLKNEAIRLLTVGTTGIA

SEQ ID NO: 38151 - protein, 425 aa, Microcoleaceae sp.
  misc_feature (55)..(96): Xaa can be any naturally occurring amino acid
  misc_feature (379)..(420): Xaa can be any naturally occurring amino acid
MIVLEFKLKGKAQQYRVIDEMIRTAQFVRNKTLRYWIDHQGVKLVDLYKQCAIMXXXXXXXXXXXXXXXXXXXXXXXXXXXXXXXXXXXXXXXXXXRAIFAIQRFFSNCKTKKPGKKGYPQFKKQTRSVEYKTSGWKLSADKRCLTFTDDFAAGTFRLLGSRDLHFYAPGEIKRIRVIRRTDGYYAQFCIDVERTEETIPTGKAVGLDVGLNHFYTDSTGETVSNPRHLRQSEKALKRLQKRVSRKKKGSGNRKKAINKLGRKHLKVSRQRKDFAIKTALCVVKSSDFVAYENLQVKNMVKNHKLAKSISDAAWSQFAQWLQYFGKVYGKTVIAVAPQYTSQNCSTCGNTVKKSLSIRTHICSCGTVLDRDHNAALNIXXXXXXXXXXXXXXXXXXXXXXXXXXXXXXXXXXXXXXXXXXGAHRN

SEQ ID NO: 38152 - protein, 459 aa, Moorea sp.
MYKTIPVKATFTDEEKVFWLFQCENANSLWNCATYYSKQKHYSWLEQQPEAYTTYWKEDVLRYSWKTYKCSIKYAELCRELKENPHYKAMAAQSAQQTLKSVAESITSYNQLVELYYKGQVDRPKILRYRKKGGLAAVTFPRQALTYKEGLFYPSISKESKPELLTEIALEAPGFIDPDWVKEVTIRPYLGQLWIDWVINDGKQPIENNLNLDYSQAWSFDHGGNNWLTGVSTQGKSLIIDGRKLKSMNQGYARLVAKYKAGKPEFYWDSNLDRVQRKRNNQMRDAINKAARFIVNRCLNDRIGNLIIGWNERQKDSSSMGKRGNQNFVVIPTKRLIERLKQLCLEYGIKLTITEEAYTSKASYLDDDSLPKYGEKPAGWTPSGKRVRRGLYKSSKGHLVNADCNGAANIARKVAAQLGIDLTKAGRGALTLPHRFDLFTSLSRSYRTRSEVARVHPAT

SEQ ID NO: 38153 - protein, 414 aa, unknown
  TnpB Polypeptide
MLGIEWCGRSMLIARAFKYELDPNNQQRTRLSQHAGCARFAYNWGLQQRIALYRQNQDKKRFTSAIAQHRELNRLKRTVFPWMYEASKCAPQEALRDLDRAFRNFYRGLKSGKRVGFPRFKKRGVHDSFRVTGTIRFVGRMIQLPRLGRIRLKEKRESYFKGRVLSATVTRRADRWYVSVTVEMEIGTPEPPSGEPVGVDLGVKALATLSDGIRYSNPRVLEKKLRKLRRLSKSLSRTKRRSKNRERARLGLARLHLRVFNIRQDSLHKITTYLAKNHSQIVIEYLCVSGLLKNRKLSRVIADVGFYEFRRQLEYKCEWYGSELVVAPRFYPSSKRCSACGNIKREMTLSDRVYVCDECGLEMDRDLNAACNLVAASWTETENACGEDVRLVTDPAGSAEQTSMNQEPNISQGH

SEQ ID NO: 38154 - protein, 459 aa, Streptomonospora sp.
VSTHHQAYVFALEPTPEQAQALASHCGAARFAYNWGLARVKTNLAQRAAERTYGLAEAELTPALDRSAYGLRKQWNAAKHAVAPWWGANSKEAYASGLANLSVALKNWNASRTGKRAGRKAGFPRFRSKRSRRSFRITTGSFGLDGAGNRHVKLPRIGRVRTGESTRKLARHLHRGSARILAATVSHRRGRWQVSFTVEKTTPAPAPATRGGAVGVDLGITHLAVLSTGETVANPKHLEKVQRKLRRAQRRVARRRGPDRRTGQTPSGRWRKARAAADRLHTKVVNARRDHLHKLTTRLVADFDTIVIEDLNVAGMVANRRLARAVADVGMGEVRRQLEYKAAWSGRRLVVAERWFPSSKTCNDCGAVKAKLRLSQRTFACQVCGAVADRDANAARNLAGLAEAASSPSCGARINEPAGNPRKPSLAGDGYRHGKTPPARAGSTPRRKATAQGTFSHVS

SEQ ID NO: 38155 - protein, 226 aa, unknown
  TnpB Polypeptide
MEVEKINHVIIEHTPAGKYFAVLNVDFEPEPRLNAGGTIGIDVGIKAFYSDSSGNTVSNPRYLERSMRKLIREQRRLSRKQKDSHNREKLRIRVARVYEKVTNQRNDFLQKQSTMLVRENQTICIEDLNVKGMIRNHKLSKSIASVSWAKFFEMLEYKAGWYGNEIHRVPTMYPSSQTCSCCGYRNPRIKNLGIRIWECPKCHGVHDRDTNASINILKKGLQMQSA

SEQ ID NO: 38156 - protein, 346 aa, Epulopiscium sp.
MDLTIKIKLIPTNEEKNILTKMCNEFIKTINTLAEKMYNCGEIIKLTTAKFQADLPSAVKNQCIREAKSIYSKYLKGVTEKLAVLKKQVCVWNNQNYTIEENTISFPVWLEKSKKISIKTIIPQRSKELLQNNRGTLRISKKNNKYIAQVTIKIEKPENYGENIMGVDLGIKVPAVCVTTNGKVKFIGNGRENKVIRRKFKAKRKKLGKLKKPKAIKKINNKENRIMQDRDHKYSKEIIEFAKKNNVSIIKLEQLANIRNTTRKSRKNDNSLHNWSFYRLSKFIEYKAKLAGIKVEYVNPAYTSQICPICSEKNKAKDRLYRCRCGYTRHRDLVGAINISRASGIS

SEQ ID NO: 38157 - protein, 446 aa, Bacillus sp.
MKQAKTLKHKITNHSRIFDETVEVYNQALSFIINVIDAEFGDITMFSTKDMVTMVEKLIHTTKSNPLPKYKEFNQRFYKFPSYFRRAAIASAVGKVNSFRSNYQNWWEEKQAAEKEGKVFKKNPPRLQSTHKEFPVMYKGNMFNRLSDCEGEIKVFHKNDWVWVNIQFKKQDLEKRNVVDWKECNPKLVAVGKKYFLSIAYENNIKLNKTKVSDQKVCAVDLGINNSAVCSVLDAKGTVLARRFINQPKEKDRLYRMTNKLRKAQSISGWISAPNFWRRIKGIQTHIINNTSQRIVQFAKEHSCDVIVFEYLGNMRVPKGFWGAKKLRFKLRHWRKTAIQNKVTQMAHYEGMRISRINPRNTSALAFDGSGHVERNHKKDLATFKTGKVYHADLSASYNIGARYFIRAHLKSLSEKKRLWLQAKVPEVTKRTSHTLSSLITLHLAL

SEQ ID NO: 38158 - protein, 351 aa, unknown
  TnpB Polypeptide
MQITVKAKILPDKQQMSLINAATHEYIQLINQIASEYIQVAADLKYTSKNVAAELPSALKNQAIRDAKSVFRKYCKTKKQSILKKPVAIWNNQNYNLKNNFISFPVLIGGKSKRMKIPIILTDYQKQLLNNKLGSLRINQKSGKYIAQIAVQAPEATAIGDQVMGVDLGLKIPAVAATQDGKIKFFGNGRQNKFHKRKHRSVRKKLGKLKKLKAIRKRHDKEQRWMKDQDHKVSRQIINFAKENNIKIIRLEKLSGIRQTARTSRKNEKNLHSWSFYRLAQYVEYKAILAGIKIEYVNPKYTSQICPVCGVKNHANDRKYKCSCGFKTHRDILGAKNIISAPVIDGNSLSA

SEQ ID NO: 38159 - protein, 449 aa, unknown
  TnpB Polypeptide
MVKELELQTQTKKGVRKVHLVEQHVIGKNDPRYAIIDEAAFKSKNLYNAANYEYRQAFIHEGKYLNYNEVQKRMQSHEAYKGLPAKVSQQILMVLDRNWKGFREGLESYYEEPSKFLGRPKPPKYKHKTEGRNILLYTIQAMSRGKNGLQRGIIKPSMLAIEVQTKQKDVDQVRIVPRKGFYVVEVVYEKEVKPADVNPAYYAGIDIGMNNLVALTSNKPGFRSRLVNGRPVKSVNQFYNKRKAELQSRLGHTGTTKRMERMTNKRNRHIDHYMHTASRRIIDLLVKEGIGVLCIGKNDAWKQEANMGKRNNQHFVQIPHARFIAMLTYKAELVGIRVEVTEESYTSKASLLDLDPLPVRDPNNGGEKHTFSGKRVERGLYRASDGRKINADINGSGNIIRKVAPDAFGLKAVEDGKEVLASLVVHPVRIVVPLTKLKDKHVAAKASGQ

SEQ ID NO: 38160 - protein, 474 aa, Bacillus sp.
  misc_feature (97)..(97): Xaa can be any naturally occurring amino acid
LDNNHHSVTCAKRNYDEEHVHILFRFVPNIDLSKVMNALRKVVKTMARKKAVKVLRKQKKRETMQRFTQKQNIGRACLTAKEFRLLQRMSHSSKALXVDTAMQADMNYSGMQSNSVQAIRRALFTEVKSFFKALEQWKRNPEKFTGRPKFPNYSRSTDKRIIEIYQVPKVDDNGYWMIPMSVAFRKKFGSIKIRMPINLRNKKISYIEIVPKQKGRFFEVHYTYEMHVSQMKKQPTTTINALSCDLGVDRLLSCVTNTGDTFLIDGKKLKSINQYFNKMICNLQQKNIENGISKRVVTNKMAALWHKRERQINGYISQTVGLLFKKVKAFGIDTIVVGYNVGWKQKSDMGKKNNQKFVQIPFHKLIAAIENKCVKEGIRFLKQEESYTSKASFLDKDRVPVWSKDDSTHYHFSGKRITRGLYQSKAGTCIHADINGALNTLQKSKVVELDENLKVKTPILLEVQKRKAVASRIA

SEQ ID NO: 38161 - protein, 725 aa, unknown
  TnpB Polypeptide
MPKAPTANSCVKCSLSSLGCSLVLRGAIDDLAVRIHVVAVRGTHLANHIIAQIVSSTASSDVLPDLPDVFSHSWWQQCFKAAANPQSGKNDLLHTTSAQLFAGGDIIRLGSPGIHAIETLSQDIVVNIHAMLTMNFHKQLRKAFRRDILCYAAIRGFSFDANDREQLVDYCIWRCVQQDSLFGEISFHMADYDPPEVGIWLQAELDSTIDEWRLRYGKLLPCPAPAFISNMKGPVMMQLYRWFIDLQRQRKRLQDELTEHFVGNTELARKCFEKAGKAMRPLPLTKLRVGHILVDRTALKCLLLELQKAGEPISDLEIPLLTPVAVDLGEDGEPLKKRAKLNEDGTEKPTRNRRNEDDNSYQTGLYWSHFPNARRLVKGRKGVLLHPAVRTDGISCSVPLLIPGRPESKAELKELKKMQKCCDLTPGNPQPMDRASGQRLVAIDPGRRDMVYCYVKTDDAEDTPSTCTTSVSKFFRSSQFFGVSTRQHVKEAKRRRIAGVTVELQKRTMLSAQMYRDVDLHVNLHSALCHLPSNKAFETYKIYEDMMLPILEEAIAAMSARRLRREAFLSFQSKDKALDLICSKICGGVSIPKSQKRGRPRVLVAFGNGGSVSTTGCGYAPAPQARLRHRLQHVWGAHISLINEYRTSKCCCLCGATMSCVFKKRNKCLVLKKAKKIHGIMRCHDHGYFHRDKNAAVNIMAIYENLVSAEERPVQFRPVRGSRFT

SEQ ID NO: 38162 - protein, 379 aa, Blautia sp.
MEQITITAKIQLSVIDTDKVLLDNTMSVYSAACNYVSDYVFRTHDLKQFSLNKVLYSKLREKFGLKSQMAQSVLKTVIARYKTILENRNEWIKPSFKKPQYDLVWNRDYSLTQSCFSVNTLNGRVKLPYFTKGMSKYFDHTIYKFGTAKLVNKHGKYFLHIPVTYDVEEASLSDVCNVVGIDRGINFVVATYNSKHKSGFISGKAIKQKRAFYFELRKELQMRHTASSRRRLKAIGQRENRWMQDINHQISKALVESNPKHTLFVLEDLSGVRNATERVRTKNRYVSVSWSFYDLEQKLIYKAKQNQSTVIKVNPRYTSQCCPMCGHIEKANRNKKLHLFTCKNCGYKSNDDRIGAMNLYHMGINYLEDSIVPNTVTTE

SEQ ID NO: 38163 - protein, 393 aa, unknown
  TnpB Polypeptide
MIKAVKIRLYPTFKQKELLNSHFNGCRFIYNNALNYKMMLYKEYNIKKSKIDIINELPEVKEEFSWLKNVKAEVLQNVIDVLDKAFQNFFSGNGYPKFKNKRAKQSFTSTQNFKVLDNTNKLVFLKNKIKFKCSERDVVLLRNTKIKKITYSKDKIGNYFASVLIEANIENTYNQSTNEVGIDLGIKSFLTTSEGEKIDNPKFLKTSEIKLKKVQRNLSRKVKGSKNFNKCRVKLAKLHNKIQNQREYFLHKVSNKLISENHTIFCETLKVKNMLKNHKLAKSISDVSWSKFITILEYKSGWYGRNLIKIGIFEPSSKTCNNCGHKKEELLLSERIFKCEKCSHNEDRDVNAAKNIKRIGRNYPKFKLVEWNVGLAMKQEENLSDFIEFDKNS

SEQ ID NO: 38164 - protein, 287 aa, Lactobacillus sp.
LIKTHKIKLYPNATMRKELEKLFDYRRFVWNQGLEIWNDMYDASLVMMDKSIRPNERKVRDELVANKADWQFERSARVLQLAVNDLSKAWANYLNPKMPNHDKPKWKSKKRSRKTFRTDRAQIVNGKLRLDKPHGTRVWYDIKMAEQPRWQGEIKQVCIVQDADGYYASLSIEATVMVEKRTIRRVTAVDVNVGKFDYKTPSGYAIQPTLPASLPALYARITHYQKQLARKRATNPKHFNSATYRATRTKLKRNYQRVERIQMDLLNKIRTKLVVDHDLIRDRNTLG

SEQ ID NO: 38165 - protein, 463 aa, Paraburkholderia sp.
MITVTRTLHAIPSSLRAIRASCKAMAFVRADLWRRYGALGTVGKSAADIRKEVTAGGWYSGLSVDGTIRAETTKDAVNDILTYKAAACAKVRQAIAKRTSDQNERKRLYTLLKSDKWREDGYLHRMMRKHFRHGVSSCDNQFIVRSDKHESRIVGGRLTVTIRIAKQYGEPLVLTTTSSGKNVDLTGCNLRVILKGESVEIHYATEKTAGRPCGTAEIGVDKGYSEAFTDSDGRHHGDNFGAVLTAHSDQVSKTGKARNKLHALEKKHRAAGRIAKAERIKVNNLGRVKLDRRRDRTQKRLRTIAYQAAHSIVDAAAVIGSEDLTAPIRGNLQWRKYNRRMSAWAKGVLAQALEEVCTQRGATHVVVNAAYTSQMDSFTGLLEGRRAGDKFYRANGDVLQADFNAARNVRNRIRDREIDRFMPHTQVKQILIARSSGATERQEASVGRRKPRQRSADKSSAQH

SEQ ID NO: 38166 - protein, 458 aa, Paraburkholderia sp.
LRGEERGSGDPQSGRGYDVRGRSGQGRAGDHHSLQRPALRQSFAQEPEADRWGAQGHRGRMLIAHRVALDPNNTQATYFARAAGTARFAYNWALAEWQRQYEAWKADNALPKPSQMALRRQLNALKREQFPWMLEVTKNAPQMAIIQLGQAFQNFFAGRARYPKFRKKRVHDRFSLTNDQFSVDGSRIRIPNLGWVRMRESLRLTGKIMSATISRVADRWFASITVDVPDSSHLPQADNQGVGGVDLGVSALAAISTGEKVIGPKAQTVLLGRLRRLSRSLSRKQKGSANRRKAKAKLAKLHARIASIRLDALHKLTTDLTRRFHTIGVEDLNVRGMMKNPHLARSIADMSFFEFRRQLEYKAGMRGGVIVAADRFFASSKTCSACGHKLEKLALSVREWTCPACGTIHDRDVNAAVNLRNNAVSSTVSARGEEGAGLRRKTKTKPASAKQEASFVPV

SEQ ID NO: 38167 - protein, 377 aa, Paraburkholderia sp.
VDIKRAYRFRFYPTPEQAAVLARTFGCARFAYNHMLRLRTDAWYQRQERVGYHKTSAALTALKKTPEHAWLNEVSSVPVQQALRHLQTAFANFFAKRAKYPNFRRKDGVQSAEYTTSAFKWDGAALKLAKMDEPLAIRWSRTLPKGAKPTTVTVSKDTAGRYHVSILCNDVVAEKKKAKGQVGIDLGLTHFAILSTGEKVGAPNTLRKYENKLAKQQRRLAKKQKGSARRMKAKLKVAKLHARVADARRDFLHKLSTRLIKENQVIAIESLAVSNMQKNSRLAKSISDASWSEFVRQLRYKAEWYGRTLVGIDRWYPSSKRCSDCGHTVQKLPLDVRSWTCPECGSTHDRDVNAARNVLAAGLAVSAHGESVNPMSR

SEQ ID NO: 38168 - protein, 423 aa, unknown
  TnpB Polypeptide
MTEFSSIAGGRTAVVTHAFRFALDPTPRQREALASHCGAARFAHNWGLALVKQRLDKRQTDPSVQVPWTLPALRREWNRAKHEVAPWWAENSKEAYSSGLDGLARALKNWSCSRNGRRTGRPVGFPRFKKRGSDRDACRFTTGTIRVLPDRKHVQLPRIGILKSHESTRKLARRLEQGTARVLAASISRQADRWYVSFTCEVQRAMRSPRRPRAVVGVDVGIRHLAVLSTGTSVANPAPLASELRRLRRLNRQLARRQGYVAPDGSAQRPSAGWQQARVRVARAHARVANVRRDGLHKLTSDLAGTYGTVVVERLNVAGLMRNRPLARPIADAGWGELRRQLGYKTTWAGGRLVQAGTFYPSTKTCSRCGVVKAKLPLAVRVFQCVVCGLVIDRDLNAAVNLAKLAQGVAESGPETRNACGGT

SEQ ID NO: 38169 - protein, 379 aa, unknown
  TnpB Polypeptide
MKRNKAYKFRLLPNKAQSNLIDRTIGCARFVYNQMLSDKIKHYKDTKLSLKNTPAQYKNEFEFLKEVDSLALANSQMNLETAYNNFFRRVKQGKKELGFPKFKSKKKCSWNYTTNNQKDSIRIEENKIKLPKTGFVKLVQHRIIPENCIIKSCTVSKTRTNKYYISILVEYETQVVKKDIEKVIGLDFSMPELYIDSEGNSAKFPRFFRLAQEKLAKEQRIFSHRKPDSKRYEKQRLKVAKVHEHIANQRKDFLHKESKKLADNYDLVCIEDLNMKAMSQCLNFGKSVSDNGWGMFTTFLSYKLEDQGKQLYKIDKWFPSSKMCNVCGCINSNLTLSDREWICECGERHDRDVNAAINIRNVGIKTVGTTGLAQDCLQA

SEQ ID NO: 38170 - protein, 331 aa, Aquisalimonas sp.
MVQRKVTYRLYPTAEQRGALEHQRWVHCLLWNEALAERRRTWGDRQESLGFSAQCKRLTEWRTQSRLLRGLNAQSEQVTLKRLDLAFQHFFRRVKGGEKPGFPRFKPLRWFKGWGYKTHGDGWRLVTNERMKHGSLRLSGIGPVVIRGNPRTPGTPKTCEILCRNGRWYASITLDCEPAREHGEKLGGLDWGVETFATIATPQGTEVIDNPRHLGRTLSEIRRVQRSISRKEEEAKKASGKTRRFPVSKRLRREYERLRRLHRKVASQRLDFLHQTTARLVGQFAALGLEDLNIQNMTASGGRRRRRSASGAMRVPVVRPARGTRTPHGFC

SEQ ID NO: 38171 - protein, 365 aa, unknown
  TnpB Polypeptide
MQKGIKFRIYPNRKQKNLIHRTLGCCRLIYNRGLAMRKEGYENGKKIGYTQTSAMLTELKKQEEFAFLKEADSIALQQSLRDLDRGFVNFFQKRASHPIFKSKHNRFQSYRTINQKDNIRIVGRYIKLPKLGFVKVRQSMEIGKIHHVTIEHTPSGKYFAVLNVDFEPDSRQNNGGMIGIDVGIKEFYSDSNGNTVSNPGYLERSMRKLIREQRRLSRKQKGSQNRDKQRIRVARVHEKITNQRNDFLQKQSTLLVRENQTICIEDLNVKGMLRNHKLARSIASVSWAKFFKMLEYKAVWYGNEICRVPTMYPSSQTCSCCGCQNPLVKNLRIRIWECPECHVVHDRDMNAGINILKKGLQMQYA

SEQ ID NO: 38172 - protein, 387 aa, unknown
  TnpB Polypeptide
MNTVRIYQLNNLSQTQFHRLRDAQMEAAQVWNLCMHMHKDARVQHDKWPGLKELHEATKHRFALHSQSVQMVMRAFLGNVDTTRQLRQTHPQMRMRYPYKDKRFYPVMWPAQAVSREQGRVVLPMGRGRKSLVLSLDLPGNSGACTLVWNNGFELHVCVETPQADNAPGDNHATVDLGEIHLAAVTTNTGKAMIVTGRGIRSLKRQRTMQIRSITKKQSKCTKYSRRWKKLQRAKNKQCRRAERRIRNQRHQATRKVINFCIQKKVGTLFIGNPHGVRNQNKGRHQNQRMALWEYGKDISYLTHKSKQAHMVCFTGSERGTSSQCPTCGHKHKPSNRRWTCKACGFKGHRDLVGSINMHKLAFGEQVKFPRSFTYLRPSSLGKVVVG

SEQ ID NO: 38173 - protein, 265 aa, unknown
  TnpB Polypeptide
MSDLTKTIKLHIHVTPEQEMMFRKMTEHYRQACNFVSQYIFDNQFNLAYQSLNKELYCELRVLFGLKSQLAQSSIKTTMARYKTVKQQLFQKPYKYKDQDGNRKYIPKTLEWLWNPIFFKRPQADLVRNRDYSFVDNGQSLSINTLGKRTKCTFKSKSFSKYLDGSWNLGTAKLIELKGRWYLHIPVTKAVEDFQKENVRHVVGIDRGLRFLAVSYDEQGKTEFVSGRKIAAKRHKFLKVRQQLQSKGTKSAKRRLKALSGRENR

SEQ ID NO: 38174 - protein, 402 aa, Desertifilum sp.
MLVFEAKLEGTDEQYRSLDEAIRTARFVRNACLRYWMDNRNIGRYELSAYCAVLAADKNFPWVAKLNSMARQASAERAWSAIARFFENCKKSRPGKKGYPRFKKERTHGSVEYKTSGWKLSDDRRYITFSDGFNAGTFKLWGTRDLHFYSLKQFKRVRIVRRADGYYAQFCLDVERVEKREPTSKTIGLDVGLTHFYTDSNGETVENPRHLRKSEKALKRLNRRLSRTQKGSNNRKKARNRLSRKHLKVSRQRQDFAVKLARCVVQSNDLVAYEDLQVRNMVKNRRLAKSISDAAWTQFRQWVEYFGRVFGVVTVAVPPHYTSQNCSSCGKVVNKSLSTRTHVCPDCGHTQDRDWNAARNILELGLRTVGHTGTNASGDIDLCLGGEIPLDKSSRGKRKPKK

SEQ ID NO: 38175 - protein, 378 aa, unknown
  TnpB Polypeptide
LIERAYKARLYPNKEQRESIERTFGCCRYVWNRSLEAKQKAYEETGKSPSSFELCKQLTKWKQSDAPWLYEVSNMALQQSIRDLDVAFKNFFRRVKKGEKPGYPKFKSRFDNNQSYRLPYDSGNGFRIIDEHHIRIAKLGVVKCRGLRMPEGRMMNITVRRVPSGRYHCSVCCVECPEPEAPPGTVEMLGVDAGVKDLITRSDGVKVANPHALKRLEKKLRREQRRLSRKQKGSANRDKQRVKVARVHEKIASVRKDCLHKATTQAVMDAKAVAVEDLNVRGMMANHKMAKSASDASMSEMIRQLEYKSRWYGRDFVKVDRFYPSTQTCSCCGKVTGPKGLSGLKEREWECPECGAKHDRDLNAAVNIANEGRRILNS

SEQ ID NO: 38176 - protein, 399 aa, unknown
  TnpB Polypeptide
MILVERHIIKQSHQHWPEIDKLSFLSKNLYNAANYICRQHFFASGKKYSLNDLYHLTKDLVDYRNLPTKVSKQIIKRLVSTWTGYFEAQKEWNKNPSKFLSEPRIPGYKDKAKGRNVVIYYHESVYKTELKKGICHLSMSDIKIPTKVDNVVEVRLVPRLTCYVVEIVYEKQEERLSTSDYVAGIDLGLTNLVALTSNQPGFKPLLINGRPLKSVNQFYNKTKAKLQSQLGQKRKSSQRIQSMTSYRNNYVDNYLHNTSRIIVNLLKACDIGTLVIGKNENWKQNINIGKKNNQSFTQIPHARLIDQITYKCQLAGIKVVVTEESYTSKTSALDLEIPRKHSTYLGKRLKRGLFQSSLGTKINADVNGSLQIVRKVFPNAYTTEGIASAAVAPLKVLPL

SEQ ID NO: 38177 - protein, 340 aa, unknown
  TnpB Polypeptide
MISVKGKQTKTIYDHNLILGTVTHSLGEIYFKAHSEYALPASITITREAGKWFVSFSYEVAAFRLSEEELIGHYSAMSEESLITITHGMDRGVVVSVAVSDATSHDFTSEQKQGLARKEIRRKRYERQMANRIKGSGHVRYDFVHKTSRKIVDFDAEVFVFENLNVQNMIRAPKPKQRKENDKYLPNDADAKAGLNKAILESAWDKTKLFTVYKAGRVNKLVIAVPPQGMSQECSKCSHTHPDNRQTQALFVCQNCGFTENADFNASLVTKKKGISMLVAGELSVKQKKRAMRLKKKQQLGQELPEGTRVETELSRTESHAFRTHLSANRETRTTTVLTV

SEQ ID NO: 38178 - protein, 430 aa, unknown
  TnpB Polypeptide
MRQAERHWIREGHKLYPICDDLTFKAKNLYNAGLYQIRQSIFERNRCQEEEKSSVLSWVELVSQFRKEKQSDMLALPSKVSTNILKSLGSTVNSYYQTLKCFHDKSNSSVTSKPQLPRYLHKTEGRYVVEFTNQTFSRKRGLNGELILCPKDFNLVIPTKVKTPKSVRIVPKLKAFVIEVVYEVETSPLKQTENYAAIDLGIDNLATITFSDGTNPLVVKGSKLKSINQGYNRLIAKATSKLPANQKTSQHIHRLWRNRELKLQSELHKITSFLSLYFDEMAIETVFIGKNQGWKQEVSLGKKTNQSFTQIPFNIFISQLTYKCLAKGIKVVEQEESYTSKASFLDEDEIPVYDSVQTKPQFSGKRISRGLYQSKDGKVLNADVNGSYNILVKGLLSLDKTLNRKAVSFHTRSLRRWESISNKNLLSQYM

SEQ ID NO: 38179 - protein, 406 aa, Bacteroidetes sp.
MLKIRKAYKYRLKTNSNIENKLLQYNGSARFLWNKCLAMNLERLEKRQAILWYNELAFWLTVWKRSEEYGFLKECPSQVLQQKLMDLEKAFKDCFDKSQPLKRTPVFKKRRLNDGIRFPQGFKIDNRRIFLPKIGWVGFYKSRDICGIIKNVTVTHRGGQWFASIQVEETIEIGKHASFSEIGIDVGIKCFAAYSDGSKVEGVHSFRKHEEQLALEQRKLSRKKKGSKNWKKQKIKIAKLHRKIANVRSDFLHKLSTEISENQAKVYVEGLQIRNMSASARGTIENPGQNIKAKSGLNKSILDQGWFEFKRQLDYKLFWRGGILVEVNPKHTSQRCSCCGHTAKENRVSQVAFKCQVCCHEDNADINAAKNILTVGQTGMVCGSNRISDRKQKPAGTREELLPQAC

SEQ ID NO: 38180 - protein, 396 aa, unknown
  TnpB Polypeptide
MKFRFYPTDEQAVGLGRTFGCVRLVYNKALEARSAAWLQDSRRVGYAESSALLTGWKQREDLAFLNEVSCVPLQQALRHLQGAFAGFWAKRAKYPRFKSRKKSRCSAEYTRSAFTFRDGQLTLAKMREPLDVVWSRPLPQGCEPSTVTVSRDSAGRWFVSMLCEDPRVTALPAAPNPVVGIDAGITSLLTLSTGEKIANPRHEQRERATLARAQRELARKQKGSANRERARVKVARVHARITDRRRDHLHQLTTRLVRETQAIVIEDLHVRGMVKNRSLARAISDAAWSELREQLAYKCAWYGRDLVVIDRFHPSSKTCSACGHVVPKLALSVREWTCPRCAAVHDRDVNAAKNIEAAGLAVLVCGAGVRPQRRPPGGQSAVKQETQPARAGIPSL

SEQ ID NO: 38181 - protein, 411 aa, Okeania sp.
MKLVERHVISKSHDLWSEIDHKAFLSKNLFNLANYHYRQYFFSEQKKLNFNQLYHKVSKSSDYQALPTKVSKQIIRRLDQSWTSYFSALREWKKQPNKFLGKPKIPQYKHKTKGRNILPYPEESIYKKALKKGICHLSMSEIKIPTSQTEIIEARIVPKSSCYIIEIVYEKPEEITENKQVAGVDLGVNNLIAVTTNQTGTAPLLIKGRPLKAINTFYNKQRSCLQSQLKTNHNQSHSHRLKKITHKRNCRVENYLHTASKRVIDWCVNHEIGQFIIGHNQTWKQEIKLGKKNNQQFVNIPHYRLIEMLTYKAQLIGIKVIITEESYTSQSSFLDGDYLPKYGDKKPKFSGKRVARGLYKTRGNKLLNADVNGSFNIIKKVIPDVFDQGIKGLPFNPVVVDPLRTTKLSDF

SEQ ID NO: 38182 - protein, 562 aa, unknown
  TnpB Polypeptide
MLCESFTSWRRLHAVKDCRLKRFKHAPAAQNQVRTIIREIDASALAPEDIRLLDDLLDGYGANVRHIMDLLKTRRYRRFCHGNLYQEFRKTLRAEHRAMQEKLPEEERAAHPLALGGMQGKVWKVSVEYACALYDRYWRGIQVRALQELRRKPFYQALTRAEQYYVACLLKSTGGMFFDMLDGRVPKPPAFPKSIQGSVAHAGALCAKVRATVRKLSRHLPVHGQNRSCVLAPREGYHPLRKSAPGDADGISIITAIPRRTVKVRVKGRGPIKKTIVLVRDGDRFFLHLSVPLKVKPLEKVPSAPAGYSHCTALDMGFTEVFTDDGGRQYGGGLGVLLTRMARELDDHCRKRRALWAAYRKAGPRKRQRLLKFNLGKKRWESRRERARREVENLINRALNHLLASRPSDVYLVEQFAESFDYSGMSREVRRRLSGWMRGVIADRLAFKVAERGARLVYVPANYTSQRCPVCSFVRRDQRSGDRFHCKHCGHKAQADGNAALNLLLAAHEPKIKRGMTCAQVDTVYRTEYEKKCRTEGKTPLPRRLRTSKRSAKGTCQKGNVK

SEQ ID NO: 38183 - protein, 320 aa, Klebsiella sp.
MRPEISIFLTQKWLHGSLSGNHTPDTQWLKDAPSQPLQQSLKDLERGYKNFFQKRAAFPRFKKRGQNDAFRYPQGVKLDQANNRISLPKLGWVRYRNSREVIGEVKNVTVSLSCDKWYVSIQTEYEVADPVHNAESMVGLDAGVTKLATLSDGTVYHPVNSFKANQRKLAMLQRQLSRKEKFSANWQKQKRKIQCHHSHIANIRRDYLHKVTSEISKNHAMIVIEDLKVSNMSKSAKGTSEQHGRNVRAKSGLNRSILDQGWYEMRRQLEYKQLWRGGQVLAIPPAYTSQRCACCGHTAKENRLSQSRFECLECGYTENR

SEQ ID NO: 38184 - protein, 557 aa, unknown
  TnpB Polypeptide
MNQWFFVIFDQKVLSAKNRFLRCDILIVNLERRERMHTVQILLNTKTCSQEMEKRFRAMTHIHNVCVKHGNKLLSRLEHDKAYQDAMEKRLETSKKLDGLQQKVLSNRKEERELEKQVTAMEKEIKSINQVLNAIRTDMGLSKSGFESWLKKCGSRFSHLVSSQQVQAEAGRVWAGVEKVLFGNGTKLHYKKECELSTITGKSNTNGAKFHPETMTVGWTGLTLSCKLPNRISEQHYIAEALQGTIAYCTISRKMFPSGWRYYALVCVRSDAPVNGRTSGKGPMGIDPGTSTMAAVSNEAVFLEELAPRVPEYNRQIRDLQYRMDISKRMTNPRKYHEDGTINQKNHDQWIFSKGYKRMRQKLRTIYRKKAAYIKQDHEERANRFLAHADTIYIEAMDYRALQKRARATSRKEEASQVKQKDGTVKLIRKFKKKKRFGRSLNNRAPASFITILKRKAGLLGVTVMEIQTRTYKASQYNHVTGECAKTLLSERKKEIDGHTVQRDLYSAFLIQNPSDGLAVPDQQACKKRFQNFLQLQERLIQTMKSTGQSMPQCFGF

SEQ ID NO: 38185 - protein, 402 aa, Streptomyces sp.
VRLRYNFRLYPSARQRTALARAFGCARVVYNDALRARETARDEGLPFPKTGDLSKLLITEAKQTSERAWLGEVSAVVLQQSLRDLDTAYRNFFDGLKGRRPHMGAPRFKSKRDNRQAVRFTVNARWSITSGRKLRLPKIGDLKVKRSRTLPSTPSTVTVVKDAAGRYFASFVVQTDPSEVLPPATTEVGIDLGLGHFAVLSDGTKIDSPRFLRRAEKRLKKAQRALSRKEKGSKNRDKARTRVARAHARVADARREFHHQLSTKLIRDNQAVAVEDLAVKGLARTRLAKSVHDAGWSAFVNMLEYKAARYGRTLVKIDRFEPTSQVCSQCGLKDGPKPLHVRVRTCQACGAVLDRDINAAVNVAQAAGLAVTARRAQVRPGPVPAPRSEAGTHPTPQPSTAR

SEQ ID NO: 38186 - protein, 291 aa, unknown
  TnpB Polypeptide
MEQKIKTILVTHKDRFGRFGYDWFKKFCMKFNTTIVVVNKEEPSPQEELVQDIVSILHAFSCRLYGLRKYKKQIEGDGEIAKELQDGKGKSDVKMYFVKNNPKDCRCERHRINIPSLGWVRVKKKGYIPVTKDGYVIKSGLVSMKAGRFYVSVLAEIPDSKITTNDYSEGIGIDLGLKDFAIISNGKTYKNINKSATLKKLEKRLIREQRCLSRRYENLKEGESTQKANIQKQKLKVQKLYHRIDNVRRDYMNKTIAEIVKTKPSYITIENLNVSGMMKNRHLSKAVASQK

SEQ ID NO: 38187 - protein, 412 aa, unknown
  TnpB Polypeptide
METKRAYKTELDLNNEQVTMCLQHAGAARFAYNWGLREVMQARVRGEKKPSAIDLHKKLNALKATEFPWMYESSKCAPQEALRDLDVAFDNFFRRCKQGAKKKGFPRFKSRKGGIGSFRLTGAIKVSDRTIQLPRLGELRQKEAGYLPVNAKVSQATVSEKNGRWYVSVLTKVEIAQPVTPDMPIVGVDLGIKSLAVLSSGEVIENPKHLRAAQRKLKRMQRAVSRRVKGSGRRKDAVRRLGKQHERVANKRKDAMHKFTTKITRESSVIGIEDLSVRGMMANHHLAGSLADASFGEIRRQIEYKARWYGSTIVVIDRFAPTSKMCSGCGCIKDSLSLSERTFKCDACGLEVDRDLNAALNIKKLAVSYMDSLNGRGLESAGFDRKVKTKLSKVKRQLNVKSDADPICLSFG

SEQ ID NO: 38188 - protein, 221 aa, Cyanothece sp.
LVKASNLDYSHALAIDHGVDNWLSSVTTKGKSFIVNGRRIKSINQRYNRFVAKYKQGKSQDYWDDKLEQVTHRRNCQMRDAINKAARFVINYCLKHQIGNIVFGWNDRQKESINIGKTNNQNFVQIPTARLKNRIQQLAESVGIIFTEIDEAYSSKASFLDDDLVPNYGEKPKGYKFSGKRFKRGLYKTAKGWLVNADIQAAANLLKKGSHTARNKPSQGG

SEQ ID NO: 38189 - protein, 490 aa, unknown
  TnpB Polypeptide
MSKYYNAVKVKLTDENQIYWLNYVREIFLSEYELLKTNSSVQLKSFTGRELSHCFRGHFVKKLAELTNKNYNEWELNNRFRYFKMFSMHLRQDFNSLNYKQRIVDILEKYNFDLKKSNKEIREELIKLNLYPTKQELMNIIRSKNNNNSLSLLQNYYQNGFSIPLDFTLGQDKQTILHPDEKQPVFHINLNGNWIWFDFRDNIKFQYIQNRINSDKFVRFCKPKFILDENENWYCILAIESDNNDNRENNEKNSLVYPLAGVDIGQVKPYSAVILNKDQTNLKASLVSKELTASKETKLINSKLERVKEHLSSIYNKINVYENIIKNNKNQEFTTQIIQKLEERNREKDALRRKRKELQKRKSYLVARDLMRQLIFFNVKKVNIERLNWVEHTGGSWDFSQQQDILEQKAIEHGIKVTKIYAANTSKENPFTKKRSLGKADAKTRMVQFSGKKYQIDRDILGAINIALRDKNNQFKLKYNEKKLKTMIII

SEQ ID NO: 38190 - protein, 560 aa, unknown
  TnpB Polypeptide
VENKSFMNNTIGQERIQDLNLDISLASTHLHLVKKIPITDVNDVFCCLLLSNTAKKLYNSALYLFKKQYCENQTTLTYETLDKLIKNEELNPNFSRLYQDLTAKVSQQVLKLFTQNVKSFFSLKQSKKLTDEQKKKVNLPRYYTKNGLVPIYYTNQALSKKSFNEEGVIHFAGTDLKIKLDKNLAALPEITHFSQINQVRIIPSTKNDKNKKLSDLLEEYCSSSADTKPASPLFTVEIVYTAPLTKQRISNQSLNLRYETKITQKVRKKDNKVYEIKTEELVEVSYTEEFLKSVAGIDQNLDQLAVGVVLDNQKTLTFNYDIKYLKCVNQYWNKQKARLQEEINKQEKLLEDFKNSLELKLIDGDNSKSKLVEAINHKKILIKRLKNKIKRITTKRNRKIDNYVHQLSRKLINHLSKLGVKNIIYGKNVNFKQEINLGKVNNQNFVNIPFNLIIERLRYKAALAGINFMTVEESYTSKTSFLDREKLHSYKSDKAPKKYNFLGNRFTRSLFKSKDGYIIHADTNASFNIIRKVTGDSIYNFVEMASIKGSSPKRVKISIS

SEQ ID NO: 38191 - protein, 555 aa, unknown
  TnpB Polypeptide
MELNKQDFTVSITQDIIKDLNLDISLATSDVQLVKQIPITDVNDMFCCLLLCNTAKKLYNSALYLFKEQYRKNQTTLTYATLDRVMKNENLHPNYAKLYQDLSAKVSQQVLKLFSQNIKSFFSLKESEKLTDEQKKKVNLPKYYSKNGLVVVTYTNQAISKKAFNEEGVLHLSGTDLKIKLDGSSAPEITHFGQINQVRIIPSTKNHKDKRLSDLLDEYCVGDVKQPLFTLEIVYTVPVSEKRKNNQSVKLRYETKKIEKIDKKTQEVYTIEKEELVEVRYTEEFLQSVAGIDQNLNQLAVGVVTTKETTAFNYDLKYMKSINQYWNKKKAKLQADISYQKQLLKELAEPSEKLDFYQTVLTEYTASRLISSVEILLKKLQNKLKRLTTKRNNKIKNYTHQLSHKLITHLSKLGVKNIVYGKNVNFKQEINLGQVTNQNFVNIPFNQIIERLRYKALLAGMNFMIVEESYTSKTSFLDRETLYGYKHNRAPKKYKFLGNRFTRSLFRSKDGYIIHADTNASFNIIRKVTGDSIYNFVEMASIRGSSPKRWKINLA

SEQ ID NO: 38192 - protein, 447 aa, unknown
  TnpB Polypeptide
LSEFQTNHTSTIKLAHKIELIPNKAQTEYFAKACGVSRFAYNWALASWNSQYKNWKEAEVKAKENGTVNNLSKPNEYELRKQFNAIKKDKYPFVKEITKCAVQQGIKDLGVAFVRFFKKTSDYPQFHKKGRNDSFYLDNTVFQVVNQKIYIPKLGWVKMRENLRFHGKILSATVSRTADKWFVSIQVDVQLDLQPAISASYNQQSSAEENQYRENQAMLNHDECSHKAVVSNIKVVGIDLGIKTMATLAYDNTIEKIDSPKPLKRYLSKLKRLQRKLSRQGQSYTMEDYVDANGETRKIRKYSNNYMKTKMKLARLHAKIHNIRQDFLHKLTTRLVEEFDVICIEDLNVKGMMANHKLARAIMDLGFYEFKRQLLYKAQMWHKTVIIADKWYPSSKTCSCCGEKLKELDLSVREWECPHCHTTHDRDANAAINLRNYGLNQIQTTCS

SEQ ID NO: 38193 - protein, 424 aa, unknown
  TnpB Polypeptide
MLSLTCVLHPDKKEYEILRSLCRASKNLYNFGLYQTKQHLFLNNSFLKYPENYHICKDNENYKFMQSASAQQTLKFVERNMRSYYALKKLADKGKVGHPSLPRYLKKDGYFMVAYPKNGFSIKGNKIELGTSRLHGKENKLSFTIPEPIRKIKHKIQEVHILPAWQGKFFRIKYIYEETPQDLQLNPDRVLGIDLGLYNFATLVGHGTATIISGKYIKSYNRWFNKEKAKIQSQKDLQGYKHCTAKEIQLSEKRYNVINEFLNQSVNLIVKQCIQNDIGTVIVGDFEGAKTGINHGRKNNQNFVSVPYYKFKAKLESKCQQYGIQYKAVNESYTSKCDALAFEPVKKHESYLGKRKKRGLFQSSTGVLLNADVNGALNIIRKVSGDSQVTDIISSGLVNRPVTAYLCGNKLNVKGSYSSSPILA

SEQ ID NO: 38194 - protein, 424 aa, unknown; identical to SEQ ID NO: 38193
  TnpB Polypeptide

SEQ ID NO: 38195 - protein, 258 aa, unknown
  TnpB Polypeptide
LQAKPSCLVETTEDAERGESKLFRRHGRFYVNLVFTFDTPPLRRGTSVIGVDLGERIMAATVLLQNSCIKRPRFLGREVRGIRRHHAWLRRRLQERGLSRIVKRIGDREKRRVDAVLHRISKEIVEMADRTTSWIAIGDLTGIRRSAEKRGKRMRRIVSNMPFHKRTQMIIYKAMIRGIPVVLVNEAYTSITCHVCGRRGLRSTQARFRCPECGEFNADLNGAINIARKVERHLGYIPLCGPPVNQPLTVQLHRSHRF

SEQ ID NO: 38196 - protein, 446 aa, Sulfurovum sp.
MLRTYKLKHSINKGKQRKILNLLKEYRKVSDEISNRQWRYFYENGKFNRDLEVNSIKSKLSKRYRQTAQYQVVAQLESYLGNRQNEFKDYLKNSNFDKETKIKLYYINRYKKWFYQSVTMQNSEIEQNIIKLSRIIIKNIFKKNRKPNPKFCNMALDAKVMEITPNGVKKVKKSEKLKDENGEFILNKSGNPKVKTYTIEKEIEKSSYDYWIKLSTLEKGKKIYLPITTNNYFEGIKGDVSNFIQINFGQDIDKINGDLALSTLQKIDYNDYKIDICLIKNIKKEEYQPKIDKLALDLGLNNLFATNIGELYGRNFSKLLKKYDEIVSLLAKNRQKQKLKTLSKKYKKIINKIKAYLKNEINRVINNLIKNNRPKEIIVEKLNFTSPKLSKKLNRMISNFGKSIIEEKFESIKEKYGIEITQINPAYTSQECSKCGYVEKKNRMQI

SEQ ID NO: 38197 - protein, 384 aa, Lactobacillus sp.
MIRTQKVKLYPNSHMRKVLLDLCDYRRYCWNQALETWNNMHDAYCLNKTANRKPNKLRVRDELVANKADWQYGLSSRTLQLAITDLGTAWDDFFNEALPDWGKPRFKSKRAPRQGFKTDRAKLVKGKLRLDKPHGAANWYDIRFNKHVDLDGILKTVSIYCENGIFWACLNLEVIIEPKCQTNQLTAVDVNVGHFNYTDGLINVIPKQLNRLYEQIKYYQRNLAHKRVVNGKKATHTINYRAMRAKLQRAYRKATNIQHDLMQKVTTKLVTDFDTIVIEDLAVKKMQMTHVASKGGHRSMFGYFRQLLTYKCDWYRKQLVLAERSYPSTQRCSQCGYVKQGLEKITLRGNALHGTRHDQYDCYQCGAKLNRDSNAVANLLALAK

SEQ ID NO: 38198 - protein, 329 aa, Anoxybacillus sp.
LAQQLFQQHHKTSNKRCVSSLQKLFFFAGRAKFPKLKTKKRTRPSFYQDTSKIKITDTHVKLEKLTPSKKKNRQKLNWIRLAERGRIPHGKHVTYVNPRIVFDGLHWFLTVGVEEAEVKHETYSEGIGIDLGVKSLATVSNGMTFPNINQTPKVKKLEKSIRRMQRRISRKYEMNKTKTEGGEFRYRKTENIKKIEFLVLKKRRRLKNMQLNHTHHITATLVKAKPAYVVMEDLNTSGMLKNCKLSKAIQQQTFHVFKRQMTYKCAWHGIELIVVDRFYPSSKKCSRCGHVKDHLSLSERTYRCEACGIEIDRDLNASINLKQYAESMM

SEQ ID NO: 38199 - protein, 704 aa, Streptomyces sp.
MQLRYNYRAYPDAAQRRALAQAFGCARVVWNDCLRDRKEAHAAGLPYVKSAQLSRLRITQAKRTEERAWLADVSAVVLQQSLRDLDTAYKNFFDSLRGKRQGRKVGPPRYKSKKDTRQSIRLNTNAFCLQENGTVYVAKVGNLKVKWSRRLPAAPTSLTVTQDSCGRYFLSFVVDTEPDILPGLETESGIDLGLSAFAVLSDGRKIDSPRFLRRAEKKLKRLQQDLSRKAKGSKNRAKARIKVARQHAKVADRRRDFHHKASTQIIRDSQAVYVEDLAVSGLGRTRLAKSVHDAGWSAFVCMLEYKAVRYGRTFAKVDRAFPSSQVCSACGFRDGPKPLHVREWTCGVCGIVHDRDHNAARNVLFEGRRIVAAGRAETPNASQSAGKTRTKVPARCVEAGSPPEGSDDPGRNPWTLGQGARQCERMEIRELRYFVAIAEELHFGKAARRLEIAQPPLSRTIARLERQLGVTLLERTSRKVTLTEAGAVLLSEGRAILSAVAAAERRTQQAAQRRPRLVLAVKSGTAGELLAKLLDAYRMEPGAATVDLLLCEAHQHQKLLQDAQADVALLHLPFDSTVGLDTETLYTEGQVAILPSSHALSGRSQIRMAEVTALPELPMARWPGPGGSYPEGPGAEVRNLTQLFQLIALGRTTVIMPESTGTDLRRDLAAVPVVDAPPVTTVIAWPPQSRLRAVADLIRVATRL

SEQ ID NO: 38200 - protein, 385 aa, Streptomyces sp.
VKLVVQVKLLPSPEQAAALEATLRACNRAAEHVSQTAFASGVMDRNGLQKLVYTDIKASFGLSAQPAVRVVKKVVDAYRTLAASLRAGRLGRPSSKRYRKAVGSAVGFRPEAAQPFDDRCLSWQTDARTVSIWTVDGRMRGIRYTGCADQLKTLAEYRKGESDLVRRGGKWFLIATCEIPEPEVFEPVDWIGVDRGIANLATTSDGTNYQGRRLNRYRRWQARKRAELQARCTRSATRRLARHAKKEQRHAAHVNHRISKEIVSVAQRTGRGIAVEQLDGIRERVRLRRDQRGTLSSWPFHQLGQHLAYKARRAGVPFLAVDAAYTSQRCPRCGHTGRANRPTRDRFSCRRCGLAGPADHVAGVNVRDRARSAWVFVTMPVPSSA

SEQ ID NO: 38201 - protein, 404 aa, Streptomyces sp.
VIRAYKFLMRPTVRQGQALSEMLRDHCSLYNGALQERRDAYRHVSKTSVRYGMQSAQLKDIRAFDPERQGRWSFSSQQATLRRLDKAMQAFFRRVKSGETPGYPRFRGVTWFDTVEFPKDGDGCRWDSTPHDPVTRVRFQGVGHVRVNQHRAVAGRVKTVSVKREGRKWFVVLSAEQDQPEPLPATGSVVGIDLGIANFLADSNGGFVPNPRHGRRAAQKLQAAQQALSRFPRRKAKDRTANHQRAVEKVAQLHGKVRRQRLDHAHKTALGLVRAHDFIAHEDLRIRNMSRAPAPKPDPGRLGTFLPNGAAAKAGLNTSISDAGWGVFLTILHAKAESAGREVIAVDPRNTSRTCPACGHTAKENRPTQEKFHCVACGHHAHADTVAATNVLRAGLARRNANPA

SEQ ID NO: 38202 - protein, 286 aa, Cyanobacteria sp.
VAGWKAHTTGGNGHLEISNLGKIQMRGKARVWGKPTTCTIIWKNNKWLASITVKCDVQRQTGTGAVGIDIGTLTAVAFDNGDKIDNPRFLASAQSNIRKASRELRRKRKPEKRQSKASRRWKKASCKVSKLQNKVANRRQDWVHKVAAQITRDNSLVATETLQVKNMTAQAKKGKTKRQKTGLNRSIIDVGFGMLRSAIKYKIEEAGGFFVEVPAQKIKPSQTCPKCLAQKKKELSERIHQCEKCGYTTDRDVASALICLNWALGTSVLDAEQKALAKTLSSHAED

SEQ ID NO: 38203 - protein, 487 aa, unknown
  TnpB Polypeptide
MTMPKKVGVTKKISTQVVPVIGMTESVEAELLSTMRKLGIVRSESYNKLGSINYWGLDWKKAIPEVKSFRTPGSLGLPAKLMDWTINDIAKAITAQQAACIDATIKKIYKRFPGKENQGKRKELCKQLRTLAFLDNSLLHRLVRKGYQRGHSWIKNQIVYQQEGYKCKRISRNTYQLELAGLIKRKRNKVVVKSNRKIKGQIRLIFNQILQRFEIHFLVDHGTVEIPSERRSIGVDKGYTEAFYDSDGNAHGKGLGKATTNKSDRICVKNRNRGKLWALHRKLEKIDPAKSARILENNLTRKTENRRYKKNQAEIKAIIGAASKSLFIGESVKVFAEDLTQPIQNKRQSKAVSRKLNSWMKGEIRDSLQKWADWTGSVVTEVQPSYTSQIDSVTGTLLGKRSGDNFTRFDGVVLQADHNAAKNILARGMDKEITRYMSRAEVQAVLLRRTARWLEGWGLDLVDAVELEWLDSKHTKNQAFKQLLIEM

SEQ ID NO: 38204 - protein, 386 aa, Herpetosiphonaceae sp.
MTTVKSFKYRLNPTAAQEQLFRQFAGCRRFVWNWALARKQETYQATGKRLTYTALASELVELKRQPETAFLQECHSQVLQQVLMDLERAFMNFFEKRAGFPRFKSKKRTSPTFRIPQHVTVIDNQVRLPKVGLVKATIHRSLEGVVTSATVKQDATGNWYVTFVSHLEQPENMVRTACTPVGIDVGLSSFVTLDDGTKVAAPRLYRRSERKLKRLQRQVSRCTKGSKSRNRARLALARQHQKVRNQRTDFLHKLSINLIRTFDALCIEDLNIKGLARSKLAKSFTDAGLGSFVRMLEYKAVWWSRQVVRVSRWFASSKTCFSCGAVHQLPLSERTWNCSRCGARHDRDMNAARNILREGLRVLAVGSTESQTAAGAHVRLATASSA

SEQ ID NO: 38205 - protein, 370 aa, Halomonas sp.
MKTERAFKYRFYPTPEQEALLARTFGCVRFVWNVVLRYRTDAFYERKEKIGYTNASAYLTQLKKAPETAFLAEVSSVALQQCLRHQQSAFKHFFAKRAKYPRFKSKKHRQSATFANSAFSYRNGEITLAKCSEPLAIRWSRALPSAPSTVTVSKDRAGRYFISCLCKVDTEALPITPKMVGIDLGLKDLFVTSDGTKVNNPRHTARYELKLARAQRRLSRKQKGSNNRAKAKQKVAKCHAKIADTRLDHLHKLTRQIVNENQVICLESLAVKNMVKNRHLAKAISDVGWGELARQLDYKAEWAGRQFVQIDRWYPSSKRCHSCGFVLESLQLYVRTWDCPDCGTQGIDRDVNAACNILQAGTALLAGAES

SEQ ID NO: 38206 - protein, 304 aa, Acinetobacter sp.
VIRRKQFKKSKLKWRVSNRKSARRSLGWIPFKKVAIKHADGYVQYGKHQFKLWDSYGLSKYKIKTGSFVEDARGRWYVCLGVDSPKLEKTKATKAIGIDLGLKDIATCSDGTVISNPKFYRQYEQKLGIAQRAKNKKRVRALHAKIANCRKDHLHKASTMLVKDNALIIVGDLSAKKLVKTKMAKSVLDTGFSALKTMLKYKCENAGVLFEEVNEAYTTQMCSCCRKISSSSPKGRADIGIRGWRCVECCTFHENRDINSALNILALGHERLAVGIPVFQAGEDVNERQMKIGIKTLKGQIGIM

SEQ ID NO: 38207 - protein, 384 aa, unknown
  TnpB Polypeptide
MSETGRKTFKYKLKPTPEQEQRLETVVWRCRVLYNTALEQRVTAWQRCHVSLSRYQQEAELKAMRAEFPDDAAIHRHVLQDVLARLDKTYQAFFLRLQRGELAGFPRFQGRDRFHSFTFKEYGNGAQLDNGCLVLSKIGRVAVRWSRPLEGTPKTVTLSKEADGWYVCISCAEVLVPPRAPTSQDTGIDLGLESFATLADGSQIANPRSFHVAEMNLKRAQRRVSRRKKGSNRRRKAVRLLAKKHLKVKRQRTDFHQKSALVLVQQYDTISHEDLQTANMLKNHHLAKSITDAAWRGFLGILSFKAAEAGKTVVAVPPAYTAQACAGCGVIVSKGLSVRWHRCPDCGTSLHRDHNAALNILRVGHSGLGQSPQALTWPVRASVA

SEQ ID NO: 38208 - protein, 461 aa, Mycolicibacterium sp.
MARFDVPDGWCVQAFRFTLDPTDGQAQLLARHFGARRKAYNWAVSALKADIEAWRATSAVSEKPSLQVLRKRWNAVKDDVCRNAETGAVWWRECSKEAYADGIGGAVNAYWNWQTSRAGTRSGKRVGFPRFRKKGRDCDRVTFTTGAMRIESDRRHITLPVIGTVRTQENTRRIERLVAKGRARVLAITVRRSGPRLDAIVRVVVQRPQQPNVARPASRVGLDAGVRRLATVATADGEVLERIMNPRPLDAVLKELRHASRARSRCTKGSRRYRERTAEISRLYRRVCDVRTNHLHVLTTRLAKTHGRIVVEGLDVAGMLRQGGLPGARIRRRALSDAAMGSLRRLLAYKAGWYGSKLVVADRWFPSSKTCHACGHLQYIGWDEHWQCQECSASHQRDDNAAINLARYEETSSVVGPVGAAVKRGADHKTGVARLVAAKRGRDPATSSVNNPETGCKPCDL

SEQ ID NO: 38209 - protein, 376 aa, unknown
  TnpB Polypeptide
MKVYDYKLKPNKEQIKLLESLLWETKCLYNNALQELVEHYKTTGKYLNRFTQDKNYNKQTYPNIPAQFVDTTLDRLHRSFANFFRGLKQGKRIGFPRFQSYKRWSSFAFRDYTQGKIKDGKWYISKTNGIKVIQHRDFLGIPKLTMLVKRADGYYVQITCEVEIIEAQKTNKQVGLDLGLRYFAADSNGNKIEAPKFFRKAQYKLARNQRQLSKKKKGGKNRNKARQLVAKNHLTIQRQRKDWLHKLSYKYANENDVVVVENLNVAGMVRNRHLSLSISDASWATFLSMLEYKLQTLSRILIKVNPVWTSQICSNCGAIVQKSLSQRTHYCPECLYVDDRDVNASKVILKIGQELPFAETASIEESMKQEVTRSLA

SEQ ID NO: 38210 - protein, 399 aa, unknown
  TnpB Polypeptide
MIHNLAHTIRLFPTKAQEIFFKKACGCARVAYNYGLSEYQKQRKEGGKPSIIKIKEKFNQEKKTLYPWMYETNKDANQQPFSNLQDAFTRFFKHQNKYPKFKKKGKKDSFYISNDKFEAKENKFRIPKLGWVKGAEELRFRGKIMSATVRRKADYWFVVISVETDQTFTTCENQTIVGVDLGINALATLSDGKVRESVKPLRARLKQLKRLQRWASRKVKGSFNRHKANKKVAKIYYEVACLRKDILDKMTTYLCENYQVICIEDLDVESMLKNHCLALSLADCGFGEFRRQLTYKSLLHGNTIVVADKWFPSSKKCSGCGHVKEIFSLSEREYVCEHCGLVIDRDLNAVINLMNYALNQLGMACPEVTPVDTGALVYSSAIGINETILDEAGISSVPK

SEQ ID NO: 38211 - protein, 387 aa, Escherichia sp.
VKRLQAFKFQLRPGGQQECEMRRFAGACRFVFNRALARQNENHEVGNKYIPYGKMASWLVEWKNATETQWLKDAPSQPLQQSLKDLERAYKNFFQNRAAFPRFKKRGQNDVFRYPQGVKLDQENSRIFLPKLGWMRYRNSRQVTGVVKNVTVSQSCGKWYISIQTESEVSTPVHPSASMVGLDAGVAKLATLSDGTVFEPVNSFQKNQKTLARLQRQLSRKVKFSNNWQKQKRKIQRLHSCIANIRRDYLHKVTTAVSKNHAMIVIEDLKVSNMSKSAAGTVSQPGRNVRAKSGLNRSILDQGWYEMRRQLAYKQLWRGGQVLAVPPAYTSQRCACCGHTAKENRLSQSKFRCQVCGYTANADVNGARNILAAGHAVLACGGCQQTG

SEQ ID NO: 38212 - protein, 362 aa, unknown
  TnpB Polypeptide
MKRGLKFSLALANTDKLKVLDKLSQEYKRTVNYFLKRLFQKKDLSEEFLKLYQSPLSYRYKQCAKRQAFKLFKSWCRNKKKGDKPKLRNPSLILDYRFLELQKSKNSNSFDYWLKIATLDKGKPILIPIKSYNYAQQYFKNWQLLKGGRLLKQNNNWFLELTFQKETPAKKEEGKVIGIDMGIKKLMVTSEGKEYGKDIESLIDKIQRKKQKSKAFFRALKERDYYINRVVKTLSWKELKAIVMENIKNIKQNTKKERKLGKLFRSKFQRWTYSQLLKRMKLTAEATGVHLQLVSPAHTSQTCSQCGAVHKLNRSNELFKCRNCGYTLDADYNASKNILKSYLAQQLMVAGSIKAFNGIFVP

SEQ ID NO: 38213 - protein, 364 aa, unknown
  TnpB Polypeptide
MEKAFKYRMYPNREQRILLAKTFGCTRFVFNHYLAKRRDAYEKDGITLNYSACAKDLVSLKKEYEWLKEVDSVALQSSVKNLDTAYINFFKKKAEYPRFKSKKTHRYSYTTKYTNGNIELYENKVKLPRIGLVKIKKTRVPKGRLLSATVSQVPSGKYYVSLCYTDVEEVLFPLTYNETGIDLGIKDFIILSNGEKVENPKYLKKSIEKLKKLQKQQSRKTKGGRNWIKNRIKIARLHEKIANQRMDFINKLSTRIIREYDIICIEDLKVDNMLKNHNLAQSISDVSWSKFTTQLEYKAQWYGKVIKKVDTFYASSQTCHCCRYKNEETKDLKVREWTCPKCHSNHDRDVNASINILMQGILAN

SEQ ID NO: 38214 - protein, 287 aa, unknown
  TnpB Polypeptide
VPIKLDVGANAPALVETARRFNAAATWIARVCWDEGITNTNTAHHRVYGQTRADYGLGAQLAVCARAKAMEAIKAARKTGGDMCPAWRVDAAVRYDARTYRLLPLDGVSLNTVEGRVICRLLPGQRQRDMLLETSWRIGGADLVRRKGVWYLHLTQHKPAPEPDDATGYIGVDLGVARIATTDDGTIYDGAQVTAVRACIAYKALAAGLVVAYVDPRDTSRTCAACGHCARANRRDQSHFLCLRCGHEANADVNAARNIAARAGVNQPIVLPRAGLRLCMASTSRLL

SEQ ID NO: 38215 - protein, 404 aa, unknown
  TnpB Polypeptide
MLVKGVVFYLDSEFPFEARSLLEDFRLAVNNAIRAGLQARVTSRNALVKIAYKDFREQHPRMYAQHLVSAFEVACGILKNHRKRFRKRVTYRIPYVKRLMMKAENQAYKLDRKSGVIDLPIRAGCHVELKLIVSQYHRRYLDNMSLSLGSLTVLPDRVIVAFRKDAPKPYAPDSVISLDTNERSLDGVFVEGDVVKAVKADFPDIAIIQQRHHDRRKRLQKKKAHDRRISRELCRREGTREHRRIDYMLHQVANSVLRFAEEKKSTIVLEDLKGFRPKRNKELNRRLSMWPRRKLHQIIEYKAQWKGIPVVKVDPRYSSRTCPACGRIQDSRKGTEFVCDCGWHLDRHINASINLLQTAISKRMAEGLRFDPGAFQHDVMMILYEPAMAARSEPNGTSGIVGVT

SEQ ID NO: 38216 - protein, 426 aa, Synergistales sp.
MKAVRIYRLRHLPDALFHRIMDGMAESARVWNLCMEMHKKARQDKTPWPDKNDFHKATKGKFQLYSQSVQQVFRAFAGSIASTSRRLAEGDETAEYPHREKHLYPLMWPAQNICAERGSRTRLVLPMGRGRPSVVLKLDKLPETIGAVKIVWDNGPELHVQTETPSVEQGNTRAGVRACVDLGEIHLAAVATNEGDALVVSGRGIRSHKRLNSKVNGEILKLQSRCKRGSRRWKKLAAARRKLNGRIKRRIRDARHQATHAVVEFCAKKGVETLFVGNPDGVRKKPKGKRFNQKLSQWEYGRDKQYLKEKAERAAIECFTGSERFTSSTCPECGCRRRPKGRRWICPECGFAGHRDVVGAVNMHAFTFGERVEFPEETRITYLRPASDSRRRTGRNAASSSSPDTGQSCLKAGRAGSCTAYGCGPR

SEQ ID NO: 38217 - protein, 436 aa, unknown
  TnpB Polypeptide
MKLFPKIREAKTKVQYEWLTERHVIRSSNKFFPLLKKLAHKANNGYNQGLYRVRHKLFQGEWMNYCELDRSFKTSRDNRDSMLYESMGNVHLAQQVLKAVCQDMTSWKKSRDAYRKAPQKFSGYPKLPSYKRKGWMMPFVVDNQTAKLRSDGTVEIPCMDNFRIELWHKNVKKIQQVRIVPMNGVFIVEIVYKTEKVIEYKPDNGRYLTIDPGVNNAFACASNVKGFQPVVFNGHPIKSVNQFYNKERARLLSIYKLSRQREQSHRLDRLDFKRNQKIERYAHEVSKRIAELALSHECNTIVIGRNIGLKNGSQMDKKNNQNFIGIPHDRMLQKIMYKANLLGIVVIPVNESYSSQTSFLDGEEVIPANGDKARARKGLSPAKRRFKRGLYRSNNGTVLNADINAAHQILRKVVPNAYADGIEGVGLHPLKVNLSF

SEQ ID NO: 38218 - protein, 425 aa, unknown
  TnpB Polypeptide
MATVTQAYRFALDPSPRQRRALASHCGAARYAYNWGLQLVQERLEQRRAGDDIEVPWTLPALRWEWNRAKHQVAPWWAENSKEAYSSGLDGLARALKNFSDSKAGRRQGRPVRFPRPKKKGRARDACRFTTGQIKVLESRKHVQLPRIGVLKTHESTRKLARRIEQGTARILTATISRTADRWFVSFTVEAQRHVQTEREKAAVVGVDAGVRHLAVLSTGMVIPNPHALEGSLRRLRRLNRELARRRPGSRRRSRTRQRLARVHARAANVRRDAMHKLTTSLATLHGTIVVEQLNIAGMVRNPRLARAISDTGMAELRRQLGYKTTWYGCRLVVADRFYPSSKTCSGCGWVKAKLTLAERTFCCEVCGLVLDRDLNAARNLARLVQHVAQSGWETQTARGANRKTQPAGQVATKREPSSSGSPRA

SEQ ID NO: 38219 - protein, 452 aa, unknown
  TnpB Polypeptide
LLDVSPRKQGGTNAGKREHLASTVALLNAARQFYLAFFLAHPDKLTERVQIISTTTGEVRGGVISADKLLTWAEFLTVETRDHPSPDPDWNFSQVFPDFPNRYRRSVIKDCLGKARGYLSLRQNWQQSGKKKGKPGLPTPANHPTLYAGTFSLELDELDLRNSFLRLKVYDGTEWRWVNYPTKYNRYFEERRADPDWEQESPKLVLNQHGAALHFLQTRKIVAKKIVESKQDPDLVTVAVDLNVKFLAVITVRQRGTIIQTCFVSDQGLDQHRYGHLKRIAKKQWQSGKPVKGEQSNQNLWAHIRRQNRAEAHRVSRAIVEICEQYPGCVLLFERLRVIKPKGGSKSKRRNRKQANQLKGQINQLAKAKAYASGIVSVEVNPHGTSQYCARCGWKGVRFTPKAGQRVTGKGGKLFSCAFCRYECHADFNASVNVHRSFYREMHWQPRLKKSG

SEQ ID NO: 38220 - protein, 392 aa, unknown
  TnpB Polypeptide
VYTDGVRSDSGERKPADAQTLRLLQNMLRHTRRHLVSVPNLRRVRTMTLDGTVAQVEHSQPKMGPQPSPRPRGRGSMFPLWLRVSTTEAGQVMRLPLASNHFFDQADGELSNFAQVTVTRDQHVKITLTKRTHPAAARDAGMDVALDWGMRSLLATQFGDQLGTRLYPWLTAVDAQLTALTKDLQRQGIKPGSNRRYRNMQRRIGEHVRNEVGRIINRLLEVHDVRSFTVEKLDFRGGGLSRRMNRILTRAGRGAVSKKLNSIGETHGITTVEVNPAHTSRECAGCHYVDPKSRQGPRFRCRFCGKRSHADTNGARVISHRRSVGAADALSSKGTVLRRADARFEAAWGLRPGSAEKLRRRPKERPASPTPKNRRAKPASARAGEETNSRSS

SEQ ID NO: 38221 - protein, 890 aa, Streptomyces sp.
LKTDGQAHAARATWNLPHAWWRMMPKQERTLANADAAIRQAREDIGFLAVLPAQAAQAVLKTYFQAWKNCWEGRADAPNFKARFRTGMSVDIPQGRDLNITRVHRRWGMVSIPKMGRVRFRWTKDLPVGKRADAENRITGARLVKDALGWHIAFRVQTLEAKPEPHQGPEVGIDVGVTVPIALSDCETYEHGEWLTGKEKATLLHLEQRAAQRKRHRKLGERTSRRPHRTYDRIAGLRAKAKRRALDWQHKTTTHIARTYGTVVVEALTITNMVKSARGTVEEPGKTAPSAGRRGAGRSPCWRTRPPGMAAPWSRSPPPAPPGAAPSAASLCPGAGSPRPCSCARTRTAGGRATPTTTGPGTSCTCTGWASRSSRLPGGQSSGARSASSPLPQGKRESPVLAGRALQWWSNTAVPEDRQVVAPVDAARTWPAVPPRAGCLRGRRSERGRRGHRRALGGAHRRTPAVRVRVQDAAELRTGPRVTVDGAASAAEGRGHGGTGVRRWRPGRRPSAGAGIRASAMPSRGSPGPAGRACAAGSRWRRRWPVRRHPSPPHRSRTARRIRAAPSRTRTASGSTTSSGTDAVRPRRGPSGDPAQDLAVRDHEPAVLLLAPLPPGLADRGQLGGGRVAARHGQFRVDGRGRTVRPQAAPPGALLRGGVTPGAGRGRDVGEAGLPGPGEQPPAGVRFAAVGAGDPVVQVEPPVQRGPLGVPREGPVVAVAGGDDAAGPAHPPHLAQRLDRVADVLEHLMGVDDVEGVVGEVQGVDVGDGEPDVLQAAFGGHGAGLGQDVLGRVDRGHAAGRHQGGQVGGDGPGAAADVQDVESRPQFRQQIGRRVGGGAPGVRAQDGLVVAVGVDGGLVSRRRCGGVRHGSDSLEVGACPHRTRGGRILR

SEQ ID NO: 38222 - protein, 415 aa, unknown
  TnpB Polypeptide
MQLTKKVMLYPNHTMIKVLDDLCDYRRYCWNQGLNLWNELYKQRVKNVPVDLRKKSQLAIKNKTITFSEEEQELLRLFPSPSHRVIRNKLVANKEDWQYTLSSRVLQWAIRDLANGWSAFFDSKKPKKKKRKVGKPSFRTKKNPKRGFKTERARIKNGKLVLDKPRAYKGAWYGISFRGYDLPDGKIKHCAITKINNKYYASLTVDCPEQPLPKTGKKTAIDANVNHFDYTDGSFAVCPKQLDVLYTQIKHYQRILARKRHENGKNATQSKQYFKVKTKLQKCYERVTAIQNDLLHKFTTMIYQTYDTIVIEDLDVRTMQMSKKAKNLHRSLFGRFRLFMEYKADKFDKTLILAGQYYPSTQRCSQCGHVKTGDDKITLSGNSKHGTKHNEYICYECGFEADRDYNAVMNLLALA

SEQ ID NO: 38223 - protein, 407 aa, unknown
  TnpB Polypeptide
MIVQRTEQHQITKKHPAWKLIDDYCFRSKNLYNYANYQIRQEFIKNKKWLRYKDVFDLVKNGDDYKNLGSNLGQQTLRLLDKTWVSFFNAIKDWSKNQNKYLGKPKLPKYKDKTKGRYFLGLDNNKFHITDGYIRFSYKPFYCVNHIFRTKIPETTKLMQCRFIPHSNYYTMEIVYQIEVPETTTDSEHIASIDLGVDNFATITNNIGLKPIAVKGKVIKSYNQYYNKKKAKMQSELMVLNKKHNSKHLLKITNKRNNKVKDWMHKASKHVVDYCVMYGIDTLVCGYNAGWKQESDMNHKTNQKFVSIPFDMFVNQLAYKCQNNGIRFITTDESYTSGTSFLDYEEPVKTNYNKSRRIHRGLFKSNTGILINADVNGSYQIMKKVFPNAFANGIEGAGLHPLSTKIA

SEQ ID NO: 38224 - protein, 381 aa, unknown
  TnpB Polypeptide
MLVQKTVQMVIEPDRDLRETLDAFTEVCNRISPTAYNSGTPLNALRLHRAVYATTKGAVSSQLTCTAIRLTAGAYVAARKHGHPIHRPFHWKTPHALFLIGKRGRDASFRKDGTLSIWTVAGRKHLSYSVPEVFRETLASAVETDSVVVTVRGDRLIGHVAVTLEVPDMPGVVPVGVDLNETNAVVAVDADGRTLFITGLHRKVLNIRTRKTTSRLQVKLETKKAEGTNTRSVVRALKRLSLKRSRRTRDFCHCASKQLIEWAPQNCVLVFEDLSFSHERKTSKKRSKALNHRLSVWPRGMIRAFATYKVAGKGIIDGVDPAYTSQICSRCGLLGSRSRHSFSCPHCGHTDHSDINAAINIRNRFTALRDSGVPSTTPETS

SEQ ID NO: 38225 - protein, 317 aa, unknown
  TnpB Polypeptide
MTASPSRMPWNDWVWLDISFQAQDLDKRGLLDKDGKLDWKQCNPKLIRKGKQYFLGFAYQKNIELHDTPLASQRICAVDMGLTNSAVCAILDANGTVIARTFINQAIEKDRLRQVTGQLKQRQRQSGKIAAPRYWNRINGLQKHIKHDTARRIIAFADAHQADTIVFEYLGNFRPTKGVYGAKGHRERLHYWAKVGIQNKVQEMAHYRGMRIARINPNGTSRQAYDGSGVVTRNNKKDLATFPSGKTYQADLNAAYNIGARHFIKFLQKATPETDWLRLAAKVPSLAVRTQQTLATLITLHTEAASTGTAPVASGVR

SEQ ID NO: 38226 - protein, 452 aa, unknown
  TnpB Polypeptide
MFSAYLVKGGDSLRKTFHALTGLPPTMTKHIPFKRSAKYTENMLKRYRYRAYPKPGQVEPIAQLFGCVRVVYNDALAYAQDTYRKTGKKPSTAELSARLTQSKKTKERVWLTEVSSVPLQQSLRDLDKAYKAFFDTVTGKRKGKQGAGAPRFKKRGNRQAARFTANAVFRVRETTHRVGFVRLPKIGEVRFVLSRPLPSEPSSVTLIREPDGAYYVSFVVDVEPIPAPHPTAYAVGVDMGLKHLAATVNSEGNRTLFANPRPLHQAEKKLAKLQRQLSHKKRGSHRYERQRIRVAKAYAKVKHTRTHYLHQIANQIVDENQVIALENLMSTDLVRTHLGKSIMDAGWGQLRRLIMEKAAERGRRVVFADRFAPTTQACSVCGASEGKKPLKIRTWVCSHCNTHLDRDLNACVNIMLAAGLAESLNEQKRHVRHLLADAVVADTVNPLKAAHL

SEQ ID NO: 38227 - protein, 444 aa, Kitasatospora sp.
MDQHGTVIIVQLRYSFRLYPNGPQCSALARAFGCARVAFNDALRARETARAAGLPFVTSAELSKRLTASKETPRRAWLGEVSSVVLQQSLRDLDTAYKNFFASLKGKRSKMGPPRFKSRKDTRQAIRFTANARWKIAPGGGLWLPKIGDVRVRWSRTLPSVPSTVTVVKDGAGRYFASFIVETDPAADLVRMPDTDHVTGIDLGLTHFAILSDGTKIDSPRFLRRAEKRLKKKQKSLSRKAKGSKNREKARAEVARAHATVADARREFHHQLSTKVIRENQAVAVEDLAVKGLARTRMAKSIHDAGWSQFVTMLEYKAVRYGRTFLRIGRFEPTSQVCSACGVKDGPKPLNVRAWACGACGAVLDRDINAAVNIAKAAGLAVSACRAQVRPVLAPAQREEAGTHRDGQATVVGISGLEAGERKSTKGQCTWPTPPHPASAPSSA

SEQ ID NO: 38228 - protein, 375 aa, Kitasatospora sp.
VKRAYRYRFYPTDAQAAELSRTFGCVRKVYNMALQACTKAWALNQERVSYGATSAMLTQWKKTEDLAYLSEVSSVPLQQTLRHLQGAFTNFWQKRAKYPRFKSRKKSRKSAEYTRSAFRFRDGRLWLAKMAGRWFVSMLCDDRPAMPVPVSAAVGIDVGIISVVTLSTGEKITNPRQESKGRERLAKAQRDLARKAEGDGMNRAKARRRVARVHARVADRGRDFLHKLTTRLVRENQTIVIEDLTVRDILKNRRLSRVVSDASWTEMRSMLEYKTDWYGRELIVIDRWFPSSKLCSSCGTLQGRMQLDVREWTCGCGATHDRDVNAAINILAAGLAVAACGDGVRPQRSTPGGQSSMKQEVVPPPRSRAAGQSRG

SEQ ID NO: 38229 - protein, 280 aa, Okeania sp.
MYKSIKTKLKLNNKQKTFLAQHAGYSRWVYNWGLSLWNAAYKDGYKPNARKLREVFTNHTKPLYPWMKNLSSKVYQYAFRNLGEAFKRFFQGLGKRPRFKKKGRSDSFTIDNCGKPVELNGWSHKLPFIGWVKTYEPIEATTQKITISRQAGNWYLSLSYEFSATPTPKITDVVGVDLGVKTLATLSTGQAFPSIKPYRTAQDKLAKLQRELSRKVKHSNNWHNAVIKLARQHRRVANIRKDALHKLTTHLAKNHGHVVIEDLNVSGMMANHKLAKSVSR

SEQ ID NO: 38230 - protein, 428 aa, Okeania sp.
LLGLKSKVQKIASLKQKLKQLKNTERLHICFGSSKLFNAQHNLAENGYKTRQEWSVDWRKKRSGRFLCIGKSQPGGGTMLKVFPLQEDGKYQLQIQLPRPLQDKYGQKILLEFSVSDRNGRYRATDLDYAINSLKPITISIFRREHKQDNWYIHLSTYVPEIPVVHTRKNGCIGIDFNAELISVTYVKWDGNIEDLEEIPYKWKNQTTGQRLASMRNIVSQIVFLAEFFECAIAIESLNFSKKKSKMSEESKVYNEMLVLLATGIFRETLESRCRRFGVELIKVNPAFTSVIGMINYMAKYGLNSGTAAALVIGRRALKLSEKIPQCLLRPEDVNKHDWSHWRRVASFIKLHRIRRTQLFQGRKARLRYPQQLLTSDFVKGRATPPGNADQVFVGLLKNPWQKQLLTSDLGTSDFVQGGTSTFTASTH

SEQ ID NO: 38231 - protein, 223 aa, Okeania sp.
MKYRSGAPQYALRYLSDGWKRCFSKVSGQPQFKKKGRDDSFPAECYANTLDGSISVGFNRIKLPRIGWVKTFEILPDNVSPKSVTITKKAGRWFISFKIETASINTEKSVDVVGVDLGIKSLATLSTGEVFEGAKSYRKLESKLSRLQYLNRHKTKFSKNWKKSQLKIAQLHNTIANIRKDTLHKLTTYLAKNHSQIVIEDLNVLGMMANHKLAKAALVYGFL

SEQ ID NO: 38232 - protein, 264 aa, unknown
  TnpB Polypeptide
MLRRSVRKDRRGMQQKWVRIKEKGYIPTTKDGYVIKSGSVSIKAGRYYVSVLVEIHNNKIANNSNEGIGIDLGLKDFAIVSNGKTYKNINKSAKLKKLEKQLIREQRSLSRKYENLKKGESTQKTNIQKQRLKVQKLHHRIDNIRTDYINKTIAEIVKTKPSYITIEDLNVKGMMKNRHLSKAVASQKFYEFRAKLQAKCNENGIELRVVDRWYPSSKTCHCCGTVKKDLKLSDRIFKCSCGYVEDRDFNAALNLRDAITYEVA

SEQ ID NO: 38233 - protein, 490 aa, unknown
  TnpB Polypeptide
LAIKSGGVHVGPPIFLTKDSIVDFIKLDSKEPDPRGSKFMIAKEAFDLEGFLEIYQEDLRITTDSIFNFIKEIISNYGADNVNINPHQIKITNDDIDDYQYLGFDNKKYDFSFGVYNRKGELQKDGMPKNEWVKAKDLLDSDTVTHKKITDTSMKDMLESVLPNTGNAWRSDLVAYYIKMLKSRIRGDKFNKSSLCVKILEMTRPPQLRNETFHTKGGFKINTSKKTISIPARGVDDKGKAVRYTFPYEFTTSKLNYDGKGTGKGGNFTVTKKKNAKNNVIILAEKKDSVRFTPEDPTKWYGVDCNIKASNWLSFYDLYSQTSFKWKRGEFPQRIIDKVKELNKEIGNKDRGNIKSKHRRPKRLQVVKYIPRKLDKYITRIFTPLVKKCKATGKGLAIDGAAFGHKAGNFGQENIRRVVPKLCREMGVPCLVVPPKNTSKTCSSCGHIVTYAQNKKFHDTEVFDCPECDNVMDEASNAAKNIALYASRSD

SEQ ID NO: 38234 - protein, 373 aa, unknown
  TnpB Polypeptide
MNERLIRTISIKLDIDEYEAALQETQKAFNAAASWIASVCWEEGISNTNTAHHRVYGETRSRFGLGAQLAVCARAKAVEAIKATRVKKSETCPQFGPRGSVRYDARTYRLMSLDRVSLNTLQGRATCRLILGNRQHAMLINRTWKIGGADLIWRRGTYYLNVMQSKDAPEETETSDMLGVDLGIVSLATDSEGETYNGAQVKVVRERYHKRRQILQKIGTRSAKRRLKKMSGREKRFQKDTNHVMSKALVQKAAQSCKALALEDLTGIRERVTVRHENRYERHSWAFYQLRMFIRYKAAWAGVPVRFIDPRNTSRTCSHCGHCAKANRQSQSSFKCKQCGFCLNADLNAAINISRVARQAAYGVTSSGVDASP

SEQ ID NO: 38235 - protein, 402 aa, Escherichia sp.
  misc_feature (64)..(64): Xaa can be any naturally occurring amino acid
  misc_feature (292)..(292): Xaa can be any naturally occurring amino acid
VKRLQAFKFQLRPGGQQEREMRRFAGACRFVFNRALALQNENHEAGNKYIPYGKMASWLVEWKXLERAYKNFFRKRAAFPRFKKRGQNDAFRYPQGVKLDQENSRIFLPKLGWMRYLNSRQVTGVVKNVTVSQSCGKWYISIQTESEVSTPVHPSASMVGLDAGVAKLATLSDGTVFEPVNSFQKNQKKLARLQRQLSRKVKFSNNWQKQKRKIQRLHSCTANIRRDYLHKVTTTVSKNHAMIVIEDLKVSNMSKSAAGTVSQPGRNVRAKSGLNRSILDQGWYEMRRQLEXSGLNRSILDQGWYEMRRQLEYKQLWRGGQVLAVPPAYTSQRCACCGHTAKENRLSQSKFRCQVCGYTANADVNGARNILAAGHAVLACGEMVQSGRSLKQEPTEMIQATA

SEQ ID NO: 38236 - protein, 423 aa, unknown
  TnpB Polypeptide
MTEITLVTNCLLYEDKNKQLYNYFNDITPLFSFLVRRTIHHLKHDLNGEDLNKYRTRLKKEYQLTNRFAKAVVTTAKNTLKLSNAAGDYLHSTYATKIKKVNAKIIKTKATLNNPKTKKNRIKNLKIKLFWLQMKKNKLIQLQNNGPKPILTFGTKKLLNNNKELFLKKRDNQIVYIGDKNEHLGNQQFKLFYNKSRNKFTYKVRIEDMYIKNSKYIHGEFIIKDNVAKREILKTLKSPKSNPLSFRIIKRNEVLYLQIMYRINSENKTRNSNGVIGVDFNKGFIAISEIDQYGKLLNLDRIDYIHKGNAGVTKNSMHHLIKDLVDLASLSGKDIVIEDLKSLNKNKKEKTERKHYNRMINTLKFGKFRKFLEIRCDKLGVGLSRVQPNNTSKIANNKYCYDMKLNIHSGASYVIARRFYNLD

SEQ ID NO: 38237 - protein, 451 aa, unknown
  TnpB Polypeptide
MSSYAIKLNGDLKALEISIFIYREALHFVIPIVNAHWDEMKDFKYVNQRMAYAEKLVHTTKDNEARYHFDVKFPKFPSYLRRAVLNRAIGIVSSYRSNLANWEEKKVKLEAKGEKLPQVPLLGTRHFDYPAYYKQNLFRNFNPITQTIDLKVFKNGDWVYETYTLKTSDCTYYQKNLANKKQNVPVIKKKGRRFYAAFSYEENVPLITEENIEKICAVDLGMGTDATCCIMGDDGTVYARKFIHFSEEHDRLDTQLGRIKRNQRRGNKKNTRLWKRVSGLSQNIADKTAHAIFEFGNTHGVDAFVLEFLDFKGKHAVKLAHFWRYKRIFSVLGMKAHRHGLRIARVNARNISRLAFDGSGTVKRGWKISKETPYSIIQFSSGKFYNADLNASYNIGARYWIRHYLKPVPETERLVLEAKVPQVTKRSTCTVSHLISLRSELIALNVKRTQA

SEQ ID NO: 38238 - protein, 357 aa, Proteobacteria sp.
LVERYTDTRQQGGKWRTKAELQKEVTRQFPGLHSQSVQQTVADFCEAITSAESLRRHGEKYKYPYKKPRFRQVIFTNQGAKLRNGTLLLPCGTAGRLAVRLPKGVAIPGRLMEVRLDYGCVEIVCEIADDARAGGPIIGVDLGVNTVIAATDGAKALLLSGRAIKATLQLRNKRLAEITAKQAHQTPGSRRQRRLQRRKYRMLRHAGNTLRDLCHKATRKIAQAFPNAKAYVGEPFNDAAQTMRRKQAQTVASACNRKIIAMLNYKLAACIEVDEHHTSQTCPVCGARSKHQRTYRCQCGFVAPRDVVGSTNIRTIGLEGAMRPGCGVPNAIQWKHPSKYPGSPPGSHADTMHVARE

SEQ ID NO: 38239 - protein, 414 aa, unknown
  TnpB Polypeptide
MLLTYQYRLQPNPEQVATLSHWGELLRRHWNYALGERLDYLRRTRSLLDQCSLISEAIGDIPSKVDYYSQAANLKETKSLFPEYKDIYADCQQQNLMRLDKAWKRWLIPDKNGNRGGKPRFKKQGDICSFTFPRVNSPKAGAYEVGNILKLSKIGEIPVILHRPIPNGFEIKQATIVCKSDGWYVSFAIEDNTVPTSLPIDEIKSVCGIDVGLEKFLTTSDAQAIAVPQFYRKAQTVLARQQRKLARLEIWSKNYQQQANKVARLHLHIARQRKDFHYSVAHYLCTTYDLIGFEKLNIKGLARTRLAKSILDVAWRTFLNILQAVAVRRGKHTREVDARGTSIECFNCQERVVKDLSVRVHDCPNCKISLDRDLNASLNILKRTVGQPFAACGGLVSRQPVRQELSFVNLRSPR

SEQ ID NO: 38240 - protein, 455 aa, Lachnospiraceae sp.
MPVLTTETRLSEKEAKGIMEYARKYRADYGIIQRYVWHVIVGQKGVIDQPKLNTEIQRKFSVSKRTANSVIYDMRGRYKALKELKRTERTLYKNKILHLKQQAEKIAAAVNKLKKDAAANKLDEKQLEKYRKLKKKLYYRHQRIQKFKDRLAQLKKNIANGHYSLGFGGKKTFDSQYRLEENGYRSHEGWYNDYRRKRDRNIFYLGSKDEAEGNQMFQLRPNAEGSYDIQIRIDGKYVSDDKYVYGKCRFKYLDDELRESLRNRDRPVSYRIKIRGTKIYLQAVVTLDMSKRPIVTSMVHGAIGLDFNDGHIDLAETDGKGNLVAMDRYRLKYHGTGGRAANEMRQVTAEIGKYALSKGKSIVKEELSFARKKSQTEKGSGKRYNRMLHTLDYSRYEDDIRNMAVRNGIDLIEVNPAYTSQIAKTKYCPIRKIPVHNGAAYVIARKGQGYKDKAV

SEQ ID NO: 38241 - protein, 274 aa, unknown
  TnpB Polypeptide
VEIIGGVKLKIIGLDMRYDDYDNREARLVYRDNKMILWISKRIPKPQPYQPRDVIAIDINERKIVYRDDKINKKRDTKIDRAHRWKLLAESLQRRYSSPRYPAWRRRRGILNRIRSYHRKARDILEDWARKSALEIVELAKKLGHAVAREDLKGLINSLRRIESKDHRTRLIIMGYSRLGEWIDWQAMKRGSPLAIVDPRGTSSECPKCGSKLEENGYRRLKCPRCGFEADRDVVGKLNTRKKALKILRISGGSLATPSAPQMTDVNPNRWENR

SEQ ID NO: 38242 - protein, 430 aa, unknown
  TnpB Polypeptide
MSYGGKCGRWSVESFGMRVYGIVRELDPTPVQATALRSQVGAVRFAQNTMLAQVKQALDAKESMSWTSISLHTGWRNIREESAPWHKECSKESFQDGCSRLSQALSNWSDSKKGKRKGKKVSFPKFRKRGNRDSWSFTAGRMVNDSVVKVPRVGHVALKEPLVVPDGCRPTMWMVRERAGRWFLTVRVREESWQNPQKKPTSDIIGVDLGVGDDFAAFPNGSKITNPRFLRNDAKRLRKANKSVSRKVKGSHRRRKAVKNLQRVYFDTTNRRQDFLHKSTSSIVKSHDVVVLEDLCVSSMALRKGFRLGRSVSDACLREFRRQMEYKAEWYGTTVIIADRWFPSSQLCSTPGCAHRNKDLGLKELSWICPECGITHDRNVNAACNLQGYGVRSTAGSSLVEARGDEVRPPAVVVLVGEARNAVLSKVDRI

SEQ ID NO: 38243 - protein, 412 aa, Streptomyces sp.
MKLVVQVKLLPTPVQAAALEATLRACNEAATWVSEVAFEKGAQRNFALREHTYGQIKARWGLGAQAAQHVIKKTCDAYATLKANLRAGNLGKPGSKRYRRATQKPVVFRPQSAQPYDDRMLSWQIAERRLSIWTTAGRIKDVAFTGSREQLTTLALHRKGESDLVYRDGMWFLNATCEVPETPLNTDPVDFLGVDLGIVNIATSSDGEIMAGRQINRSRVRERALRTKLQKKNTPSAKRRLKKRRHKEARRAKDINHKIAKHMVAEAERTGRGIALEHLTGIRERVRLRKPQRATHSSWSFAQLGQFIAYKARKAGVPVVYVDPAYTSRTCAECGHIDRANRVSQAWFACRSCGFVDHADRNSSRNIRARAWELWRRGAPSTAPAPPPRQRGGAGRKRSVTASDARCASPSP

SEQ ID NO: 38244 - protein, 446 aa, Acidimicrobiaceae sp.
VTTTIETAKCATLTTVTQAYVFALDPTPEQANALRSHIGGTRFAYNALLGLVKANWDGVRAKKEAGEEVTREDYFGTYHLDHQRLWYQQRDEVAPWWSENGSSTYNYACLNLSKAFANFRAERARFPTFKKRGSSGSVSFLSKAVHLTDSHHVRVNRIGVLKTYESTRKLYRHLERGTGRIMAATVTQRGGKFIISFTVQVTKQFPAARAPQRIIGVDVGISTLYTGASTDGAQLLNVENPRHVFKAAKTLAHVQRVASRRHGPQPGIKPSNRWRKANSRVQKIHTSTANARKNQIHETTTMLAKNYDVIVIEDLNVKGLLKNHSLAKHISDAAWGKFSHQLEYKTKWYGSTLVKADRFYPSSKTCARCGTVKAKLSLIERTFACESCGHKADRDLNAAINLARLGLPGTSSGTGRGGEVRPEQQRLVATAHPDEASTEILTLVST

SEQ ID NO: 38245 - protein, 413 aa, unknown
  TnpB Polypeptide
MYLTQKNQIRGLKADEFETLKELCRLSKNLYNVGLYTVRQYYFQERKHLRYESNYHYCKGNENYKLLGTEIAQQTLKVVDRAFRGFYGLVNAVKSGTYNSQVKLPHYLPKEGYFSLIVPRVKVKDGKFRVPMSNVFKAGHGEIWIPFPARLNPDTLKEVRIHPKYNGRFFEVEFISEVEETPIENVADSAIGIDLGLDNLATCVDTNGASFILDGKPLKSFNQWFNKENARLQSIKDLQKIKGTTERQARLAINRNAKVRDYLNKAARYVVNHCIKQSIGKLVVGFNIEMKQSINIGSRHNQNFVQIPHSSFRFKLKALCERHGIKYIEQEESYTSKASFLDGDPIPVFDLDHPKEHKFSGKRVRRGLYRTEHNLLVNADCNGAANILKKSKHNVLSGVSSGCLAQPLRVKIS

SEQ ID NO: 38246 - protein, 372 aa, Clostridioides sp.
VIAVKKAYKFRLYPNKKQQELINKTFGCCRFVYNKYLAKRIDVYKNNKETFTYKQCSSDLTNLKKELKWLKEPDKFSLQNALKDLDNAYKKFFKEKAGFPKFKSKKINRFSYKTNFTNGNIMYCGQHIKLPKLGMVKVRDKQVPQGRILNATISKEPSGRYYVSLCCTDVDIEAFENTNNQIGLDLGIKEFCISSCGEFIENPKYLKKSLNKLAKLQRELSRKTIGSLNRNKARLKVARLQEHIANQRNDFLQKLSTKLIKENDIICIEDLQVKNMIRNRKLSRLISDVSWSEFIRQLEYKANWHGRQIVKVGKFFASSQICNKCGYKNEEVKDLNIREWICPSCNETHDRDINASINILKEGLRLITIQNK

SEQ ID NO: 38247 - protein, 263 aa, unknown
  TnpB Polypeptide
LTFSWSHSWFSRRVKGLELGEPVIKEDKVHLPFRYRLPWFTPLDFLAIDSNLYTLDAYDGEKFVTFSLRELYSLKYGMELKRGEIQRFASKHGRKGELLSRKYSHRERNRVRDYVHKFVNHLPEMYPVTTFAVEKLNKQSMFQDADEELSKKISRTVWRSIHRVLKYKAPLYGSLVKEVNPRLTSKSCPRCGRVSRKVGGTFRCERCGFTPLGRQLNASLNIFLKMCGFPHLFLTGSRWVGVTPLRGRRGVNGFPRDPVKPKG

SEQ ID NO: 38248 - protein, 420 aa, Okeania sp.
MTLTINYTYRIYPNATQQQLMLRWLETCRQLYNRCLRDLKDWMNSRKCQIDRCSINREYIMSPDIPFPGYIEQKRQLTQWKKKDAQLKAVHSQVTQDVVKRLHNSWEAFKHRGHGFPRFKKYGRFQSFLFPQFKTSPIVGNQIKLPMIGFVNINLHREIPDCFKVKGVRVVSRCRGTKWFVVLTIQADVSVPDTPSYGRAIGVDVGLNDFLATSDGLRISRPRFFVDLQSQLKLLQRRASRKQKRSKNWEKAQIKVARLHHKIDNTRKDWQLKIAHSLCDQADSIFVEDIDYRVMAKGFLGKHSLDASFGQFRELLKWVCWKRGKFFATVDHRGTSKQCPECGSEWDNNLSIRWHTCTECGYSNNRDVASAKVICNRGTNQYPGITGERKPPAESVLSGIFDLDKCYAGTLNCEVEKPAP

SEQ ID NO: 38249 - protein, 653 aa, unknown
  TnpB Polypeptide
MDGNENIPTDFFKGIKISLKNVLKHPDINLPKITNAVIQCNKIVINVLMFMKLYLLDYYNIHNALPNIDKVFINSCMKILCNEKATGRPPKKEIKDLKDTLTTFYNTHFKSLIKDEQLEYTHMNTILDYLTIDILTMYENNIKLHYVEYVERYVNVIWKKAFLISKIRKMNITKQEKDIKINKLCNQLRKIKTDILNVETSEYKSHNMYHKWIKEQKNIIVPIKQFKKNLYYDLQCTPLEYFPCMIFMMKQVEKENQTTLNVFPMRNEVIPKHIRLDTTTLVHLLMTKTQGNKCEYLTNGNLKRNENKIWKFFFRVERKCFHKKHYEFHHMIETDGISCSLLLLRKDLVGKRLPNMKKGLNNEEYIDELKDYSQLQNKKIVGIDPGKCDLIYCVDNDNKDANHFRYSQDQRRKETKKKKYSKIQLELKQEIINGKTIIEWETELSKFNRKSLDIGKFKNYIQKKSEINNILFNFYEKYIFRKLKLQSYRNIIRSEQKMINHFKKIFGNENDVVVCFGDFEQKQHIKFKEPIKGKGIRTLFRKAGYNTYLVDEFRTSCRCSNCEIGICSKMMIRENPRPFRTGNILVHGLICCKNKRGYWNRDVNGATNIYKIAYNAINNIERPNYLSRNKNSSADLDESAKPKFTRSETGKPY

SEQ ID NO: 38250 - protein, 379 aa, unknown
  TnpB Polypeptide
VVRTYRYRLYPNKTHQAALGNVLFAACALYNHALAYRRKRWNESRRGVWYNEQAGMWRDWRNEDPADNPLRLLNMSAGQQVLRRLDSAYREFVKGKRGRPRFRRLDHFNSVAFKPGDGAALKGGRLYLQNVGSVRVNWHREVPEGELKHIIIVRKPSGWYVCLQVEMQKNIPAHSLNPLVGVDVGIAHALVLSDGTVFDNPRPLQGSLPALRRLQRSVARKKRGGSNRKRAVLKVARLREHIANQRRDFWHKVTRGLVTTYGTVVLENLSLSFMLQNRALSQASHDTGLGMFRELLDYKAVEAGVEVIAVYPRNTSQVCSACGSIVPKVVCVRVHSCPDCGLVLDRDINAARNILRLGRSRWGVTWPVAASVPQDALRL

SEQ ID NO: 38251 - protein, 437 aa, Moorea sp.
MVEDMMAIIHCFSCRLYGLRRYIQPIQENIDKNLDNPDNSPKVGSEVQIMVEIPMYAIKRELKVNNTEANCLDQCAGFSRFVYNYGLWMMKASWEFDHVKASDSKRLNAIKKVFTNVTKKSAEFAWCNNYPSRIYQNAFRNLAKACSRWRDRLLKAQMPKFKKKRHQCSFTVDDCNGKRLLKAGKQINIPTLGWFSIIGGDPLQLYFPNLGLWPRYANTISREAGKWFVSFKVDACPVPGMKHTHQKVGIDLGVKCFATLSDRTKIEKPESIKKAKTKLSKLQWHNRKKVLGNGQTLTKPSQNALTYYARLRKQHKHLANIREDFLQKETTRLAQTYQEIKIEDLNVLGMLANHKLGSAISLLGFHRFRELLTYKQEFHGFKLTLVDRWFPSSKTCHKCGYKQNMPLKERVYICGGCGNVEDRDLNAAINIEGWEPR

SEQ ID NO: 38252 - protein, 313 aa, Crocosphaera sp.
MKSLLFPQFKNPPLQLPSQEGLGVGGWQIKLPKLGKVQINLHRPIPDGFVIKQIRVVKKAMGWFAVIIIQSDINLPEVNAPFGHPLGLDVGLSSYLATSDNYVEKGRKFFKSEQRKLKLLQRRLSRKQKRSKNYEKARKRVEQQHNHIAFKRKDYQFKLAHKVCDMGDSIFMEDIDFRTMAKGFLGKHTLDASFGQFRDILKYVCLIRGKYFGLVDHRGTSQTCPNCRTEVRKTLADRTHYCPECGYRCYRDVASAQEICNRGIETTTLGLRGKETVCQVEVSGVMSLDNWRRGTPLWAEISRRESGSPRYTA

SEQ ID NO: 38253 - protein, 431 aa, Crocosphaera sp.
MTLTLNYTYRIYPDNKQEAILSEWLEICRRSYNYALRELKDWISSRKCLVDRCSLESEYIMAASYPFPSYHQQQNQLPKAKKVYPELAKVPSQVLQTNVRRLHDAWDFFRNRGFGFPRFKKYGQMKSLLFPQFKSNPLTGWQIKLPKLGKVQINLHRPIPDGFVIKQVRVIKKAKGWFAVVSIQSDIILPEIEILFGHFLGLDVGLSSYLATSDNYVEKGRKFFKSEYRKLKLLQHRLSRKDKRSKNSEKARKKVEKQHNHIAFKRKDYQFKLAHKICDMGDSIFMEDIDFRTMAKGFLGKHTLDAGFGQFRDILKYVCKVRGKYFGLVDHRGTSQTCPNCRAEVRKTLSDRLHVCHECGYGVDYPVDRDVASAQEVCNRGIETTTLGLREKETVCQVEVSGVMSLDNWRRGIPLWAGISRRESGSPTHNL

SEQ ID NO: 38254 - protein, 469 aa, Crocosphaera sp.
MILNYQYRCYPETPQKSQLNSWLRVCQYWYNWQIGDRFRWWDRNRTNYVIPSGEFCCISCSLPPLELRDKPTFYSQKKLLPEKKKDLKIVKHSGELLDFSIVPSQTLQDVSKRVKLAFDRYIKGDINGSRSGKPRFKNRYRTLKIEAQAIKIKRIEKNWFYLSISKLGGWLKIRLHRPLPQGFSLKNILITRKADGWYCTMCLDDPSVPKISKDEIIPSWDNSMGIDAVLFEDNYLANSEGNKLPSVKSYRKNQTKLAKISQRKNTKEKGSKARRKLAKREARKHQQIARARKDHAYKMAHSLVHSDKKVFFVENLNLQGLRKRNKTKKDHQGNYLPNGQSAKSGLNKSWSDASFGQFFDIFSYIAEKAGAVVKKVNPAYTSQLLPHRDEFVFTDCSIRKYWDEIEKNWVDRDISASINLKRVGLELFPTINRRSGKIVKSQTNSTAKEVLAVLKRIPEAYALSLDERR

SEQ ID NO: 38255 - protein, 366 aa, Crocosphaera sp.
MLTMTYEFKLQPTPEQIAIIEQTLDVCRSVWNFALRQRKDWCASRKSPINACSLNCEYIISADAPFPNYHRQAKQLTDAKKQYPQLNTVHSQVLQQTLRTLDRAWDDMRARGFGFPRFKNKYRLRSFVFPQLGKDPIRNDALKLPKLGWVEWRLSRPIPEGFEVKQARVVRKASGYFVGLSLQLDVDVPSPLTPLSKGGMKGGIGHPRGLDLGFEKFVATSDGEEIKRPRFLTTLQRKVELLQRRLKNKEKGSNNRHKLNQKIARLHQRITDTRKDWHFKLAHHLCDGVGMIFVEDINFVSWQRGMLSKHSADAGFGQFFNILEWVWLSRDVYFAKVNKDGTSQTCPNCGAHTGKKTLDVRVSPLS

SEQ ID NO: 38256 - protein, 460 aa, Crocosphaera sp.
MKYTYQYRILPTTNQKITLNRWLRVCRFWFNRQLGERFQWWEQNRCAVNSCPLICHLPELKEKPNYYSQKKQLPILKKDVVTVQWSKEKLDLSEVPSLTLQEVCKRVDKAFSRYISGDSNGKRSGKPRFKSSNRFRSMVFEGGGLSIHSCSVGKKYLYLKTPKIGLIKVRMHRYLPDGAILKQAQIIKKADGWYVNLRLDDPTIPKFNKDKIVANWDNSTGLDAVLYEDDYLATSDGKKLSSLKSLRKSEARLAQISQRKANKKKGSKSRRKLAKRESREHQRIARARKDHAYSTAHKLLKTGKKVFFHEKLNLKGLSRKNKPVQDDNGKYLPNGQSAKSGLNKSWSDAAFGQFFSIFNYIAEKAGVAVIEINPAYTSQLLPYRDEFVFTDCSIREYWDEIEQVSVDRDISAAINIKRVGLDEFPTIKRRKGKIVIVDSTTHLTSKEVLSVFRGLEKPAL

SEQ ID NO: 38257 - protein, 475 aa, Crocosphaera sp.
MIIAHKYKLKASPSQEIIMTNWLSMLRSHYNFCLRDRIEAYEQVKSPKLGNYSDLKTKAPCCPFTCSISPQSQLGEPFKKSGKKRNAYEMQSSELPFLKQARPWYKNIHSTVLQQNLRRLKTAFQNFFDGRGYPKFKTRQRFKSFSYPPNQVKLELNKIYLPSIGWMRFFKSRNIPDGFQLKTVTVRSLADDWYVSIRIENKDVPQSSPKDLKQIKTAISGDLGIKKLLALSNGELIKNPQFEKRLSNRKAIRQRRASRKKRGSSNQKKAYTKLARIDQKIVNQREDYQWKVAHHLVRLSDVIILEDLNIQGMIKKCRAKQDENGKFLKNGQSAKRALNRLIRDCSWGNLIEKIESVAAKFGSICLKVNPKFTSQKCSHCGHIQKENRNKERFLCLNCGFLADADVQASVNIGTKGLETLGISQSRLLMVNQKVTPKPELTGSSHRETSVSLEIEPGNPQQLSLFEWVNGEVIPC

SEQ ID NO: 38258 - protein, 404 aa, Pusillimonas sp.
MQRLQAFKYELRPDGQQQRQMRRFAGSCRFVFNKALALQKTRYEQGEKKLGYAGLCKELTAWRNGSETPWLKDAPVHPLQQTLKDLERAYANFFAKRADFPRFKKKGQCESLRYPDPKQIKLDQGNARIFLPKLGWLRYRNSREALGTVKNVTVSLSGGKWFVSIQTEREVEQPLPQSTTAVGIDMGIARFATLSDGSHLEPLNSFKRHETALRKAQQAMSRKTKFSNNWKKAKARVQRIHSRIGNTRRDYLHKATSTISQNHAMVCIEDLQVRNMSKSAAGSTEKPGTNVRAKSGLNKAILDQGWFEFRRQLDYKLAWNGGYLITVPPQNTSRTCPACGHVSKDNRQTQAQFACGECGFEENADLVGAINILRAGHARFACEVSDAVRSPAAGTRRGESVPAD

SEQ ID NO: 38259 - protein, 245 aa, unknown
  TnpB Polypeptide
VRVVPRMNHYVIEVVYQVKEKTHCDNGKCAAIDLGLNNLATVVFNEGSKPLIVNGRPLKSINQYYNKKKAKYQSRLKENKRTSKRICTLTNKRNNKVTDYLHKASRLLVNQLVSQGITTLVIGKNKNMKQDINIGKVNNQNFVQLPIMRFADLMKYKCELEGINVVYHEESYTSKCSFLDGEPICKHDKYMGKRVTRGLFVSRSGIKINADVNGAYNIMIKAIPNAFANGIEGVGVHPMVLTIKE

SEQ ID NO: 38260 - protein, 410 aa, unknown
  TnpB Polypeptide
MKTKKTYKYRLYPNREQRSILEEWLEVCRVLYNDCLTERRDAWQSCKKSINYYDQANQIKEIKTFDSDIKSIHSQVAQDVLKRVDKAFKNFFRRIKRREKAGYPRYKPKQRYDSFTYPQSGFESSENGKKLILSKIGSINIKQHRAIPESAEIKTCTIERDLDRWYACFSVEVEIEDPDQNKKITLANPTGIDLGINHLLTLSNGDTEDNPRYLSKSERKLARKQRKLSKAKKGSNNRIKRRFEGAKTHRKVREQRSDLLHKISCKLVNTFDLIVFEDLNVKGMLKNHHLAKSISDVSWSQLTNFVSYKAEEAGRRVEFVNPKNTSQECSNCGEIVKKSLSQRVHKCPFCGLVIDRDKNAAINILKKGLQKSSIFEQLKNVGQELSELKHEDFSNQREERYRKLLCLSME

SEQ ID NO: 38261 - protein, 387 aa, unknown
  TnpB Polypeptide
MINVEFLTTRGESTIVNIQNNKPNPTILKSFKYRLYPNKNQTKTIDKTISLCHFLYNVMLEHRKTCYKRGKSINKYDQILELPSIKKEFPEYNDIYAQVLQNVVNRLDRSYQNFFRRVKHGEKPGFPRFQSYKKYNSFTYPQGGFWITDNNKLRLSKIGDIKIKLHRPIEGKIKTCTIVCKNDKYYACFSCEIEAKPLPKTNKVIGIDLGLKEFAITSDGDKYENQKYLYKSEKRLVQLQRSLSRKKKGSNNRKKAKLRVAKLHEKIANQRKDFLHKLSTKLIQENQIIAIEDLKVKNMQQNHKLAKSISDVSWYNFREMLEYKANWYGRKIVFTDQYFPSSQLCSVCGYQNKDIKDWSIREWTCPQCGEYHDRDINASKNLLKIAS

SEQ ID NO: 38262 - protein, 458 aa, unknown
  TnpB Polypeptide
MPHYSILTVELNHNNHGIERVIRDTVGLFRDAVKFLGPIILTHWEDIRIKNKQEQLGVVEELIHTTKNHHAVYPEFDEKFYKFPLYYRRSAINFTLGQVSSYLTRKKEYEAKRYNAISNGKHFREKAPILQLDTVAWPSMYKNQMYFREGETSLCLKVRIRNTWDWIRLNISGRDRKSIEKTLAAGGKLSSPQLILKNKKVYLQFPVVHSIVDFPDTELPEQKVLAVDLGINHGAVCSVVDARGTIHGRFFDPFNRERDFILHLLNKIRKVSYSSGKGQSLAAIYTKLDGVKGNYVRQLAHWIVQTAREQGVYGIVMEYLGPMKGRGRKRDRIHHWCKKKIFDFVNGLALRYGIRVFRVNPCNTSALAFDGSGPVSRNEKNFSLCTFANGKQYHCDLNASYNIGARYFLRAYQKAMLVTAWSECMAKVPALSKRTDGTLCVLREFSKLLTPELLSNAA

SEQ ID NO: 38263 - protein, 346 aa, Escherichia sp.
  misc_feature (95)..(96): Xaa can be any naturally occurring amino acid
  misc_feature (111)..(111): Xaa can be any naturally occurring amino acid
  misc_feature (180)..(180): Xaa can be any naturally occurring amino acid
  misc_feature (210)..(210): Xaa can be any naturally occurring amino acid
  misc_feature (241)..(241): Xaa can be any naturally occurring amino acid
  misc_feature (256)..(256): Xaa can be any naturally occurring amino acid
  misc_feature (329)..(329): Xaa can be any naturally occurring amino acid
VKRLQAFKFQLRPGGQQECEMRRFAGACRFVFNRALARQNENHEAGNKYIPYGKMASWLVEWKNATETQWLKDSPSQPLQQSLKDLERAYKNFFXXRAAFPRFKKRGQNDXFRYPQGVKLDQENSRIFLPKLGWMRYRNSRQVTGVVKNVTVSQSCGKWYISIQTESEVSTPVHPSASMXGLDAGVAKLATLSDGTVFEPVNSFQKNQKXLARLQRQLSRKVKFSNNWQKQKRKIQRLHSXIANIRRDYLHKVTTXVSKNHAMIVIEDLKVSNMSKSAAGTVSQPGRNVRAKSGLNRSILDQGWYEMRRQLEYKQLWRGGQVLAVPPAXCPGKIRFKPFDTGSGLV

SEQ ID NO: 38264 - protein, 314 aa, Kurthia sp.
VSVYVHELVDIYNAQRNLEKAYKNFFRDQSVGFPRFKSKKNPIQSYTTNNQKGTVTLIDGKFLKIPKLKSLVRIKLHRQLKGEIRSATITRHASGVYKISLLVKEEIIALPKTNSAIGIDLGITDFAILSNGQKVDNHRFTLKMAQKLKREQRKLAKRRLVAKKKGIDLIDSLNYQKQKRKVAKLYDKIVNQREDFLHKLSTDIIKNHDVICLEKLNTKGMMKNHKLAKSIADVSWSSFVQKLQYKADWYAKTIVQIDTWFPSSQLCSHCGQNDGKKGLSIRQWSCTNCGTQHDRDINASINILNEGLRLHTLG

SEQ ID NO: 38265 - protein, 258 aa, Kurthia sp.
LIDGKFLKIPKLKSLVRIKLHRQLKGEIRSATITRHASGVYKISLLVKEEIIALPKTNSAIGIDLGITDFAILSNGQKVDNHRFTLKMAQKLKREQRKLAKRRLVAKKKGIDLIDSLNYQKQKRKVAKLYDKIVNQREDFLHKLSTDIIKNHDVICLEKLNTKGMMKNHKLAKSIADVSWSSFVQKLQYKADWYGKTIVQIDTWFPSSQLCSHCGQNDGKKGLSIRQWSCTNCGTQHDRDINASINILNEGLRLHTLG

SEQ ID NO: 38266 - protein, 379 aa, Kurthia sp.
MLRHKAYKFRLYPNVEQEILIAKTIGSSRFVYNHMLNAWNSSYKETGKGLSYGKCSAMLPAMKKSDDTSWLREVDSVALQSSIKNLAESFDRFFKKQNQSPNFKSKKNPVQSYTTKNTNNNLAIVDHKLKLPKLGLVKFSKSREVSGRILSATIRKNASGKFFVSLLCEEEITELPTTNKAVGIDLGITDFAILSNGQKIDNHKFTSKMETKLKREQRKLSRRALLAKKKGINLFEAKNYQKQKRKVAKLHEKVMNQRADFLNKLSTDIIKNHDMICMEDLNTKGMLRNHKLAKSISDVSWSSFVAKLQYKADWYGREIIKIDKWFPSSRICSECGHKDGKKALNIRDWTCPICHVHHDRDINASINILTEGLRLHKLV

SEQ ID NO: 38267 - protein, 362 aa, Betaproteobacteria sp.
MPTKEQTVALRETLQRANEAANEISRLAWESKTFGQFKLHRLVYKAIREQFGLSAQVVVRLIAKVADAYKLDKHKQRVFRKDGAIAFDDRILKYNREDVSIWTLNGRQKIPFVAGAQQKRLLHSRQGESDLVLREGKWFLFAICNVIEPATDDDPEGMLGVDFGIVRVATDSDGQSFSGAHIKNLRARHRKLRAKLQSKGSKSAKRLLRKRRRKESNFAKDLNHQISKAIVKKAKDTNRGIAIEELTGINARTTVRKVNRAERLSWAFADLRTKIEYKAKLAGVRIVVVDPRNTSRTCSACGFVHKSNRRSQSVFQCQQCGHRRNADTNAARNISSRAMSISQTRSKSSLDSEPQAACFSGR

SEQ ID NO: 38268 - protein, 365 aa, unknown
  TnpB Polypeptide
VECAYKYRLYPNKQQKEIIGKTFSCCRFVYNKYLAMRIDKYKDSKESMSYVQCANDMKNLKSELEWLKEVDSTSLQSSLRDLDMAYQKFFKEHSGFPKFKSKKDNHRSYKSKYTNENIQYLGKYIKLPKLGYVKTKNKLVPQGRIVNATISKEPSGKYFVSLCCVDVPEKEYEQTNNAIGIDLGLKEFVITSNGEMISNPKYLAKQQKKLAKLQRQLSRKSKGSSNRNKARIKVSRCYEKIATQRKDFLQKLSTKIIKENDIICIEDLQVKNMIKNRKLAKSIADVSWSEFVRMLEYKARWYGKEIIKVDKFYPSSQICSSCGKSTGRKTLDIREWDCPYCRTHHDRDINAAINILNEGLRIRVA

SEQ ID NO: 38269 - protein, 376 aa, unknown
  TnpB Polypeptide
LARWISGYAAIENNPFADGEIILKMVIQGAWYRLIFNFDNKRFREGKVTLPVIKVEDGQSIFIFTVVTDNPVVQFSGDYTIGVDVGINNYATVVVRETKTGRIVYETTLSQRVHSLWNSVRASELQVRYLRKKAATLLRDRQARMSALDEAQLHREAASRKKRELAILVAQEIAYLAHVWGNAVVAVEDLSWIVNTMQNGRWNRGELVKWLTHYVSQNGGWVVSVNPARTSQLCYKCGSKVAHPTHKDSVCPEHGVMDRDVNAAANIAARTISRVTKARVTRAKNRKLRQQAPLRTPIARNSLKYPGRDRTKNKPTPRRKNRSRVFGEVILPVCPARAQAQRLEARVLADGGTHRVAGTSQAALKQACVTYRCMLL

SEQ ID NO: 38270 - protein, 493 aa, unknown
  TnpB Polypeptide
LVSLASEVRDVSAYATYVVRNDEALADELARITAVQPAEAGRQAGVTMPDFLATGKSGRSRKEKLVQYNVVTAYRSYEEQVKAASGESFKYVSQGWKRTVNGSAPSYGEDYVNLGAVDRQYAAVENNPFADGEIVLRMVIQGAWYRLIFAFDNKRFHDGKVTLPVIKVEDGQPVFIFTVVTDNPAVQFSGNWVIGVDVGINNYATVVVRDVKTGWIVHETTLSQRVVHSLWNSVRASEQQVIYLKKKSDRLLLHRQARMSALDEAQFHREAASRKKRELAILAAQEIAGLSHVWENAVVAVEDLGWVANTMQNGRWNRGALVQWLAHYVSQSCGWVVDVNPANTSQMCHKCGAKVSHPTHELSVCPEHGEMDRDVNAAANIAARAVPRVVKARATRAKNKKLRSQPPLRTPVTRNSLKYPGRDRTKNKSTPKRKNHRRPVREVILPVCPARAQAQRLEARVLADQDTRVALGTSKAALKQGNTAYKCRLCSLI

SEQ ID NO: 38271 - protein, 219 aa, unknown
  TnpB Polypeptide
LSIVSQANIRRRYCSSTRHKRPNLSPPVSFVGLDYSSRELYVSSDGEHANYPRFYRQMEPRLAREQRKLSRMTRGSRNWSKQKRRIAKLHAKVRNRRVDFLHKTANRLADQYDCVGVEDLDMRALSQTLRLGKSTLDNGYGLFRSMLANKLERQGKQLIVVDKWFPSSQMCSNCGHREGATKDLSVRNWSCPVCGVWHDRDLNAATNIMREAQRLSREQ

SEQ ID NO: 38272 - protein, 433 aa, unknown
  TnpB Polypeptide
MGSYEAVKVRLDPTPRQERLMASHAGAARFAYNAGLAHVKEALDNGEPADWSHYDLRRWWNENKDELAVNKTTGEVWWSQNSKESYSGGLRSLAQGLSNWSKSRKGQRKGKRVGFPRFKSKNTVMRFAYSTGFTAPTAGDPYGLKLPRIGRVHCMENVYDRVNGARLVRITVSRRAGNWCASLTVEREQPSSPAHTLKRGAVGVDLGVKNLATLSDGTVIPNPRALGARLKALRKAQKALSRKVKGSARREKARERVARLHARVADVRTDAIHKATTMIAQTYGTVCIEDLNVAGMVKNHSLARSLSDASLGEFRRQLEYKTARTGAVLCVVDRWFPSSKTCSNCGTVKAKLSLSERTFNCDNCGTSIDRDLNAAINIEVAGSAPEMLNARGGDVRRTVGNAVPGEARTKQAQKSAVRLGAGLGNEAMRPRIN

SEQ ID NO: 38273 - protein, 385 aa, unknown
  TnpB Polypeptide
VEAVRTISLKINPPKEEYLLMMEDGKKLFNDYTKWCYENGTYNKNKIHKAVYHQFVEKYPNVKVALQQSIRDVASACCKREKLKGKPPIKKSLTLSLSKHAFTLRGKQLTLIGIEKRHKEILHVPEYYLEVYQTWNQRSASISYDKKKKQFWLHITFKSPEKIKQISNIKNEKVLGIDRGIYNPIVTSDGSFVGCGKDMRRIKNNYQYLKSQLQKKGTRSAKRKLRKISGKEKRFVSDFNHRISKEIANSTYQVFVLEKLKNIKKTKYSKKFNKKIANWSYFQFELFLKYKAESLGKHIVYIDPAYTSQECSCCGKVLKSNRNKNQYKCECGFEEHADINAALNIKNRFLNSQESLKILGAVVNHPNDSKNYSLDSSPHACHGGN

SEQ ID NO: 38274 - protein, 375 aa, unknown
  TnpB Polypeptide
MRLTIQLKLQPTPEQADALLRTLERANEACNAISRTAWETKTFRQFAVHALVYQSVRETFDLTAQMAVRCIAKVSDAYKLDKKVMRSFTPHGAIAYDDRILSFALPKSEVSMWTLDGRQAIPFVCGERQRQLLTTRRGETDLALVNGEWRLLAGREVETREPIDVEGVLGIDLGVTNIAVDSDGETHSGKAIKNVRYRHRRLRQKLQRLGTKGSRRRLKKLAGQERRFATWINHNLSKRIVGKAERTKRAIALEDLTHIRSRVRVRRSQRATLHSWAFVQLRAFLVYKAALAGVPVSFVDPRNTSRTCPACGCIDKANRKTQASFLCISCGFAGPADTIAAGNIARRAPVSVPCCSDASPRVGSARAKPTSFSGG

SEQ ID NO: 38275 - protein, 397 aa, Gloeocapsopsis sp.
MLKVVKIRIYPTKEQEISLAKSFGCTRWLWNRFLAQNNEVYKETGKGLSRYDYQKQLPKLKKEFDWIKETYSQCLQVVCLNLSRAFINFFEGRARYPKFKSKHGRQSISYPQNVLLQGDYLKVPKIGDIYALIHREITGKLKTVTISKNPDNKHYACLLLEDDSEEIKPSTEGKAIGLDLGLTDFVVTSDNSKIKQPLWMKQRERNLKRKQQKLARKVEGSKSREKARVLVAKTHSKVARCRGDFLHKLSRKIVNENQVIVVEDLHVKGMVCNPNLSSSISQVGWGTFCTMLKYKAEQEGKVYLEVNRYFPSSKTCHVCLNVVDSLPLDVRSWTCSCCNTNHDRDVNAAINIRNEGLRILASGTGVTAEGGCVSPKRGRKKSTVGQQPVNSEAYAIA

SEQ ID NO: 38276 - protein, 368 aa, unknown
  TnpB Polypeptide
MRAYKYKIIASKRIAQIFERTLGVCCDLYNAGLQHRRDAYRVAGESVSYAEQCRELTDVRAADLEVAAVYSQVGQDALRRLNKAFLGFFRRVKAKQTAGYPRFRSRSRYDSFTYPQQGFSLKGDKLTLAKIGSCRVRLSRPLEGTIKTCTIKREADGWYVIFAVEESQCRYLPKTGKSVGVDVGIESFATLSTGAKIENPKYLRQAERRLKTAQRSVSRKKLRGGNRRKAIQLLATQHLKVKRQRHDFFHKRSLDLLREFDAFAFESLNIAGMVKNHHLAKSIADAAWNTFLNIHIAKAENAGRLVGLVKAAFTSQDCSRCGNRVRKSLAVREHRCIECGLVLHRDHNAAINIEGRAYPLVIAEPSAR

SEQ ID NO: 38277 - protein, 509 aa, unknown
  TnpB Polypeptide
MFTMRKNEIPFYDYLEPSIVKAYHSNSLVKPFWNKKIQQLSDKLFLPSHDNLYQIKNKIKTFNYLNWFNVEQYSGFDKEFYNLKTKDHKNEPKKIVKCKQIKLFLNLKQREYMIKIIGIYRYFYNRCVSYLNNYDKNTRTSWFYVDPNKKTRKINVIVDVNNNPYNIIAMRQYLVDDWPEWILEGYPKHLIREAQKEAFQRFQTCLDQCIKKHIVFDFKYKSKKEIIQTINLDKQMISTKKNGIFTSWKIENAYMFKYLKTSEKIPSNFVGSNISYHRILKTFMLNLNYNSMSTTTKNKEVCAIDQGIKNPFTIYAPNKVIIIGNEASDKLYKLCKEMDIILSRMNSETYYKKHKMEDNQIVKQYYNVNSKRKSQLRKALHRKIQKVKNLVKELHYKTIKYLCDTFKTIILPPFETQKMAGKLNNEMCRKMFTLSFYTFKMKLINKAKEKGVKIHHLNEPYTSKTCGKCGNVKHNLKNDNVYVCNICNLVISRDINGARNILLRNAHLI

SEQ ID NO: 38278 - protein, 419 aa, unknown
  TnpB Polypeptide
MDLNQYIVICFVVHVRRQRNALILPLRILHILQSVWNNIGMDRTVQVRLLPTDEQASTLKETIQQFTESFNTVCRAGWEKSETNSYNLHHFTYRACKTALPQLVSDLHIQAIRKASESLKSANALIRKGRKVSCPQSNSCPPRYNLHTFKVYWDKVIISMSTTSGRIKIPFKIPEYARYVIGQPIATADLIYRKGKFYLHVVVKLSDVAFVSNGQAIGVDLGVVRPAVTSDNRFHGNRHMKEVTKRNLRLRRALQANGSKSAKRHLRSLAGREARFRRDCDHVLSASVLHDIEIGTTIVIENLTNIRSRVKARRGEAKRRLHSWSFAQLKGFLEYKAEALGCQVIAIDPRHTSQRCSVCGFTYRGNRRSQSDFLCRSCGFHINADLNASRNIRDKYLVGWGISPSDALPPTSVSSHPPR

SEQ ID NO: 38279 - protein, 421 aa, Okeania sp.
MLNLTYEFKLKPTPQQAQEIERILEVCRRVWNYALAERKDWIRSRKSPINACSLFAEYIIPADQPYPNYARQSQALTKAKKDYPELKTVNAQALQQVLKTLETAFVDMKRKGMGFPRFKKARRMRSFVFPQMLKNCVQGIYLKLPQLGRIEYIKSREIPEGFRVKLARIIRKAGGYFVALCLECDVDVPDVPPHGYPIGIDLGLDKFLATSEGELIKRPRFFNSLHRQMKLLQRRLKKKQIGSNNWQKLSKIIARLHETIANTRKDFHFKLAHHLCDQAGMIFVEDLNFQAWAKGMWGKHTLDAGFGQFVTILQWVCWKRGVYFGKVNKDYTSQICPNCNAHTGKKKLSFRVHSCPECGYTIHRDVASALIVRNRGVSEVGRILDVKEVAWGGDLTGTRNGLVKSLRNRKKGGEAWIYPAS

SEQ ID NO: 38280 - protein, 427 aa, Okeania sp.
MRTAYQYKLRPNKKQIATIEMWLELLRRQYNYRLGERFSWWSENRCPVNACPLVMPIPQLREIPDYYSQKRDLVNTKDKFPEYKLIHSQVCQDCIKRVKLAFDRWFKADKNGHKLGKPRFKGKGRYRSFTYPQIKLDCIQGNKINLPKIGNIKLIKHRTLPDDFQIKTVTISRKADGYYVTLSLEDKSFPALSCEVEPTLKNTLGIDMGLKEFLVTSEGESVPIPQYYRKSQQRLKTQKKRLSRKKKESKRWLKAILAVAKQHKKVSDKRKDFHFKTANELLSKADVIAHENLNIKGLAKTRLSKSINDAGWGQFLSILTVKAVSAAPPQEANAGQKTIGVNPKNTSQDCSNCGEKVNKELNIRTHSCPHCDIVIDRDLNAAINIKNRAVGHSVLKARACPTEYRGWETRSPHYSASKRVGVCHQSS

SEQ ID NO: 38281 - protein, 312 aa, Okeania sp.
MRTAYQYKLKPNKDQTATIELWLELLRRQYNYRLGQRFSWWEENRCPVNACPLITSIPQLKDNPDYFSQKRDLVNTKDKFPEYKLIHSQVLQDCIKRVKVAFDRWLKADKNGQKLGKPRFKNKSRYRSFTYPQIKQDCVVNQRINLPKIGNVKLIQHRPLPEGFQIKTVTISRKVDGYYVTLSMENKLVPSIISEIKPTSENTLGIDMGLKEFLTTSEGESVPIPQYYRKSQQRLKTLQKRLSKKKKGSKRWLKAVKALAKQHKKVADKRKDFHFKTANELLSKANVIAYVDAERRAGGKLKYQRAGENQIE

SEQ ID NO: 38282 - protein, 235 aa, Okeania sp.
MVKPNNCWYYEVSKCAPQYALRHLSVAWKRCFSKVSGQPQFKKKGRDDSFTLDGSITVGFNRIKLPRIGWVKTFEILPDNTHPKSVTISRKANRWFVSFKVEREPQSTEKLVDVVGVDLGIKSLATLSTGEVFVGAKSYKKLEAKLSRLQYLNRHKVKFSQNWKKAQLKISQLHNRIANIRKDTLHKLTTYLAKNHSQIVIEDLNVSGMMSNHKLAKAVADMGFYEFRRQARVQV

SEQ ID NO: 38283 - protein, 292 aa, Okeania sp.
SIKYKTTGWKLLNPKTINFSDKKRIGILKLKGIWDLGYFNESDIKRVRLIKCADGYYCQFVLYCQIKEEVKPSGQCIGLDVGLASFYTDQNGNKIDNPKFLRKSEKRLKRLQRRFSKKKKGSSNRKKARARLAKVHLKVSRQRKDFAVKLARCVVHSNDVIAYEDLRIKNLVKNHCLAKSINDAAWYQFREWIEYFGIKFGKITIAVRPQYTSQNCSQCGEIVTKSLSTRTHSCSCGCVLDRDENAAINILKKGLSTVGHTGAKVWGENASTLMEVILSKQVVSMNQKSTRQ

SEQ ID NO: 38284 - protein, 263 aa, Okeania sp.
MYSCQQVLVAQNSELIAILTFLCEQSHKLTNMGIYYARQLYFKSQKSIGKYDLEKVYKKNYHYKVLYSQAAQQILRTVAESFRSYYGLIMAYNEGKISNRPRIPNYRKKGGMATVSYPKQALKLKGNQIRVPLGNTCKRWFGVDSFLIPMPNNLAFSTLKELRILPRNRCFYYEFVYEKEVIVKPQLHQENILGIDHGVNNWLTCVSNVGTSLIVDGKHLKSMNRWYNKQISIIKENQPTGFWSNKLAAITEIRNRQIRFGYK

SEQ ID NO: 38285 - protein, 381 aa, Okeania sp.
MLLGFKTELHLNNKQKTLLAKHAGVARHAYNWGLWLTQNILNHNSNNPSGKLKFPTAIDLHKLLVAMVKPKNYWYYEVSKCAPQYALRHLSNAWKRCFTKVSGQPRFKKKGRDDSFTLDGSISVGFNCIKLPRIGWVKTFEILPDNVSPKSVTISKKAGRWFISFKIETASINTEKSVNVVGVDLGIKSLATLSTGEVFEGAKSKRKLESKLSRLQYLNRNKTKFSSNWKKAQLKIAQLHNRIANTRKDTLHKLTTYLAKNHSQIVIEDLNVSGMMSNHKLAKAVADMGFYEFRRQLEYKCELYGSELIIIDRWFPSSKTCSRCGQVKESLSLSERVFNCEHCNFSCDRDLNAALNLAMAGSSSVTACGLDNADVARMKQE

SEQ ID NO: 38286 - protein, 455 aa, Okeania sp.
LITLTYQYKLKPNKQQETEINQILDVCRTVYNYALRERKDWLSSRKVAINSCSILAEYIIQADAAYPNYNYQAKNLTIVKKNNPRIKSVNTQVLQQTLKTLDRKFSEMKYLGKGFPRFKKKLRSFVFPAMLKNCLGNSRFKLPQLGWIKIKQSRPYPEGFQAKQARIVRKATGYYLMITFSSSESVPENPVGERSLGIDAGIESFVATSTGKLIKSPKFLLGQLRELKLARDPASPPGTSGQTPRRLQAQAVGTRVGVRRKRSEPATTPVARERRPREGTPTKRGNADQERERASLLQRRLKKKKKESSNWLKLQNKIARLHEKIADARRDWHFKLAHQLCDLTDNIFVEDINFKSWSRGIVRKQSLDSGIGQFINEILLYIFWKRGKYYAKVDKNYTSQECPKYGHIGKKKLSVCVAFRRNRKHNCSHCNYQENRDVAAAPTPIPSREGSKRGG

SEQ ID NO: 38287 - protein, 454 aa, unknown
  TnpB Polypeptide
VIQLANSRVKAEKKEKKPKVLMGIQQNLIYCDYDTKSIITFLCEQSNSLYNCGIYWARQLFFKTGRIISKFDPINEVGKNIHAQAMPSVPAQQTLLSVSEAFSSYKKLRDLFIKGQLLDQKPKPPGYRESGGLFKVAYPNIGAGKPTLTDDGQIRFPLGLTINRWFKVKEFFLPLPANLDFSKVKEFTILPKNGEFYLECSYETPKIDIELDVNQALSIDLGTSSNLMACVDTLGNSFLVDSKHAKSMNQLYNKRVANHKEGKPQKYWDGFLDTITRKRNHQMRDMVNKAARVAINHCLTHGIGTIVVGWNVGIKDGASMGKQNNQQFVQMPLARLKERIKQLCEIYGIRYVETEEANTSAASYLDGDSLPEHGKKPQGWKASGKRTKRGLYRAKDGSLVNADLQASANILRKVAGNLGIDLSRLGRLCLTTAGRIRLWKLPNPNPSPKESPRL

SEQ ID NO: 38288 - protein, 295 aa, unknown
  TnpB Polypeptide
VKLSGLKKSLKVFGLQQLNIEGIEFANARLVQKPTGWYIQVTCYVPKQERKHNYQTVGIDFGCETSFTTFVDETKQSRKLSYCFEQSENEKRVQRKLSRRRSKKFSNRTNKGLRLTNKLRKQKQKRSNQKKDAANKLIFWLKQFETAVIQDEMLANWQKSGHGKKIEKGILGRVKAILKTLSNTFVLDHSLPTSKYCFDCFHKNDDLKVWEREFVCPNCGCITDRDVHAAQNMIAFYKLIQMVPMECRDPKRIKETLIDIEKRVETNLSRSLEEVIQLMIQGLSKKHEALDLSQG

SEQ ID NO: 38289 - protein, 325 aa, unknown
  TnpB Polypeptide
MQSDLPKWVKDTPCHIKQNAIFDAHQAYSASRDCKFKSCRAVQQTLKFNDCNFTKGTWYPRLTKGLTFIASESIPQECDQATQLIKCKGRWFAVFPELAPITQMKSDKVIALDPGVRTFLTGFDGSKFLEFGSGDMGRITRMCQHLDDLMSRIAKCSNRHRCQKMRKAAGRMRTKIQDLVNEVHKQVAHYLTENYQVIFLPTFETSQMVAKAKRKINSKTARAMLTWAHYRFKLFLKQAAVRRSCIVVDVTEEYTSITCTRCGHVHTKLGGAKKFKCPKCHFELPRDFNGAFGILLKALSDTTFTLSDDGVAIVRLPDDMSCCTA

SEQ ID NO: 38290 - protein, 318 aa, unknown
  TnpB Polypeptide
  misc_feature (4)..(7): Xaa can be any naturally occurring amino acid
  misc_feature (290)..(293): Xaa can be any naturally occurring amino acid
MEAXXXXTLGRIKLREKDYIKIPKDSEKIPLAMATVSVDAVGKWYVSFAYVADIVPVHESISSFEEQDIVGVDFGVKDLAITSDGIVYANPKAYQHAKARLRRFQRALSRKKKHSKNRERCKRILGRIHRRITNIRVNAAHQFTADITKHTKPKAIVIEDLKPKNMYKNHKLASAILDANFGRMRQFLEYKCAWLGILLFFAPQFYASSRYCSHCGQYYNKDLTLDDREWVCPVCGHHHDRDYNAARNLQFYGLWLLNLVVPTETNAVRYTVSDNSVANACPHGNAQCVXXXXAEAGADGVEEPMLHVASGRSRKEGN

SEQ ID NO: 38291 - protein, 289 aa, unknown
  TnpB Polypeptide
MKRLPHRLALSPSLVLKGAKAMLVCPVAVTPPRYCKAKGVGRVCAVDVGINTALTAVVVSFTGTVIARTFLTCGRHDGQRDALRERIQEKQSASGRAGRGFCRDLYRRIAGLSLDAARQLSSQLVAFARAHGAQAFVFEALKGWKPKGKNKAQRKRFHRFQHRALFKAVGLRADELGMRMLEVFAGGTSRWAYDGSGKVVRDTQNAQLATFATGKQYNADLNAANNIAARGLALLYGIKNPRPAKAPVGGVRMPLVLADVWAYARALGASLTASGALSDAPSKSPAAIY

SEQ ID NO: 38292 - protein, 411 aa, Thermoactinospora sp.
MMSAPVDRLRCVSRYRLQPTPAQERALLEHCAHARFVWNLAVEQHSHWRPGRAGAPGFAEQCRQLTEARAAFAWLAAGSIIVQQQALKDFARAMANFFDGTHGRPSWRKAGRHEGFRIVGVRGRHWAVRRLSRRVGEVRIPKVGWVRLRWSRPVPAGVKSFRITRDRAGRWHVAFAAIPAPIPAPGTGETVGVDRGVVVSAALSTGELLSAPTLREPEQARLRRLQRKLARARRGSLRRAKVNAAIARLKAREADRRKDWVEKTSTRLAWQFDVIAVEDLNVRAMTRSARGTRETPGRNVAAKAGLNRAILASGWGQLVERLEHKAPGRVVKVNPAFTSQRCSACGTVERNSRESQALFRCRSCGYADHADVNAARNIARAAGRAVSAREGPRIAGPVHREPQPALLSTQS

SEQ ID NO: 38293 - protein, 313 aa, Haloterrigena sp.
VVRQNPASRGLPSLDPAQITPEQRGWVEALYAGAAEMGESRLFERDGTWYLHVTATRNMAHQAAASADERTPIGVDIGEASLVTVCHRDEHGSPVRPKLWADDGKAVRRLRKTYFTATRRLQNRGSERIAESYGDALWDRIDNVFHRVTHEVVEYAESVENPVLVLEDLTHIRENMDYGAYMNRRLHGWGFAKLHAQISYKAAEKGIPVETVNPRNTSKTCHACGEIGHRPRQATFRCSNDDCWLEEYQADVNGAINIADRYRSGESHRQSDRDPRQKVGDNDSATDGACLTGPQDSHADAETQQKTRGTYAS

SEQ ID NO: 38294 - protein, 486 aa, unknown
  TnpB Polypeptide
MVIAAKNKKKETRTKMSNNRSTKTKSIKLDCIDYPTMDWKVFDEIFKVLQDETIKASNQNVRICNAYYSLGKDKNWLESEYKTDKIRNVLYSVAREHCKYQYSGATGMISERVYKNYFCGENSWEKKIKKGDGNPPMSFTKKHPIYIRAIGPNIECVNKEKGYYSLEFPLLNKNAKGNIHGTKKYMDESGKWVTEIIPIDINSNRLKFRFRTRKRGDLEEVMEKLMDKNSGYKIGDSSMKSEWNKRKRRMEYYFQLTYSYDKDDAILKTLDPDRIMGIDLGWAVPAYATISDDIRQKLKYGNSKHYKQACADRKRRSDRQRDMKFNSRNGHGRKCKYDSDCNGDTHKTRNRNDTDNENWSRFIVDDAIKYRVGVIKMEDLTGITRQEKDEKNLGDWDYFSLQQKIIQKANEVGITVMKVNRRYTSQTCPFCGKKDSKNRPKGKYGQAYFKCVECGYQDNADHVAAINISRAEPIKNMIYPGWVEEV

SEQ ID NO: 38295 - protein, 272 aa, unknown
  TnpB Polypeptide
MKLTLQTQLLPDPESAAKLKATVERFNEAATWLAGVAFARKLANKFLLQQLCYVELRERFGLPADMAIRCISQVCEAYKRDKKIKAKFRKHAAAPYSMGKNIGFKGPDRVSISTLEGRVVVPFIMGKYQTDRFGWSKGQCDLVLRDDGKWFLLVTVDVPDGTPVDTEEFIGVDLGVMGTRRLIAADSEGESPLRSTAVENRRRRRSEIEAKRVQYATRRRRLGKATNGAKRSQRRHCHKALSRTKKKEARFRRDTNHRITKGLVAKAVRHVI

SEQ ID NO: 38296 - protein, 384 aa, unknown
  TnpB Polypeptide
MKQKRAYRYRFYPTSEQKCILAQTFGCARYIYNWALRLRTDAYYKDQQRIGYHETSAQLTLLKKHTSWLNEVSSVPLQQSLSHLDRAFRNFFEGRARYPTFKTKQGPQAATYATSAFKWDGKQLTLAKMDTPLALHWSRPLPSGCTPTTVTVTKDCANRYFVSLQVEEDIKHLSPVEEEVGLDLGLKSVVVLSTGETVGNPKFFATDEKKLAKAQRRLAKKQKGSKNLAKARIKVARVHAKIADRRRDFQHKLSTRIIRENQTICVESLQVKNMVKNHSLAKAISDVGWSEFVRQLEYKAAWYGRHLVKIDKWYPSSKRCCDCGHLLDSLPLDVRVWRCPECGVVHDRDINAAKNIHAVGLTVFEACGEAVRPGRAKARSGKLQ

SEQ ID NO: 38297 - protein, 488 aa, Streptomyces sp.
VEEKTGQVLTAAVLAKRVGWAADLVSGMAAELLAEHWNAADVDALASGVDAGGRALPSKAWMALRRLGWTAAPPGGLRVNDRIVRMAQEQAGRLLRSVKWRADVTTAVLKTWPAEPGKRTAREWDAVREAIPGGRDLPSGVITSRTRQIAAFQHKHGRLPAGVFELEAAPHSAGMLLLSACDRQQATIGRGDDPGRALLRLQLPTRPDPQLYKDWTWVACPIALPPTIPPGALLHLPTLRVHGGGVRVDLAYTHAVPKARRSGHTVALGVDWGLNTLLSAGAVRLHDDGRITALGAGSMFRAAGVLAKQHRLRRESEHLHAKTDHYQRLIAQADTHPLTGKHAILADEIQRVAARRSNLNDTLASSAARWTVDQALTAGASVIYVEDLRSMEARHMGRTLNTRLSQQVRGKIVERIRHLAAETGIAVVTVPARNTSRHCPRCLVPLRHRKAPDRPTTPAGNGPCARTGTAAGRATATLEHGSVSPPAA

SEQ ID NO: 38298 - protein, 256 aa, Okeania sp.
MKSIRTKLKLNNKQKTMMAQHAGYSRWCYNWGLSLWNAAYKYGYKPNARKLREVFTNHTKHKHPWMKNLSSRVYQYAFINLGEAFKRFFQGLGKYPRFKRKGRSDSFTIDNCGKPIELNGWSHKLPFIGIIKTYEPIEARTKKSRQAGDWYLSCSYEFNVITTPKKTDVVGVDLGVKTLATLSDGKVFESVRSYRQFEAKLSRLQYLNRHKEVGSANWKKAQRKIARLHGKVANIRKDALHKLTTYVSQEPRQSCH

SEQ ID NO: 38299 - protein, 504 aa, Leptolyngbya sp.
MMAQRTVTVTTELPVELWQFAIDVSKLVEPARVEYLNRKLAGDDENSIVRELQPKYGINKRQVNAIRSEVRGAISCAKESRKLHINTLELQIKSTKGWLKTAAKSLAKLPDAVGLQHGQHLRVQKRFAIHHKKRRLHLLEKKLEHLKSKPLRVSLGNKGTQYLTIGTTKESFGNHIAQYDGGTIKFRVPYALEAKYGKAISSPLRFEHEQGRRWINDAIQANRALSYHIYCKGFRWFIACWISVPEPPSQSLPRQYGCIGIDINPGVIGWAYVDSDGNLKRHGQFKLNLHSRRRGQIEAVLHDVTRRIVTIAKSLSCPVVIEALDFTAKRSQLRERGRKYARMLSGFAYSKFAKFLDQKCQLAGIELISVKPAYSSTIGLVKFMRQYGLSSDTAAAIVLARRAMRLSERIPDHNAYPSVKAGKHVWSAWNALNNTLKSLPRHQHFTRPNRSLEATPVCGSQDGLAGKRNRTSRRGETPQRNRKAAVSDTCLDVHGFIQLRIGFN

SEQ ID NO: 38300 - protein, 386 aa, Lysinibacillus sp.
VFRVLVNKAYKFRIYPNKEQEILIAKTIGCSRFVFNYFLAKWKDAYKETGKGFTYHTCSSRLTQLKKEYVWLKEVDSIALQSSLKNLADAYARFFKKQTKAPRFKSKNNKVQSYTTKHTNGNITIVGNKIKLPKLGFVKFAKSREVEGRILNATIRRNPSGKYFVSILAETDVQPLEKTGSSVGMDVGLKDFAILSTGTVYKNPKFFCSLEKKLAKEQRILSRRKEMALKQKKSLEEARNYQKQKVKVACIHEKITHARTDYLQKISTDIIKNHDVIGIEDLQVSNMLKNHKLAKAISEVSWSQFRTMLEYKANWYGKQVIAVSKTFASSQLCSACGHKNKDVKHLNLREWDCPSCGTHHDRDMNAGQNLKNEAIRLLTVGTTGIA

SEQ ID NO: 38301 - protein, 443 aa, Prevotellaceae sp.
MISIAHRIELKPNNKQKTYFRKAFGCARLAYNWGLAEWKRMYEAGEKPSGRKLRMQFNAIKKEQFPFTYEVTKCASDQPFLNLDMAFKRFFKGLGKYPQFKKKRDNNVSFYLQASEVHLSETNKNSEAFVKILHNKSGKHQYLHFPKLGWVKMAEHIRFNYAKINNVCISQSGGKFFASFSLEITEEEYKRTHPNVDLVDGGRKVGVDIGIKSALILSDGIAIENPKPLKKNLRKIKRLSRQLSKRFHPKTKEERLKGVRKSNNYMRLSVRLAQAQGHVANIRRDFLHKVTTILTTHYGEIAIEDLNVKGMTKNHRLAQAVNDVSFGELRRQIEYKAETNGVKVTKADRYFASSKTCSVCGEKKEDLTLRERTYRCPHCGAVIDRDLNASLNLLGLLVNHKIGTDYPESTPADLTALLSRFSVNGIATSKVETGKQHKSIVYA

SEQ ID NO: 38302 - protein, 194 aa, Vulcanisaeta sp.
MGGWRLASEAKIKLDRRDRRVIIYLTFVKEVEEYKPSGYLPVDVNENNVAVLIDGVAHLFETNTEKLVLGYYYCRKRIQERYDKLYGVTSRIKRRIMRRLKERKRKDDVRWKIANIIVRFAHEKRYAIILEKLGKKPASNMIKRIGDKQLRHRIFQASFRGVQKAIEEKAKEYGVPIIYVDPKNTSRLCQYIVP

SEQ ID NO: 38303 - protein, 376 aa, unknown
  TnpB Polypeptide
MRKMFQYRIYPTKSQAKALEQVLEECRWLYNETLAYRTRAWEQEQRAVSWYESKARIPLLKQARSTLKNVHSQVLQNVTERVELAMQAFFRRCKAGETPGYPRFKGKGRYESFTFTQSGFSITHDERVCLSKIGSIKMVYHRPLRGKIKTLTVRKSRTGKWYAAFSVEWEPQRLPDRAEQVGIDVGLKTFATLSNAEAIENPRFFRQEEKALAKVQRKHSKLAKGTPQRQKHRKVIARVHERIAFRRANFTHQESRQVVDRFGVICVEDLHVNRMTHNHCLAKSIHDASWSEFFSKLSCKAEEAGRKYVAVNPAYTSQDCSRCHHRQVMPLSERTYHCPCCLLALDRDLNAALNIRAVGLHSLGLSVEAPVFRRGE

SEQ ID NO: 38304 - protein, 365 aa, unknown
  TnpB Polypeptide
VNGVFARPTTCIAIAGATKEGLSLHSQTVQAVNEEYVSRRWQFKKPRMAWRKSSGARRSLGWIPVKASALRYKGGQVWYCGQPLSLWDSYGLHQYALGTGSFSEDSRGRWYLNVTVKVRTVSKSAATRVIGIDLGLKDFLVTSDGVKADSHRFYRDLAPNSSAAQRANKKQRVKALHAKVANRRKDTLHKLSTTLVREYGAIFVGNVNASGLAQTRSAKSVLDAGWSAFRTMLQYKCADAGVWFDEVDEAFSTQTCSCCARRTGPKGVTGLGIREWQCTVCGTVHDRDVNAARNISSLRGWTGCTSVARRRAGHTASLCLDRGRTWPSSRRNVRPLGRAGRQLTSPGASRTFAARVGRARRPLSS

SEQ ID NO: 38305 - protein, 235 aa, Okeania sp.
MVKPNNYWYYEVSKTAPQYALRHLSLAWKRCFTKVSGVPKFKKKGRDDSFTLDGSITVGFNQIKLPRIGWVKTYEILPDNVSPKSVTISKKADRWFISFKVETATIITEKSVDVVGVDLGVKTLATLSTGEVFDGAKPYKNLESKLSRLQYLNRHKTKFSSNWKKAQLKIARLHKKIADIRKDTLHKLTTYLAKNHSQIVIEDLNVSGMMANHKLAAAIADMGFYEFRRQVRVQV

SEQ ID NO: 38306 - protein, 254 aa, Pseudoalteromonas sp.
FKPFQRFKGWGYKAHGDGWKLHLKEKKHGAVYLADVGIVKIRGKARNDGGKPKTAEIIRKNGEWFISVSMEYDSIERQCGTKAIGLDWGVSHYFSTIDQNGNFEQVENPRYLRSSKERLTSLQRDLALAKKGTRTYRKLKCKIAKLHQKIARQRLDFTHKETAKLVKVAALIATEKLTVKNMTRSAKGTAEKHGKMVKQKAGLNREILNTAPAMTLNLLSYKAEEAGSEYVEIPTKQVKPSQTFPDCGAKKKKT

SEQ ID NO: 38307 - protein, 185 aa, Pseudoalteromonas sp.
MEYDSIERQCGTKAIGLDWGVSHYFSTIDQNGNFEQVENPRYLRSSKERLTSLQRDLALAKKGTRTYRKLKCKIAKLHQKIARQRLDFTHKETAKLVKVAALIATEKLTVKNMTRSAKGTAEKHGKMVKQKAGLNREILNTAPAMTLNLLSYKAEEAGSEYVEIPTKQVKPSQTFPDCGAKKKKT

SEQ ID NO: 38308 - protein, 245 aa, Pseudoalteromonas sp.
VQGNIKNCTVSFKSGRWYISFQVEQDIDEPKHNSTSAVGIDMGVAKFITLSDGSHLKPLNAFRKHEKRLAIEQRKLSRKVKFSTNWQKQKAKIQKLHTLIANCRKDYLHKASNQISKNHAMIAIEDLRVSNMSKSAKGNAEEHGKNVKAKSGLNKSILDQGWYEFRRQLEYKQLWNGGLVVAVPAQYTSQTCPCCSHVSRENRKTQAHFECVECGYINNADIVGALNILERGHRLLACGESALAA

SEQ ID NO: 38309 - protein, 601 aa, Rhodococcus sp.
MTGPGSTAPRQFAFTTRAHMAVDDTTGEQIGLDDVDTRAGWLLDLNTAAGAELVSRLWHPATFDVLAAGRDRQGRKLPAQGHVAAARLNWNPDYPDGVYVPSRVTRVVTAQVMATLRTLAYRDTAITALSARFDPTTGAVAPPTEPGASVPSGFARGVRRQLAARARRTDGAPAGRLRITDVQEPPRMAAMAQLSAADRQLAQITVAERELVLTVKLPTSPAPAGRAQWRSVRLTATIPAHLHGRAITDWHLPTLVLDRRGLLWRCAATEMVPVADLTASTVAVGVDWSPSTLGAAAIVAEDPGGLSSDYRGWTYDDRGLGIKLARLQAEGQLLHAKAARLTQLAATAQPEVRARLEAKIAVLGAYREAVGAKRGKINRELAFHFAGQVTDYAAPAGAQVIAVEDLTTLETRGHGRVNNNRAAQSARRQAVAALAHTAAGVGITVVSVPARGSSALCPGCDEPLCRPGGYHTAWCSRCRVGGNRDHVAGVNLAKRALLGKNNVARRRGRLPAVRVAEHAPVRRCRDKNGPTPRRPRHRRVRRSLPAATPRMGVNPKEHVPASQASVWDTVKPPAPHGDAGSRDTHISQAPATPVADSMRST

SEQ ID NO: 38310 - protein, 424 aa, unknown
  TnpB Polypeptide
VKLENAVQTSCSDEKNSLTYEQLSRSVSVSVSPAPTSASFRELPVIRTLRFKLMRSKKNRKLHREIEQFARVYNHFIALIERYYRLFKKHPSANQLKKLLPKLKRTRRFLWLKNLPSQALQDVVERIERAYKGFFERRKEGKKAGRPYFKRSANYKSFTLKKAGWELVGEHALRIGDNTFKFHKSREIPAEKVKTVTIKRDKLGDVYVFFVVKSTEFVPKRCATGQSVGIDFGFDQFLTLSDGTSVDAPMFFKRDLRHIKQLSRSMSRKVHGSKSWNSTRLALNRAYRTIQNKRDDWHWRLAHFLCQKYDLICFESLNFKFFQRKHGKKVQDFGFVNLVKKLTYLARHYGTQIVFVDRFFPSSQLCNACGFQSPELKDLKIREWVCPACRKHHERDLNAAKNIHDEGGRALAGLTEFKSFEIIS

SEQ ID NO: 38311 - protein, 493 aa, unknown
  TnpB Polypeptide
LSYLSITLKLHKPSREKRRILEEAMMNYTRAFDFLLTEAGRCISDIEKNYSGSTLKLSKWVDKDMSTRLNQFHTEPFKDSIKSDFAMTLESYLKLKAAGKKCGFPSGYTDSTGKLTKVRPIFFCRYDIKRDYCLLYNPDKGRYYLKLYLMNNKMARINQNVFAAESKLQYVHQSGLKLENEESKKRYIIVPLSFGSWQEEYLNECLKNPQMLKTARLIERKGEYFITINLKLPQNEKIKTDTWIGISRGIGKPLYYTVTDQMGQLKEAGAIRLKKSDVVNNGNMEQEIYRAANQIVDKALTYNSQVILENIKLQRGGWAYGDYKNYKPMLNKMLYNSLDKILTYKLENKGLPKPIRVSPSGILFTCPQCGKNTKRNRVSKDMFLCVSCGTAYKIDFLGSLNLANKLNKYNADDIKIKVTKETDGIRLCNDLLGLNLQISSMENYMENLRKEIMKTVQEIIESQNHEYDHKDKRWSMVQKIEGYDDFMKHIKFI

SEQ ID NO: 38312 - protein, 395 aa, unknown
  TnpB Polypeptide
MTAYRTIRYRLYPKTYEKHQKLHGTAGACRYVWNYFVAKLRDDYLYYGECNYRYFSMSKNFTTIRKYCAKWLQNYSANIVKSSLQPLETCYREFFKKQRELPKFHARNSTTPSFPIDKQTAKITGSHLYIQKIGWMKFEGSNPYPNGEFVSGRVKYECGNWYAYITYKVELTRRPQSAREVGIDRNVGQIALSDGQIIHLPDLERKARNRKKYQKRMARQVKGSNRRKITRRRVQRAFMRERSARANWAHQVSRRIANNYHIAYIEGLNTSGMTKSAKGTVENPGKRVKQKTGLNRSILNSGWGKLEQCLSYKMIVEKVDPKYTSQTCSRCGAVDKASRKTQSEFKCTACGHEENADVNAALNILAAGNTVTGHGGVGVAPPVKCQKDSLACLPS

SEQ ID NO: 38313 - protein, 386 aa, unknown
  TnpB Polypeptide
MAVPGVEELVGQQEGQARGPQGGLAEIQVETLRCPAFRIHDRQLRLIEDDPKALRLPRIGRVHCMENAAERVHGRRIVRMTVSRHAGFWYAALTVERPAESVPAKNRKRKNHDRQVGVDLGVRTLATLSDGTTFPNPRNYVRTQRKLRRAQQALSRRDRGANHGYGSKRYNRALGRVRRIHARIAAQRADNIGKLTTWLADNYSDISIEDLNVQGMSHNRRLAKHVLDADFREFRRQLEYKTARAGARLHVIDRWYPSSKTCSNCGTVKAKLPLSERVYHCDKCGLDMDRDLNAAINIQVAGSAPETLNARGEDVRQTGSSRTMPTPVKHEPSGGASRVRLGAGLGNETMQARTNQIATEHHPRNLRGAVASQLLWAWPDRAANTR

SEQ ID NO: 38314 - protein, 431 aa, unknown
  TnpB Polypeptide
MLTRKIRITPTPEQEQVLWDLSEKCRLLYNFALAERNQNWETNFEHPKEERTYITYLKQQNALPSIKKQYPEYVWVYSKVLQMTLRRLDADFKSFFTRWKQGDTQARPPRFKGKHFFTTLCYNQSGFVLNREQKIIRFSHNHPADVELQFDLPWLPPITGTIKQVDLFQDTRHRWFVAIIIDEVTPAYIDNSLYQAIDLGITNLVTAVNMHGKFIQIRNRRADLYWKSKIREVQSKRDHCKKHSHKWHFYNEKLLKIHRKCSNQMFDFQHKISKKVVENTRATTLIIGDLDIKDMIQKKKTTGYPRRNQASRTLNHSLQSTGSLGRFAEFLTYKAERVGKRVTRIDESQTTRTCCLCGTVRNRSLSERDIQCDCGTTLDRDQNAAINIMLRFLSQQPPVNGEPIQVFLDGLHRHTALPRFPGEVDSMEAPV

SEQ ID NO: 38315 - protein, 202 aa, unknown
  TnpB Polypeptide
VLGRAGAVDPKTPRTVWIGSTHGVFKSEDGGLSRKASRGVEPDDSVGAAARIHERIRNRRHDFCHQNAWRIVNRFGVIAFEKLSVENMTCRPKANPDPNNEGQFLPNGASAKAGLNKSIADAAWSQLRSTLASKAESAGRETLAVNTAYTSQDCSGCGYRPDGLGGRTKKKLSERWHLCPMCSLSVDRDTNAVVNILDLLHN

SEQ ID NO: 38316 - protein, 391 aa, Nostoc sp.
VRISYQYRLKPTKQQAEIIDNTLDMLRCQYNYQIGQRFEWLEQNRCSIDRCSLIVCHLPELKNKPNRFSQQASLTQLKKDRPWYKGIHSQVLQEVPKKVEIAFDRWLKGDANGKRSGKPRFKAKGQYKTFIYPQFKREHFQNDKITLSKIGVVKVIVHRQIPVGFDIKTVAVTKKADGYYVTLSLEDRTVPAIKPDFDGLNIVGIDVGLIDFLVTSDDERIVSPKFLRKAERKLKSAQRKVSRRKKGSNRRKKAINKLSKQHKKLADTRKDFHFKTAKALLDKYDVVAVEKLNIKGLVKTKLAKSINDAGWGQFITILSNKAENAGLKVIAVNPNGTSQECSNCSHKVKKPLSQRMHDCPNCKVSLCRDLNAAINIKNRGTHDLKAQIMSS

SEQ ID NO: 38317 - protein, 334 aa, Nostoc sp.
MWGKCLSCVKLQAHIAKLRKQNPFWQQVGSQAVQDICQRIEKAYQLFFKHNKKGVRPPGFKKVKKYKSFTLKQAGYKFLGGNRVKIGGRVYQFWKSKEIEGTVKTLTIKRTPLDELFMVVVVDEGSKSEVEVKTSKIAGFDFGLKAFLTCSDGSKIESPQFFKQSLNTIKKASRQHSQKLKGSSNRERARKNLVRKYEDISNRRRDWFWKLAHELTNRFDILCFETLNLKGMQRIWGRKISDLAFGEFLEILEWVAKKKNKLVVFIDRWYPSTKTCYHCGHVLESLDMSIREWRCPSCQSINGRDDNAARNIQAVGASTVGLGDLRRAVPAIAV

SEQ ID NO: 38318 - protein, 390 aa, Nostoc sp.
MQTISVKCKLQVPVELRSEIDLTLQGFADACNQIYETAKRENCWNTTKLHHMVYKAVREATGLKANHVCQAIRRVIGNAKAVKQVHKFRPTSLNLDIRTFQYLEELQTVGVTLMCGRVKFKLSIGNYQLALLKGQSPTAATLNKTKQGDYYINICVDIPTQPTGKTPKASTERSRSVIGVDLGRRDIATTSRGESWSGKQIQLVRDRYSKVRANVQSKRTRSSRRLMRRLSGREQRFQKWLNHNISKQLVHDAKQANATLAFEDLTNIRESLNQKPRSKTERRRTNNWAFYQLRLFVGYKANIAGVPVVFVPPAYTSQTCSRCHHVHPVKGKSYRNGKVFKCGHCGFEHDSDINAANNIAALGACVSSPESPGMSCQLQGQMSLFPVSQI

SEQ ID NO: 38319 - protein, 386 aa, Bacteroidales sp.
MKARRVIKLKIEGSDKVDAMLGVYLKAINWLSPIVYKTKELNSTRLHKAHYANLREMGVPSQLACSAFRVVTASYKTAKSRKCWRLARFKRPMIPVVFRRDFNRTKKGVTLWGETINIKDPHPLPDKFWKDSKLVRVKNQWYLHLAHEIEIPDERAEGCIVGVDMGVKRMLVASNSANSKPFFYHGGELNHRRSCIRRTRASIRSVGSRSARRLLKRMSGKEAAVTGHLMHVASKALVDYADAQGARRIVMEDLSNVRDASLRKGKDLRSKVHRWPYADMRFKIAYKAEGRGITTETVSPYNTSRACHRCGYVSASNRKGLHFNCLKCGYRDDADLQASKNIRARSVSIACNAPETGSNKPPESSGLMISLCGVGSRLKPPVLYRG

SEQ ID NO: 38320 - protein, 544 aa, Nocardiopsis sp.
VADSKLRNIDPSFVALGPSGVAIRDRLKHLTPTDEKVLRLIGAHLGSLASKDLKARCADGLEHSTDTWAARKRELTGASSSRWAGSLTKATHDQWALARRGQAAHIQSLEAGVKTIAHRLSLPVGEKGTKRAPGGYRSAHEWFHKARRLHILQDRLAQVRADRENGIVHVARGGKRLLNTRHNLDLAQLTGAEWRERWAAERWFLQADGESGKRYGNETIRITPEGEVSIKLPAPLSELANAKHGRYVLAAKVRFPHRGQEWSDRVEANRAVAYRIHLDVERGRWYVTASWTIPPTKTIPLDAALVHGVIGVDTNADHLAAWLLDTCGNPIGQPRRFSYDLSGTAQHRDAQVRHALSRLLNWAKTCGVKAIAVEDLDFTAEKTREKHGRRKRFKQLVSGMPTGKLRARLTSMADQTGIAVIAVDPAYTSKWGAQHWQKPLTSKTRRTTRHDAASIAVGRRAQGHPIRRRTPPPRQHQSDAGGHRTVQARPEAPGCEGPRPRAPGPRTRSVQPDAASTRATRTPKTVRDVRGDRQWVQDSLLLTD

SEQ ID NO: 38321 - protein, 389 aa, Mycobacterium sp.
LFPSPEQAAALAEHSRHARFVWNLAVEQQRHRQPGRHAPGYHEQCAQLTAARAEYNWLAAGSQTVQQQALRDFAQAMRNFCNRTHRRPTWRKAGQHEGFRQVGLKPRHIRRLSGRYGQVWIPKIGWVRFRRTRDVPATVKSYRVTLDRSGRWHIAFAAIPEPIAGPEDGSVVGVDRGVAVSVALSSGELLCVAGLSAGETQRLRRLQQCLARAQRGCRRRARTKLAIARLRARETDRRRDWVEKTTTDLARRFDTIRVEDLKVRAMTRSARGTRERLGRNVAQKRGLNREISRQGWGLLVARLQHKAVGRLEFVPAAYTSQRCSYCGHVAPENRKSQAVFQCVACGAGPCSADVNAARNIAAGRAVTARGDLGASRSVNREPQLCSPAA

SEQ ID NO: 38322 - protein, 402 aa, Streptomyces sp.
MVTSTRRYDACVKITVQVKLTPDAIQAPAVEHTLHAANEAANWVSAVSFERFGLQGAVRELRKLCYSELKARGFGAQAAQHIIKRVADSYTTLRANIKAGNLGPEQSKRRRKAESKPITFRPDAAHTYDDRCLSWNYDAQTVSIWTLAGRIKNVRFACSADALKQLTERRKGESDLIQRDGKLFLAATIDIPEPDLYEPKGFIGVDRGINNLATTSDGDNHTGRRLGRYRRRQDRKKAELQARQTRSAKQLLKKRARREARHATHINHKISKTVVAVAQRTERGIALEKLGGIRERVTVPRDQRARQSSWPFHQLGAFIAYKAKRAGVPFIEVDPAYTSQRCPRCGHTERANRPTRDHFHCRRCGLAGLADHVAGVNIAQRGATAWVFVNMPDPVPAQRGDR

SEQ ID NO: 38323 - protein, 395 aa, unknown
  TnpB Polypeptide
MKCYKTELDLNNHQRTACLRHAGAARFVYNWALRRKIDAYEARQKVPTAIDLHRELNVLKKTELPWLYETSKCAPQEALRNLDKAYQGFFRRCKSGAAKKGFPRFKSRKRGIGSFTLTGAIHVIDRTIQLPRFGILRLKEHGYFPSDVEITSATVSERVGRWFVSIQTKEEPIREAGTETLGMDVGIKSLAVLSDGTMFENSKALRAAERNLKHLQRTVSRKQKGSANRKKAIARVARQHYRISCVRKDSLHKVSGAITKRAGIIGMETLNVAGMVRNHHLAKALSDASIAELHRQITYKMKWAGGIVVKANQFYPSSKTCSSCGNVKVALRLSERKYVCESCGVVLDRDLNAAINLKQMAASSVVGSHACGGFRSQAEPVKQEPNTIQGVVLNG

SEQ ID NO: 38324 - protein, 432 aa, unknown
  TnpB Polypeptide
VKQIRSGTTRLVYAALDFRFWINRMEIVVADRSCGEYFPLMERAESGKTEAITCIRTLRLKVKSEAYPWLRAAATEVNQVWNFDNAASDKAARPFSGPRRWLSGFDLDKLTAGASKYFERIGSDTIQRVNAVYATRRQKSKRTKLRWRKSFGSNRALGWIPWKAVQLKRKGNALRFAGKTFRIFEHHLLDGVTWKSGCFAEDSVGDWHLCLPVAYEVVAIAAPQDSVGLDLGLKTTVATSDGEKLEAGRFYRQIEQKIAQAQRRGHKRQVKRLHRRAARRRKDALHKFSRKIVSQYQTIVVGDISSTNLVKTRMAKAVLDAGWGLLKTQLLYKGQSAGRCVIIVNERNTTRACSDCGALTGPTGLDMLDVRAWVCGGCGGAHDRDVNAAKNIRLAARCSPSVGGNEPSPSTAPPSQASRLREARISAVKAAA

SEQ ID NO: 38325 - protein, 495 aa, Nocardia sp.
MTRHTTFKFCLDPTVEQQAVLFRHAGASRFAFNQCLRMVKTGLSRRRSDPDVDVPWTGFDLINAFNRWKKSEAAGRVFAVNSYGAAEVVATGLVWRGDVRQQVFEEAAVDCGRALKAWSESRSRQRGAARVGFPRFKRKNRTVPSFRLRNSRSRGGCPAIRIGDADRKRSITLPGIGLIKVIENTRRLRMLLGKGRARILFASVTYRANRWWVSINLEAADLHPSHHHAPAVGRDQSSWVGVDLGLAAFLVAATGDGRETCRVTDAPKPLDAGLRKQRHLAKLMARKQKGSRNRRDAASRLRRHYRRVRDIRRHFLHRVSNELVKTHDRIVIEDLNVAGMLRNRRLARAISDAAWGEFARMLTYKQAWRSGEIVVADRWYPSSQICSSCRRTGDRLGLKERTFRCVHCGCSMDRDRNAAANLALWAYDHHRTPDLQAGGRATNARRRDGADQHRCVGATSPKDVGTDVRPVSAGRTDDAREGRCWTTSRRHSGTL

SEQ ID NO: 38326 - protein, 406 aa, Scytonema sp.
MSITVNYEYKLKPTAQQVKTFEAWLSVCKKVYNFALRERKDWVNSRKSAVNACSLVSEYILPADASRPTYYSQCKSLTAAKKNIEELTEPHIHVLQQTLRQLEAAFVSMWERGHGFPRFKKKMRSFVYPDVKQSAVESGRVKLPKIGWVKMKMSRPLPLGFIFKQIRVVKRASGYFVMLTYQLGVQVPDVPFSGHPLGVDIGLDKYLATSDGELVSRPRFFNALHRKLKLLQRRLKHKKKGSSNWLKLQRKIARVHQRINDTRKDWHFKLAHRLCDNAGAIFVEDINFKAWAKGLFGKHTLDAAYGQFFNILSYICWKRDVFFLKVNKDYTSQICPNCGTHTGKKDLSERIHRCNVCNYTTYRDVAAAQVIRNRGVLAVGQPVGLQIASGGVLSGASSNASLDKIP

SEQ ID NO: 38327 - protein, 404 aa, unknown
  TnpB Polypeptide
MYHSQKTQLRHLSKTEFQLLRHLTHTAKSVYNEMLYTMTNYYDVYNEFLTYTDTCFMVKNLENYKKLPSQVGQQVLKVLDKNWASYFRLLRERKRGNYNRPISEPHYLPKDGHFVCIFQKQSFSLKENTVRLSLGKWCKKHFGMDFFTIPIPENVIGKPIKECRLLPRQHGRFFALEFVYEVPEQHPVVDPQKIMAIDIGLDNFATCTTSDRASFILEGRGLKAYNQLWNKRKAQLQSQYDRQGITFGKKTAILNHDRDNKMRNAMSQYVNHLIKHCIEHQIGQIVIGELKEIKQHGHLGKKNNQHFQSMPYGLFRAKLKSKCELYGIQYVLVNEAYTSQTCCRCGNVDKKSRIHRGLYVCRKCGVTINADQNGSINIGNKVAPNFTEGSSGTLNAPERVRLLI

SEQ ID NO: 38328 - protein, 535 aa, Scytonema sp.
MPQIYQTYVTQIDNNLTSETQTLEMLEQFSPVAAEMSAMALNGLQSDMKKEKLNSNIQNTFGVNKRHANSVINFVAGELESARQCYKRHIDILDAKIKLVKSEIERLNKRLKNHREYAQALEKWNLAIKYPQNTQARKSKKVPLLKKTPEFDNACPVNGKPHGKTYLQLAKQLLHQKKRQLRMYLDRRAKVIKRGIKVNLGSLGKVPFVGSTNETNSNQICQLTPDIIPSLKIRVPYFLESTFGEYCTLRLHKINERGYSNIVTAWALNKALTYVFSKNKKGKWVVAITCLVNFSITSHDKSWGCIGLDINPGSIGWCATNRHGNPIAWGKVNLDLHSCSTEQTEARLAYAVTEITARALATKKPIVIEKLDFCEKKKQFKRGRKYNRMLSGFAYAKFFELLRARCLKLGIKIIEVSPKYSSQIGVVKYMRRYGMGSDSAAGLVLARRGMGIYYEKLPARYACQTSVRPEARQHVFAHWQRFNKYYLKVASRNTWFGTPTLTGSAGEGLANTGNLGFPKLRHKHESSSLHPSVKA

SEQ ID NO: 38329 - protein, 324 aa, unknown
  TnpB Polypeptide
MDVSKTIFNTLSEFDYVKIVPYQIKKIAVKDCYTTFTNGCKKAKKEGVPFEMHYRSKKAPKQTMYIPKSAVSADGIYYTLSGKLKYAEYDWLTKEYGDCRLTKENNRWFIVVPIKDDSKAIYFDNQEGIVALDPGVRTFITYFSDDGRFGLLGYRSAQTIFIKLRRLDKLLSKKETVKDRRENAILNRKIKTIRFRIHNLIDELHWKVINYLTKNYSTILLPTYETSEMTCKIGRKLNKTSVRSMLSLRSFEFEQRLQNKCNERGVQLIRCNEAYTSKTNSFTGEIFNIGSREWFNYNGVRINRDINAARNILLRALRDDSANG

SEQ ID NO: 38330 - protein, 228 aa, Clostridium sp.
LVEERDIKTSNSNIGMKISNTNNEGLGIDLGIKEFTICSNGNKFKNINKISTVKKVEKKLKREQRKLSRKYESLKIRNKNIREGRATGRNIQKQVAKVQKLHQRLRNIRTNYINKTVSLIIKQKPSYITIEDLNVKRMMKNKHLSKAIASQKFFEFKTKLISICKENNIELRIVNRFYPSSKTCSNYGEIKKDLKLLDRTYKCDCGLTIDRDLNASINLKNAKEYKIA

SEQ ID NO: 38331 - protein, 406 aa, Micromonosporaceae sp.
VRRSFKFRLRPTVKQVQALTGMLADHRELYNAALQERRDAYRKRAITISYGMQSAQLKDIRKELPEQGRWSFSSQQATLRRLNLAMQAFFRRVKAGQMPGYPRFKGARWFDTVVWPSDGDGCRWDSTSDTTATRVYLQGVGHVRVHLHRPVTGRVKTISVKREGTAWYVVLSCDGVPTQPLPSTGRHTGLDVGVTEFAALSDGTLIPNPRWLKTSADQLAAVQRQHSSRYPKHAPRSNRKTRSARRAAQVHRMISRRRLDFHHKTALNLVRGFDFIAHEQLNIAGMTRSPKPKPDPERPGTFLPNRAAAKAGLNKSILDTGWGQFLAILAAKAENAGRLTVAVNPRHSSQTCHNCGHVDAASRNSTEFLCTACGHQDHADINAARNHLRAGLALIQAASQDGNPRL

SEQ ID NO: 38332 - protein, 396 aa, Metallosphaera sp.
VKLRVEVDHNTYSALKEVEEEYKAILEDTVNYGLKNKTTSFTRVKAGIYKAEKEKHKDLPSHYVYTACEDASERLDSFQKLRKRGRSYTDRPIVMKVTVHLDDHLWKFSLSKISISTKRARVFVSPTFPKIFWRYYNNGWRIASEARFKLLRGKIVESYMVFKEDDPKPYEPKAFIPVDLNENSVSSLIKNKPVLLETNTKRITLGYEYRRIEEGRSTKDREVGRKLREKDKKLDVRRKLAKLIVLEAYESRSAIILEDLSKRAPEHVVEDVKDEQLRSRIYRSAFSSMRRAIVEKAREFGVPVILVDPSHTSTVCPVHGTKIIYQPDGGDAPRVGVCERGERWHRDVVALYNLRKRVGDVSPVPFMSKESHDPPTVSRWLRAKSLHSIVIEDKMK

SEQ ID NO: 38333 - protein, 476 aa, Variovorax sp.
VTSVNRKQPSSVEEKKRTQKILRKGMFLMSPNTTELGAMNGFLGAHCKITNTLLETSRLRYKAGMPAYNLTTACQAVKAIRNSISWIERHTTAQSVQVTAVRVVRAFERFFDRVARGETPGYPRFKSIKRFTGWGYKQYGDGWSLLQKNSKIKTNGSRAGHSYGAVRLTGIGTVSLRGRTRFEGEPITAEVLHRGGKWYLSVTFEVTPEAVAREGGRASMAFDWGVSTLLTKVVGDPMTGQVEAIDNPCWLKKQLDRIAEIQQAIAALEKRAKAASGKQRGFPVCHQLKNAYRRRRCLHAKIANQRHDFYHQLTAKLVKQYGLIATEELEVSNMARAPRPKEDPGNPGQYLPNGAASKAGLNRSILDAAPAGFVAKLRTKAEEAGSRFQFVPTRELKPTQRCHLCGETTKLELKDRQWKCTCGATHQRDENAARTILRYVFEGAWWKDTTNSGLERPRRPRAARNSIQVGSPIWME

SEQ ID NO: 38334 - protein, 541 aa, Variovorax sp.
MTLRSIRDAELGEAYIPSSIGLPPEIEALAWRKRAIHVFRDPQEQLLVLAPDHIYERYGHRVLGSGPNEAHAAASAAIGLTQTCVKGPVLPGGEGSLIFLRVLARSVSDCPYCFFMSADPSLRAFRFQLRPRPAQEKQLARYAGMMRWVWNRALAEQQAARERGEKYAGFASMCKWLTAWRAAPDTRWLADGPVHPQQQVLKRLDAAFQTFFANVRAGRKPSYPRFKKRGAEPGIRFPDPKQFKLDAANGRLQLPKLGWARMRMSREVTGELRNASVTREGERWYVAIQTLRPGVLPTADVAPTLGIDLGVANFAGLSDGRLIVPLAALKAQQQRLRRYQRSVSRKVKGSCNRKKAVVKLRALHKRIAQQRNDWLHKLTSGLAAEHPVIAIEDLRIAAMSASARGSALKPGKKVRQKGGLNRGILDAAWGEFRRQLEYKLAAVGGQVLAVNPAYTSRTCRVCGHEAVENRRSQALFACVACGHTEHADINAAKNILAAGHAVRASSSKPAACGGVVRRAASARTKRAAPAKQEPTEEAGRA

SEQ ID NO: 38335 - protein, 506 aa, Variovorax sp.
MLKGFEFRAYPSKVVQSILLRWIGCQRFIYNARVREDHYFRTMQRKRLALVGQYPEQDQSYARYIGDGNGNPEEDTRWLREVPPQLLRNGVVLFSQAYTKFFKKLAGRPTVKKRHGRQSVWVTSELFRFEPVPVSQAKSVQASRQQWRLILGNAKFPCGELPFAITSVPEDQKWQPPKTIHISVDAGRWHVSFCNEDDALGPDAADTLVYLRQYSKEELLDQTIGVDLGVKVPLMAAEAQGISKGFALKPIEHERLQRKEVQRRRWQRIAARRQAGSKNKAKARHRVAAAARYAADLRKDFAHQVSRALVDHDVRLIVFEALQIKNMTRSAKGTAEAPGKNVRQKTGLNRSILGSAWGQVRLYTEYKALAAGKLAIRVDPKHSSQECSACGHTHPDNRPSQEQFVCQRCGHTENADTNAARNIARRGVEAIVSGSYTLKRKKKAGSVLRKSKAEDDQREGRTGPGTEQVSESHVCGDTVRRRRRNAARAVVEEAETETPTTSALAV

SEQ ID NO: 38336 - protein, 609 aa, unknown
  TnpB Polypeptide
MSRTILKEGEHMEKCLFSKYIKPDAMGSIKADIVRYNKIKRYAFSLIVKMGGDKPLSDGTSIHNHLKDKFDVNDHFANAAKREAVASYKSAMECLKLNAETLESKIKQENKKLSSEQKRLAHLKEEKASLVNRSLQRKSGSKRKVKFKSYRGGNESETSEGTFRVKKGKKITTYKNQYLFEVQYLTPEIKRVEHRIHYIEQRRTRHEHELERIKSQIDSGRPSVCFGSRKLFKQQNTIYAGRHDEWLKEYRSRRNNGMTIPGRKGIIQGNCVVRYDTDTKVLSYDSMTRIPVKTKNSKTKKESVLRAVTYEIKGVEFPYGQVFVNDAMNNKSRQAVAWRFEDAGSRILVKCMVSVEQELSRKNEYYTDGCVSFDTNVDHLAMTELDKNGNLIHHEVIRFDITGKTNEQRGQILSNSLEQIFKYAKQKCKPVAMENLKDIKNESMYKNEELNRKLSEFAYTKITQLAESKSYKYGIGLYKAVPAFTSQIGKIKYMRHYGISIHVAAAMAIGRRAMGFKERPPKGLRTLIPQGNKNRHHWSQWRFLARHLKKQPAYKFYHMIPYDEFECITDMNQYMKEEFCNYQNRAYFLKRLTDIFNQLARTMPGVTTV

SEQ ID NO: 38337 - protein, 439 aa, Okeania sp.
LKARYKYRIYPNHIQIIKLNQLFGCCRYVWNSALAHCNQLYTNGHKRPSYVDLTKQFITQAKRELVWLKEVASTPLQQSLKDLDQAYRNFFNSCTGKRKGIKVKPPKFKSRKSRQAVRFVGANYKIGQDKIYFPKVGKIKIIWSRPLASNPSSVTIIKDSAGRYFASFVVETCAENLPKTENSIGIDLGISTFATLSNGEKFEAPKPLKKNLKKLGKFQRKFAKTELGSKRREKARVRVAKLHAKVKDIRTDFLHKLSTDLAINYDTIVLEDLNVSGMVKNRKLAKAISDLGWRQFRTLTEAKCEKYGREFRTISRWEPTSQKCSNCGFKGGKKELNVREWTCLNCGTFHDRDINAAVNILEAAQPKTKVEIVKGTVAKNPVQLSLFNEVAEGQRSIIFGHGGNVRLKSQQIPMMCQPALSHSFSLVCLIDGWESRAVS

SEQ ID NO: 38338 - protein, 328 aa, Okeania sp.
MRLVDRHIINRTHQYWACCDELAFKSKNLYNLANYYCRQHFFCTGHSLDLTKLYHTTKDSDAYRALPTKVSKQIIKCLVATWRGYFQAIKEWSKHPEKFLGKPKIPKYKNKTQGRNVVIYSKESVYRASLKDGICHLSMSEIKIPVVVETVIEVRIVPATSCYIIEVVYEKTLQPQIHSTYVAGIDLGVDRLVALSTNKPGVKPMLVNGKPLKSVNQLYNKRKAKYQSHLKGNRKTSRKIEALTYHRNRFVENYLHNTSKLVVEYLTTNNIGTVVIGKNDNWKQGANIGKKNNQNFTQIPHYKLIQQITYKCQLVGVKVIETARLLHQ

SEQ ID NO: 38339 - protein, 419 aa, unknown
  TnpB Polypeptide
MLNLSYEYKLKPTYWQVQEIERTLVICRKVGNYALRERKDWLNARKCRIDACSIESEYIIEPSVPYPNYARQCKSLTSAKKQYPELKTVNAQMLQQVLRKLETAFVDMRRRGMGFPRFKNKYRMRSFVFPQMLKNCCQGNYLKLPQLGQIEFIKSREIPQGFVIKQGRIVRKASGYFVILSLECDVSIPDPVASGHPLGIDLGLDQFLATSENELVKRPRFLISQHRKLKLLQRRLKNKKKGSNNRHKLNQKIGRLHQHIADTRKDWHFKLAHHLCDQAGMIFAEDIDFRVWGKGMFSKHTLDAGFGQFISILSYVCWKRGVYFDKVNKDYTSQVCPNCDAHTGRKELSQRVHSCPECGYTTHRDVASAQVIRNRGVGAVGRIVSENACGDGLTGTGNSLVKNRRSKKKGEEARFQPAS

SEQ ID NO: 38340 - protein, 467 aa, unknown
  TnpB Polypeptide
MLVNRILQYQINKSNKNYNIIDELCFKSKNIYNYGNYIIRQTFIITSKLDQNIILDTKEREFLIWINQKVNEFNKYKQNNLLKKQSKGKSLNKKIKLLKYFDRKNKLISYDFMDFVTKYSEPFKILGSQCSQSTLRVLDKAWKSFYVIIKDWKKNPSKYLGRPKIPKYKKKDGRYPLYIANNQCRIENNYLYFSWNPLKILNNRIKIDIEGKLIQIRFIPRNNVYIMEIVYEIEVPDIKNNEINNIVSIDLGINNFATLTNNLDLQPIVINGKILKSINQYYNKQLACYKRMLKKENNKENNKEWSNRLDRLTIKRFNKIKDYMHKASKLIINYCIQNNVDTIIIGKNEGWKQESDLCKKINQTFVQLPYETFINMMNYKAENATIKVILTEESYTSGTSFLDNELPIKENYNKNRRIYRGLFRSNKGIKINSDVNGSYQIMKKVVPNAFSNGIEGVGLHPIVINVA

SEQ ID NO: 38341 - protein, 362 aa, unknown
  TnpB Polypeptide
MLKAYKYRIYPNKEQRIFLAKTFGCTRFIYNQMLADKIKSYEKNKDLDIKKIKYPTPAQYKQEFSWLKEVDSLALANAQMNLDKAYKNFFRDKSVGFPKFKSKKNNYKNYTTNNQKGTIYIENSHIKLPKLKSMIKIKQHREFDGLIKSCTISQVPSGKYFVSVLVDTEINQLPKVDKKVGVDVGLKEFAITSDGEFFHNSKWLRKSEKRLAKLQKDLSRKKKGSKNRNRARLKVAKLHEKISNQRKDFLHKISTQLINENQVIVIEDLKVSNMIKNHKLAKAISEVSWAEFRRQLEYKAEWYGRNIIVASSNYASSQLCSNCGNKSSQTKDLGCRIYVCSVCGMVMDRDINASKNLLKLAI

SEQ ID NO: 38342 - protein, 488 aa, unknown
  TnpB Polypeptide
VQLRYNYRLYPTPGQRSALARAFGCARVVFNDGLRARQEAHAAGLPYVSDAELSARLTAAKATPERTWLADVSAVILQQSLADLNTAYRNFFASVTGERKGPKVEPPRFKSRKDRRQAVRFTANARFKILANRRLRLPKVGDVSVRWSRDLPSGPSSVTVIRDSAGRYFASFVIAAGPVTLPATEPVVGIDLGLTHFAVLSDGRKIASPRFLRRAEKKLRRAQQALSRKEKGSRNRDKTRAKVARAHVRVADGRREFHHQLSTRLIRENQAVAVEDLAVNGLARTRMAKSVHDAGWSAFVNMLEYKARLYGREFRRIGRFVPTSQVCSACGVKDGPKPLHVRTWQCRACGAWLDRDINAAVNVARAAGLAVTACGAQVRPGPAPAPPSPTSPAARGTRAGQPPVTWAACCPPTSATWSRRRPGRRGTRVTGPTSACATAARPGGTPAASRSVSRPIRPKSPPPWPPTCAPPAGSRTPSPPATATSPSP

SEQ ID NO: 38343 - protein, 300 aa, unknown
  TnpB Polypeptide
MSRYRLIPTPAQEAVLTQHCAHARYVWNLAVEQQSWWREGRVGVPGYCTQAAQLTEARTENRWLREGSQMVQQQALRDFAQALARFIAGTHRKPTWRKANQNEGFRIVAPERARLRRLQRKLARSSRGSRRRQRVKLAIAGLRAREADRRSDWAEKVSTDLARRYDVIRIEELHIPNMTRSARGTAKQPGTGVRQKAGLNRSILASGWGKLARRLQDKAPGRVEKVHPAYTSQRCSACGHVAADSRENQALFRCTACGFADNADVNAAKNIAAGHAVTARGRSPLGGRVNREPQPLPLSA

SEQ ID NO: 38344 - protein, 379 aa, unknown
  TnpB Polypeptide
MLRAIKVRLYPDKQQEQTLQKVLGCYRFVYNHMLARKQEAYKSDKTNLGLTELSKYFHHELLKDEQYQWLKEQNTKVMQQSIRQMLTAYDKFFKEHKGFPKFKGKRDKQSALFPIDAISKKNTFDTRKITLTKKLKDIKFRCSDLYFSRLQRYKDNIRSATLSKTKSGCYTLSILIEMNDNEFVKFGKTNRDVGIDLGVKDFVIISDGEVFENKRFFKSDERKLKKLQRQLSKKRKGSSNFSKQCKRIAKTFETITNKKENYIHSVVNYLLRKYDTIYMEDLNTSGMLKNHKLAKAIQEVGFFKFKAILQNKALQNDKKVILIGRYYPSSKTCSNCSYIHKGLKLKDRHWQCPNCGSYHDRDYNAALNILYEGRRVSVV

SEQ ID NO: 38345 - protein, 206 aa, Sphaerospermopsis sp.
KELATLSTGVTFVNPKHYKQNLAKLQRLSKIYCRKVKGSSNKHKAKIKLARHHARIANLRKDTLWLTPRFAIINLPFGFASSTGRKPTPPTGLTTYLCKNHANIVVEDLNVSGMLSNHKLAQAIADCGFHEFKRQLEYKAKKFGCQVIIADRFYPSSKTCSYCGHKKDSLSLSQRIYCCENCGFEIDRDLNAAINLSRLAKACSRS

SEQ ID NO: 38346 - protein, 451 aa, unknown
  TnpB Polypeptide
MTAAGMIKSGQELAKLYIEDAKEDIKAIRKTLRKKKNYRKKLLKIKESIIKHTKDPKKAVKGSANIQYEKDGSVTVQFFQKIWVYETLYLFEHQWLDRKLRQLKTHIAKMEHKLKRLEIRQQRLKDHPLKVRFGGKKLTKNRTIPERHRALEKRRNRRMQISGRKDCKYGNWVFRYDTKTKTLEYRSMTDWDGNRICFPNVTFPYGQEWIEIWLQERKGAIAWEIIDCGTAWQIRCILTKEPENMNNYYGDGTIGIDINYDHIAMTETDQSGNLLHHEVFHFDMEGKRSGQIKHQISEALEKVFQYADQQHKPITAENIKSIQRKKFYDKHRKKHRHISMFASACIRELLISKAVKYHIGVKFVHPAYTSKAGKMRYLRRYGLSVHEAAALCIARRGQGYKESIPSCLKPYLKDEKVRTLIPQQWGPLTKLINKVTTQELLSYQDPVLHRN

SEQ ID NO: 38347 - protein, 489 aa, unknown
  TnpB Polypeptide
MTICASTSVRSVLTRREINAVEIRRSYRYVLRPSGTQERALLAHLDAHRTLYNSALEHRRTAYRMARVSIFYYDQARELAAIRADDPSQKACNHSSQQHTLRRLDRAFQAFFRRAKAGQTPGFPRFRGKGRFRTLTFTHGDGATFTDTHTIPLRHPFAATIKIQGVGAIPLVYHRRLGERESGKMGGRMADPVKIGTVEIIRTGDRWEAVLSCTLTVPTPKDAYPTLPATGVDVGLDYYASLADGEQVDNPRFLCKGVDEVKRLQRKLDRARRERMAEKRATKKREAEAAKAKATGTPAPPTPPAEVWVSTRGKKRPKRTAERRARVLSRAVARRHQKISNQRAYFQWQLARSLIARFGLISVEMLKKGNMTRRPKKKLDEGKTKEAGRPVYAPNGAAAKSGLNKSIYDAAWGLFVQRLGSKAEEAGCLIVGVRAAGTSQECPRCTRKTPKTLDERWHTCPCGCSLPRDVAAAQVILARGLTSVVALAA

SEQ ID NO: 38348 - protein, 414 aa, Microcystis sp.
MKARYQYRIYQTDQQKRFLSQLFGCVRVVWNDTLSYCQELYRQGEKKPKYTELSKRLTQVKKTEEKQWLTEVSSIPLQQSLRDLETAYSNFFASCKGERKGKKVKPPKFKKRKSKQSARFTDNGFTVNQHHVTLAKIGDLRIVWSRPLPSKPSSVTVIKDASDRYFLSFVVEIQPEILPDNGESVGIDLGIATFATLSTGEKIDAPKPLKKRLKRLRKAQKNLSRKQKGSNRREKARKRVAKIHAKIKDTRTDFLHKLSTRVVRENQTIILEDLNTSGMVKNRKLSRAISDLGWRSFRDMLSAKSDKYGRDFRIISRWEPTSQRCSCCGNIGGKKALNIREWECLFCGTFHDRDINAAINIKVAGGQSETSKNGRGGKCKTSVKEAASREASTHPKIVQLSLFDLPGITVRPRR

SEQ ID NO: 38349 - protein, 261 aa, Microcystis sp.
MIVLEMKAVVKPSQCSAIDEAIRTVQFIRNKALRLWMDAKREDKIDKYSLNKYCAVLAKQFKFVDTLNSMARQASAERAWSAIAHFYDNCKKKIKGKKGYPKFQKNNRSVEYKNCGWKLSDDRKKITFTDKKNIGTIKLKGTRDLNFYPIDQIKRVRIVKRADGYYVQFCLSVDIREYAKPLEPTKRCVGLDVGLKVFYANSDGETVEIPQYYRKAEKRLNRLNRKKSKKFRKGQPQSNNYQKARKRYARKHLRVSRHNYL

SEQ ID NO: 38350 - protein, 182 aa, Microcystis sp.
HHRSSRLQTQLKTRNNQPSSKRLLFLTHKRNCRVENYLHTASKRVIDWCIRPQIGTLIIGHNERMKQSLNLGKSNNQQLVNILHNRLIEMLTYKAQLKGIKVIITEESYTSQSSALDRGELPKYGEEKPLFKGKRLARGLYKMGTNQLLNADVNGAFNIIRKVIPDVIDQVIKGLPFNPLRA

SEQ ID NO: 38351 - protein, 446 aa, Sterolibacteriaceae sp.
MQLTHKIALCPTLEQAEYFKRACGTVRRVWNWALNEWYKQYAAGYKSNAMALKKQFNAIKYSDPQWLDENGRPWLRNIHRDAHAQPFAHLAKAWNRFFADLKNAKPAHPPKFKKKGRCRDSFYVANDKFKLDGKTIRLPKVGSVAMTESLRFDGKILGATVSRTADRWFVAVQVEVLDTQFYRERTAHGMTGIDLGIKAAATLSSGEAIDAPKPLKHALRRLKIRSRRHSRKLEAAKVRAGFARHAHLPKGARLPLSNNRRKSAAILAKLHARIANLRADFMHKLTTRLCRENQAVAIEDLHVKGMLANDKLARAISDVGFGMFRSQMEYKAKRYGTRLVVADRWYPSSRQCCVCGWKNEALALGHREWDCPHCATHHDRNLNAALNLKRLATATAIPVASPSGNGGTAAEGVSAVVGKVTPVRYECGLQDGSGQEENSAHIGALS

SEQ ID NO: 38352 - protein, 418 aa, Sterolibacteriaceae sp.
MKVQRAYRYRFYPTPEQEEQLAKTFGCVRSVYNWGLERRTRAFYERKQRLYYKDLALALTALKKTPERAWLNEVSNVALQQALRHLDRAFANFFAGRAAYPTFKSKRDAVQSASYMRNGFTLRDGKLTLAKQDKPLDVRWSRPLPNGVQPSSVTVTRTSGGRYYVSLLVEEDIAPLSQTNERIGLDFNAGAIVDSKGRVHRLPQRLNDLEARKRRYQRAQRRKITAAKVRMGLEPNAPLPRGARLPVSNNLRKASRKVGRVQEHIAAIRSDWQHKLTTSIVRENQVIAIEDLALRGMTASARGTPEKPGKRVHQKAGLNRAVLNMGFAELRRQLEYKAQWYGREVIAIDRWYPSSKRCSACGYVLPKLALSARKWTCPACGQAHDRDLNAAKNILAAALAIKAGAAALRIDEPRDSGG

SEQ ID NO: 38353 - protein, 360 aa, unknown
  TnpB Polypeptide
MSDATIHRGRVIRLYPTPAQAERLSSWVGAVRLVYNLALEQRRMFYRPGRQFNYVSQGRELSGLRQAFDWIADVPRDSLDQALIDLDQAHRNWWAGRAKSPDFRRLGQNDSIRFPKPESVRLRRCGRKSVRLRLPKIGEIAARSDQLPDGDIRSVTVRRQADQWFASIQFERAAATAQRLPGEVGIDRGIRAFAALSSGELIVGPNVGRRAANALARAQRKLARKKRGSINRAKQRRRVAKLTRARAGQGRAAKAGLNRSILDQGWSLFHRYLAYKLAERGGLLVMVPANDTSRTCAECGVVDKESRKADRFTCTSCGHSADADVNAAINILSRGRATALPVEASVSRPADEAGTSGRAA

SEQ ID NO: 38354 - protein, 360 aa, unknown
  TnpB Polypeptide
MFKNIKSWQKGKKEYKKNPNKFLGIPRLPNYKKETSICIFTNQQIKIKGGLILFPKMTGLPSIKTNQINIQQVRIIPKLNHCIIELVYDKAESKPLKYNGKWMGIDLGLNNLMACTTNDDAFIVDGKKLKSLNQGFNKIIAKMKSTLPFIPNKRTKTGNRMQKGTSRRIQAITDRRNRRVDDYIHKSSRLIVDVAKEKGVTKIIVGNNKHWKNEINIGTKNNNSFCSIPHATLIEKIKYKAQLEGIEMICTQEAYTSKCSALDLEPIKKHQTYVGKRKKRGLFITKNGLLINADCNGSLNIARLGLSVSGDEINFSESLVRCVSQPKRVNVLNNKTKLLKHLLLNDDMSDTTIKINKYNQ

SEQ ID NO: 38355 - protein, 482 aa, unknown
  TnpB Polypeptide
MDLPVSQKPGKATKEDKKKRKCKKQTRTHAVTHIRLIEANPGKLDALDQLIVVFTALCQQYVTLFCTTETSPDKYADPVFESELSERWQRVSMQQAAGIAKSWRTNRQAAYAAYLEDLADYADAKAKAETSGVPLDPKRKEPAWREWTMPELRVPCIQANANVLVVEKSEDSTFDYWLRISTLDKGNPLRVPVKLASYHKKALAGRTLNTSTTLSKRKGIWWLTLSFDLDVPLETEPSAPRVGADVGIANFITTSTGKRYGSFHGKLARRQKRDREKRRRKAKLRACLKKKGITKLPSTSSASGQRLGRHVRQEINRAVNLMIADHPHARIIYEDLSVASMRFKARSMNAYLYASNLAHIPKQIAWATAKRGMAAHTVKAAYSSQECSRCHYVDRANRPNQQTFLCRVCGYRKHADYNASQNLASRFGDDELAACKGKKEVKTLLISRHETWKQTYGLAVVQPAVQLGLWDHPEASTDVAQR

SEQ ID NO: 38356 - protein, 562 aa, unknown
  TnpB Polypeptide
MSKKKPNSELPQKEPRRTTPSMLLELPLIVNEGQAKRIRGHLEAGRALYNAVLSEGQKRLRRMRADPAWQAARSIPRTRKQERRAAFSALRQRYGFSEYALHEYAKTARVCWIADHLDAVLAQTLATRAYQALNRVCVGDARRVRFKSRGRGLSSLENKRNDTGLRFVLQKPEEGNRGFLIWQDDQVEAVIDWEDEVVAHGLRQRIKYARLVQRCASSERAAGADARGFRYVVQLVLQGVPHRKQKHAVGNDIIGADLGPSTIALVPRTGEASLRVFCEELAPNALAIRRMQRRMERQRRAANPEHFDERGRINRQGKNRLRWKTSNSYERTRRRKATRERKLAAQRKSLHGRHVHEVVAVGNTVILEKISYKAWQKQYGRSVGLRAPGMFIELLRRTVASTGGILIEVPTRTAKLSQFCHGCGRCLKKPLSQRWHHCPCGVGPVQRDLYAAFLASTLSADHLIPSCAQGVILWESAEARLQAAHARVLQRANEGQSLPRSMGVPRAGARRPQSLGEPTPEPTFLLTQGKLEAWKDRSEPPVLEPGESSEKMNTLAIDGASC

SEQ ID NO: 38357 - protein, 438 aa, unknown
  TnpB Polypeptide
LILYANVCYTTHICTIYLNSLKKLGSPSRPCNDGTGKDGWWLAAPSPIVVTIRTRTWRWSLDCPPPRRNPGMIKAHKIRLHPTPEQANYFARAAGTARFVYNWALAEWKMQYETGGKPHATALKKQFNAIRREQFPWSYEVTKCAVEGAFMDVAAAFKNFFEGRKAGRQVGYPTFKSKKRSRQSFYLANDKFTVGDHWITVPKLGRVNMAEKLRFAGKILSARISKTAAWWFVSITVEMPDVVPITTNPAVGIDVGLLRLATLSDGRRYENQRPLRHLLKKLRRLNKELARRTKGGKNWQQTKGKLSRLHYRIACLRHDLLHKLTTEVAKTAGLVGVEDLHVKGLIRNRCLSRSFSDAALGKLLDLLESKVSRAGGQLIKVDRFFPSSQLCHCCRARREDLQLAEREYACRACGYVGDRDENASLNILQEALRLVGQS

SEQ ID NO: 38358 - protein, 215 aa, unknown
  TnpB Polypeptide
LLDGTAKAGSIKLWQSRRKIGYACLSVSMEAPDARDTGRWIGVDRGQNVPVVAATPDGPVVFRQGRCIRHIRRTSAERRKRLQAAGKLRAVKKLEAREGRAVRHINHCLSKDLVAMAAERQAGIRLEDLSGVRSTKPRKDTKSDAGQNRDYWPLYQLEQFVRYKSVQAGVPVDQVRPHYTSKACHARGHIGIRKKHRFECPHCGHKAHAAANACL

SEQ ID NO: 38359 - protein, 441 aa, Thermacetogenium sp.
VPHLHGFTKTLRYNLLMPTDVEEQALRTTLLYRRVVTYYLQVFQEHQEIIDHGKWLKMAEKLTHRTKDNPDPEYPFDREFLNLPSGFRRSAIAEAHGKAQAWKTSYEKWEERKRKHEERNRRRIIAGKKPIEFAERPPQYPKDNNCWLSYYGTEYKWLDSHHIMLKMFTGKSYVYRKVTLLQPFAVPPGYVAGSPVLVKKPTGWELHVPIVRVTKLNLKKIEELVKDTSLKICLVDLGMNRHAAMTIQDTEGRVYAAKLISAAKDNHLRKRYLEKIVNLQMQTGVIPEGERFAKHLWDKVSNLNDDIAHRVSRQIVDFAKIHGAKIIVFEHLDGLRPSKGTKSHRLNQKFILWVKGRIFRYTRYKALHEGIVTCRVSPKETSSRCPYCGFPTIVRYNKGKNGEETKGVDLAKCTNCGVRDINSDFIGSLGIGRNFRLKYCP

SEQ ID NO: 38360 - protein, 340 aa, Chloroflexi sp.
MLIYEYKVDASKKQYAAIDEAISIVQFIRNKCLRLWMDERGISKNDLQCYCAVLAREYPFATRLNSQARQASADRAWFAISRFYENCKMHKPGKKGYPRFQRDNRSVEYKQTGWKLEPDGKHLTFTDGCGIGRLKLLGNPKQPIETFPTKQIKRVRIIHRADGYSVQFSVQAERVIEHIPTDKQVGIDVGLKAYYTDSDGNTVDNPRHYRQAEQKLKRLHRHLSRKQKKSGNRKKARKQLAKAYLKVQRQREDFARKTASTLVSSHDLIAYESLQIRNMVKNPHLAKSIHDAGWGQFLRWVNAYGAMHDIPVIAVPPQFTCVPTSVPAVAWYWIEITMPR

SEQ ID NO: 38361 - protein, 435 aa, Thermococcus sp.
MQKTNGLPAAVGAWRSRAPSGPFINFFAFSGENSDKVRLTTKLKLVNPPDFTELFKIYRSMVNRLIKYALKHGDANFYRLKRENYHELRKKYPSMPSHYVHTACQLASAIMTDYFARKAQGKAKKRPQFRANSILLDDHLFKVDFENNTVRLLTNNGPVLLEFSPTKHLQKFLNGDWKLGQAFLVKKDEDVFVNVVFTKDLKIREPKTFVGVDLNENNVTLSLPNGEFVQIITHEREIRTGYFVKRRKIQKRLRAGKKRRELLAKYGKRERYRIIDIYHKIANKIVELAEKYNAGIALEDLTEIRDSIRYSAEMNGRLHRWSFRKLQSIIEYKAKLKGIKVVFVNPAHTSSLCPVCGGKLSPNGHGVLKCSNCGFEADRDAVGSLNIRLRALKMWGVSVPPESPTMKMGVGKPRRAERVCVCCLWPRSGACSSNS

SEQ ID NO: 38362 - protein, 526 aa, unknown
  TnpB Polypeptide
MAGAAPPPHGSLRAWETPVMQRTYETRLPDHPARDVLLDAYAELYERAKRTLFARLQAGEPLGALKCALLRRFGLTARQFNALAADVRGTIAGITARRPTLIATLEHRIARARTVLAKIRRGTNAYHQKRRRLRILEQRLTALRADEAAGRVRVCFGSRRLFRAQFALHENGYAALTAWRRDWHAARSRQFFVIGSADETAGCQGCVATVEADGSITLRLRLPDALDARGKYVLIPGLRFRYGHEAVVAAIGRNLSPHKDDWQAISWRFVRDRRGWRVLSTVSVPPGARASREGLGVVAVDLNADHLAVAELDRFGNPVASLRIPCATRGNTHEQVAAIIGDASKQVVAYARARCKPIVAERLDFERKKAELEHRGARYARMLSSFAYATFHAILAARCDDAGIALRRVNPAYTSVIGAYKFADRYGLSRHHAAACSMGRRGMGLAERPNRRMGDHVTFPLPVRNRGKHVWSFWRKVAQREAALRARGRPGPRARSSPAASPARRGISSSAAGGTPARESSAALFG

SEQ ID NO: 38363 - protein, 461 aa, Halorubrum sp.
LADVQVPNEHIWKWLMKRTNTFAVRPLSDTGEQLLRDLLDASAALWNEINYQRLMRYNDEDGFEDEDVWNADTGSLEGKYKGVLGASTAQQVIRKNSEAWRGFFDTKKAYHDESNTSVTEHPEPPGFRGNKDDGRVLKGVIRNDAYTTEWGERSRLEILVGSELKDRYDHTGRLRLEIVGDPNWPNYQKQGRLDLWYDETDCTFRASQPVTITDARATPLAAEKAALDIGANNLVACTTTTGDQYLYEGRDLFNRFRETTREIARLQSKLQEGQYSSKRIRRLYRKRTRRRDHAQEALCRDLIERLYEDGVDTVYIGGLTDVLDTHWSVETNAKTHNFWAFKQFTERLACTAEEYGISVEVRSEAWTSQECPQCGSTDQTKRHQDTLTCPCGFEGHADLTASETFLKRHTEKAVRPMARPVRFQWDDHNWSGTPHPHESPKEQRTDPSTVHHDGNVASGES

SEQ ID NO: 38364 - protein, 307 aa, unknown
  TnpB Polypeptide
VFAAYFRRVGDVSGKRRRVGYPRFKPYQRFDQVLFVAGDGARWEPVGGGRWGYATFQAVGQVKANQHRPVLGRVKTLQLKREGRRWYVIIVTETEPVPLPPTGRSVGVDLGVARFLTTSDGEIVANPRFLDATRERIADLQRRKARARPGSGNCRRLRRALAKEWRKVRYQRRDFHHKTARALVESNDAIALEDLHVDSLTASARGTVEVPGRNVAAKAGLNRSILDAGWGQFTSILVAKAESAGRRVVLVHPASTSIDCHLCGASCTRPRQDIVVCPIHGDLDADLNGARNIATRAGLGSGQASAA

SEQ ID NO: 38365 - protein, 548 aa, unknown
  TnpB Polypeptide
MHRAIARSYVAVPTQGVCIRDRIRDLTPEDDGVLRAVGAHLGRLASADLARRVRDGLDHSGEAWADRKRDLTALSSSRWAGSITKATNDQWGLARRAQNAHADALAAGIRTLRHRLSLPVGEPGRRDRPGGYRSTKEWHAKSRRLAHLEVRLAAVEKDRAIGHVSVVRGGRGLAKKRHNLAAAGMTQSQWQQIWESARWFLSADGESGKRGGNETIRVTPEGEVSLRLPTPMRHLANAAHGRYVLAGRVEFAHRGPEWRARVAADRAVAYRIHYNPGKDRWYVDALWRPKDAPAMSLAALRSGEVIGVDLNADHLAAWRVDIHGNPIGRPRTFAYDLSGSSTRRDAQVRHALTALLRWAVRTGVKALAVEDLNFTDSESREHYGRRKWFRRLVSGLPTGRFRARLLAMASEAGVAVIAVDPAYTSRWGAEHWQKSTSTPNHQTTRHEAAAVAIGRRALGRRLRRRAAPPRQHQTDAAGHRTVQAGGGSQGREEASRPGSGSRTRSVPPTRRPYAGDQATQHRSGPPIDQGLTLVDVQERFDPLFAHPG

SEQ ID NO: 38366 - protein, 279 aa, Exiguobacterium sp.
MLKGYKYRLHPTAAQAEFLVRTIGCARFIYNKLLEDRITLHEEAKANGGPKRKPPTPASYKPLFPFLAEAAGFPVFKSKRKARASYTTNNQHGTIRIEGNRVRLPKVGFIRFTQHRIFDGAIRSATVSMTKTGKFFVSLLVEQDDEPWVPAEHKIGIDLGLGHFAVMTNDALVTEKIANPRNLRKAEARLKRTQRALSREKARLVLAKKHEQVKNRRHDFLHKLSRRIVDENQVVVVETLKPREMMQDRRLAKSIGDAGWGEFVRQLAYKCRFHGRTLV

SEQ ID NO: 38367 - protein, 206 aa, Methanohalophilus sp.
MGIDVGMNYLAVASTTDRKCSFFAGGEIKNLRNQYKSMRKRLQSKGTLSAKRMLKHIAGKEKRLMRDVNHTISKKIVKFATEKGVSVIGLENLSGIRDSTLPKVSKKRRHNHSSWAFRQLQTFIEYKAREAGIITHYVDPSYTSQTCIRCNHISKNNRNRLSFRCEKCGYENNADLIGAMNIEHKTRDYRYILESQGCLSATRTNA

SEQ ID NO: 38368 - protein, 419 aa, Methanohalophilus sp.
MQLTKKYKVHPTELQKDMLWELSNACTYLYNIALSERKDTWKNDKKSISYTKQQNDLPQIKEGNPDINILYSKTCQMVLRKLDANYKLFFGIHKNGDKKARPPKFRSRKYFFTITYNQSGFKVVGNTIRFSHKINNADLIIDIEHDISNLKIKQIEIFNEDKKGNGYFFVTITYEPEINVPYVQNNHFQAIDLGITKTITAINDKGKFFEINNPRYDLYWDSKISAVQSRRDHCKKYSKKWHRLNKTISTMVSKKNNQIKDWQHKTTKKMLENTKANTIIVGKLSVKNMGKSKSRSLNRSTQNNGYLSRFIEFLTYKAELIGKQVVKIDESYTSKTCYVCGKQHDMPLYRRDMTCDCGNIIDRDRNSAINIMIRYLSQNAIWTGYEHFAHNLRQTGLLTFDVSQIHPMNDITTRRNLHA

SEQ ID NO: 38369 - protein, 370 aa, Methanohalophilus sp.
MLKACKYRMYPTKQQEEMFSKHFGCVRVIYNWALEQKIKSYEQDGKSISRFTLNKTIPKLYEDMEWLKEVNSQSLRGATLNLENAFTRFFREKKGFPKFKSKKNPVQSFSVPQYYKVDFETNKVKLPKIGWIKTILHRHFDGKCKTATVSKIPSGKYFISILVDDGKELPDKQDFNENSAVGIDVGIKDFAIMSNGEKIDNPKYLNNSIKRLKVLQKRLSRKQRGSKNRGKAKQQIAKLHEKIANQRNDFQHKLSSRLISENQAIALETLNVNGMLKNHCLAQSISDVSWSSFVTKLEYKAEWYGKSILRIGQFEPSTKICNVCGYHNKDITLADRKWQCPDCGETHDRDVNAAINIKKFALNKQNLIGI

SEQ ID NO: 38370 - protein, 423 aa, Symploca sp.
MIVIEFKAYGKQKQYDAMDEAIRTANFIRNKCIRHWMDNQGIKKTDLSALCAVLAQEFSFANELNSMARQASAERAWLSISRFYKNCQKKVPQKGFPRFKKHSRSVEYKTTGWSLCPDKKSISFLDKKNIGKLRLKGKWDLWRLNIKLIKRVRIVRRADGYYVQFCVKTDIVEELEATGKTIGLDVGLKDFYTDSNGNSQPNPRFYRKGEKRLKFHQRRVSRKKKGSANRKKAINRLGKTHLKISRQREEHAKRLARCVIRSNDLVAYENLVVKNLVKNHCLAKSINDAGWYKFRKWIEHFGTKFGRITVAVNPAYTSQNCSNCGEVVKKSLSTRTHVCQCGCQLDRDHNAAIIILNRALSTVGHTETWILNPNARGDLVSTLIGENLLKQAESLNQESPSMQERGVSKVFYSYCSEQPPKAM

SEQ ID NO: 38371 - protein, 401 aa, unknown
  TnpB Polypeptide
MISSSRHSLSGMNKSKRAKYLSFLYDYSEFVKSVVKHIWRYGHGEFSIKNQQLNLPKYIDYKNFKFIKSDLSARAKSSAVTQAAQIIKSAVEKQRRVLWVKQNKCDKVKDKSFSEPKITFIKPMLSSKCCDWKQSEGKFFGFLKLKCLGVKYGNFNIPVLSSRIPKGIIKNGFLLSEGSVQICWEVFSLPRDIGEKILAIDQGMIDVVTCSDGQKLNRSDSHRHSLVSIIEKLSRKKKGSKSFRRAQKHKKNFVNWSINQINFKDVKEVRLEKVVNIRFRKKSSRKMSHWSNPEIRDKIKRRCEELEVPVVEQSCAYRSQRCNSCGHTRKANRKGKEYSCKNCGYCADADYNAALNHLVDLPDVPRVFLCQRYNLKEGFFWKPEGFYAFDGSEIRVPNSKN

SEQ ID NO: 38372 - protein, 365 aa, unknown
  TnpB Polypeptide
MKSKTQIKTLKVRIKDKHAAILNQWAFEVNQVWNAANELSADYSWVPIPEVGYINCGTSEYDLQKELKTIRAERNFSISAVTIQSVISQHAKSRRQFKKNKLQWRCSSGSKRSLGWVPFKSAGVKFINGQVRFCGKLFSIWDSYDLSKYELGTGSFSQDSRGRWYFNTTIKVEIKSSEGKTSVGIDLGLKTIATCSDGTVFERRRITDEFAKELATAQGAKKKNRVRAIHAKIKNTRSDAIHKFTTTMAENYGAIFIGDVSSKKLTKTKMAKSVLDAGWGMLKTQLKYKAIARSVMFEEINEKYTTQICSCCGVISGNSPKGRAGLGIREWICCECGAIHDRDINAAKNILALGHERLAVGISVL

SEQ ID NO: 38373 - protein, 471 aa, Chloroflexi sp.
MKKRRKRTKAGSPQVITKAVTHIGLEAPNPGKLTTLDTLAEVYLALTQQYVTLFCSNEVPNGFRAPCFLTSLSERWHRVAIQQAAGIAKSWRSNRANAYEDYLDQLSEYQEQKTDGTLEDQAKEPEWREWNIPTLRQPCIQANGNVIKLEEAEDSTFDYWLKVSTLDKGHPLLIPVKLADYHKEQLTDPQTGKRRKINSSVTLNKRDEVWWLTLTYDETVAVATSPDAPVIGIDVGIANFLTTSDGKQYGTFNGKLRKRQKQDREKRRRKAKLRKCLEKRGVPKDKLPSTSSATGQRLIRHVRQEINRAVNLCFDEHQDCQFAYEQLSVASMRFKARTMNAYMRASNLAHIPDHITWNATKRGVLATRVKSAYSSQECHMCHYVDRKNRPNQQTFCCRVCGHTTHADTNASQNIASRLGDLELRACQNRQEVKALLMRRHEQWKQKFRHSVVVPPVQLGLWACSEASTDVG

SEQ ID NO: 38374 - protein, 376 aa, Serratia sp.
MKRAYKYRFYPTCDQVELLAQTFGCVRFVYNTILRWRTDAYDERKEKIGYIQANVRLTALKKETDLKWLNDVSCVPLQQVLRHQQAAFSHFFASRAKYPKFKSKHHKQSAELTASAFKYRDGKLYMAKSKAALDIRWSRPLPSSPSTVTLSKDTAGRYFVSCLCEIEPTSLPVTPKMVGIDVGLKDLFVTDTGFKTGNPRHTAKYAKRLALLQRRLSKKEKGSNNRARARLKVAKLHVKIADCRLDNLHKLSRRLINENQVVCVESLKVKNMIRNPKLSKAIADASWGEFVRQLQYKAEGSGRSVVAIDQFFPSSKRCSGCGYIQPKMALNVRSWHCPECGADHDRDINAARNIKAAGLAVLAHGERVNPKPLTAA

SEQ ID NO: 38375 - protein, 397 aa, unknown
  TnpB Polypeptide
MESTILRRVYRFRLEPSSLQEDGFRRYAGARRFVWNWALQQKREHDQATGTGLSEKELSARLTALKGESDTAWLKEMDSQLLQQVLADLKRAFTAFFEHRARYPRFKSKKRDTARFRIPQRVTLTNGSLTVPKIGRVKVRQSQAVEGVTKSATFKRDACGHWVVSLVAEMEMPAVALPLPTDEERVVGVDLGLKDAVVTSAGARVAAPRFYRAAQRQLRRAQRSQSRKVKGSKNRAKARLHVARVHQNVAAKRNDFCHKLTTRLVKEHDAVCIEDLNVKGLAKTKLAKSMLDASMGTIRRQLAYKGVWYRTHVVTVGHFYPSSKLCHECGYKHDGLTLADRVWACPSCGCVLDRDLNAGRNIKREGLRILAAGHADSLNACRECVGRPMGAALAIPA

SEQ ID NO: 38376 - protein, 436 aa, Thermococcus sp.
MKRSVTVKLQPSKEQEKILLQLADRGAKVWNRVNYLRRQQFFQGQIVDFNTTEKTVYDEFKKEIGSATVQQIARKNAEAWRSFFSLLRKKRNGELPDWLKPKPPNYLKEDGGRKPLIVLRNDQYRIEGNRLILKGLGKFKRLEIQFKGRIHLKGRQGRLEITYDEVKRKWYAHVSLTVEEKLEGEEWVKLPRRPKGGLSAGIDLGVNNLMAVYVESGESFLVNGRPLKSIDFYWRRKIADYQSKLNKSGQKTSRRLKRMHEGAKLQAKHYINTAVRGTVQRLYELGVSKIVVGYPRGIARNSGKGKKQNFLLSHVWRFNTVIKRLKEVAEEYGIEVMVVGEAFTSQTCPVCGKPHEGARFVRGLFKCRATGLVFNADLVGAFNILKKVVKTITPNLSGLYAQRRGNWPEARPEGLKARFELGFNETPQTSPSLARG

SEQ ID NO: 38377 - protein, 498 aa, Oscillatoriales sp.
LLTNYVYKLRPNQTQDLKISNWVDMLRSHYNWCLNDRIIQYNQQFVQGDYSDLRNQVEACPLTCFVSKNGATGNPWKDGKVDFEGKLKNPRRTAGDIQITSLPKLKIARPWYSGSDSTVLQQNVKRLDTAYRNFFEGRGFPQFKNRSNFTSFTFVMGIKIQGNKIYLPKVGWMRFYNSRSIPKDSRTLLGREPSWFQWLYNLSVIPHLFEKGYIKACAVRKRQNGWYVSLRIEDKSVPDYKAKSLQDVVKVIGCDLGITKLVHLSDGYQIENPKFSTNKKVKRTLKIRQRRVSRQVKGSKNRKKTAKKVGLLHQKISNRRQAYQWKVAHKIVERNIDAIALEDLHISGMLRRCRVKIEEKTGRFLKNGQSRKKGLNRSISDAGWGELILKIEYLAAKQGKVVIKVNPKHSSQECRNCGHIDKSNRDGEKFICVECGYHEHADIGAAKTIRDRALKMVRGDSAKPGTMYLDAQKVSPRSKSKCGEFGNPSHRDIKTEMS

SEQ ID NO: 38378 - protein, 411 aa, unknown
  TnpB Polypeptide
VDRLTSRNLTRAKRQSQTCKVYECKIDRSHLSNFAHKHLSSLFKEAKWFYNYCLSNENLNDANCTLKSVPVKVKDEYEDRKFNVLQTQHRQAIKERLFTSLKSLSSRKKQGYKVGRLKFKSEINSVPLREYKRTYRLDFDGKRIKLAGMKKKWLRVNGLEQIPDNADIANSTLVRKGKDYFLHITTYVDKETSVVPNMSIGIDFGCETQLSFSNGIKVEFQVPTSKRIKRLDRRIMRGNRVASKKKEQDKRKRKVEYGHLTNKKKDIRHKLVSAIVKNYKYVCFQDENIHAWHAGTHGKKIQFSGIGGIIGDLKHKSHTPIMVGKFFPSTQLCPNCGNKQKLSLSHRTYSCDCGFVKDRDWKSAICIEEEATKQIPMDDRNFKTREILTSTFFETLVAINGIKVSKLKSMN

SEQ ID NO: 38379 - protein, 223 aa, Microcystis sp.
LANRWFISFKIDVERQTTDKSIDGIGVNLGVKNLATLSTGEVIEGSKSYRKHEKKLARLQYLNRHKVKGSNNWKKAQKQIAKLHFKIANIRKDTLHKLTTYLAKNHGKIVIEDLNVSGMLANRKLAKAVQDMGFYQFRRQLDYKTQLYGAELILADRWFPSSKTCSNCGYKKESLSLTERVFECEQLLKLRVKFGRFLERVFPQVGMEKSHPHTLSIYRFCLN

SEQ ID NO: 38380 - protein, 265 aa, unknown
  TnpB Polypeptide
VKHVTIKKDKTGAWYACLNVERGTPENPATTGINAKNSVGIDLGIKKFIHDSDRRQINRLDLSADRERLEREQQARTRKEDGSSNWEQQRQKVAEVRKRMRNKKADFKHKIAAFYTSEYDAVFVEDLNVKSMLEGERNSRNTAEVGWRDFITILKHHGHKRGCHVVEVDSEDTTKECSQCDVKTDKPLWVREHSCPSCGFETDRDYNAALNVWERGLTKLGVVHSEETPVETGTAVETAESLSVSASAVVETGSPCLTEAAQAAE

SEQ ID NO: 38381 - protein, 460 aa, Micromonospora sp.
VKTIQAYRYALDLTPTQERAALAHAGAARVAHNWALARVRAVMCQRAAERTYGIPDNQLTPALSWSLPGLRKEWNAAKRQVAPWWAECSKEAFNTGLDALARALRNWTHSRSGHRAGRPAGFPRFKSRRRTAPSVRFTTGTIQAELDRKHIVLPRLGRLKLHESARKLARRIDSGTARIMSATVRRDGGRWHVAFTCEVERTDRRPTQPLSVVGVDLGIKHLAVLSTGEKAPNPQHLIGAQARLRRFSRALARKAGPDRCASRHPSGRWERTSARLSRAHARVRNLRRDGLHKLTTRLAREHGTIVLEDLNVAGMLRNRRLARHIADAGFAELRRQLAYKAEWYGGQMILADRWYPSSKTCSGCGAAKAKLALAERTYICTTCGLVLDRDLNAARNLAALVASHTTGSGPVAGRGAVRKTQHAGLVAVKRQPGAASAGQTGTVRPQGRTTDRELTRAGDG

SEQ ID NO: 38382 - protein, 363 aa, Clostridiaceae sp.
LNKAFKFRIYPKTEQQIVIAKTFGCARFVYNRMLADRIQHYKETGKSLNNTPAQYKKEFEWLKEVDSLALANAQLNLNKAYKNFFRDKAIGFPKFKSKKSNHRSYTTNCVNGNIKVERGYIKLPKLGVVKIKQHRDVPDEYRLKSVTISRTPTGKYYASILYEYEKHIEPVEPEIIVGLDYSMKELFVSSDGTSAEYPKYYRQSLAKLKREQKKLSNCEKGSHNRTKQRIKVAKLHEKVANQRKDFLHKSSRQITNAVDVVCIEDLNMKGMSQALNFGKSVSDNGFGLFVSMLDYKLREQGKQVVKIDKWFPSSKKCSGCGEVKDALLLSERQYHCEACGITLNRDYNASLNIRSEGIRMLLA

SEQ ID NO: 38383 - protein, 402 aa, Tatlockia sp.
MQKAFKITLLPTHNQEVLINKTIGCARFVYNRFLALKKEVYNTEEKTLNYNACSQKLTLLKKEIEWLKEVDKFALQNSLKNLETAYKNFFTDLKKTKGKKGVGFPKLKKKYGCKQSYKTNLTNNNIQVLQNRLKLPKLGWIRFHKSQEIPGKLVNVTVTRTSSGKYIASILCETDIEKYPQAVQNIGLDLGIKSYLVTNTGEVIDNPKYYRTQKRKLRKANRKLSRAQKGSNNRVKAKVKLARTYERITNLRDDFLHKLSTRLIKENSIICIEDLRVANMVKNHKLALSISDASWAKFVAMLEYKATWHDRVVQKVGTFYPSSQTCNSCKTINPLVKDLKLREWSCPTCSSYNLRDKNAAINILNEGLRLIAAVGASEAQNACRELVTPGLVQAEIVEARIA

SEQ ID NO: 38384 - protein, 409 aa, unknown
  TnpB Polypeptide
MKQLDSKRLKAYRYRIYPTEEQKEFFAKTFGCVRLIWNLMLNEKLNAYKNKEKIPRNTPAKYKSEYPFLKEVDSLALSNIQLQLEKAFRDHFKNKKHFGLPKFKKKKDKQSYTTNNVNGTIKVDFEKDLLYLPKIKTGIKIKLHRVFNGQIKSATVRMTKDGKYYVSLLVETENVKNKVKEPKSKTCGIDLGLEHFAIITNDFGTYKIEHPKYLRKAEKRLKKLQRDLSRKQKSSRNYLKTKLKLAILHTYISNARNDFLHQLSKTIIDDNQVIVVEDLNVKGMFKSKYISKSISDSGFGTFLRYLEYKAEWYGRELIVVNRFYPSSKLCNVCGYKNKQLKLSDRYWQCPICGTYHDRDINASINLYKVGLEQSELKPVERQRVSVKQEASSGAAHIPLSSYDTKNYYF

SEQ ID NO: 38385 - protein, 258 aa, Geobacillus sp.
MQRKGGMTMLRGQKVAFRASKRDLERLWACNRESARVWNECLRLSKEYFLQHGRRISKSELQKQTKGRFHLHSQSIQAVCHKYLFARQSAQAAIQKGLPHARYPYKQKKFFNTKWAKDGFNVYENGTIALSMGIHNGKREEPILVHVSHLPKGTIKEIECCYDHGWYLAITYDDGREAKAYQPGRSVGVDLGEIHTIGAFCENGQALLITGRKVRSLHRLRNKKLADIQRRQSKCQKGSRRWKKYERAKRYLLSKSER

SEQ ID NO: 38386 - protein, 361 aa, Vibrio sp.
MKRAYRYRFYPDNQQAELLAKSFGCCRFVWNNSLKYRTDAYYERGESISHSFLEKRLVHLKAEFEWLKEVSSVVFQQALRDQQEAFKNFWDHRAKYPRFKSKHDKQSIRLTKAAFKYKDGLLFIAKSKQPLNIKWSRELPSEPSSITISKDKAGRYFVSMLCEFEPTALPVTPNMVGIDVGLNHLFITDSGEKVDNPRHFKRYEKKLAYLQRQLSKKQRGSKNRDKMRHKVARLHAKIADSRLDNLHKLSRKLINENQVVCVESLQVKNMLRNPKLAKHIADVSWGEFVRQLEYKTEWANRTIAKIDRFFPSSKRCSCCGFVNEAMPLNVRDWVCPSCETHHDRDINAAKNIKTAGLAGLA

SEQ ID NO: 38387 - protein, 398 aa, Streptomyces sp.
VATYVKRAFKYRFYPTDAQAAEPYRTFGCVRKVYNMALAARTEAWARQERLNYGATSAMLTAWKKTGELAYLNEVSSVPLQQTLRHLQVAFTNFFAKRSKYPRFKSRKKSRRSAEYTTSGFRFRGCRLTLAKMSEPLDIVWSRPLPEGAALSTVTVSQDAVGRWFVSLLVEDPTVKPLPTTDTAVGIDVGLTHLLTLSTGEKITNPRHEHRDRARLALAQRRLAKKAPGDGANRAKARRKVARIHARITDRRRDHLHRLTTQLVRDNQTLVIEDLRVRNLVRNRKLARAISDAAWSQFRSMLEYKAAWYGREVIVVDRFFPSTRLCSHCGGIAEKLPLNVREWTCGCGAVHDRDVNAAKNLLAAGLAVTACGAGVRPQRESSRTGRSARKQEAPRREP

SEQ ID NO: 38388 - protein, 445 aa, unknown
  TnpB Polypeptide
MCHFCDTLIITKLKTTMITSYQYRLNPTYEQRCQLTRWLNMLRGQYNDLLAERFNWWEMNCCYVNACPLTCSIAEPKKQPNYYDQKRSLVQLKEEREWYKDIHAHVLQDVVKRVDLAFQRWLKGDSNGKRSGKPRFKGKNRYRTMAFPSMPKEPINGNLIKFPKLGEIKFIPHRPLPEGFRVKRALITKKADGWYVTLTLENKSVPDSPTVNIEPTQDNSLGIDAGLEYFVACSEGSTKTPPRFYRCAEDKLAKLQAKKDIKPKGSKPRRKLNQRIAKLHQKIARQRKQWHYELAGELLDKADVLFVEDLQVSNMTRRAKPKQDEDGKYLPNSQSAKSGLNKSFADAGIAGFLKEILPYKAAKAGKKVIQVNPKGTSQHCSNCLNRVPKALSDRWHSCPHCEVELQRDVNSGILIKKVGLGIASLKNANPESGRRSPRCTASQSA

SEQ ID NO: 38389 - protein, 402 aa, Erysipelotrichaceae sp.
MKIQLTQQVIINNRHRYFSMLDQLCLKSKNLYNYALYQIRQHYKETKTHLSYYDLNKRLSSENQIDYRSLPYTQCAQQILMQIDKQYKSFYKAIKSVKIKGKKVRLPHYKDKEKGRNIVTYTNQCFKIKNNILTLKIDKHNRIELKTDKENIQQVRIIPRGNHIIIEIIYNKEYELKENNNRFGSIDLGLNNLATLTSNVCQSMIYDGRKLKSINHFYNKRKGQLQSKLTKHKHTSKRIQRLTNRRNNKIKDYMHKISYSIVEYMKTNNLNTLFVGKNNGWKDSINIGKTNNQNFVSVPYNMLIQMLNYKCKLAGIHMIIVNEAYTSKCSFIDNEKICKHETYKGKRINRGMFRTANGLYINADINGSFNIMRLGIEKCNCDVQNIVPADMRFVYNPIRIKV

SEQ ID NO: 38390 - protein, 378 aa, unknown
  TnpB Polypeptide
MAINKKRKKKTKKLMICLSLRISTTDINFQKIDSLRMEFRRVYNEFIGVWYRTGKVSKSVFELHKFPHSLLANVRQSARDVAVEAVKSYFELKKENPYANPPAIKDEPMSPRLNYKEGYRIRSEVDNGEKFYKARITISPGDRVKVNLIGSEKQFTMLEKVLSGEYEIGSCNISKRKKKYYMNISLRNGEIPKPNNNKTFIGIDTNEKNIALSAINEHGEVLKSLILDYPVINSERQKYFVIRKWLQKINKDSVKKKIQNKEKLVVRDFYHKMSRIAVEWITQFSSPLIIMEDLTNIRNSINFGKRWNRRLHGWGFRTLQSMIEYKVNHCSIPVYYCHPALTSQTCAKCGLRKKSHKRKREFTCSWCGHVDHRDRNEA

SEQ ID NO: 38391 - protein, 467 aa, Paraburkholderia sp.
MYSTDMSSLLQSGVRFRAYPDAGLASTLARWIGCQRSIYNGKVSEDRLFSAQRRLEIASGNVQVQTPLDQAYSHFKDRVLTPWLYEVPSQILRNGAVRWMGAKQRQLKKLGKAPRRRTRRDFNSVHVTAELFRFVQTDAGAAIELGTKADPVGTLPFLAHRPFAVPKSIVVRNVAGRWFVSFCYEHASNVILREPHELAYELNALDDATLAGITLGLDRNVTDNCVATSEGAQFHFDPVSVERMRRKEVGAKRYQRRMVRSQKGSANRRKLAARIARRRDYATRVRNDFAHQLTYRLVHSQARFFVLEDLKIRNMSRRPKAVKDAGTGKWLKNGASAKAELNRKILASCWGRIDVFLRYKAARQNKLVGKVPAPNTSRGCSRCGHIHADSRHGGRFICVRCGFTLHADHNAGINIRSRGIKALRDGAFSVGKPQKRIAFRRRNSRTTGGTPEVACGANVRPDPRLAA

SEQ ID NO: 38392 - protein, 435 aa, unknown
  TnpB Polypeptide
MQVIINRAEKYRIAKDNDPSVFSFLMQNFGCNRKVYNLCVDSLYAQLQKQNYSNGHIIPSFQCPKVSDLKKQYPYLKQADAQGLANSVLDFLAAWQKFLKQKDHEAYTKRALRRAAAGTEPLSCKGLKGMPKFHSRAKGDNSYRTVCQYPSASNSLKNPTVRLNGNLLYIPKLKAGIRLVIHRAIPKGAHICHVTLRLDTDGYYYVSVAYSYTTEMNMDLRNIAICGGKLPDNLTFLGLDYSQKHFYVDSKGRKANCPHCYRKSEEKLAKLQKQLSRKQSGSSNYLKQKKKVQRLHAKIRNQRRDFAQQESTRLVRMYDVIVVEDIDLRAMGGALKLGKNLHDNGFGMFRTMLAYKLEQKGSCLVKVDKWYPSTKTCSHCGSVKEMKLGEATYVCPVCGMSMDRDWNAAVNVERKGREIFLEYFRTLLEQNNTAA

SEQ ID NO: 38393 - protein, 561 aa, unknown
  TnpB Polypeptide
MPKKKTNNEPKFTIQGEWFPEIYPAFRAQKWSRSNEDPLTTEMRLFCSCQRWAFNRLLEGSAREDLKKQGQQIFGLNSRFCDDVILKAKAIIESQKELLILEIKETEIKLVRTSKKLSWAKKDLDKAIERNDPAKIEKAKRVVHGRKARVKKITDKLNELKTHQENGTIPKVIFGGRSLWKKVCKGKVSNKEWRQARQNRLYSRGDETKGGNPNIKINYRDDEFTLSVTTSHLSEQTGTDNKNRPIMTKAPRITGKLWLPEKHRLKVWELLLSGAPYTVELIKGKDNRYRAHIAFITQIPEIATNPNRGCLGMDTNPNGLALTNIGYTGQPEPWPEGFDVPYPKALHKFDGEFQVTTHLNGFLYIKIPELSYSRGYRRTYLIGVLAKVIVDIAKVLDKPIALENLDFAKDRLDTNKKFNRMASNFPFKKIIEAVIRRDFKEGVGTKPVWPAHTSTIGYYKYMQRYGILIHHAAALTIGRRAISYKERITNELKQKIKLLKEKLTLKVSSLPGEGKGMTQTAKQLFNRLDRKIPVYNGLTRFKQELFYSVWHDLKQLVLLSR

SEQ ID NO: 38394 - protein, 521 aa, unknown
  TnpB Polypeptide
  misc_feature (389)..(390): Xaa can be any naturally occurring amino acid
  misc_feature (396)..(396): Xaa can be any naturally occurring amino acid
MQKRDSNIIKKYLGIIKKEHDNLVTISKRDKYQIDTGLLDRLTLTTNSRRTVRYDLKNKYPRISTDELQECRESAVSSYKSYLELSIIQNAKLSIDKSKKEQGLFSRTILYNGGPRGRFNLDFNIVSVRDSMDTNWLIVNGVKKKVKHNRLKIPLKLGKYHVKQISKGKIASLRFSKRDGIHYANFSINSQIESQDVKGKPKAVMGIDLGIKKTAFTVVMTNTGIQHRKTWHSDNKFKKLSRLEDQIASLQREYYHRINNSIGRGNISRKLKELKDRRKIVSLEYDRILVKELVAHIQDISQTFNLQIGIGKLKGIRKKGRKGNGKGKKFRKTLNSWAFFRFTKLLEHKLSEIGLKNKLFAIDEYWTSIFCYKCNIKGKRPTQSFFKCXXTQCGVXNNADFNGAMNIAKRTVKYRKLAPKSTWSKVGLGRFLRPYQEKGTKTTPKAHSHKRRRSPNTVKKNLAISVPVSVVTSHHKSSNDINFDIIDDIENDLAMVKKYEKAILVKPASLNTPSGRKRPSL

SEQ ID NO: 38395 - protein, 548 aa, unknown
  TnpB Polypeptide
MKVSSRYSRSFYSDGLSDTKYREIHALAVSIQEVKNEISEIVNQNLFCYLEMDKHAFQKMMLPLVKNRISSHFVKQLLDDVYVAYQNKFDSVKRRLKFQHIKEYSFTFYKRSSKTKSGRIYKSGDFKGISVKHDETPLSMTLTYLARYGYFGIVDYLLEKFVNEQNQKKEAFYAMLLDTIYKFGFTRLFAIAMSKRNRIIKHYSEYPIEFKSISFRGRSRLSDDIVSLNDNKKSIINSFANISWHTNTRKTMIIPMKYAKDFHGELKKYTNGTDTSYTICFEKDNQIRMILSYEGERKYPDAKNRIIGIDVNSKHNLLQCSNGYEIDFDRKLVETLSNELQKIDKLKENKNYTIGKRKENKNYTIGKRKQNKIDHLNRELQSKIREEIASLCKRLKNHRYRHAVMEDLDNGFESTFVKDENDLNYNRRLKLLHLGSLKDEFEHIARKHGIAVSFIQAFYTSQTCPHCGHIDSENRKDQEHFECVNCGYKSNADLNASINIKQRVVSTVLRDELLKKSNVNSSTYIPKVNSKEKTKEVLELFRSNLICV

SEQ ID NO: 38396 - protein, 351 aa, Brevibacillus sp.
LQSLTVNIRIFPDQPHILYQLGKEYVRVVNNLTTQAEQLGAFPKMTTKDVESALPSAVCNQAIRDAKSVYRKIKKLGTRPILKKPTYFVNNQNYSITDNIVAFPITVDGRTKKTKIQATTTRRDMQLLKKGKLGLMRIVEKSGKWYAQISLIVQTNELIQENIMGIDFGLKVPAVVVTSTGKTRFLGNGRQNKYIRRKYQHRRRRLGKLKKLSAIRKLGNKEQRWMKDQDHKISRQIVNIAIQEGVSVIKIERLENIRKTARTSRKNTKNLHSWTFYQLQQFISYKANLVGIKVVEVNPAYTSQSCPACGEKNKVRDRRYNCLCGFHSHRDRVGAINIMHQPVADGNSLPA

SEQ ID NO: 38397 - protein, 351 aa, Brevibacillus sp.
MQVLTVKIRILPAQPDILRHLGKEYIRVVNLLTEQAEQLSSFPKTTTKNVETILPSAVCNQSIRDAKSVFRKSKKLGGRPILKKPVYFVNNQNYTVSENTVAFPIVVDGKTKKTAFRATMTSRDRELLSKGKFGLMRIIEKSGKWYAQISVEVPTSVTINENVMGIDLGLNVPAVAVTSTGKTCFFGKGRQNKYIRRKHQQRRRKLGKLKKLSAIRKLGNKEQRWMKDQNHKISRQIVNTAIQEGVSIIKLERLENIRKTARTSRKNAKNLHSWTFYQLQQFISYKANLAGIQVVEVNPAYTSQSCPACREKSKAKDRMYECSCGFHAHRDRVGAINIMRQPVADGNSLSA

SEQ ID NO: 38398 - protein, 527 aa, Richelia sp.
MKAKSKASKTKQGKDSMMLSPTSAVQLELPLFATVASVQLFSETTLPDKLNSCSNSTQTPKSSKTSAQGLTSKGKDCKPYWSDLCAANSSRLLLPVATDCAGSDLNYSSSWHNKTVEKSWFSQTLFTAQKPNSQPIFSPSFTSSVVECTASGATARKSRKIRLFLNPEQKALIKQWFGVSRFVYNTTIKYLQEPGTKASWLTIKTGILNSLPEWAKTVPFQIKSIAIKDACQAVKKASSDFKGDGQVRHCKFRSRKDTKQSVFIPKTAVKDCGIYHTILGQSKLKEALPKVFSDGRLTLACGEYYLIVSEKVQQAHTDNQGRLVALDPGVRTFMTFFSEDSYGWLGVDSNLFIQKLCFRLDKLVSKISRAPGRQKRRFLKAASRLRCKIKNLVKELHHKIAKFLVDNFDVILLPTFETSQMVSKSRRKLKNKTVRQMLTLSHYDFKTFLKWKAWESSKLVIDCNEAYTSKTVSWTGEIVQNLGGAKTIKSQATGLKMDRDLNGARGIFLRALVDTPLLRDSLDLSVC

SEQ ID NO: 38399 - protein, 388 aa, Bacillus sp.
VTLLNQHKAFRFRLYPNKNQEILIAKTIGCSRLVFNHFLGKQKEYEAYWHVVEAMVQNGQLPQNNWKGTYFNKYDTIKALPALKKQYPFLKEVDSIALQKSVENLGDAYDRCYKKQNKSPQFKSKKNPVQSYTTKYTNGNIAIDGNQVKLPKLGWVRFAKSCEVEGRILNATIRKNPSGKFFISILAETDIQELSKTHKAVGIDMGIKEFAVLTQGDTIPNPHFLKKMEAKLIKEQRTLSRRVEGSSNWYKQKRKVALIHEKITNARTNFLHKHSTALVKNHDLIAIEDLHVTNMVKNRKLAKSIQEVSWSEFRRMLEYKAKWYGKQVIAISPWFASSQICSDCGFQHKAVKKLQIREWDCPNCGTHHDRDHNASLNILNEAQRLLSV

SEQ ID NO: 38400 - protein, 386 aa, unknown
  TnpB Polypeptide
MRKLLKNFKTEINPTIEQKVKINKTIGTCRYIYNFYLAHNKELYDKGEKFISGKSFSVWLNNEYIPNNPDKLWIKEAYSKAVKKSIENGYTAFTKFFKHQSGYPKFKKKGKSDVRMYFVKNNPKDCACERHRLKIPTLGWVRIKEKGYIPTTKDGWVIKSGTVSIKADRYYVSVLVEIPNTKNVNNSNDGIGIDLGIKDLAIVSNGKTYKNINKSARLRKLEKQLKREQRCLSRKYENLKKGESTQKNIQKQKFKVQKLYHRIDNIRTDYINKTIAEIVKTKPSYITIEDLNVSEMMKNRHLSKAIASQKFYEFRTKLKTKCDENGIELRVVDRFYPSSKLCHCCGAIKKDLKLSDRIYRCNCGYVEDRDFNAALNLRDAVSYEVA

SEQ ID NO: 38401 - protein, 376 aa, unknown
  TnpB Polypeptide
VLNKQFNLVKRQEFPFVLDVTKWAPAQAIIDLDRAFKNFFRRVKQGKKPGYPRFKRRGIQDSFYIAGERLRLKDKLVRIPKLGWVRMTEPLRLQGKIMSATVSKTADRWFCSIQVELEIPEPKADGSTIGVDVGIKQLVTTSDGRTFTNPRALQKAQRRLRLLQKAVSRKSKGSRNRHKTVLRLQQRHYRAACIRSDAIHKATAAITKGVGRIVLEDLNIEGLLQNHRIAKALGDAALGELHRQIIYKAEQRGVEIVVADRFYPSSKTCSGCGAVKDVLTLGERIYICEACGLEIDRDLNAAINLKQLAGGSSATACCLGSSGVVASQQDETTDWAGIPRERSSVRRKEQFIYLGADNANLKVQDDSSGTGSDSSN

SEQ ID NO: 38402 - protein, 381 aa, unknown
  TnpB Polypeptide
MQRKAFRYRLYPSRTQARRLDAILETCRFFYNDCLAERKTAYQERGETVGTYAQLRQVKARKATNPWAKDVHSHVLQTVVQDLAKAFDAFFRRIKAGEQPGYPRFKGRNRWHSFGFKEHGNGFRVDGRRLKLSGIGRLAVRWHRPTEGQIKTLRISKQAGKWFASFSCVVNEPLPLPATGMDVGIDVGLARLITTSTGERVAHPRFYRTAQRRLRVAQRRVARRKQGSQNRRKAIVMLQRQHERVGNQRKDYLNKLAHDLVERHDRIALEDLTITRMVHGNLAKSILDAGWGYLVQRLTHKAASAGRVVVWVDPRYTSKTCSGCGRLFEGLTLKDRWVACACGLSLDRDHNAAINILNRGGQLRWSSSSPVGGLGQEAAGL

SEQ ID NO: 38403 - protein, 291 aa, Ruminococcaceae sp.
MQWRPKFKKKNKSDVKMYFVKTDKTVVIPCERHRIKIPTLGWVQIKEKGYIPTIDIIKSGSVSKKADKYYVSVLVEVPDIVPENTNNSNGLGIDLGLKDFAVISNGTHKKNINKKLAVKKSEKKLKREQRKLSRKYESLKKRKNLKGEATRQNIKKQVIRVQKLHQRLDNIRTDYINKIVNDLVKTNPNYITIEDLNVKGMMKNKHLSKAIAQQKFYEFRLKLEQKCKQNGTELRIVDRFYPSSKLCHKCGNIKADLKLSDRVYKCECGYTEDRDYNASLNLRDAKIYKIS

SEQ ID NO: 38404 - protein, 474 aa, unknown
  TnpB Polypeptide
MFKAFKYRIYPTAEQQKQIDHSISVCRLVYNLALDVKKRAYEIEKSFIGSDKVKAYKLSKYDISKQLKDLRSDYDWISVVNSQSIGYEIENLDKAFNTFFKGGGFPKFKKKGKDIDSFTNRQHCKINWDDELLTIPKIPNISIVLHRKFEGQIKLITITKTSTNKYYASVIADINILLPDKLPILNDKTVGIDLGINTYAVISDGTIIDNPKFLTKPKYDEANKCLLGKELKKLKRLSKIASRREGKNSPLDANGKPLKANQKKAYLKLAKQHEKIANKRRDFLQKESTKLTNSDNTTFCFETLKIKNMSKKCKPKTDENGKYIQNGQKRKSGLNRSITDAGFYTFKQMVKYKSDWVGKNVLEIDTFYPSSKTCNNCGNINKELKLTDRTWKCDICNVEHDRDLNASINIKREALNNIKEIGKGKTELTSVESSDVSVMTKKGSKKQKNLQIFSLDSENDVFSKQYLPHKRLNI

SEQ ID NO: 38405 - protein, 183 aa, Glycomyces sp.
MAKVRAELQAKATKSAKRKLKARSRREARAVKDQNHRTAKQLVTSAERTGRGIGMEDLAGIRDRVRLTAAQRGELNSWSFHQLQAFITYKAKRAGVPVVVIDARHTSRRCPLCGHTAKANRPARDDFACVGCGLAGAADQVAAVNVRDHARTTWAFVNTPNVADTPRPAAGTSDKPPASTGGS

SEQ ID NO: 38406 - protein, 349 aa, unknown
  TnpB Polypeptide
MFRAAGILAKQHRLRRCSKRLHAKADRYRRLMAGDDAHALAAKHQVLTNEIRHVSARRSNLNTALAAAAARWTVDQAIAAGATVIHVEDLRSLEAKGMGRTMNTRLSQAVRGQIVDRTRHLAAETGIAVVIVPAHNTSKHCPRCLVPLRHRKAPDRPTTPGWKWALCTSCGYQGDRDTGAWQRIAARGLTHQSTTVTDRPGGGMVIRTVVDTLEATAVVTPAVKTSRDRSKTGPTRHKPTRPAPRRRRAPSPTVHSGPAGKRPEGHAPTGRTRLPRAAHRNQDVTTISTPTSRHRPRGAALGAGFHLHAHATPPRWAHPMPDTPSGTRSLSRSETLRNPDHPKVRLCAG

SEQ ID NO: 38407 - protein, 469 aa, unknown
  TnpB Polypeptide
VRKAVAVEVESPPPELYAVEEPYRRIVEEVAAYVAERETLEKEKYKELYRRFRELYPLPSQLIQQAINQGVETGKSFLKLKRNGRVHKPHPEVRLVSIRFAKDSWSYRKTATSAAPVKIAVSLPGGRREIWIKPHRRFWLYWWKVLSKETELASTLVLKRRRGRWYAVFVFDVASKREPPAEVVAFDVNENSVAVARVSLLSTVDAVARWNRQYLDPAIYSIKTDFGRLAKRYEAVRNAKLEELKRKYPYAGRDEEERRQNVADTREYKKFVRRLRERRRKEGRVRQIASEVTKSPALIITEELGKNPQEEMIGLEEKKVKKRELRHRIRQTPFRRILRAVEDEAREGGSVVFYVSSFRNSKVCPTHFALLKNGGGWHDLHCPHGHAVDRDAAAVLNMLWKITPEGVVKGVWWDLKEIGKRLKKEIVPREAVGKANPIVPQPIVYAVWVSLKALMASSQWPAVLARVAP

SEQ ID NO: 38408 - protein, 343 aa, unknown
  TnpB Polypeptide
MWVALQQPLEELNKAKLEGKRVTRAETQSLIVRLREEKPELKEVYSKVLQIVNYQLWSNIKALANFRKNGKKVGKLRFKGRGWFKTMNYNQSGFRLEGRRLILSRVGAIPIKLHREIEGKIKGVIVKREGSGKWHAIFQVDRQKPLPKTDKAVGIDVGLKHFLTDSEGRKIESPKFYQRTLERIKVIQHSLSKKKKGSKNREKQRIKLAKVYEKLTNQRNDFLHKLSRFYVNNYDVICVEDLQIQNMVKNHNLAGRILDASWGKFLHMLSYKAENAGRMAIKVNPRSASKERTEVEDRDYRASLNILKRGLSGLGRPLEPAEMKPLLVEMPASFIVEAGSPFR

SEQ ID NO: 38409 - protein, 391 aa, Globicatella sp.
MDKKERLIELCRELRLPSIRKMVQDEETFHNPTLAFTILLQVLEQEKNDRFIRSKQNRIRIANFPQKKLLEELDKEYPWLREVDSVAVQCSVKRLSETFVRFFKGYSKYPKFKSKKHTKQSYLSTIRGNNIRFNDNQRYIKLPKLGWVKCKSSVLHIENERIKSVTVKYTPSGDYYLSLLVTSDNQAMPKTGNVVGVDLGVNNLAITSDGQKYQSQRLHLTYKKQLHYWEKRMARRRIQAKKNGVALVDAKNYQQAKRQVARIHQRIKNIRKDYIHKITTDMVKSYDVIVLEDLKTTNMMKNHQLARSIANQSWRMFRTILEAKCAMYDKTFVAINPYKTSQKCSNCGYDNGKKALNIRHWTCTKCNMHHDRDINAAKNILNIGLEQALVK

SEQ ID NO: 38410 - protein, 309 aa, unknown
  TnpB Polypeptide
LQNVLKRVDLAFQGFFSRVKKGVKAGFPRFRSLNRYDSFTFPQSGFLLTGNKLTLSKIGSVKIKLSRAIIGKVKTCQIKRECGRWFVIFTVETSIEPLPKTGESVGLDVGVSAFATLSDGAIIENPRFAESLQKSLRIAQRSVSRKKKGGNNRRKAVLKLRKIHQKIKNCRADFQHKAARYLVNNYDVICIEKLKVSNMLKNHCLARVIADVSWSSFFHILENKAVEAGRELIKVTPNFTSQTCSSCGHCEKANRKTQADFVCLKCSHNENADENAAINILRLGKSVLGSKWNDSSCLPKESLTITVSV

SEQ ID NO: 38411 - protein, 402 aa, unknown
  TnpB Polypeptide
MYQVRRVNIGKTSQLDELAHACGELYSQTVIFFWRTVRHKGIWLKCAQMERIFTSDKLHAHTSDATVQAFYASLKSWRERRKTDPNAHPPRRRHWYFRIENKSQAISLENGELRLSNGRSSDPLILLWKWEKPKTVVIHWTGTQYEAIATYRLEPECKPMGGEVVGIDLGEIHIAVSHDGENTHILNGRYLRAKRQYQNKLKEKLSKKIDRKKKGSRRKKKLIRSKQRQLRKLKHQIKDIEHKQTTRLISTLYQEGVQTVVIGDVRTIRQNNDVGSKQNQKIHQWSAGKVRHMLTYKSEQLGMVVELQDEHSTSKTCPVCEHKRKSKPNGRVFNCTNKKCKWSYHRDGVGAMNIRRKYLGLGPVVGDMAPPTGMRFRPHSSRSSLRETVPARNSNLATGESR

SEQ ID NO: 38412 - protein, 413 aa, unknown
  TnpB Polypeptide
MRLSLPDSIIMWYHPFMMDVQRTVTILIESDPDLRATLTACRDLKQALSPLCFNGGKPLGPIALQRAAYHAVKGRLNSQMTIGAIRDVASAYASAKRNRHPITQPFAFRKASARFLVGQRGRDADFRADGTLSIWTVAGRKRLSYTVPEHFQPVLAAAKEINSITVIELNGRLVGRVAVTLAVPDPAGILPVGIDLNKTNALVAVDADDRTLFVSGKEVKIKNVRTRKTRSRLQRKLAARKAEGKDTRSVRRALKRLGRKQRNRSRTFAQTVAKQVVTWAPANAVLVLEDLNVPQPSKKARQRAGVRRRLSQWNHAEVRRWITLKAEERGLAVALVNPAGTSQTCSRCGLVGVRRRHRFVCPHCGHEAHADLNAAVNIRNRYTVLRDGGPPSTGPEAQPVTGVGKLAASAVSR

SEQ ID NO: 38413 - protein, 418 aa, Halorubrum sp.
VVDDFVRRTAITRLEVTDEQRDLLEDTISEWKRGCQLATDMAWGKCNAKSDVQPLAYDNVREHTDLGSQHAILATHQAAQAITGCIERKAKGKKVSKPTFTAPTVKYDTRTMTLFDDDTVSLSTTESRVRCDLALPHADNGYQRQYLDSDEWSVTESTLTARDGDYFLHIGFRRPKTDTEWNTAEDGTVLGVDLGIENLAVTSTAYFFSGRELTHNLREFEKVRAGLQQTGTRSAHRTLEQSSGRELRYVRDVLHRASNAIVDEALRYECDVIAFEDLTHIRDRTGASWGHKWAFRTLSEQVEYKAEAEGISVKQVGSAYTSKRCAECGFTADENRPTRTDFRCVKCESEANADYNAAKNIGMRYVRRGQQSSRRTGNSQLALKSGTVTPSGGFTAHPDGFEVEDMDKSHPQRAKSSD

SEQ ID NO: 38414 - protein, 408 aa, Richelia sp.
MKHRSFQYRLKPTSSQRKTLESFGSATRFVWNHFLSKNKETYEETQKFVFKHDMITSLPKLKQEFDWLKEIPSQSLQQKCWDLDTAIKNCYKRGFGFPKFKVKRHLSDSFRIPQTNGHIKSTRKAICIPKLGWISWIRHRPLQGKLKSITIRQIGQHWYVSILCEQKEDVLLTELNEYQILGLDFGLKSFITDSNGNKIESPKFYRSKQKVLRKKQRKLSKCSKGSNRRNKARIRVAKLHRDVANIRKDFLHKASRTIAKSALVIGIEDLNVKGMGRNRHLSKSIFDSGWGMFCSFLDYKIQEYGGCLIKIDRFYPSSKTCSSCGQVKDMPLDVRSYECDCGSVLDRDFNAALNIKREAINIFSRTGTVRINARGDTSSGVPAYDGIRNVSLNREKFRVDLDSEATFL

SEQ ID NO: 38415 - protein, 442 aa, Burkholderiales sp.
MYTHAERAGERVCKQKGTNSFQLNCAFLRNSEQFFMLTAHKIALKPNNMQATYFVRAAGTARFAYNWALAQWQRQYEVHKTDASLPKPSQMALRRQLNSIKGEQFPWMLEVTKNAPQMAIIQLGKAFENFFAGRAKYPKFRKKGVHERFSLSNDQFSVESSRIRIPHLGWVRMREALRFAGKIMSATVSRVADQWFVSITVDTPDDLPLAKAENQGAVGVDLGVSALATLSTGEPPIPGPKAHKALLCRLQRLSRSLSRKAKGSKNRHKAKMKLARLHARISNIRKDALHQLTTGLTRRFHTIGIEDLNVKGMVKNRRLSRAVSDMGFFEFRRQLKYKAAQRGGAVVVADRWFPSSKTCSHCGHKLEVLPLSVRQWTCPACNTTHDRDVNAAVNLRNMAVSSTVSVCGEEGSGLVRKRKTKPASVKQKVSFVPVSTGMSKSD

SEQ ID NO: 38416 - protein, 373 aa, unknown
  TnpB Polypeptide
MLKQKAFRYRIYPTEEQKIYFAKTFGCVRFIYNAMLHDKIEHYKINGETLNNTPAKYNAQFPFLKEVDSLALANAQLNLESAYKNFFREIKKGNNDQGFPKFKKKTYNQKFKTNNQNGTVGLIDSIFLKIPKLKTPIRIKLHRQPPNDAVIKSVVIERSSSGKYYASILVETNIEPLTKGMNSIGIDLGLKTFAVTSNGDEILSPKALIKHEQRLAFLQKSLARKEKGSNNYYKNKKQIALLHEKIANIRKDFLHKVSTQLVNENQVIKVESLKVRNMVKNHKLAKHISDASWSMFVEMLSYKANWYGRELIKIDTFYASSQLCHICGHKNSEVKNLAIRKWNCPSCGTEHDRDINASINILNYRTVGTTGIA

SEQ ID NO: 38417 - protein, 242 aa, Nocardiopsis sp.
LPKVGEVKVKWSRSLPSTPSTVTVIKDAAGRYFASFVVETDDEPLPETTTDVGIDLGLGHFAVLSDGTKVTNPKSLRRAEKKLRKTQKALSRKQEGSNNWAKARVKVARAHARVADGRREFHHQLSTTIIRDNQAVYVEDLCVKGLGRTKLARSVHDAGWSAFVHMLDYEAQRYGRTFLKVDRFLPSSQTCSVCWVVDGPKPLNVRTWTCAGCDTEHDRDVNTSRVVLAAGRKPAREREAES

SEQ ID NO: 38418 - protein, 454 aa, unknown
  TnpB Polypeptide
MVEANRTVAIPLTLPEESKSDFHRTILLYAYCQQETVEHCWPDTPKQPTDLQTSKQDAENALYDRLRNDTDEQLHSNLVQKAIKDATSAISSCKTSWENGDRISKPDFYDRDAPGYTMTYDKRAATYNRYEATFSTVNGTVTCRYELPAVLEGTPYAAYVLNTRWSFSTSKLVFDGTRFWLHAVVQRQFGDDPVYAPETDDASSDTHNEDTHRVLGVDLNVDGATAVTSTGQFYGNADALNAYRHDHEQLRGELQQTGTRSAHLRFQQRRGAEWRYYDQYAHYVANSIKHEALRVRATHIAFEDLTWIRRRISNLPKFQQWLFRKVQKYTEYKLERYGVTVDTTNPADTSRACSHTECDCVAEDNRDGKHFECTDCGYTVNADYNAAKNIGFRYLSDELSSPASHTCSSGQATSQLALMSGTLTPSGTYAETDWVSTDKPHPQQASGGLSARAQ

SEQ ID NO: 38419 - protein, 501 aa, Acidithiobacillus sp.
MMRTYPYSHAANAVKERQVWAVLRAYRHSAQQIANDQWKSLFITGGMEKDGPICPADHIISKRYRQTCQYQVIAVLKSWLSNRKNDFRMLVTHSSLWKDQTEEGKRLCIQLLFINKHGLWFRDRVVMRKEAIPPEVMRLARNLFRRLMNKHNKPSFRHIGMALDAKVARVEAPKKAHSAQFPYWLTVSTLDSGKPIHIPLVENPYALGADGDDKAFVQINVRRGTAMDGRAGILDIARVKEAAPVFSLERPRPQIVETLGIDVGLRTLVATSMGELLGRNLIDRLCRLDAQISRLAAERQRQGLPVRSRRYDTLVNRLRTFLKNEIGRVLNGLFARVHPAKVVIESLDFRSPDLSRRLNRLVQNFGRTWFRKKLDMLSEQYGFLVEEVHAAYSSQTCKSCDYVAKNNRSSQSKFHCRFCGRKAHADPNGACVIRRRRSLAEYAPWRSKRQILQATVGCFLKRWSGRLSGLQVNSALRLVVEGNPYFADHRAALWPGNTTTD

SEQ ID NO: 38420 - protein, 406 aa, unknown
  TnpB Polypeptide
MELTEKEIIYATDERFDLIKNLCHLSKNLYNACLYDVRQYYFETKSYRHWKSQKPIFIKNNNSDYYALQSHVAGEVFKQVGEQFIGFFNNKTNKKKRIPKYKDKNGYNLVIFPRLTISKQIDYDKDEQIYTYTLCKKSYNFKIKSTKPNIKMVKFVYDEANNLIKCYKIYEVEAPKLKKDNSRYFSIDPGLNNIVSIYNNIGIRPLLYNGRPIKSINQYYNKTNAKLRSELPANIKSSKRLKQLSFKRANKIDYEMHKISTHIINEAVKNNISKIIIGSNVSWKNGINIGRKNNQNFVNIPHTKLFNQLLYKGLLNGIEVIFTEESYTSKASFFDKDELPIYGESNHNNFSGRRISRGLYKDSKGNLWNADLNGGGNIMRKFSDKAAYKGMRKTKELMKRPILITL

SEQ ID NO: 38421 - protein, 375 aa, Escherichia sp.
  misc_feature (108)..(111): Xaa can be any naturally occurring amino acid
VKRLQAFKFQLRPGGQQEREMRRFAGACRFVFNRALALQNENHEAGNKYIPYGKMASWLVEWKNATETQWLKDAPSQPLQQSLKELERAYKNFFRKRAAFPRFKKRGXXXXNSRQVTGVVKNVTVSQSCGKWYISIQTESEVSTPVHPSASMVGLDAGVAKLATLSDGTVFEPVNSFQKNQKKLARLQRQLSRKVKFSNNWQKQKRKIQRLHSCTANIRRDYLHKVTTTVSKNHAMIVIEDLKVSNMSKSAAGTVSQPGRNVRAKSGLNRSILDQGWYEMRRQLEYKQLWRGGQVLAVPPAYTSQRCACCGHTAKENRLSQSKFRCQVCGYTANADVNGARNILAAGHAVLACGEMVQSGRSLKQEPTEMIQATA

SEQ ID NO: 38422 - protein, 372 aa, unknown
  TnpB Polypeptide
MLALKAFKYRLYPTEQQEVLLNKTFGCVRVVWNHNVEVFNKFDKNLAQQEQPLTSTLLRKKFDWMNEVSASALQQKEIDFKAFKKDYFSKTRKKKVGRPSFKHRDAVQKYRLPNQKFTLNKNTIRLEKRGKVKLVLDRPVPDDCKFMSVTVSKNLCNQFFASVLVETRIIQKPKTGKVIGLDLGIKAFLTGSDETTIKNPSYFRESQARLAKAQRHLSRKQKGSSRRKKAKLKVAQIHNNIANQRKDFIHKTTIKLVNNYDFIAIESLNVVGMVNNRKLAKSVSDASFSKFTEVLSYKAAWYGKKVVKVDRWFASSKICSCCGWKDKELKLSDRTFKCKVCGMEKNRDLNASENILKEALRVSSAIRTPSEC

SEQ ID NO: 38423 - protein, 374 aa, unknown
  TnpB Polypeptide
MLDADPQLLLPTVMAYTEAYNHVCEAGWDSRDYNGLSLHHKTYKHCRTLLPSALTISSRVKATEALKGGRARKKAGYKVSCPNSKQCSVRYNKNAYSVWFDKDELSVSTITGRQKFGFKVPQYFNKYVDWRRKSAELFVRGRDVFISIVFEKEVADVALTGEVIGIDRGIKNIAVVSDNRFFKGGNTKRIMENYRSLRYRLRSKGTRSARRHLRRIGQKENRFRRDVDHCISKQIVGAISPGTTIVLEDLNGIHSGIMKFRKDQRYWINGWSFARLETFLKYKAGEKGCLITHVNSSYTSQKCSVCGHTERGNRTKQSLFKCKKCGFSLNADLNASRNICAKHKDAISYPCGADTTEPIVPGDVAWAQAAIIPS

SEQ ID NO: 38424 - protein, 455 aa, unknown
  TnpB Polypeptide
MPNTPKPAAHTPEPVHRTVRLRLYPGDAETGNTRAGIAGACRFAWNHTLADCEQRYARWREMHVPVLNWPEVRDGSTEWGKAMCKRIGPAPSTSYFTLGQRFTALRNDPAHAWLREYPFECVRYSLKYLADAYKRFTANPKTEGKPRFKARHRTVPAFTIPCKVRIREGRLRIPKVGWLRLDGSNPYADCKPLTVRIRREVSDPYPKWYAYVCYEVPAERTRQPAADGALGLDRNVGQATDSDGVVYAMPDTERLDAQIARKQRELSRKQGWGPKDRRPKSNRGRRVNRQLSKLHRKRRRQRDDATHQVSRTLADTAHTVAIEDLNTKGMTASAKGTVEQPGRNVKQKAGLNRRILASGWGGLELKLAYKAGEVIKVNPAYTSQTCSRCGYVHKANRLSQAVFRCGVCGFRANADHDAAINILVRAEGPPAPVHGPRGRGCCTARGDPVGNSYDL

SEQ ID NO: 38425 - protein, 520 aa, unknown
  TnpB Polypeptide
MVTVTYEKPIWFNIDKSKLLNDPTDSSYNKTSIYKTTIKPKIKYEANETFNVHNEAIKLINGYQNKITKLVNNNNLTETKVKTLTTKLLKESNGFNTVIRVKKYPLNFSNEQKIIIQSWIKECKKVYNKCVDKNSENKKYFNKGFQYIKASLFNEIYGETEKPCPYDVLTDEVRVYCSNLKSCFTNLKKSNIKHFEIKKKLKQKSNYSLLIPSKSVYNNGLFKTILGNINGFELDELPLYDCRLFYCCKTLTYTLMVPTKVSCKALPNREDIVAIDPGEKKFIEFYGLKSYGYIGKDIRKPLLKLRDRISKYQKILNKTKTNKSGNKLKNRRHIKKKITQLYKKIKQIVKELHNQSANYLCKNYDKILIPKFATQEMVTHKYKSFNDFKTKTINKGSTYEERKQIAKKLTKNCRLSRKVKYVLNTLSHFSFRQHLTEKSVEHGCQLKVVTEEFTSLTCTNCGHMSKVYNKRVKECEYCKCKIDRDLNGARNILLKNLDEFKYKHEATKPTGTYIPNLKTK

SEQ ID NO: 38426 - protein, 377 aa, unknown
  TnpB Polypeptide
MILAKKVRLYPTREQEQKLWQSVGTARFIYNYTIAKQEENYKNGGKFISDGVIRKELTQLKKSELIWLNEVSNNITKQAVKDACNSYKRFFKGLANKPKFKSKKKNKPSFYNDPIKLKIKDKKILIEKVGWINIREQIPTGAKYNNPRITYDNKYWYISIGVEVEKKQEELTDVSLGIDLGLKDLAICSDGKIFKNINKTKKVKKLEKRLKQKQKQISRKYEMNKIKKEGGVGCQFIKTKNIEKLENTTKLIHRKLSNIRNNYLHQVTTSIVKTKPYRIVIEDLNVSGMMKNKHLSDSVRRQCFYKFREYITYKSELYGIKLVIADRFYPSSKTCSHCGSIKKDLKLKDRVYRCSHCGVVIDRDYNASVNLSMYKLA

SEQ ID NO: 38427 - protein, 299 aa, Lentzea sp.
VVLNRTFGCVRLVWNKTLGERNHRFRTKGARTTYRETDTDVAELDPTMVVISRDPDGRWYVTFSVDTEAPVPTRPVSHSIGVDLGLSDFLVTSDGERIANPRHLAGKARNLARHQRRLARCRRGSSNRRKAKAKVARAHRKVRNARQDFLHRTTTRLVRPADVIAIEDLNIRGMVRNHHLARAISDAGWGEFRRQLEYKCSRAGRSLVVIDRWFPSSKICSTCGHRLAQLSLSARHWTCQGCRTRHDRDLNAAKNILAAGRAVARAGSGNACGADVRRQGPTLPRSAAKQETRTSGKAK

SEQ ID NO: 38428 - protein, 286 aa, unknown
  TnpB Polypeptide
MPLRKTKKTSAEIIRKAYKFQAVPTEEQKAMFAQTFGCVRYLYNRMLDDKSKAYKYFGENLNLTPAWYKHISCCRWLADVDALALANVQLNLNTAFQNFFNKRAKYPKFKKKSDHHDSYTTNVVNGNISYRTSDKYMYVTLPKIPGELMVKNHRPVKQGGKLKSVTVSREPSGKYYISFLFEYTKVKAVHDIDPDNAIGLDMSMRSFYVDSDGNEVDSPHAYLHAQDRLAREQRKLSHMKKGSSNYQKQKRKVAKLHAKATHQRNDFLHKLSRKLVDAYDIVGIEI

SEQ ID NO: 38429 - protein, 381 aa, unknown
  TnpB Polypeptide
VIVNQAFRYELDPNVGQGEGLARHAGTARFAYNWALNLCRACLDAKERLPGGMTLHRLWNRWKGDNAPWWAEVSKCAPQEAFRDLDRAFANFWRGRKTGKRTGFPRFRKKGQDDRFRLTGAIHILPRAVALPRLGPIRTKEPTAKFQGRILSATVAREADRWYVSLAVERERPDPALVEGPVVGIDLGLDCFAVLSDGARMEAPKPLARNLRRLRRRSRAHSRKQKGSANREKSALALARLHRRIRNQRQDFLHKLTTRLAKTKSVIVVEDLSVAGMIRNRRLARSIADAGWSEFRRMLAYKTTWYGSHLVLGPRFFASSKTCSACGSAKASLPLSERTFWCEACGTTLNRDLNAALNLERLVAGSSPETQSARGVDVRPA

SEQ ID NO: 38430 - protein, 359 aa, Acidobacteria sp.
MRKTFKYRIFPTHAQVTRLGATLDICRELYNGSLQERRDAYRFERKSVRYIEQANQLPDIKKIRPDVAGVHSQVLQDVLKRVEKAFDGFFRRVKAKQKAGFPRFRSYKRYDSFTYAQSGFSLTGSKLRLSKIGSLRIKLHRLIEGKIKTLTITRSATGKWYACFSVEVEPQPFPANNKAVGIDVGLNHFATLSTGEQIANPRFFRMDEKALAKAQRREKRKAARHIHERIANRRRNFAHQLSHALVSLFGVIAFEDLNIKNMVRNHCLSKSIQDAAWNQLIQYTTYKAEYAGREVRKVDPRGTSQRCSACGATVLKDLSQRTHNCSCGLVLDRDHNAALNILSLGLQATALPRQEAARL

SEQ ID NO: 38431 - protein, 635 aa, unknown
  TnpB Polypeptide
MSITINGQTSPAAEFAWDGCHKIYLLDNGDADKNGKYGYMLSKNGEAGYKVLPVSELQRVWDQSCPLRFINNWALDKNMFPNATRSPSPSKRVERENHEIIQGIRGRIRSGYRSHPMGVQPPFCREGAPAFRRGEESRHYYSHIIRKCGRISLMSQKVVLERVTLDGAKPFTGYADRHDPESERLYARSGGQAMDWLCDAWRYRFNQLRSNRCKYGKDKTLVPIGGEPDTRSVSQSRSECSWLAAVPSLILESPTRIERVEWFTAVQRRKTLLSKRLKPGRMPRFKSYKRDGQRFVCWHNGGRNAVYRRVNRNHGIITITGQNPKGMSLPGEPLRYRILLHVRVSQPIREYTAIQVDWTNRTVVFNNTPTPIKHEPTGRAVGIDRGCVHAAADSDGRFMDLPKDRLKAIDREIRKRQKAQARRAGNAGYSSEREYAKSGKTSRAYRRTRLEIGRLHAKSKRILDDVYQKYTTRLVRENDLIVLENLRLANMSRRNKPVPDPLHEGRYLPNGQDAKHGLNRSLRQASMGRLVSMLAYKTKLAEGVGMILVNPAYTSQTCSRCGHVDKKNRESQAVFVCKKCSYTANADVNAARNILERGLDTLAVTSGNLWGADGTPVEQGHKTNGNAARESVAVS

SEQ ID NO: 38432 - protein, 538 aa, Sutterella sp.
MTTQTFILELPIKADDSQSRTISKKFEYGRMLYNATLGSGLGRLTQMRQDPEWRCACEMSKGKERNELFRRLNRQYRLTEYDFHSDIARHREGTKRKSELGICEAQKLATQAFNAVSRYMFKQGGRPRFKSFKRGLHSLEGKTNTTGLKFKPEKMLLDWCRKTYQVMLDPEDTYALEALYADKERTKFKRIKYNRIVCRNIKGVKRFYLQVVLEGTPPVKHAYAPASERMAIDPGPKAFAVFCPRVQAKVQIAPQAKVNEKAIRRIQRSMDRSLRAKNPNAFDEKGRIKPGVSLAYSKGYQARLTKLREAHRKVAGTRKCEHGELANLLLECAGNIRIEKNSWEAFKRSHFGRSINNSAASGFIQKLKSKAERAGLTVEEVSPYRLKPSQYDPYKDEFVKKALGERWMYLGDESTVIQRDIMSAILIYFADLKNQTHNPEVVKTNLEGLKRGLTDAGYVKHLKLPRSSGSKDPLFAPEPKALTTEELRSKCFRVDSDRHSSTINGTDGKAVGWSETFPLTGELFRDSVLSSVSARGAS

SEQ ID NO: 38433 - protein, 615 aa, unknown
  TnpB Polypeptide
MTGKSFSVWLNNEYIPNNPDKIWIKEAYSKAVKKSIEDGCTAFTRYFKHQSAFPNFKKKGKSDVKMYFVKNNPKDCRCERHKLNIPTLGWVRIKEKGYIPTTKDGWKIKSGTVSIKADRYYVSVLVEIPDAKITDNSNDGMGIDLGLKDLAIVSNGKTYKNINKSAKLKKLEKQLIREQRSLSRKYENLKKGESTQKNIQKQKLKVQRLHHKIDNIRTDYINKSIAGIVKAKPSYITIEDLNVSGMMKNRHLSKAVASQKFYEFRTKLKAKCDENGIELRVVDRWYPSSKICHCCGMIKKDLKLSDRMHHYFGDIRDKEKVNSHIQEIKPDFIFHLAAQAIVSTSYVDPFDTITTNVVGTASVLEAIRNITWNCTSVLITSDKAYDNVEWIWGYRETDAVGGKDVYSGSKGAAELTIKSYWKSFIQSMPNIKLGIARAGNVIGGGDWAKDRIIVDCVKAFSENKIVEIRCPKATRPWQHVLEPLSGYLTLGQYLFEDKVENGEPFNFGPRAEQTKTVFELVQDLAELWGLDKNDAAKLTDNLPFQEATLLKLNCDKALAYLDWHSTLHYCECVHFIADWYKAFYIEKNDNLYELTISQIEMYMNVAQQQQLKWTE

SEQ ID NO: 38434 - protein, 507 aa, Calothrix sp.
MNIVNKKPIQTTEYTVTRIAYSVGTINQSLIDLASVLGKLRSELWNKYGSLQSWGINKNEIIKNIRNDVKLRRICGAERFNLSSEIWERTVQAVLDDIHATQEAAKAQIIRKIYEHFKPERTLIQKGKKLVCVDIPETSFRQELIIAINSAYSVWHQYPILCRWVRQFYKRGHTWVNNQIVINATASSMKGKITKDGRSVTTYKIPTFMDGQKCQWVEIKIHTGRTCPKAGRLRLIFNGEKFELHYPHTTQVNAITKTDIIGLDKGFTEGFYGSNGQAYVETLGEVIKVASSKRTEKNKKRSVIFAISQKVDAQKSSRMFKSNLGRKKASKKDSVKRLYIKQLIRTDVNQIFNSFGEVVAEDLSKHIKGKKKAKAINRKLNEWSKGELQKALDEISVRKGAKVTLVNPAYTSQLDSNNGTLLGKRIGDQFISYQGVILQSDMNAAINIKNRALDSEITRFMKKEAVHKILLNRTVQFLEELGYTLEAAVYMGWLNSKHLIKVKTNCA

SEQ ID NO: 38435 - protein, 409 aa, Anabaena sp.
MLVLEYKVKGKQNQYNAIDDAIRTTQFIRNKAIRYWMDAPRELKIDKFALNKYSTELRSDFTFAAELNSMAVQSAAERGWSAISRFYDNTSARLSDHCKSKKSGKKGYPRFQKDCRSVEYKTSGWKLHKTKRRITFTDKKGIGELKLLGKWDIQSYELKDIKRVRLIRRADGYYAQFCIGIDVVDIQLKTGNEIGLDVGIESFYTDSNGHHEPNPKFLRKAEKSIKHSQRRIYKKVKGSSGRKKARKLYAKKHLKVSRQRIEHAKKLARNVCKSNDLVAYEDLRVSNMVKNHCLAKSISDASWYLFRQWIEYFAVKFDKITIAVAPHYTSQKCSSCGVIVKKSLSTRTHKCSCGLHLHRDTNAAVNILHLAKNRGGHPQINATGVETPTLLGVSLVEQVLTVNVESPCL

SEQ ID NO: 38436 - protein, 312 aa, Ruminococcus sp.
MNKAYRFRIFPNSEQKAKIENTFNCVRFIFNKMLSDRLAYYNQTGKRLRNTPAQYKKEFPWLKEVDSLALANAQMHLMAAYERFFKNPAGNLPKFKTKRRSKKTYTTNCVNGNIIIRCGEIRLPKIGFVRIKLHRVIPKDFRLKAVTVIRDARGLYYASVLFEYEQTVPETVPERVIGLEYSDTGLYTDSNGGQMDYPPYIRQTLETLQREKRKLLHMKKGSRNRKKQRIKTMKLREKFCNQRTDFLHKHSRQIANAYDCVCMKDPAEGISYDFGWAIFRFFLKYKLSEEGKRFIRTDNVMLSEMLYSSQAV

SEQ ID NO: 38437 - protein, 362 aa, Desulfitobacterium sp.
VQMVYRYEVYPSREQEQKLFHTLKLCRKLYNHALNERQVTYKETGHGLTYNQQQNALPAFVKAHPEYSQVHSQVLQDVLRRLDSAYQHFFAKEAGYPRFKNRDHYSSLTYPQVDNVKRTFGRAGYIYLSKLGFVKMETHRKFPVEAIKRVNIKYHGGKWFANLTAEIPDVAPVENPSQAVGIDVGLNHFAVLSDEKVIDNPKYYRKMEKKLAKAQRRLSRKRKGSHNRGKAKVKVAKIHAKIANQRKDFLHQASVRVVRSYDLIVMEDLKVHNMVRNRRLAKSIHDAGWGQFRNYIRYKCERQGKQFILVDPKGTSQSCLCGESVPKDLSVRVHECPSCGLVMDRDLVSSKLILARGLSKIA

SEQ ID NO: 38438 - protein, 464 aa, unknown
  TnpB Polypeptide
LTTSGPPGARAPSLVRGYRFALDPTPSQEQALRSHCGAQRYAYNWGLRRVIANLEQRAAEQTYGISDRDLTPSLDWSAYALRRLWNDAKDDVAPWWEDNSKEAYSSGLANLAVGLRCWVKSQSGDRRGPRMRFPQFKSKKCQMSCRFTTGAFGLSDADRRHIKLPRIGLVRTHESTRKLARRVAEGTARIKSATISYARGRWFVSFSVEVRMAPSVLGLPREVVGVDLGIQHLAILSEPVRGISDAAGMVANPAHLEQVNKTLRRLQRKATRREGPDRRTGKPPSRRWYRAQDKVNRLHARVANARINALHRLTTSLSERFDQIVIEDLNIAGMLHNRRLARRIAGAGWGELRRQLSYKSQWRGGELIVADRFYASSKLCSGCGATKAKLRLSERVYHCETCGVTLDRDLNAARNLAALASQAAGGTSSPSCGATLNEPAGNPQKAGQVGSGYRHGKPRVGNAA

SEQ ID NO: 38439 - protein, 391 aa, unknown
  TnpB Polypeptide
VPCGIWHSSSAGSPGGQRGRAVRSAEQCRHLTDARADMPWLADLPAQSAQQVLRQLDRAYDNWWNPEHPAQAPTFRKRSGGLSIPFPGQAVQVRRCSRRWAEVRLPKLGWVRFRLSRPLSGMVRNATVAKDALGWHISFGVATATKPASPNRLPGCGVDFGVRCSAFVSDEREPRLMPSTLTAGQRRRLLGLERRKNRQITWAKKHNGGRYSNRLRRTIDQIAKLRARQARRRQDFTHKLTTDLAKNHGWVAVEDLRVMGMTRSAKGTREKPGRYVKAKAGLNRAVLDNAPYERRRQLAYKAPRFGSELRLVRPAFTSQICTACGLRDRKSRPGCGRLFACTACGHVEHADLNAARNIHNLAAGQAVHSTRSHLRAARPSSRMREPLGSVV

SEQ ID NO: 38440 - protein, 416 aa, Okeania sp.
MRTAYQYKLRPNKDQIATIELWLELLRRQYNYRLAERFSWWEENRCPVNACPLIMPIPQLRDNPDYYSQKKDLVNTKDKFPEYKLIYSQVLQDGIKRVKLTFDRWLKTDKNGQRLGKPRFKGKGRYRSFTYPQIKQDCLEGNKINLPKIGLVKLIQHRRLPDGFQIKTATISRKGDGYYVTLSLEDKSVPYFPDVKPTTENTLGIDMGLKDFLVTSNGESVPIPQYYRSSQKRLRTLQKRLSRKKKGSNRWLKAVKAVGKQQKKVADKRKDFHLKTANELLSKADVIAHVDARGVPEANLNIKGLSKTRLSKSINDAGWGQFLTILTVKAENAGQKTIGVNPRNTSQDCSNCGKKVPKELSQRTHSCPHCGVVIDRDVNAAINIKNRAVGHSVLKARGVRRGTGTTKREAHTKLTL

SEQ ID NO: 38441 - protein, 421 aa, Oscillatoriales sp.
MMITYQYRIKPNSEQIAIMDNWLELLRRHWNYALGQRLDWLHRTRCRIDRCSIISEPIGKIPETANYYTQQSALKETKKIFPEYKDIYSEVQQINIQRLEKAWWRWLTPDKTLKRAGRPRFKKKGELRSFCFSRVNHPKAACFLTGTTLRIPRIGEIPVIVHRPILNGFTLKTATIVKKADGWYVCLSIEDGSVPTLMPIDTIKTAVGIDVGLEKFLATSDGKIVRIQQTRRKAQNHLGRQQRKLANQQKGSANYQKQANKVAKIHQRIQRQRKDFHYKTAHFLVRQYDLIAVEDLNIKGLARTHWGKSILDAAWGSFMTILEAVAVIRGVRVVKVNPNNTSQDCSGCGVKVKKDLSIRWHSCSHCHTELDRDINAAINILHRAIEDFKAVGLIVSACGGLEITQPLKQEAKEMLAGFQLE

SEQ ID NO: 38442 - protein, 268 aa, Okeania sp.
MKSIRTKLKLNNQQKTLLAQHAGYSRWVYNWGLSLWNAAYRDGYKPNARKLREVFTNHTKPLIPWMKNLSSRVDQYAFRNLGEAFKRFFQGLGKRPRFKKKGRSDSFTIDNCGKPIELNGWSHKLPFIGWVKTYEPIEATTKKITISRLAGDWYLSLSYEFHPITHPHPLHRRGARGVGDVVGVDLGVKTLATLSDGKVMTSVRSYHRFEAKLSREQYLNRHKEVGSANWKKAQRKIARLHRKVANIRQDALHKLTTYASLEPRHCVN

SEQ ID NO: 38443 - protein, 271 aa, Holophagaceae sp.
LDIPLAERVPGLDTARNLRIVKEGQTYFAVVTLRRSMPEPKPIRKAVALDPNHKNFAYGVGTDGKAFEIQNLGGLRETDKRIDKLKSRRDRRQRRSRLVEVVRQDQSVGRHWEPSRRWNRINQALKRAEQKRRDQTKHFLFSGSNKLCKNYDLIGVGDYAPAQGDAGLGKKANRAMQNRSLLGRFKSILLWVARRSGKSAEVFDETRTTRTCSEPDCGHIVQGGIQPNIREWTCVQCGTTHIRDENAAKNILVRMLRIRSLTPRTHAFSGI

SEQ ID NO: 38444 - protein, 405 aa, unknown
  TnpB Polypeptide
MKFCVKYRLKPTEEQAVALKKLAFYATKLYNTDNWTRREQWTKTGKIPNWYAQKKLLKTNHWYRLLPSQTAQAVIKNLQDNYKSWFKLRKTDPATKPPGFRKKFALSPLTFYQQFTLVGDQLAFVMSRKFRTETGVDKLVFRLDLWRKVDDAPKMCTVLYQDEKWMAHVVYEVQEPPRTGDENVMAVDLGIVNLAATVDLAGRSKLYSGKQALAVQHYFNKEIARVQSLTARQQNKKGSRAISRMHQKKQRQVNQILHSVSKALVEDAKRNRVGTIVVGDLKNIRKDNGEAKDFGRNNQKLHAWGFRKLLTQVRYKAALSGIRVVEVSERNTSKKCSVCGVVRKANRKHRGLYVCSKCGAVLNADVNAAVNLLRKYLHQAKAQGSIGCVTQPLIWRYAVNQEVLL

SEQ ID NO: 38445 - protein, 269 aa, unknown
  TnpB Polypeptide
MFIGYKYFKSFVIDGNCGIGEFKLENGLLTLLNPGRVGKRSEKDLVSFNLGQYGQDITRKTVARLIFSRNRNNEYYVDITYNEEAPEQKLDNCNYMSIDIGTSSIATCYSNKINNLQIDNTRFFKLEKSIDAITSKRDKKKKYSKRWRRLNEIKKAKQVKVANKNKDFQHKVSRKIIDLCKANEINTLVVGDIKTKKLVTKYRHVRNTNNQNRGTLSRFKGFLKYKAINEGIIHVHVNEAYTSQTNCLTGQRNLSSELDVREVELLPGE

SEQ ID NO: 38446 - protein, 297 aa, unknown
  TnpB Polypeptide
VDSLALANAQMNLQSAYRNFFRDKSVGFPKYKSKKNNHKAYTTNNQKGSVAIVGKYIKLPKIGYVRVKQHRGFIGTIKSVTISQVPSGKYYVSILVETEHIEFPHTDNKVGLDLGIKDLCIASNGDKFENPETLKKYEKQLVKLQRQLAHKEKGSANFYKIKRKIARCHERITNIRKDNLHRISHKLINDNQVIVSENLAISNMIKNHNLAKSIADCSWYELTRQLEYKAEWNNRQYIKVDTFYASSQLCGCCGYKNTDVKNLAIRIWSCPVCGTKHDRDLNASQNILAEGLRLLSA

SEQ ID NO: 38447 - protein, 205 aa, unknown
  TnpB Polypeptide
MSDNGSYLGIDIGLDNLASCVSNNGSCFIINGRPLKSINQYYNKRLAYLKSKLKDNKHTSKQIRSLTNKRNNKIKDYLHKASRILINHVVSNGINTIIIGHNKCWKQEINIGKRNNQNFVSIPFNVFISMISYKATLEGINVKIVEESYTSKCSFLDNERICKHESYEGRRIKRGLFKLLLVVLLMLISMVLLTSLENQKKNPLM

SEQ ID NO: 38448 - protein, 380 aa, unknown
  TnpB Polypeptide
MNKTVLVKIKVQESDKSRIQATFSDYKVAWQAVFDYVFKEKCYNRSKVHFATYQVVRKTLPNLSSALVQEARNDAISKAKSTKTNRHKITKPPILKRISIRFDKRTASIKGNVISFVANQSKRIKAKLIDFPFLSQHRGFKMLAPMIFCKKGQYWAALVFEIPESIVRDSSIIGVDMGLRILAATSEGKLIRGTKLNLLRRKTRFLKKVLQRKDTKSTKRHLKRISRLEKRQSRDVIHCAVNEVLNTKASIIAIEDLDLRARKYRKSANRRRFAVPISEFTRILEYKAKLQGKQVVKVKPAYTSQNDCRGLNPGKRIGGKYIGLDGKILHSDINAACNIALKAKNLGLNNPVSIYYANRQVTVNSPTVGGSHLQASIPLG

SEQ ID NO: 38449 - protein, 419 aa, Lyngbya sp.
MLTLTYEYKLVPTKDQIAIIEEMLAVTRKVWNYALRERKDWYNSRKCSINSCSLQQEYIIPANAPYPGYKEQSAGLTKAKKSNPELKRVNAQVLQQVLKTLDKAFTSMKNQGHGFPRFKNKYRMRSFVFPQFKANPVVNDLIKLPQIGMVKMRLSRPIPEGFKIKQVRVVRRASGYFAMIALQSDVSVPDTPVWGHPLGIDVGLDKFLATSDGELIERPKFLTKLHGELKLLQRRLKLKKLGSANRHKLNHKIARLHQKITDTRKDFHFKLADHLCDQAGMIFVVGEACPKDIDLDFRTWAKGMLSKHTLDAGFGQFFNILAWVCWKRGIYFGKVDYRYTSQICPNCGAHTGKKDLSERLHKCPECSYEIHRDVAAAQVICQRGIAAVGQTVEEIDCVGVLSGVGNNLDKCRKSSKPKS

SEQ ID NO: 38450 - protein, 385 aa, unknown
  TnpB Polypeptide
VSIRTIALTLAPIEAQRTAFLRLRRAFADACNHISAVAWDTGTFNRVRLQQVVYGDVRATYGLMAQHTCQAVSVVAQAYRKDKDTKRVFKPTMAVPLDTPRLYRLAGNHVAITTLDGRLAVKLNIGGIQRAWLKGATALKEADLVCDRKGRWRLMVSAVYPDPPTRDTDGVIGVDLGRTDIAMTSDGDTFSGHRVTAVRDRYSRTRRMIQRNVSKGTRSSRRRGRRTLARLSGREHRFQSQVNHTISRRIVTRAVTSGRAIALEDLTGIRERTTRQARTKTERRRSNSWAFHQLRLFLAYKCVGAGVPLVLVNPAYTSQMCHCCLHIGERAGKRFHCPDCGWWGDADLNGARNIALLGCSLNAPHGPWLCCLYQPGRRALEIPPL

SEQ ID NO: 38451 - protein, 347 aa, unknown
  TnpB Polypeptide
MYKETIPYYDLKRRITALKADHDHGWLRAADSQVLQDKVEDVERAYRNFFEKRARFPRFKRKDAAQSIRYPQRFRFKDNRLYLPKIGWVKAIFHRAMEGTPKNVTVSRTTSGDYYVSVQCEREINPAPHSGPVVGVDLGLTHLAILSTGEKIEHPHHLRHAEKRLARLQRALSRKRQGGANRERARRLVARRHEHVANARRDTLHKLSDRLTRDFGTVRLESLNVRGMLKNHCLAKSIADSGWGMLAEMCRYKAAWRGGTVEQIDRFYPSSKTCHVCGLKNDTLALADREWACAGCGTCHDRDINAARVIASAPTAGAAGRTSAGRSRQTPVPSGVARRSLNREAQA

SEQ ID NO: 38452 - protein, 155 aa, Vibrio sp.
NLWRDTATKKGTRAHRKLKHRIAKPHQKIARQRLDFTHKETAKLVKVAALIATEKLTVKNMTRSAKGTVEKNGKMVKQKAGLNREILNTAQAMTLNLLRYKAEEASSEFVEVPTKQVKPSQTCPDCGAKKKKSLADRWHSCECGCEKPRDVASAR

SEQ ID NO: 38453 - protein, 157 aa, unknown
  TnpB Polypeptide
MENSIIKTVTISRTPSGKFYISILVEYENQILPIIPETFLGLDFAMHGLYVASDEEDADYPNFLRKVEKRLAKAQRKLSKRQKGSRNRDKQSLRVAKLHEKVANQRRDFIHKKARYLVDKYDAIGIEDISVKAMAKRKKGGKFSFGKSVATMDGRNL

SEQ ID NO: 38454 - protein, 467 aa, Hydrocoleum sp.
MKYTYQYRIYPETSQKLTLNNWLRICRYWYNRMLGERFNWWEQNRCPINACPLISHLPELKDKPNYYNQKKQLPELKKGIVEVKHSGEHLDFSQVYSTVLQDVCKRVEATFSRFVAGDSKGNRSGKPRFKSQSRYRSLNFPNADDSWLKFSSINSKWLYISIPKIGLFRVRTHRPIPDGSKIKQVSLINKADGWWINFSLEDKSIPELKTDNIQPTWENSVGLDAVLDKDIYLATSEGNKLPSLKPLRTNQDQLTKVSQRKNKRKHGSKSRRKLAKREGKIHQKIVRNRKDFQYKTAYKLTRTGKKVFFIEKLNLVGLTRRNKTKQDENGNYSPNGQSSKSGLNKSWLDAAFNQFFQILGQVAEKANARVIECKPNYTSQLLSYRDEIVFIDCSIREYFDEELQLKIDRDINAAINLKRVGLDLFPTINRRQNKVVIAKSKTASVSKEVLSVFKRHQKLTQKADASV

SEQ ID NO: 38455 - protein, 484 aa, unknown
  TnpB Polypeptide
MNMIIFAVEFDEFSVEIGADVRKNEVQIIKDSFVKDISAVFGNEDQMDMKIKNDMSAVTDFSLLFHRPSIEWEKSNCRHTMQIKKAFRYELMPKGEHIRKMKQFCGCARFVFNRALAYQKAQYESDNTVKFSYTRLANLLPEWKREFEWLKNCHSQILQQSLKDLESAYRNFFAQRADFPKFKRKGIRDSIRYPQGVRLEERNSRIYLPKTGWIRYRKSRDITGKIKNVTVSQEAGKWYISVQTEQEITKPIPTEQSAVGIDMGIIRFATLSDGTYHEPLNSFRRHQEALRKAQQAMSRKEKFSSNWQKARLKVQKIHSRIADTRKDYLHKISTAISKSHAMVCMEDLQVRNMSGSASGTRESPGRNVRAKSGLNKSIIDQGWYEFRRQLKYKLAWKGGLFVLVPPQNTSRTCPCCGHVSADNRKTQAKFRCETCGFEENADVVGAMNILRAGHARLACEVSDAARSPAAGTQRRDQGTCALTP

SEQ ID NO: 38456 - protein, 575 aa, unknown
  TnpB Polypeptide
MEITRTINADKRYYLDENLITNADSLIETIRRFNDIQMQMYNLLYEKKYMASGSLTEQTYSQWCKDKFETNDYYNCAIYTRASGMLSSQKELRTLYMQTKRSDLKARDTKIASTEQQLAKKQAIKDSLVTYAKTGRWKTPYTGCQTKVAGKKVNLPGGKTMTVKMYEYKIEADIRKLKTRWKLLISARNRAQAKLDNLKAHPPRRIVFGSKKMYTEKDKEDMDIEVWRKEFYDKRHSSMSLPGRHTSKDCNFLVKRRNDVLIITCMDGKQAILSDFRLARDNEVWLAMLDAKPEGRKPVCYNFQLKRDGNGRLYLIPSVTLILENRYCNESLEDGCVSVDLNYNHVALTDIDKDGDRISGEILKFNPENKTSGQISDEIGRVMSRVGKYCENRKKPLIMEDLDTTITKHGMKYGNAKGNRHASVFAYRKMTACLENQSYKRSFGIIKIDPAYTSQIGKILYMRKLGISIHAAASYVIGLKGMGLLEKLRPEPEMTDRLTDSLKEGLADQNSMDSLMKAWKYISGKFSDVYTHSFYRQVPYGYKKSESLTKSGRPRRPKTLKTIAAEMKQWTACNC

SEQ ID NO: 38457 - protein, 404 aa, Pyrobaculum sp.
VWGEVKEAVKQTGLPFAYQQQAVKDAVEAYNSWAEAGGKPPAVRRVSPYGDERAWRFDRLTAISLRLMSGRIVAELWPHKRFWLYEWLAKTGRATRASTIRLRRVGNRVYAVFVYEVEPEAPREPTAVVAFDVNENTIVAARVDLKATVDRVAQWNRQWVQPPISIKVLLTDFGRLAKRYGAIRRRWAEELSVEINGKRTSGAHTREYKKRVKRLREGDRKRDRVNRIAHALTKEPTILVTENVGKKPQEEMIVDKRSPQLRHRIKQTPMKAVVGKVADKATERGLRLVLVSSYKNSQICPIHGERLSFPTEPKIGLCPRGHWVHRDVAAVLNMLWRAVERLEPEYSEIVKQALSTVDEKILEEWSRTVLEAEGPDVLARASPMTPPGEETVIPAGIEGAHEPP

SEQ ID NO: 38458 - protein, 404 aa, Pyrobaculum sp.
VKEVVKQTGLPFAYAQQAVKEAVEAYNSWAEAGGRPPEVRRVAPYVDERTWRFDSATALSIRLMSGRHAAELWPHKRFWLFEWLVRGGRAKRASTIRLRRVKNRVYAMFTYEVEPEAEKEPAAVAAFDVNDNTVVVARVDLKASADRVAQWNRKWVQPSTSIKVFKTDFGRLAKRYAAIRRKWAEGLSVEVSGRKLSGVHTREFRKRVKRLREGKRKRDRVNKIAHELTREPVILVAEDLGRRPQEEMVERAKSAGLRHRIKQMPIKAVVGKVRDRAAERGLRFVFVSASRYSKTCPVHREPLSFPLGPKMGLCPHGHWVHRDVAAVLNILKKAAEELEPKYAEVVRHALSTVDKRQLEEWSAIVLRAERTVKARWPAVLARAGPMTPPGAIIPAGDEGAYDPP

SEQ ID NO: 38459 - protein, 387 aa, Pyrobaculum sp.
MGYRTLVIKRRVEEIPPEQLAKFLEVQERFRQWTTEWYKSGFKSPMPEQNPLKYFAIELKHAMKLLPTNGLKSGVWRVPLPFNTELRFGKNAGDNSRGVLVDLSEKAVKVRKWSGQRNNTITIKLKKTEIKWIEERIREGGQLKLALAWVGKRRGSNMMSFNVALIFYREVTPYQPRRLLVVDINSLHNGVVWAVVEERRVLRRGILRPDLAHIGRLEREAARLESLCATKGGAYCRRAVELKSRLWRLWRQWTVEAAKKIAKLAIQYKAAVVVDKPMNESIQELKESGTVARRNKIYLNVGRFVKRLRELAEWYGVPYREERLYSTICPVCGAKMEELPNRRVKCKCGFEANRDEVPIHWAQKRYREIIPLFSTTHYIQLFPIHFT

SEQ ID NO: 38460 - protein, 398 aa, Pyrobaculum sp.
MGYRTLVVKRRVEEIPPHQLARFLEVQERFRQWATEWYKSGFKTPMPEQNPLKYFAKELKYAMKLIPVNGLKNGIWKVPLPFDAEMRLDKNAGDNSRGVLVDLVESRDGKQKEKAIKIRKWSGERGNTIVIRLRRTEIKWIEERLREGAQLKFALAWMGKRRNSNIATFNVALIFYREVTPYQPKRLLVVDVNALHNGIVIATIEEDKVLQKGILRPDLGRIGRSEREIARLDSLCSTKGGAYCRKAVETKSRLWRLWRQWSIEAVKKIVKLAVQYRAAVVVDEPMDESIRGLKKGDRVKSNVKKYLNVGRLVKRLRELAEWHGVPYAELRLYSTICPRCGAKMEELPNRRMRCQCGFEAQRDEVPIHWAQKRFREILPPFFHRDALRSTPLSTFYLT

SEQ ID NO: 38461 - protein, 397 aa, unknown
  TnpB Polypeptide
MWYNRIVERIALKYRIFPTKTQEVALNETLSVCRLVYNSLVHERTALHEQGQKAPNYHAQAIAITRWKKDHPELKTVHSQVLQNVAVRVDLAFQAFFRRVKENKLKAGETPGYPRLKGKGQYDSITYPQSGFKIGDTSVWLSLFGRPVQVKAKIHRPVDCAVKTCTVRRYGKKWFVCFSCEREIEPLPFSEEAIGLDAGLNSFMALSSGEFIENPRFFRRDEKALAKAGRKQAKTKKRSPARKKANKVLSRIHERVRNRRHDFAHQTARRIVNRFGVIAVEKLNVKNMLGNHCLAKSITDASWSMFRTVLTQKAESAAREVIAVNPAYTSQDCHACGYRAKKKLSERWHFCPICSASLDRDTNAAINILALAIGKSLDGITSSQVIPVEAPAFRHGE

SEQ ID NO: 38462 - protein, 359 aa, unknown
  TnpB Polypeptide
MSFKEMSREFTVLKNSHPEMFAHWRELNTWSAREILKRLDAGYVRFFKGLAKRPPKFRSWQKPYSFTMCQSGFKFADPEEGDLGFGIYGDRVRIMKRDYRFNLSRPILGNIKTVTVKVDALGDFYMSVATDHIATEVTPKTGRAAGYDFGVKTMFTCSDGTQEASPAFYSTAQSPLKSAQQKSSSKQKGSNNRARERKNVARVHRKIRRLRENHHWKLAKQFVHKYDMLCFETLSFEGMKRLWGRKVSDIAPYAFHLKLQHQAKKHGKQLCYIDRFEPTSKTCSTCGQAQVFMDLSVRLWRCQGCKTTHHRDVNAAINILQVGASTFGAEDVRLAIASGPRRLRPKSIPHDPHRKARIH

SEQ ID NO: 38463 - protein, 387 aa, unknown
  TnpB Polypeptide
LKKSLTRGERIRIYPTEKQSNKINMIIGCVRLVWNYSLMERSSIYELYKDYPELITSHTHKSQKDWKTVFPFLKEADSQALNTEQQLLNQAFKNFYQGSHRYPKFKSKKQFRNSYTTHTTNNNIRMEDNCIKIPKVGWVKLKKNRRDLPENASIKAVTVSRTKTNKYYVSLRLSYEQETVEQNKDVLKAIGLDFSMSDFYVDHKGKKANYPMYLHQSLEKLGKLQRQLSHKVRGSKNYEKQKRKIAKLYEKITNQRNDFLHKLSRKIVNNYDIITVETLDLDEMRKPAYWSKQVSDMSYHRFINYLKYKCEDMGKVFHQVSKYYPSSKTCSTCGRVKKTLALSTRTYTCECGSVIDRDLNAAINLGVQGLKTYLINYIEDRTASIAW

SEQ ID NO: 38464 - protein, 313 aa, Rhizobium sp.
MPNRAYKYRIYADQPTAEFFARCCGVVRLVYNIALEQRSSFWRQFRKAEGKNISYPSQARELTAIRAEVPWVAECPIDAQQQALRDLDQAFRNFFAGRAGYPKPRRKFVNDAFRVPSSRVGAIAVLNAKWARVRLPKIGDVKFRYTRPISGAVGNVTVVRQANGWHIAFSCAFEHETPENDNPPVGIDRGIVNTVALSTGEMHAMPPSNLDDRHKQWQRTASRRNSRSKRQAKARRHAARIAAKAARQRLHWQHLTTTRIARRFGAAVLEDLKIRNMSASAKGPSKSRARTSPRRLASIARSARRRGTASSGY

SEQ ID NO: 38465 - protein, 415 aa, unknown
  TnpB Polypeptide
MTVKDQITGLSVREYQTLRLLCRMSKNLYNEALYSVRQFYFAEKKYLNYVANYHICKESENYKSLGTDIAQQTMKIVDRAFKSFFALIVKAKTGSYQFNQICLPHYLDKEGFFSLILPTAHVTFKGGFFILPMARSFKKEHCELKFRVPPHIDSKLIKEIRIHPKFKAQFFELELVYDKEPIETDLDPNKFLGIDLGLDNLATCVTSGGSAFIVDGKNLKSYNRLFNKENARLQSEKDKHGIKFFTRRQYLNLRKRNRRVNHAMSVAARRIVDYCVENRIGNIVVGYNADWKRGINIGKQNNQNFVQIPHGKLCEKLKYLCELYEIRYMEQEESYTSKASFFDDDFLPTYDANNSQPYKFSGRRITRGQYKSATGFVLNADVNGALNILRKCSLISLAALQDRGYVDQPRRIRIF

SEQ ID NO: 38466 - protein, 404 aa, unknown
  TnpB Polypeptide
VKVNRVEQHQIHKTHPLYKTIDEFSFKSKNLYNYANYIIRQEFINNGKYIKYYDIDKALHHSEPYKELMSQAAQCTLQVLDRNWKSFFVAIKDWSKHPEKYLGRPKLPKYKKKDGRFPWYLKNNQTWIRDGYLGFGLRVMNGYKFKTNIKGRLISVRFVPKGLIYMMEIVYETEVPEIKPESKNVVGIDLGVNNFVTMVNNIGLQPIIINGKGVKSINQYYNKQKARIQSELKIRNDKDWSNKLDNLTRKRANKIKNYIHHVSHYIIDYCKENQIDTIVIGLNKTWKQECKMNNKATQNFIYIPYNMLINQLQYKCQDNNVNFIVTEEAYTSGTSFLDNELPIKNNYDKSRRVKRGLFKSNNGRYINSDVNGAFQIMRKVFPDILLEGIEGSLTPIIINATKVV

SEQ ID NO: 38467 - protein, 422 aa, unknown
  TnpB Polypeptide
MYEERNRKIKEKGKETRERHAKMDCRVFSVKVQENRLSNAKLEKLYRCFLEAKWLRNAVVATENLSLEDTSAVQVKVNGTFEVREIKTLSAQMKQSVVDSVKQDVFNLSKAKKKGLKVGKLQYKKECNEINLKQFGCTHYFKGQNKIHIQRIGVLVVNGLEQINLDEVEFANAKLIKKPSGFYVHLTVYTKKQPQSTTEKEVIGLDMGIKDQLTFSNGVKVNFYLEESEQLKGLMRKLSRQTKGSNQYKQTLVRIKRIYEHQNNKKNDVVNKLNSVLKQNYIICFQDELLNSWKRKKSKRRFSFRRKVQHGILGRVKVKLEKNDANVMLESSVPTTQTCPVCGCLTKHSLDKRQYHCNHCGFENADRDIHSANMMVLLSGYGTYRSLNTDAVSTEKMVGLLDNLSSLGVVVTTTNSMEAHCL

SEQ ID NO: 38468 - protein, 386 aa, unknown
  TnpB Polypeptide
MSIKVRLKPNNKQLSKLFQYAGCARFAYNWTILREQENYKQGNKFISDNDLRKEFTQLKKLPEYEWLNEISNNVPKQAIKDACNTYKRFFKKQCKFPKLKSKRHNEQSFYQDCVKIQFTDTHVKVEGFSMSHKQNKQRLNWIRLCEKGRISTNCKYLNPRFTYDGLYWYVSVSIEVDDNDKTSTNDGIGIDLGVKNLAVCSDGSVYKNINKTQRVNKLEKKKRRLQRSISRRYEKNKKGKNYCKTSNIIKIEKELLKVTRRLTNIRHNHTHQITSEIIKRNPSFICMEDLNVGGMMKNRHLSKAVQEQCFYKFRRQIEYKATWNNIPVILADRFFPSSKVCSCCGSVREDLKLSDRVFVCHDCGNRIDRDFNASLNLRMYGEQSVA

SEQ ID NO: 38469 - protein, 334 aa, Mycolicibacter sp.
VPASSRPNCPRTSRSPTPPTPPASSGRVRPSPPSRIRYLAITLACRDLPAGSDRAKVLFATISYHAGRWWVSLNVEAAELHPAHRHPARGSADDGGWVGVDRGLSAFVVAATAEGAEVTRITHAPKALTAGMATQRRLAKSLSRKQKGSHNRRDAAAKLARHHHHVANTRRHFAHQVSNALVKTHDRLVIEDLNIAGMLANHRLARAISDAGWAEFARQLRYKQSWRHGQLAVADRWYPSSQLCSTCAYRRTDLSLADRVFTCANGHRLDRDTNAAINLARWGQTHHNPHRSPDPQAGGRVTNARRRDGADQHRRVGETSPKDAGTDVHTAPAA

SEQ ID NO: 38470 - protein, 399 aa, Rhodococcus sp.
VQLRYNYRVYPTPGQRQALVRAFGCARVVFNDALAVRLSAFEQQLPYPKDEELSKQLITDAKKTEERAWLGEVSAVVLQQALADLNTAYRNFFSSISGKRKGPKVSRPRFRSRRDNRQAIRFTKNARFKVLEDGSLRLPRIGDVAVRWSRDLPSEPSSVTIVKDASGRYFASFVVQTGDDETLPQVDTEVGIDLGLTSFAVSSDGKVIASPKYFRQAERRLKKAQRALSRKQKGSRNREKARLEVARAHARVADRRRDFHHKLSTRIIRENQAVYAEDLSVNGLARTRLAKSIHDSGWSSFTAMLEYKAQRHGRTFVKIGRWFPSTRLCSGCGAAGAKKPLHVRKWICPCGAVHDRDINAAKNILAAGRAERLNACGADGRLRSTEAVSSEAGTRRGAA

SEQ ID NO: 38471 - protein, 307 aa, unknown
  TnpB Polypeptide
MWCQHLNCAKLQFPIAQIRQRNLFSQLVTQAVQDICQPIEKTDRLLFKHNKKGVRPPNFQKVSQYKSFTLKQADYKFIGGNIIKNRSRVCQDWNFRKIEEKVKKLTIKLTLSELFMVVVIEKIARSEIKSETSKLPGLDFGLKVFLTVSDGTKIASPQFLKQSLTVINQASCEHSLNQVKDSANREKAKKNLVRRYEEVVNRRYDWLGKHAHDLTNRDLQCFETLNFKGTQRLWGRKISDLTLGEFWQILEWVGNKKDLPIVFCDRWYPSSKTCLNCGHILKELDWSTKEWRCPSGQSLNGQMKMLL

SEQ ID NO: 38472 - protein, 324 aa, Ruminobacter sp.
MTKGSFYIGGDQVKVLQGKPDSKNPKVLNTNSNHQSLKIPNFGWVELREHIRLEGKILSSTISQEGDKFYASFNMEISDEEYRRTHKPILQLNTAVGIDLGLKYFITTDNGVVIEAPKPLKRYMKKLKMEQRALSRKVHPRTKEDTTKYSKNYYRQLEKVKKLHRKIACIRKDCIEKVTTVLVRNYQYIKIEDLNVKGMVKNHKLALAISDVGFYKFRSRLECKAKEYQRVVSLADRFYPSSKTCSKCGAIKEDLTLKDRTYICPKCGFTIDRDLNAAINLKNSLKSDYVGRVTTEFMDVDRLALLDDFAKNKITTSLIEASIQ

SEQ ID NO: 38473 - protein, 363 aa, unknown
  TnpB Polypeptide
LDSIEGKKNITAIRFDKNANVVVYQKMVIPIKIRDNDYYAKEALENEIAYCRIVRKPFKNGYEYFVQIVLRGVPPLKPNRMPNFNGGNTAFDMGTSVVNAIGQEDGLMEPLAPKTVKECNKAIILLSRQLDRIRRLNNPNNYNEDGTCKKGHHKWVKTKNYYKTLFALKNMYRLKSIYIREHQARLQNKILSYGGNFATEDINFTSWMRRSKKPTEQTDKEIEVTNKKGEKKKVKKCKKKKRFGKTLNNNSPGKFVRDFAKKLEYFGLELEMINTKEFKASQINHDTGEYEKIPLSQRTKIVAGHKVQRDLYSAFAMANRKDLETIDRQKCIDNFEKFLEIQERIINNLKARGDDLPACMGIK

SEQ ID NO: 38474 - protein, 330 aa, unknown
  TnpB Polypeptide
MRKHWKHGRNHTYNQIVVRSDNYTTFQLGGHAWIKIPSLQKGKRIAIPLNTTVEPTGTLRLILKDSEVEVHYTIEITETHNCGSATIGIDKGYTEVFVDSEGEHYGEGLGKLLTKHSDRLKKKYQARNKLKTIITKKPHKKTNIIENNLGRKKLNRQNIKVKCQVKDKICQATHKLIDKASVIATEDLTSPIASKKFGKNVTRRLSAWTKGVIATALDMISRRRGSSVILVNSAGTMQMDSRHGVLLGKRSGDSFHGFDGVVLQADENAAQNILARLHDPEIDRWTPWQKVKSILLKRTERQRLGLLNQDSSCNPSGLSTESELHIHSFE

SEQ ID NO: 38475 - protein, 134 aa, Endozoicomonas sp.
VAFKYKNGQLFIAKSKEPLNIRWSRELPSAPSSITISKHRAGRYFVSMLYEFEAKPMPISKKTVGIDLGLNDLFITSDGEKSGNPRHTRCYEQKLAYLQRKLAKKQKGSSNRAKAKLKLDAAVLPKQVTYLSRF

SEQ ID NO: 38476 - protein, 410 aa, Microcoleus sp.
MLVLEYKVKAKSNQYKAIKEAIRTVQFIRNKCLRYWMDASKNTKIDRFALNKYSTELRNEFKFVKDLNSMAVQASAERSWLAIKRFYDNCKAKKPGHIEFPRFQKDNRSVEYKTSGWVLHPTKRRITFSDKKGIGELKLLGKWDIHTFPVKSIKRVRLVRRADGYYCQFSLNVDCVDTQPKTGKKVGLDVGLNSFYTDSDGHQEDNPRFSRKAEPKIKHCQRRIYSKEKGSSNRRKARARYSRKHLRVSRQREEYAKRLARNVCLSNDIIAYEDLRIANMLKNHCLAKSITDASWYQFRQWIEHFARKFGRLAVAVPPQYTSQQCSKCKRVVKKSLSTRTHVCICGCVLDRDENAAINILLKAIEILLKAKNTEGHSEINASGVGTSTLLGASLVEQVLTVNEESSCLDC

SEQ ID NO: 38477 - protein, 384 aa, unknown
  TnpB Polypeptide
MKAYKFKIYQSKRNHYLVGLIFIAAQIWNHSIALHKRYYRLYGKHLNVYQLKKHITKLKKLPKYKHWNQLGSQAVQDVVLRINKSYNLFFSNLKSREANKIKRFVSPPNFKKSRKYKSFTLTQAGYEFLGGNKIRIGKKVFKFFKSRNIQGNVKTLTIKRDAVGDLWLIATTDWEDTPPEINPRNGNSIGFDFGLKTYLTGSDGCCFESPLFFKRGLRKIRRANQQLSRKKRGSRNRLKAHFHLARVHRRVANQRNDYHWKLAHQITDRYDVICFEDLNLSAMQRLWGRKITDLGFYSFLQKVEYLAKKKGRIVRFIDRWFPSSKMCHVCGVLNKSLELRDRQWACDSCNTYHDRDLNAAINIHAVGTSTANGVTVRPATTVGK

SEQ ID NO: 38478 - protein, 406 aa, Cyanothece sp.
MKLAERHIIKRGHKFWSEIDGLSWHSKNLYNSANYLIRQNFIYGQGYLSYNKMASLMKETQQYKALPAKVSQQVLQGLDNNWKSFFEGLSELKINPNKFKGRPKLPGYKDPFKGRNLLVYTNQAISRVALKQGRIKLSGTSLSFPTSVPDRVAQVRIVPKCDCYVIEVIYEELEQFSGSNDFIASVDLGINVLMAVTSNQPGFVPLLINGRPLKSLNQFYNKRSSKVKSLLKGNRKSSSRISRLTRCRNQKIDNYLHRASRYLVNLLVEQQISTLVIGKNDSWKQECELGKVNNQSFVSIPHTRLIDQITYKCNLVGIQVVIQEESYTSQSNFFQLDPIPVYGEITEKPVFTGKRISRGLYRTDTGFLCQSDVMSSYNILRKAFPNAFSYGIERCVVHPRRINLSK

SEQ ID NO: 38479 - protein, 415 aa, Cyanothece sp.
MLTMNMTYRIYPDVDQQAMMLEWLETCRRLYNRCLRDLKDWINSRKCSIDRCSLEKEYIMSASIPFPSYLEQKRQLTQWKKEDDYLKAVHSQVTQDVVKRMHNTWESFKDRGYGFPRFKKYGQYRSFLFPQFKDNPITGYQIKLPKIGDILINQHRPIPNGFKVKQIRVLSRCRGTKWYVIVTVQSDASVPEPLPYGRGVGIDIGLENFLTTSDNFTVEPAKFFRELQSRLKVLQRKASRQKKRSKNWEKAQIEVAELHHKIANCRKNFHFQTAHLLCDQADMIFVEDINFRVSAKGFLSKSMLDGAFGQFRNILSWVCWKRGKYFAQVDHKFTSQICPKCQTHTGKKPLSQRVHECPECSYQTTRDHASAEVILQRGLEKVGMDVAERKQSDNGVLSGVLYLDKCRCRNAQLRS

SEQ ID NO: 38480 - protein, 363 aa, Cyanothece sp.
VLLSIKTKLKLNKRQKTLMAKHAGIARFTYNWGLATWNDLYKSRLKPNIYLLKKFFNKHLKAEYAWIKEKGICQKITQYAFEHLGQAFSRFFQGIGEKPQFKKKGKHDSFTLDNGGKPLNVGGRSLKLPTIGWVKTYEALPHTTCKKFTISRTADEWFISFTYEQDKKPTNKEYEVVGVDLGVKTLATLSTGKVFPNQKHYKRNLNKLQKLSRSYSRKVKGSNNLLKAQIKLARYHAKIKNVRHDNLHKITTYIAKNHKLIVMEDLNVKGMLSLDKLSQSIADCGFYEFKRQLTYKADKFGSELLLASRWFPSSKTCSNCGCKKEKLLLSDRVFNCDSCGFSIDRDLNASINISRLAETTKPA

SEQ ID NO: 38481 - protein, 389 aa, Cyanothece sp.
MLRVVKVRLYPDTDQQQSLEQSFGNCRWLWNHCLNLMNQTYKDTGKGLSGYEVKKIIPQLKKEYEWLSLAYSACLQQVCLNLGVAFNNFFEKRARYPRFKSKHGKQSIQYPQNVKVFDNYLEIPKIGKVKAVIHRPIEGKIKTVNISKNCSQQYFAAVLFEDGKEKPSLCTEGKAIGIDVGLTHFCITSEGSKFDNPRFGKKHEKNLKIKQQQLSRKQKSSINRKKSRLKLAKVHRKITNCREDFLHKLSRRIVDENQIIIVENLAVKNMMQNPKLSKAIHQVGWGMFMTMLKYKAEQEGKVYQEVDRFFPSSKTCHVCLNQVGSLPLNVRTWTCENCQTTHDRDVNAAINLRDEGLRILTSGTGGKAYRQTVRRSGGRKKSTVPLVSG

SEQ ID NO: 38482 - protein, 426 aa, Cyanothece sp.
MLTFNYTYRIYPDALQEGMLLEWLETSRACYNYALREIKDWIASRKSPVDRCSLEFEYIMPADYPFPSYSKQQNALPKAKKIFPRLANAPSQVLQCTIRRLHDAWDFFKERGFGFPRFKKYGQMKSLLFPQFKTNPVTGWQIALPKLGKVQINLHRPIPESFAVKQVRVVRKAKGWFAVITISSPESLPSTESPSGHFIGVDLNLGAYVATSDGYSSKRPKFYGKEQSKLKLLQRRLSRKNKRSNNYEKARLKVEKQHNHIAFKRKDHQFKLAHKLCDMGDSIFVEDIDFRIMAKGMLGKHTLDAGFGQLRDIIKFVCWKRGKFFAPVDHRGTSQTCPNCRTEVRKTLSDRIHDCKACGYIQDRDIASAQEICNRGIETYCRQGLCRTETACQVEVAGAMSLANWRRESLWAGMSQGDLGSPTHNR

SEQ ID NO: 38483 - protein, 460 aa, Cyanothece sp.
MAKPTKTIKRELTPRKLEWLARTKVLFNQVVEFYVRVLSTHPNLLNTHSDDLYSVFERLTISNKKHPCVPYPLPWSIPAMLRRAAIKKAYGVYQSWHSHRQRWEKQKNKATLKGKKFAHRPPLLTRKYNFSVQFYKGAWKGTGVENELLLNLWTGTSWTWVKYKISGRDLPDNWKALSPTVVVKGNKPRLHIPLEKENFNYPKKLEVQTKKKDFKIVAVDLNMGDKLAVFTLLNSDGKALATKFIKGGSYLQSRRKRLLGKIAKSYSKTGIISSGHSRHKWDKIKQIQDYEAHRISRRIVDWATSQGANVIVFEHLGNLKPQKGKYSHKQNQKRAYWLKSKIFDYTKYKAFTNGIITSRVNPANTSRLCACCGEWVSRHHADEPIGNYRVGADNFTCLANPLHRGDADRNASVNIGLKFLSRYDLVSLKGKPLVERPRLVSGLYIQGKSLALSGRRVGMF

SEQ ID NO: 38484 - protein, 447 aa, Cyanothece sp.
MYGCQQNLITANSELKAVLEFICSESHKLTNCGIYYARQLYFKTRKIIGKFDLQKEYKTNKHFQVLYSQAAQQILRSVAESFKSFQELNKKYKKGELKDKPMLPKYRKKGGLALVTYPKQALKLVDNQISIPLGKTVKRWFGIDSFSLLMPSNLKFEDIKELRILPRNQCFYVEFVYEHKPVVKHEVDWDKALSIDPGIGNWLSCITNTGLAFIVDGRKVKSLNQWYNKRISKLKEGKPQGYWERQLAHITEKRNRQMRDAVNKAAKIVINYCLNNKIGTVVFGWNQGQRQEAKLGKLTQTFVQIPTAKVKERIKQLCELYDLRFIETEESYTSKSSFLDNDFLPSFGEDNKPKGWKPSGKRIFRGLYKTKAGKLINSDLMGAANIMKKVEVQLGLDLTKACRALLLTAPPRYLIWDSKKKKRYATSIYKGLCGEVASPLYTPCHVA

SEQ ID NO: 38485 - protein, 394 aa, Cyanothece sp.
MAILEYVCSEANKLYNCGLYYARQIYFKTHQYIGKYTLDKELKSNLHFKALRSCVAQQTLRSVYEGMTSYRKLLAMWRKGELVNKPKFPNYRKAGLYQVAYPKQWLKLVDNEIKFSLGKQVKAWFKLDSFSLPMPSNLLFEDIKEVRIIPRNLCFYAEFVYQLETRDKGLNQDNVLGIDPGLNNWLTCVSNVGTSFIIDGKHLKSVNRWYNKQASTLKEGKPQGFWSNNLARITEKRNRQMRDAVNKTARLIVNHCLDNNIGTIVFGWNQEVKKEVNLGKKNNQSFVSIPTARLKNRIAQLSELYGIKFIETEESYTSKASFLDDDIIPVFGEKPEGWKSSGRRTKRGLFRTANNWYINADCNGAGNIIRKVATTLNLDLSRVNRGVLTVRFVG

SEQ ID NO: 38486 - protein, 438 aa, Cyanothece sp.
VFVVECKVKPKPQQIQAIDEAIQTSQFVRNKVLRYWMDNRGVGKTELFRYNTRLRKEYKFVDDLNSHACQTAVERVLRAINKFFDNCKKKIPGKKGYPRFKKNTRSVEYKVSGWKLSENRKHITFTDKKNIGKLKLIGTKDLNYYQIEQIKRVRIIRRADGYYVQFSIQLDPRDTVEPLIPSQKAVGVDVGLKYFYADSQGNIEPIPQFYRKAERQLNRANRKKSKKFRKGHKQSRNYHKARCRYARKHLRVSRQREEFAKRKALRLIQSNDLIAYEDLNVKGMVKNRHLALSISDVGWSLFRGWLEYFGMKYRKVTVAVPSHNTSQNCSNCGQKVQKSLSTRTHVCSCGCILDRDVNAALNILQKGLSTVGHTGSKAFESEILSTLATANGGEDPSTLIGVILSEQASSVNQESPRMRGWGVSIIYSDNPPGDNNDQ

SEQ ID NO: 38487 - protein, 408 aa, Cyanothece sp.
MQLVERHIIKPGHKYYHEADRLCFLAKNLYNCANYIYRQNFFRGVGTNAIEVYHQLKTCPDYQALPAKVAQNVLRLVLKNWISYYQALKAYEITPEKFLGKPKIPRYRGTISLNREDGRYVVGYNHQAISKKFFKKKIAHPSGTNIYLPTKASSIDEIRIVPRTGCYVIEVVYPVEEGSQPAKCKNPQRIAAIDLGLNNLATMTYNVPGLKPVIYDGRAIKSANQYANKKNAQLRSLLPSNQYRSKRLDALWLKRNLKVEYYLHTTSRAIINDLVANQIGVLVIGWNQGFKDSINLGRVSNQKFVSIPHKKLIEQLQYKGSLLGIEVVLTEEAYTSKCSALDNEPIKKHSIYKGKRVHRGLFRTATGKKINADINGSLNIGRLYEQVVGNGHRPHPIEEPVRWAGSPT

SEQ ID NO: 38488 - protein, 418 aa, Cyanothece sp.
MLVVEAKLKNGTPEQYSRLDEAILTAQFIRNKCVRYWIDNKGTTRNDLQKHCSVLASDKTTPWANKLNSQARQSSADRAWASISRFYANCRNPSIKKKGFPKFKKHTRSVEYKVTGYKLSDDRRKITFTDGFKAGKFDLWCSNKTLVYYSEQQIKRVRVVKQADGYYCQFLIDYDREEKHEFTGSVVGIDLGLKEFYTDSYGNTVENPRYLRKSEKRLKKATRRLSKRFCKGKKKQSNNYHKQRKKVAKLHLKVSRQRKDKAIKDALALVQSHDLVVYEALLVSNMVKNHKLAKSISDASWYQFTIWVNYFAKIHRITCIAVPPHFTTIDCSVCGTKVEKTLSTRTHQCPSCETVLDRDHNAARNILSKGLKQLGAYLNGSGGHPQTDPNACQESGLWVFNRDVEHLSCLVETGIPDA

SEQ ID NO: 38489 - protein, 401 aa, Cyanothece sp.
MTAPKDGEATRAFKYRFYPTSEQETLLRRTLGCVRLVYNKALHERTQAWYERLERIDYCQTSAMLTSWKKQESLDFLNEVSCVPLQQTLRHLQKAFTNFWGKTAKYPRFKQKRSGGSAEFTKSAFKWKDGQVWLAKCSEPLAIRWSRQLPYGATPSTITIKLDARGRWFVSLLVKDETVQPLPKSDKAIGIDLGITSLITTSDGTKISKPKHFNKLYKKLKRVQKEYSRTQKGSKNREKARLKVARVHAKIADSRKDFLHKLTTQLIRENQTIVVEDLAVRNMVKNPKLAKAISECGWSEFVGQLEYKCRWYGRELVKIDRFFPSSKRCGNCGHVMDQLPLNIREWECRECGMTHDRDINASRNILAAGLAVTVCGADVRPDRHESKGQLRKTRKGRKQET

SEQ ID NO: 38490 - protein, 392 aa, Cyanothece sp.
MYAIKLELKLNNIERSYLAGCAGYARLVYNYGLDLIKSSWSFEGIKVGDGSRLAAIKKILTNHVMANDKYKWMKKYPSTIYQSALNNLGKAMSRYRKGLGKLPVLKAKKDGDSFTVYKSSGIYPSKGRAMLPFSNRQVIQAGKKIIIPGLGTFRLKEELLFTCSSQTFTISRSSHKWYVSFTIDAEKIPPIIQKNELVGIDLGVKAFATLSTGKVYEMPKTLKEAKTKLSQFQWANRNKQLGNRKKKIKASNRAKLYYRQLAKKHSRVSNIRKDFLHKTTTDISRENSRLRIEDLNVSGMLANCKLSEAVANQGFYEFRRQLEYKQKFYSTQVEIVDRWYPSSKTCSSCGHQQPIKLSQRVFDCQICNSQIDRDLNASINLKNAPVNKVRLA

SEQ ID NO: 38491 - protein, 426 aa, Cyanothece sp.
MIVLEMKAVVKPNQVLAIDDAIRTVQFIRNKALRLWMDASREDKIDKYALNKYCRILAKEYKFADELNSTARQASSERAWAAISRFYDNCKKNIKGKKGFPKFQKNNRSVEYKQSGWKLSDNRKKITFTDKKGIGTLSLKGTRDLNFYPIDSFKRVRLVRRANGYYVQFCISVDIRSYSKPLEPTKHCVGIDVGLKVFYADSDGKTVEIPQYYRQAEKLLNRLNQRKSKKFKKGQKPSNNYKRARQKYARKHLRVSRQRKGFVQREALRVIQSNDLVAYEDLNVKGLAKSKLAKSVNDAAWSTFRQWLEYFAFKYGKATVAVPPHNTSQNCSNCGEKVKKSLSTRTHKCPHCLYEEDRDINAAINILKLGLSTLGHSGSKAFESEILSTLAIANGGEDASTLVGAILSEQASSVNQESPSILPNKV

SEQ ID NO: 38492 - protein, 219 aa, Cyanothece sp.
LGITSLITTSDGTKVSNPRHFNKLYKKLHRVQKAYSRTQKGSKNREKARLKVAKVHAKIGDSRRDFLHKLTTQLVRENQTIVVEDLAVRNMVKNSKLAKAISDCGWSEFVGQLEYKCQWYGRELVKIDGFFPSSKRCGNCGHVMDKLPLNIREWECPECRTVHDHEVALRARDINASRNILAAGLAVRVCGADIRPDRHKYKGQLRKTRIREGNKKPKS

SEQ ID NO: 38493 - protein, 167 aa, Cyanothece sp.
MVATEKLNLKGMTRKAKTGKIKRQKTGMNRNLLDVGIGNLISLIKYKLDEADGLFVYVPLSIAPSQTCPKCGNKKKKELSERVHNCECGLVGDRDVAAARVMLNYARKGLGTSLSNADAESLPKTPQHCGGFRQIQQKKRQKPRQSRQRKSRVVHISISLRGEVISC

SEQ ID NO: 38494 - protein, 441 aa, Cyanothece sp.
MYGCQQVLIHPSEEVKAILEFICSQANKLANCAIYYCRQILFKTSRYVGKYEIDEALKSNVNFKAMRSACAQQLLHDVVESFTSYRRLLALWKKGELADKPRVPNYRKKGGMAVVACPSRWIKLIENNQLKIPLGNQVKAWFGIDHFLLPMPTNLNYKDIKEFRIVPRNGCFYLECVYRQKELVEMSPNPNVLGIDHGVDNLLTCTSSTGKSFIIDGKKVKSQNQWYNKRISKIQTGKPQDYWDDELALLTEKRNRQMRDNVNKSARFIINWCLRNNISTIVFGWNKRQKDSINIGRKNNQEFVQIPMAKLKSRIAQLCEPYGIRFVETEESYTSKSSFLDNDLLPTVGEKPDGWQSSGKRVNRGLYRTSNGKLINCDAQAAANIIRKVITQLEVSLAKVTRGVLSLPQRYRLDRLSKSYRKQASWWLQPDEAFRLESSPF

SEQ ID NO: 38495 - protein, 435 aa, Cyanothece sp.
MLVVEAKLKNGTSEQYSRLDEAILTAQFIRNKCVRYWIDNKGTTRNDLQKYCSVLASDKTTPWANKLNSQARQSSADRAWQAISRFYTNCRNSSVKKKGFPKFKKHTRSVEYKVTGYKLSDDRRKITFTDGFKAGTFDLWCSNKTLVYYSEQQIKRVRVVRRADGYYCQFLIDYSREEKHEFTGRITGIDLGLKEFYTDSNGNTVENPRYLRKSEKRLKKAQRKLSKRFCKGKKKQSNNYHKQRKKVAKLHLKVSRQRKDKAIKDALALVQSHDLVVYESLKVSNMVKNHKLAKSISDASWYQFTQWVNYFAKVHKITCIAVPPHFTTVDCSCCGAKVEKTLSTRTHQCPSCETVLDRDYNAAINILKKGLKYLGAYLNGSVGHTQTDTAVALLGETPRPHCLPNACQESGLWVFNRDVEHLSCLVETGISDTQV

SEQ ID NO: 38496 - protein, 430 aa, Cyanothece sp.
MYGCQQVLINSPPDVMAVLEYVCSEANKLYNCGLYYARQIYFKTHQYIGKYTLDKQLKSNLHFKALRSCVAQQTLRSVYEAFVSYWKLLSMWKRGELPDKPRIPKYRKKGFYQFVYPKQWLKLIGNEIKFSLGKQVKTWFKLDSFSLPMPSNLRFENIKEVRIIPRNRCFYAEFVYQLEIQDQGLNQDNALGIDPGLNNWLTCVSNVGTSFILDGKHLKSVNRWYNKQVSTIKEGKPQGLWSNRLAKITEKRNRQMRDAVNKAARIVVNHCLDNHIGTIVFGWNDEVKKEINLGKKNNQSFVSIPTARLKNRIAQLCELYGIRFIETEESYTSKASFLDGDIIPVHGAKPEGWKSSGKRTKRGLFRTGNNWYINADCNGAANIIRKVATTLNLDLSPVNRGVLTRPQKLKFWSAKKTLRNGVLTRCEASA

SEQ ID NO: 38497 - protein, 427 aa, Cyanothece sp.
MYGCQQNLITTSSELKAILEFICSESHKLTNCGIYYARQLYFKTRKILGKFDLEKEYKTNKHFQVLYSQAAQQILRSVAESFKSFQELNKKYKKGELKDKSKLPKYRKKGGLALITYPKQALKLVDNQIRIPLGKTVKRWFSIDSFSLLMPSNFKFEDIKELRILPRNQCFYVEFVYELETQDKSLNQDNVLGLDPGINNWITAVSNVGTSFIIDGKHLKSVNRWYNKQVSTIKEGKSQGFWSNRLAKITERRNRQMRDAVNKAARIVINHCLDNNIGVIVFGWNDEVKKGVNLGKKNHQSFVSIPTAKLKNRIAQLCELYKIKFIQQDESYTSKSSFLDGDFIPTYGEKPNEWKSSGKRVKRGLFRTSNNQYINADCNGAANVIRKLQQVSTILNFDLSRVSRAVLTQPQKLKFWSAKKTRSNVDL

SEQ ID NO: 38498 - protein, 404 aa, Cyanothece sp.
MTAPKDCEAARAFKFRFYPTKEQENILRRTLGCVRLVYNKALHERTQAWYERLERIDYCQTSAMLTSWKKQEDLDFLNEVSCVPLQQTLRHLQRAFANFFGKTAKYPRFKKKRSGGSAEFTKSAFKWKDGQVWLAKCKEPLTIRWSQQLPQNTEPSTITIKLDASGRWFISLLVRDESIEPLPKTDKVIGIDLGITSLITTSNGTKVSNPRHFNKLYKKLKRVQKAYSKTQKGSKNREKARLKVAKVHAKIGDSRRDFLHKLTTQLVRENQTIVVEDLAVRNMVKNSKLAKAISDCGWSEFVSQLEYKCQWYGRELVKIDRFFPSSKRCGNCGLVIDKLPLSVRSWECPECGTVHDRDINASRNILAAGLAVRVCGADIRPDRHKSKGQLRKTRIREGNKKPKS

SEQ ID NO: 38499 - protein, 455 aa, Cyanothece sp.
MYGTKPVKLKVSDAVKAHLTYLCQQSNNLINSSLYLIRQRHFESCETKCYFDREGFYRCGRRDRFLKITYAELCKLMKDELSYKILGGQCAQQTLKTVVESCNSYNGLLKAYWKGEVDKPKVPNYRKKGGLAPITYPAQAISFNLETGKCKLPISCELNNDIKTDLGLTEIWINGCTGITIEQIAEVRIIPKNQSLYVEYVYKVEEPPSIQLDYSLALGIDPGLTNWLTCLSNKGKSFIIDGRKIKSINQNYHRKVAKLKKGNPAKYWDKVLDSVTEKRNNQMRDVINKAAKFVINYCLKHTIGNIVFGWNTGSKNEINIGKKNNQEFVQIPTARLKNRIKELCDYYGIIFTETEEAYSSKASFLDNDLVPRHGEKPSQYKFSGKRIKRGLYRTKNGLLINSDCNGSANILKKVMTQLNLDLAKVTRGALALPKRYDLFTDMKKLYRKTDCGGAF

SEQ ID NO: 38500 - protein, 438 aa, Cyanothece sp.
MFVLEFKVEAKKQQYQAIDDAIRTSQFIRNKCLRYWMDNKGVNKYDLSAYCKILAHDFKFASELNSQARQASAEKAWSSISRFFDNCKKKIPGKKGYPRFKKFSRSVEYKTTGWKLITPKTISFSDKKGIGTLSLKGTWDLAYFKDSDIKRVRLIRRADGYYCQFVLSCEVTEDIKPSGKCIGLDVGLASFYTDQQGSKVDNPIFLRKSEKRLKRLQRRLSKKVKGSSNRQKARQRLAKVHLKVSRQRKDFAVKLARCVVHSNDVIAYEDLRIKNLVKNHCLAKSINDAAWYQFREWIEYFGSKFSKITVAVPPQYTSQNCSNCGETVKKSLSTRTHVCSCGACLDRDENAALNILKLGLSTVGHTGSKASESEILSALATANGGEDTSTLIGVILSKQVSSVNQESSTMRGRGVSKELKLGDSQLIKISYDSTDHTR

SEQ ID NO: 38501 - protein, 380 aa, Cyanothece sp.
MKARYQFRVYPTKDQQIAIARLFGCCRVVWNDALSFCQEKYKQGEKKPSYGELSKRLTQLKKSSEKEWLGEVSSIPLQQSLKDLEQAYSNFFKSCKGERKGKKIKPPKFKKRKSRQSAKFTDNGFKVRQHNVYLPKIGKLRIVWTRPLPSPPSSVTLIKDSADRYFLSFVVEIHPEKLPDNEQSIGIDLGIIDFATFSNGEKVKAPKPLKKRLKRLKKLQRKFSRKKKGSKRREVARKKVAKLHAKIADTRKDFLHKLSTRVVRENQTIALEDLNTSGLMKNRKLARAISDLGWCTFRDMLTAKSEKYGRDLRIIDRWEPTSQKCSCCGKKGGKKELYVREWLCLFCGTWHDRDVNAAKNILVAGGLSETLNGVRLVQSK

SEQ ID NO: 38502 - protein, 435 aa, Flavobacteriaceae sp.
MLKNKRQYIRIKYRLRGNPKAYAYLSGLAGANRHLWNTALSKILKDYKETDKSDFSYYTLGKWYTKYKRDQAKWLSNYVAWKSKLVLKDLSVAMKEYVQNNRARPKFKSKRNRWSFPIGLYSKEIKNNKYLLIKEGVYMKMIGHQQIERYSNPKPKQARIIREVEDRSNPKNKKNRNKNKHNKWFLSVVYEVDSEEIPIDSVGIGIDRNVGQVADNKGNIYELADIKKQEKQIAITNKKLSRKKRGSNRRNKTRLALASHHRKKTNQLKNSCRHIAKSICRKSNLIFLEDLKTKNLLKSAKGTVDKPGKNVKAKSGLSRVIQNSLWYFLECELARHGLVCKVPAAYTSQKCSECGFTDKDNRTSQSKFKCLECGLSMNADTNAAINIWTLGIGDIQYVRGVCIRPKIAKGGPGQPTMKRKNEYFAFKKQNAYSRG

SEQ ID NO: 38503 - protein, 475 aa, unknown
  TnpB Polypeptide
MAEKVTRILRSERLNQSKYARLSDLAARCGRVRADAWQRCSGVSTVLQSPYDIRDAWMAEGYAWHGLPARLGKAALADALGDIDAAREAAKVPVKRAVRHRTRGDDAERQRLYSLLKQNRWTEDPFLHRQMRKCWRGGRSHATNQIVADAGSYTTKVWHGRAWVYLQCLERGQRIAIPLKGTHLPAGTLRILLQDNGQVAVHHAVDEAQVCSTRPCGDATVGVDKGYTEVYTDSDGKRHGKDLGDLLSAESDRRKVKGQRRNQLRAVEHKHRAKGHTRKADNIQKNNLGNQKWNRRRTLHHKQVRDHLCQAAHTVVDKAGIIACEDLSLPMKSAKYRHRDTNRRLNGWVKGVMADTLTSISRRRGSALALVNPAYTSQIDSRTGLLQGTRRWDRFYCRDGVVLDADINAACNILVRLYDEEITLYMPYRDVRALLAERTRTAVGAAPPGLELRGLATRPPSTESELPAPVPKGAG

SEQ ID NO: 38504 - protein, 388 aa, unknown
  TnpB Polypeptide
MVNDSIRIGIANDASSLRKLSLLSYNQLAHYDSPSYYKLCAISRAAGILAARKKSLKRGFPTRQPYTARPFLVSCYGFKIKSGALEIPISRGERLSLPLTNHTLGVISQLGVEVRSFTLTRNKLCLSLARDAPHLECTSTVGVDRNLRNLTVGNESQIRYYDLSETVRIAKTTARIVASFKRDDDRTLGGISSKYGRRRTARTAHLLHNATKRIVARAVQGRDAIVLENIQGIRRLYQRGNGQKRKYRGRMNGWSFSEVQRQIEYKARWIGLPVIRLSRHETRGSSVTCPRCGERLQSDKRLGRKLWCGNCRIVMDRDMVAAVNLARRGRVRFARSRPPIILEAQGEADEAVMGNPTPTVIPGVDAPKPTPIRSSPEPFNQVILRESS

SEQ ID NO: 38505 - protein, 372 aa, Acidaminobacter sp.
MKFTITAKIQIYPTSDNIILLKETMSVYRKGCNYISSIVFETKVLNQCILHDKTYRSLRNDYGLKSQMAQSVVKTVIARYKSAKSNGHNWNIVKFKKPEVDLVWNRDYSISGQVFSVNTLQGRLKIPYETKGMTQYFDGSWTFGTAKLVMKHNKYFLHIPVTKDIPEIRDDKIAQVIGVDFGMNFLAVAYGSDGKTYFDPGRKIKDKRAHFTRVRKSLQRVKTPSSRRRLKSLGSRENRWMTDVNHQVSKALVLRYGKDALFVIEDLTGIRKATECVRVKDRYYRVSWAFYQLRQMLEYKVRKAGSKVMAVDPSYTSQTCPKCAHIDKANRDKKRHHFSCKSCGYQSNDDRIGAMNLQQIGMKYIAEVTMSV

SEQ ID NO: 38506 - protein, 421 aa, Bifidobacterium sp.
MLEAVKVALDPTPRQERLLEGNANAARFAYNLMLAHIQSQLARNEKADWSMYAMRRWWNEWKSEIAPWWAEYSKEAYNTAFEQLSTAFRNYFNSRKGRRMGWPRFRSKRRAPLRYAYTTGFALVRGDPRRIRLPRVGRVHCMENITERVDGAHVMRVTVGKRAGRWYAALTVERDDKPFSGVPKGGSVGVDLGVKTLATLSNGTVFDNPRLLKRAHRKLRKAQKTLSRRERGSNRWKEAKLRLQRVHAHVASQRCDGLNKLTDMLAKTYSHISIEDLNVAGMVRNRNLAQSISDCGFRELRRQLEYKTAHTGAKLHVVNRWYPSSKTCSNCGTVKAKLSLNERTYVCDACGLSIDRDLNAAININVAGSAPETLNARGGDARHDRRKPAAQTPVNREPSSRNNGMRLGADLGNEVMQTTTN

SEQ ID NO: 38507 - protein, 240 aa, unknown
  TnpB Polypeptide
MLRYRDKYKLEECNISKIYNITISKTSSGNYYASISAEVDIIAFEKTNRSCGIDLGLKDFLIFDTGEKINNPRILKSLEKKYKKLAKAVSRKVKGSNNREKAKIKLIKFHEKVVNIRKNFLHKLSTRLIKEYDIICIEDLCFKAFMKTDNAKSYQDVAQSEFVRQLEYKVNWYGKIISKIDTFYPSSQLCSECGYKNVALKDTSIRKYDCPECGTHHDRDINAAINILREGLRILEENNI

SEQ ID NO: 38508 - protein, 401 aa, unknown
  TnpB Polypeptide
MTIIIEHRDLHRSVHGSMGGVLPVTRRKKRWRLSNMLINRAYRYELDPNTHERILLAKHAGTARFAYNWGLARRIALWESEKKSTNAIEQHRELNVLKKVDLPWMYEVSKCAPQEALRDLDRAFQNFFRGLKTGRKVGFPKFKKKGRHDSFRLTGAIHVFERHIQMPRFGKIRVKEATEVQGRILSATVRREADRWFVSLAVEMEICDPIQVQGPAAGIDVGLSHFATIVSGSESVKIADPKPLNRYFKLLRRRQRRHSRKQKGSRNRKKSALQLARLHRRVRNIRQDFLHKLTTELAKTKSVIVVEDLNVSGMLQNACLARHIADVGWGEFRRQLEYKTKWYGSRLVVANRFYPSSKTCSACGAVQERMPLSIREWTCPACGTHHDRDINAAKNLLTLAG

SEQ ID NO: 38509 - protein, 343 aa, Escherichia sp.
VEWKNATETQWLKDSPSQPLQQSLKDLERAYKNFFRKRAAFPRFKKRGQNDAFRYPQGVKLDQENSRIFLPTLGWMRYRNSRQVTCVVKNVTVSQSCGKWYISIQTESEVSTPVHPSASMVGLDAGVAKLATLSDGTVFEPVNSFQKNQKKLARLQRQLSRKVKFSNNWQKQERKIQRLHSRIANIRRDYLHKVTTTVSKNHAMIVIEDLKVSNMSKSAAGTVSQPGRNVRAKSGLNRTILDQGWYEMRRQLEYKQLWRGGQVLAVPPAYTSQRCACCGHTAKENRLSQSKFRCQACGYTANADVNGARNILAAGHAVLACGEMVQSGRSLKQEPTEMIQATA

SEQ ID NO: 38510 - protein, 590 aa, Tetraselmis sp.
MAVVIHKDNEASLCRLASVCQDVQSLRDIMLDGPNPKPLEVVLAETRYPSLLRLGPSDEEISLMSSWDQAKTYIANRFVANVQVHVRSHLQRRIKKSLRSRINNTENDVAMKYVFSDGTAPEDSEDREHCERMKTRLYALKLLSRDGFTLPKREKVSPDMMLLHFDLCKEEIASFQPLPMATTLSRCHARICERVYGTLTKGMPNVPEFSSLVRERRKRVVPRRKWTKKAFRQVRRSQKAKKSGKRKQQIKKRRKQQKLKPDQQIDSLETDGYSVSLALKTPHKNPADNLSPEEKFEKHIARLKKVMTKPDAFVAGNDPGRKNLATQALLSVGSEVSSTQASRVQFTRSQWNSVIRSKQQRAWEEKRRNGPVKTALDALSSSGGKKSCNEDKWAAYLTASVENQRVLHQEFLENDERQRRRFLAYGRRQRAIDRVASRMVNTPDRKPLVIGYGNGSFPCHGRGGSDTSVPVKSLYRAVIAAFKKKRICGGVIKVWEYFTTAKCYRCHNRMEKMFKTVDGKKVEDRDFRCCATCTHEEHPKLRNRDWNAALNILVLTIAILKGEDRPEYLKPEKKKRRSAKRKADGSSIAH

SEQ ID NO: 38511 - protein, 437 aa, Nonomuraea sp.
VEGEKRLRGHIARLELNLAQIATLDGQAHRARALWNLLHEYFTFRQGRFASLKDCDDAIRAARREIDWLGQLPAQAAQAVLKTYRQAWANFLNPGHPARRPAFKSRLRSRMAVDVPQARDLQISRINRRWGAVNLPKAGRVKFRWTKDLPGLSKGGPAGRIIGARLVKDALGWHIVFRTELPVPSPHPHQGPKAGLDRGITVPLALSTGEHVTHGPWLTDGQAVRLLRLERTSVRQRANRVKGSPASNRERRTYEQIARLRATAKRRALDWQHQTTTDLAQRFSVIVVEDLKITNMMASASGTVAEPGTRVAQKRGLNRAIATEAWGRTVDFLTYKSLDRGGLVAKVAPHGTSQECHRCHTTTPGSRETQARFACKNPACGWIGNADTNAARNQLHRYTSAAGRAVTGRGDLPVGGSVKRQASCPTVSPAPAPRAAA

SEQ ID NO: 38512 - protein, 257 aa, Escherichia sp.
  misc_feature (213)..(213): Xaa can be any naturally occurring amino acid
VKRLQAFKFQLRPGGQQECEMRRFAGACRFVFNRALALQNENHEAGNKYIPYGKMASWLVEWKNATETQWLKDSPSQPLQQSLKDLERAYKNFFQNRAAFPRFKKRGQNDAFRYPQGVKLDQENSRIFLPKLGWMRYRNSRQVTGVVKNVTVSQSCGKWYISIQTESEVSTPVHPSASMVGLDAGVAKLATLSDGTVFEPVNSFQKNQKKLAXLTNGRDLVRHPFQPVQLQNQHIHLKSKCVVFLSRHGQKSDVGIW

SEQ ID NO: 38513 - protein, 470 aa, Micromonospora sp.
VKTIQAYRFALDLTPGQERDVLAHAGAARVAHNWALARVKAVMDQRAAERTYGVSEEMLTPTLSWTLPALRKAWNVAKPDVAPWWRECSKEAFNTGLDALARALKNWADSRSGKRAGRPVGFPGFKSRRRTIASVRFTTGTIRVESDRKHVVLPRLGRLKLHESARKLARRIDNGTARIMSACVRRDGGRWHVAFCVQVERPERLPARPGAVLGVDVGIRHLAVLSTGELIDNPRYLTTAQQRMRALGRALARKTGPDRRTGRRASKRWERAAARLGRAHARVANLRRDALHKLTTRLTREYGTVVIEDLNVTGMLRNRKLARHIADAGFAEIRRQLTYKTGWNGGRLILADRWYPSSKTCSGCGAVKTKLALSEREYQCESCGLVLDRDLNAACNLAALAADATTAGSGPAPGRGADRKTPLAGLVALKRQPGTAPAGQTGTVSPQGETANRALARAHREATALVTLAQ

SEQ ID NO: 38514 - protein, 377 aa, unknown
  TnpB Polypeptide
MLLTVKVKLLASQAQHDALLETMERFNEACNYISEVAWMNKTFGKIRLQKILYREVREMFGLSAQMVVRAVGKVSESYKVDRSVQHTFKPHGAVVYDQRNLTIKGADRVSILTLEGRTLVPIAYGGYRTLDQTRVKGQADLVYINGIFYLMLVIDIPEEKQIENLDGTLGVDLGIVNLATTNDGIRFSGERCESVRRRYSALKARLQSPRTWDAKKHLKRISRKERRFKKDTNHCISKQIVATAQGTNRAIALENLKGIRSGSTVSKPLRSVFGKWAFYELAAFILYKAQLVGIPVVFVNPRYTSQQCSECGFISKENRKSQSEFICIKCGYVENADINAAKNIAFRADVNQPIALHSSNQVEERWKGKPTPLGVGS

SEQ ID NO: 38515 - protein, 363 aa, unknown
  TnpB Polypeptide
MLKTYRYRLYPTKSQVTLFERTLEICRWVYNDTLALRKNAWEREQRSVSLYETNKILTGWKREQPELKQVHSQVLQNVQMRIDLAFKAFFRRLMSGEQPGYPRFKGKGRYDSFTYPQSGFHLNESRLNLSKIGDVRVVLHRPIEGTNKALTIRRSATGKWYACFSVEYDPDLAPRKETTMGVDVGLTSFATLSNGEKIENPRFFRTDEKALAKAQRRLSKAEKGTPERKTARKIVARVHERIANRRLNFAHQTSRQLVNRFGTIVFEDLNITNMQKNHCLAKSIADVAWNQFVTITTSKAEDAGSHVILVNPRNTSQMCSRCGMIVKKTLSDRVHACPYCGLVMDRDQNAAVNILRLGLQSLG

SEQ ID NO: 38516 - protein, 585 aa, unknown
  TnpB Polypeptide
MGRSKGKIISIKIPIRWGMMTNRQRTRINRITGRDTRVIKAYLGVIERHEDELLTTRRRNRIDARKLDELTLTASFGSAYRTRVPHDFKQRFPNISVNELQECRDTAIAMWQSYLERGGTKPLNSRSYTSRKIPRFAFRQRFELVYAAKNKIRYWLVIRDSLDSSRQGRRIHDKLSIPLSPSSYHLKRKEEGEIRTVRLFKDRSRKWWAIFTLTLGIQLLDFSRKPPAVLAIDLGINKTACTVLLTRNGYRQVRFWKEKKKLVRMIQYDNRVSSLQREMERLHRVGTDTSGIKRRLRDIGNKRKRVSIEYDRKVVKNISDQVMELTKDYDLYISIGLLRGIRNRARKGNYAGRGFRGMIHRWSFYRVREMLKHKLETLGFDSKRFVAVHESWTSVKCHKCGHTGIRPKQSLFICHTCGFRANADLNGAINIGRRLIMLIPSLRDEKNGLGMWLLQKEKAAPKARRSLCSKGKSSLPQRLPASLEGESVVDCYDQTSLEESVSSKDPATARTVETSSAFRTTGVPVRMQRTEAQFRLRNNVSVKPDEAHVIVSDSHLTQAGDGSREKGGTQEFLDGSLSNARNRSS

SEQ ID NO: 38517 - protein, 417 aa, Oceanobacillus sp.
VKTLAISKEKHFGVQKQVLKLKSKQEYLALRKLYHLSKNMYNVGLYSVRQHFFKTKEYLNYHLCKQNENYQLMGSAAAQQTLKKVEENFKSFFGLQKMKERKANIPRYIAKDGFFELSYPQFKLQEDGTFNIPTSPTFKKEFGMINIQFPINLHAENINEIRIIPKYNAHYFEIEYVYEIEVKKRRLSENEALSIDLGIDNFAACIDTLGNAFIIDSKRIKSVNRWYNKENARLDSIKNKQKVTQLTSRQIRILQKRNHILHDYLNKTVSHMIQHCLEHGISKIVVGHNEGWKNKSNMGKRANQRFVQIPHSLWMKKMESMCERYGIVFMKQEESYTSKASFLDDVPLPVFTATNHKGLIFSGKRIYRGLYQTKSNRLINADINGAANILRKCTHTSALAGKVVRGLLAVPVRIRLT

SEQ ID NO: 38518 - protein, 325 aa, Moorea sp.
VKHKAVKVRIYPTQEQVQVLAQHFGCARWWWNYALNQCIETYKETGFGLKQSALNSMLPKLKKQKETEWLKDCYSQVLQSVSLNLSRAYQNFFEGRAKYPRFKSYHHRQSIQYPQNVKQVGDCLKFPGKLGIVKAVIHRPLDGGIKTVTVSRDPSGKYYASVLMEYESVGAAVPMELNAKVFTEGKVVGIDLGIKDFAITYDGNKTSKFSNPKHLAKSEKKLAKKQRIAARKKKGSSGSKKARKIVAKVYEHIGNVRQDYLHKLSRKIVDDNQVVVVENLNVKGMVCATRTLRERNHKLAKAISDRVAWPLGQSKLGNFCKLPVL

SEQ ID NO: 38519 - protein, 342 aa, Anabaena sp.
MWGKHLSCAKLQSHIAKQRKRNPFWQSVGSQAVQDICQRIEKAYQLFFKHNKKGVRPPGFKKVKKYKSFTLKQAGYKFLGGNRVKIGNRVYQLWKSREIEGTVKTLTIKRTSLGELFMVVVVDDCIKSEVEVKTGKIAGFDFGLKTFLTCFSSGDATRTDGTKIESPQFFKQSLNAVKKASKCHSKKLKGSANRERARKDIVRKYEDISHRRRDWFWKLAHELTDRFDVLCFETLNLKGMQRLWGRKISDLAFGEFLQILEWIAKKKNKLVVFIDQWYPSSKTCSCCGHVLESLDLSVREWRCQECQSVNGRDENAAKNIQMVGASTIGLGDVSRAMPAIAV

SEQ ID NO: 38520 - protein, 275 aa, Anabaena sp.
LHPTKRRITFTDKKGIGELKLLGKWDIHTYPIKLIKRVRIVKRADGFYVQFCVDTEVKQEPRIADGEIGLDVGLEYFYSDSNGDHEANPRFLRKAEKSIKHSQSLIYSKEKGKNQRRKARQRYARKHLKVSRQRNEHAKRTARNVCKANALVAYEDLKVKNMVKNHCLAKSINDAAWSTFRQWLEYFAVKFNSVVIAVAPHYTSQKCSNCGAMVKKSLSTRTHKCNCGCKLQRDVNAAINILNLAKNREGHSRINATGVGVSTLVGENLLEQILT

SEQ ID NO: 38521 - protein, 388 aa, unknown
  TnpB Polypeptide
MKTYNIKLEFQNQEDKNRLMETFKIHQDIWNHLSQYVFKTKTKLSGKILHENTYHQCRKLFPESPSQIIIRAREDVISTFKTIQSNKHKIESAPTKQNLSIRLDKRLFTIKGNSIKLTTNGKKALCTFNPYPKFQELIQKYPICDPLIFVRDNQIWLAVTFNNTVIPLSDNHCIGVDLGIKRTATTSEGIIIIDKTYLKQRRRIRYIKRQINSKKKENVHKLKKGNSCRKHLKKIRRHEKNLSKNYIHHVANQVLNTKANCIVIEDLSKIKAKDKGTKFNNKLSQVPFFMFKRILTYKAQALGKRVETVNPAYTSKDDFRSIESGKRVGCRYYASDGKVLDADLNASVNIANRYANKVKLPVSFVFPSDGKYKLNGQAPVNEPNVLCL

SEQ ID NO: 38522 - protein, 404 aa, unknown
  TnpB Polypeptide
MLVKGVVFRLESGLPSEAKFLLEDFRLAVNNAIRAGLQARVTSRNALVKIAYKDFREQHPMMYAQHLVSAFDVAGSVLKNHRRRLRNSVACRIPFAKRLMMKAENQAYKLDRESGIIDLPIRAGCHVELRLVVSQYHRKYLDDMALSLGSLTVLSNRVIVAFRKDVPKPFAPESALSLDTNERSLDGVFVEGDGAKAVKADFPDIAVIQLRHHDRRKRLQKKKAHDRRISKRLCRREGTREHGRIDYRLHQVANSVLKFAEERKSAIVLENLTGMRPKRSKELNRRLSLWPRRKLHQIIEYKAQWKGIPVVKVDPRNSSRTCPICGRIQDSRMGTEFKCECGWHMDRHINASINLLQTAISKGMAGGLWFDPGAFQHDVMMILYEPAMAARSEPNGTSGIVGVT

SEQ ID NO: 38523 - protein, 431 aa, unknown
  TnpB Polypeptide
MLKAIKIRLYPNNEQAGYISNLLGSYRFVYNQCLDHKIKAYTNDKTNLGLKQLGNYFHQDLTKNANYIWLKEHNTKVLKQTIINLLDSYKRFFVNGTGFPKFKSKHDNKQSCRFPVEAISKKNDYLSNRISLTKQIKDIKFKTSDKYKKYLDKNMSNIKSATLTRNKSGSYYLSILVDGEANPQLSKPKNEFIGLDLGIKTFIADSKGGSFGNIKIKRANQKKLAKLHKSLSKKEMLPTGKFKFNKKYNKDVEIKIPSKNREKARIKLAKFYEKLNNKKENYLHHITNQLLDENQVIVIENLNVSGMMKNHMLARSIQELSLYRFKDMLMYKADWYNRDIVQVDRYFPSSKLCSCCGYKNVNLTLEDREWTCPNCGTRHDRDFNAATNIENEGRKLYKENIGHRLPDLKPAEKVSLDTSLKQEKLDLRNIT

SEQ ID NO: 38524 - protein, 389 aa, unknown
  TnpB Polypeptide
MYYVRKLKVGKNDLLDQLALECGRLYTQNLVCFWRVVRKKEIWLKPSSMMRWHSSDKLHAHTADAVVQSFFSAMSGWREARKSNSSLKPPYKLKKYFKIEWKSSAIRIKNGMLALSNGKKTPAIVLPWRFELPTKVEIGWGGKQYELRAVYTEEVSMQPIGNEVAGLDLGEIHLAVTYDGTNCYIFNGKELRSKRQYQNKINAEIQSRLSKKKKGSRRFGKLLKSKRKQLNSLDNQIQDISHKQTTTLIHTLHNEGVKIVVIGDLRNLRQNVDVGHTNNQKVHQMISGKIRGMVEYKVVRLGMSTKLQDESYTSQTCPVCSHRYKPKGRNYKCSKCGFKYHRDGVGSVNIRGKYLGSGQVVGVMASPIGVRYKPHMRCSSGSGIKAATA

SEQ ID NO: 38525 - protein, 465 aa, unknown
  TnpB Polypeptide
LRERYGFSEYAFHELAKELRVSWLAEHLDAVLAQTLASRAYRALNRVCVGKARRVRFKSRGRGLSSLENKRNDTGMRFVLQTQDQGRGPGYLLWHDDQLAALIDWDDPVVSHGLAHEIKYVRLVRRRASSPRAQGADREGERYFVQLVLTGLPHHKPKHTVGTDTVGLDLGPASIAIVPRQAEARLEPLCAELRPDARAIRRMQRKMDRQLRAANPEHYDDKGRPKKRGKGAPKWKQSRSYQATRRRKAARERRLAAQRKSLHGRLVHQIVRTGNTIITEKISYRGWQKRYGRSVGLRAPGMLIDHLKRTVVSTGSTLHEVPTRSTKLSQYCHGCGIFFPKPLSQRWHQCACGIGPVQRDLYSAFLAAFLDPAADCIPSCARYVVPWEGAEARLRAAHERVTQRAKEGQVMPRSMGIPRAGARLPESPSEATQELLFLSKRGKVEAWKHRPEPPRLEPGESSERL

SEQ ID NO: 38526 - protein, 351 aa, unknown
  TnpB Polypeptide
  misc_feature (291)..(308): Xaa can be any naturally occurring amino acid
MFKLPPSGTASMAALNRPDASDLMEEVAICLPSAVSAMMDWPCWKTYTSEFSVSGNSITGIRLSSVSLYRKSSPEALLTSAAKRINPIIRSISNPSRCFFGSSHGSRDRLAGHTSYKYCYSGRCCYSQERRREMVCHSPGQSRTIILSVFCAFCGEPLCSDPTTEAQRNKRPYSLPGLTHIIQRRANNYKSLKDKIAKLHKRINCQRDDFLYKLSRTYVNKFYIICVEDLDIKGLKEKGHNNGMHRSIHDASWSKFIFMLFSWTSSRGAADGVRCTYKAQSADRKLIKVDXXXXXXXXXXXXXXXXXXASRNILITGMEQPLAPIEPKPLHHISVMQVLAMTWEAAPFRTR

SEQ ID NO: 38527 - protein, 342 aa, unknown
  TnpB Polypeptide
VAKRGKGKATVIGKLTVDDPVNKAKLLHLMRMFRDAVEMAHYHMRKKFEASESKRRLTKFLCNAWYASSAMKKAKLYVSQEKLKLTKPQLFSVGCSGNMEKGNRNIRLISTDKVLVKIPHADGKHEWLELKTKFGKKYLDLVSKLISEEYSYGASIVLKEENGKINFFLHISIPIDLYVQFFKKSSRNKIVGYIAGFDFNSDRINMVIINKNGILLDVKSEHFPEVTSHGFPREKAKGLRRQALAKLVKYARNHGVKYYVVENLERSKKKTICRKANRKISKWAVREYLTQMEILVKKVDGILVKINPMYSSVAARFLAKDLGLDVHTTSAYIIALRSLKLL

SEQ ID NO: 38528 - protein, 381 aa, unknown
  TnpB Polypeptide
MLVLEAKLKGKAEQYNLIDEAIRTALFCRNKALRYWIDNRDTGRYDLNKFMAVLAKDFDFANKLNSQARQSSAERAWSGIARFFDNCKKKVSGKKGYPRFKKRGQSVEYKQTGWKLSEDRKYLTLTDGFKIGKVKLVGSRDLNFYQIEQIKRVRLVRRADGYYAQFCVDVDRREDLEPSKSTIGLDVGLNHFYTDSNGQTVKNPRFLRKSERQLKKLQRKVSKRKKGSVNRRKAIKWLARKHLQVSRQRKDFAVKTARCVVRSNDLIAYEDLQVRNMVKNHKLAKSISDASWSMFRDWVEYFGKVFGKVTIAVPPQYTSQNCSTCGTLIKKSLSERTHQCSHCGRVLDRDHNAALNILAIGLNRVGLTQISTPVESSTSAL

SEQ ID NO: 38529 - protein, 554 aa, Mycobacterium sp.
MTERGGSVLRRIEGPVVAAMPAGAGIRTRIHVSEAESAALMAIGAFLGSVYRSELAHRIGLGVLDHDGHVAWRAQRKRVITGLTSSRWAGAITRAVEDQYQLGMRSLAAHVADLRQAIAVLEVRCALRPGQVADADAHPGRKRRWRGYRSAAERFSKTRRLAALRSRLVAAEAALAAGRPSVVVGGKRLWQQRSHLDAAEMTADQWRDCWDAARLFFTADGETGKAAGNETIRVDGEGRVRIKVPAALVDQLGTHVVIGASVRFSHRGDEWATRVAARRAVRYDIRLDPDRGRWYLDASWRTSPEPPPTLDELRAERVLGTDLNADHLACCVLDACGNPVGQPTSIAVDTARMRASRRDGRVRAAITALLDRAEQAGCSAVVVENLNFADARAMGRETLGRGQRGKRLRRIVAGIPTGRFRTRLVGMAARRGIAVIGVDPAYTSRWGAQHWRVPLQQQTSDPASVTAHHGAAVAIGRRGLGMRIRRRPAGPRTRQRTSAGTPPTRPDHQPNATPRRCRSPGSPPHPPRGVPVHRTTPTASGQHRSGRTGHTPAQ

SEQ ID NO: 38530 - protein, 332 aa, Lactobacillus sp.
  misc_feature (197)..(197): Xaa can be any naturally occurring amino acid
LSLQAEIPEPEKYSLTDKQVGIDVGVADLAILSNGLKYPSFDSSYFEKKAKVWQRKYARRRHLVKLLVLQDRNKRVLCPRSLESFTNWQKAQKSKAKCQAKAANQCRDYLHKLTTHLVKQYDVIAIEDLKTKNLQKNHHLAKSIANASWRMFRQMLEYKCEWYGKKLIAVDPKNTSRICSKCGYNSGAKPLEIREWXQAKAANQRRDYLHKLTTHLVKQYDVIAIEDLKTKNLQKNHHLAKSIANASWRMFRQMLEYKCEWYGKKLIAVDPKNTSRICSKCGYNSGTKPLEIREWTCSKCQTKHDRDINAAVNILHKASTKPTGQGLAMVTS

SEQ ID NO: 38531 - protein, 170 aa, unknown
  TnpB Polypeptide
VSNPKYLEKSMRKIIREQRKLSKKQKNSNNRNKQRIKVALVHEKITNQRNDFLQKQSTMLIRENQTICIEELKVKNMMRNHRLAQHISSASWSKFFDMLVYKSVWYGNNVIKVPAMYPSSQTCSCCGHKNPLVKNLSIRVWECPNRHTVHNRDTNASINILNKGLQMQST

SEQ ID NO: 38532 - protein, 554 aa, unknown
  TnpB Polypeptide
VSRALREIAAPFVAAAPAGARVRTRLRVSPRDAEVLRAVGQHLGSLAGRDLAARCAEGRLDARGRAASRRERKQALTAQSSSRWAGAITRTSEDAWQLGLRNLAAERGTLIARARRIEARLAVPAGTREGRLSGYATPAERHGKGLRLKALKARLVRVEQRLASGSVPVTRGGRRLMRARLNLATADLREQQWRDAWDASRLFLTADGEKDKAWGNETLRWNPDEGWFEVKLPVPLAHLANRPHGRYRLSREVRFGYRSDEVAAEAASGAVRYDLSYDPERGRWYADASWKTPPRRVPSLEELRASPAVAVDVNAGHLAAAVLSPDGNIMGTPFTIPLELAGLSASQRDGQVRASVSQLITRARDHGARAVVIEDLNFAKARSEGRERTGNRPSRGRRGRRFRRLVADIPTGRFRNRLTQMAANANLHVVVVDPAYSSRWAAEHWLAPLREHHPETTGHHAAALVLGRRGQGHRARRSATGNRPAPEDAARPAQARTRNHPAAPAAQRKPAAPRDTRQLHGGKTGTPHRTTAGNQAPEHRTRAPAETIHSISRC

SEQ ID NO: 38533 - protein, 354 aa, Deinococcus sp.
MSHTDPDRYVTRLFRDDYPILQGLVASGRLRRAAVSLPGWDKATVFEPLVPVSAHGDHHLRLGYADLGAQIYALPSAPYAAVLRASGDYRQPAGIAGLQVCFGAPDLDAATFRAELRASLAQPLKLDSTPHLATADHGGCHATWWPNRTLILESGGDWFLALAFNLETRVIRSPGKSVFGIDLNADPALCIADSAGVARMIGPRHALLDGLRREHLDRPLAPKEVRVVRALGYASGRGPLEVALRDMLSRAEAVGVEKLDTRQLYARFVERSREQAALDWHVSWLPQALYRARIRLHRVDPAFSTQACHRHPSHLGIVRGRMFDCPLCTELQHRDKNAARNIQARTLAVHRHPR

SEQ ID NO: 38534 - protein, 387 aa, Deinococcus sp.
MYPDQHNIQISTVSYPAVRQLIAQGQLIPIDRAPESDNPIKGLTDAELYVLAADAPIEILSDVACVIGGLPVQAKLYALPSPAYHAVVRANPFTQYPGIAELRATLRTSATSALEGLRRAVQQGRQPGQLVAAAQESAQFVSCWMPDQTVVQIKSLPKRAEPDVFLTLAFRAAFTGVFPPRREAAMGLDVGLQPHTVVAREDGQVRHYHLSPLVRLPTRSLSSAERELHEILQYAQGREDSEVVVAYLIGHASHIYAEVLEHRGMSTKYIARSRQLALQDAFYSHLSQYANAAGIPFTRVDAHHSSTTCPDCETRGERDRDIFRCPACGLQRNAHEVGALNVLARGLKGGVHLRTGRWRASGQPRRPARDDFAEWADAYHFPGLGRR

SEQ ID NO: 38535 - protein, 249 aa, unknown
  TnpB Polypeptide
MRLGIHYLLLHNSISEIAKKGGLTMAQMSITAKIQVVASDEDKVLLDETMSVYRGACNYVSDYVFRTHDLKQFSLNKALYPTLRAEFGLKSQMTQSVFETVIARYKTILENQKEWIKPSFKKPQYDLVWNRDYSLTQDRFSINTLGGRVKLPYFAEWISKYFDRSIYRFGTAKLVNKHGKYFLYIPVTYDVEESDFSDICNVVGIDRGINFVVATYDSKHKSGFVNGRSIKQKRAHYSVLRKELQMRHH

SEQ ID NO: 38536 - protein, 367 aa, Eubacteriaceae sp.
MLKAYKYRIYPNKEQEMQIAKTFGCCRFVYNQTLAYRKDKYEQERKFVSKTDCNNYCNRELKKMYEWLKEVDKFALTNAIYNMDSAYQKFFKEHAGYPKFKSKHDNHKSYTTNFTNGNILVDFENGKIKLPKLGKVKAKLHRGFAGQIKSATVSQISSGKYYASVLVETEHEKMPNTTEKIGLDLGIKELCITSDGRKYENPKILRKYEKKLAKLQRQLAHKEKRSKNYHKAKKQIALCHEKITNTRKDYLHKISHEIVSENQVIVSEKLQIKNMVKNHHLAKSISDVSWYELTRQLEYKSKWNDREYVKIDAFYASSQLCSACGYQNTETKDLSVREWICPNCGVKHDRDINAAKNILAEGLRQLA

SEQ ID NO: 38537 - protein, 382 aa, unknown
  TnpB Polypeptide
MLKTFKYRLYPKKSDETKMTQTLDVCRGVYNATIDLRKFAWEQSHKSVSYFDMAKLISPWKDQDPKLTTIHSQVLQDVMIRVDLAFKAYFQRIKRKETPGYPRFRSSFRYDSFNYRQSGFRVHPDSTLYLSKIGRVPIVLHRPLPEGKQKNCTILRSRTGKWYCSIVVNTSRPEPLAKTGKIVGMDMGLTTYIMASDGTKVPRQRFFKTNERALARAQRKFSGFSRTESSPAKNKARRVVARVHERIKNHRDNFCHQTANRLVHRYDFMAVEDLNVKNMLEQKKYSKSISDASWAQLLNRLSYKAEEAGKTVVAVDPRNTSQMCSQCGALVKKDITVRIHHCPHCGLKIDRDLNASYNILRLGMQSVEYRDFAVRQCQGQGS

SEQ ID NO: 38538 - protein, 307 aa, unknown
  TnpB Polypeptide
VTWKKRAIKHDDKHDQLRLSKGFNLKESRSDFILAEYETRPDVEVENIQQVRAVWNGDEWELHLVCKKEIRVEDAPGKKTAGIDLGIKNYLAIDYENGPSELYPGNTLKKDKHYFTRDEYQTKGVSGPSKRARKARRKLSRRKDHFLHTLSKHIVQRCVEEDVEKIAVGDLSDIREDENGDSRNWGASGNKKLHGWEFDRFTRLLEYKAEEHGILVDRVDEENTSKTCSCCGQIRDANRVERGLYVCESCETTMNADVNGAVNIRRKITQSLPTGDMSNGWLAQPGVFLFNRESGSFTPREQADCKP

SEQ ID NO: 38539 - protein, 382 aa, Escherichia sp.
MRRFAGACRFVFNRALARQNENHEAGNKYIPYGKMASWLVEWKNATETQWLKDSPSQPLQQSLKDLERAYKNFFRKRAAFPRFKKRGQNDAFRYPQGVKLDQENSRIFLPKLGWMRYRNSRQVTGVVKNVTVSQSCGKWYISIQTESEVSTPAHPSASMVGLDAGVAKLATLSDGTVFEPVNSFQKNQKTLARLQRQLSRKVKFSNNWQKQKRKIQRLHSCIANIRRDYLHKVTTTVSKNHAMIVIEDLKVSNMSKSAAGTVSQPGRNVRAKSGLNRSILDQGWYEMRRLLEYKQLWRGGQVLAVPPAYTSQRCACCGHTAKENRLSQSKFRCQVCGYTANADVNGARNILAAGHAVLACGEMVQSGRPLKQEPTEMIQATA

SEQ ID NO: 38540 - protein, 380 aa, unknown
  TnpB Polypeptide
MPHKAYKFRIYPNKDQQALIHQTHGHCRFVYNHFLERWNTSYKEEGKGLNRSVMSKMLTKLKKQDDTAWLRNVDSVALQASYENLLAAFDRFFKGQNKYPRFKSKKNPVQSYTTKNSHNCIAIVGNKIKLPKLGLVKFAKSRDIEGRIMRATIKYNASGKFYVSILCEVPDFKPFPKTNEAVGIDLGITDFAILSNGRKVDNQRFTAKMEQKLKREQRKLSRRYEQAKKEGRNLRECMNYQKQRCKVARLRERVAFQREDFLNKLSTELIHQYDVICLEDLNTKGMLKNRKLAKAISDVSWSSFVQKLTYKAKWYGREIVKVSRFYPSSQICNACGHRDGKKTLDIREWTCPSCDTTLDRDINASRNILAEGLRILKQQP

SEQ ID NO: 38541 - protein, 412 aa, unknown
  TnpB Polypeptide
MYYAYRYRLKPSDAMCEELDRQRDICRQVYNHFLYRLNEHDRDNIPSMSVLRSELPDLKEWWDDLNDVYSRTLQVVVERLYDNLSGLSTLKKKGYRVGSLSWKPPRDYRSFTYSQSGFKLDKKGGRNELSLSKIGEVPIRLHRDVPDGAKLKTVTVKKEPTGEWFATFGVEVDREPPEPPTEPENVVGIDVGILKYTHDTDGLAVGSIDMTDDRERLERAQRLLSRKEHGSENYQKQQRVVARRHARIKRRLDDFLHKLSNYYAETYDLVAVEDLDVKGLMELPSNSRNRAGAAWGTFLRMLEYKCEREGTRFVAVNPAGTTKQCSECGVSTDKPLWVREHSCPACGYEDDRDANAARNILSRGLTKVGVDHPESTPVETALPTPTFAVGAKGVMEPGSPALKERSASAVSE

SEQ ID NO: 38542 - protein, 494 aa, Vulcanisaeta sp.
MLCRSVAVELEVTKELNSLLCSVESAYLNIVRDVAEYAVVNNVTSATQLQGLFYSKYRGEYQGLHAHLVIQAIRQAVQIAKSFMERRRKGLVHKPYPEIKSVSIRFTEETWSYEQFVKSIAPVRLSLSLLGKRREVWIRPHKRFWQYWWRVLSGEARLASTLVVKRRLNKWYAVFVFEIKPREEEPRSIVAFDINENTVAVGRIDIETTVSKVANWNRQHVTPQLYTIKTDFGRLARRYERVRNTIIERLKPGFALPSGKYANITNTREFRRRVKRLRERVRKVGRVRHVANELTKTPAIIVTEELGSNPQGSMINEIRRNETRHRIKQTPFKAVEKAVEDKALERGSKIFRVSAYRNSRVCPIHFTRLGETNDWHVLYCPKGHYVNRDYASVANMMWKVTPEGWVKGVWWNLRREINWREHEGKSNSLIPYEIVKYIHAMLKAFTASEQSPAVLARGSPMNPAGGANEGWARTPMNRPKGTHALQGGKGSEGF

SEQ ID NO: 38543 - protein, 438 aa, unknown
  TnpB Polypeptide
MFGCQQILINADPSLRGILEFLCGESNKLHNCGTYLSRQLYFKTGKIPSKFDLHRELKDNSHFQAMYSHVSQQCLTTVAESFKSYLGLLKGIKKGTVNQRPKLPNYRKPGLNLVTFPSADVKLKPNGLRFPLGRQVKAWFGLDAFYLPMPSNLEFKTIREYRILPRNGAFYLELIYKVESVQTDVDAANVLGIDPGLNNWITCVSNVGTSFIVDGLHLKSLNQWYNKRLSVLKESQPQGFWSKQLSGITEKRNRQVRDAVNKAARIVLNHCIENRIGTVVFGWNKEQRQEINLGSKTNQKFVQIPTGRLKDRIAQLCERYNIQFVETEESYTSKASFLDLDELPTFGEKLGAGTRTQVPSKEAPTRRAEGWKESGKRVKRGLYRSKDGFKINADCNGAANILRKVAAKLGFNLNGVSRGALIAPLKVRIWAVQESPSL

SEQ ID NO: 38544 - protein, 250 aa, Geobacillus sp.
  misc_feature (113)..(113): Xaa can be any naturally occurring amino acid
MGGEKMYFCIKQQLNGLTKEEYLTLRELCHIAKNMYNVGLYNVRQYYFEHKEFLNYEKNYHLAKTNENYKLLNSNMAQQILKKVNEAFKSFFGLISLAKQGKYDHKAISIPKXWQTCHLAIAENIGKRNMNLGKKTNQNFVNIPLGNIKEKLEYLCEFYGIEFLKQEESYTSQASFFDGDEIPEYNADNPKEYKFSGKRIKRGLYRTKSGKLMNADVNGALNILKKSKAVDLSVLCSSGEVDTPQRIRIA

SEQ ID NO: 38545 - protein, 221 aa, Geobacillus sp.
  misc_feature (89)..(89): Xaa can be any naturally occurring amino acid
MKSNAAATRPSSFPFWTAGAVVALAVNLRAPLTTVGPLVANERPHVPNESPYAAVNGRRALDLFAFFGSIYFSARHVGFLSAPLVFILXVIGYAETWQRNMNLGKKTNQNFVNIPLGNIKEKLEYLCEFYGIEFLKQEESYTSQASFFDGDEIPEYNADNPKEYKFSGKRIKRGLYRTKSGKLMNADVNGALNIFKKSKAVDLSVLCSSGEVDTPQRIRIA

SEQ ID NO: 38546 - protein, 504 aa, unknown
  TnpB Polypeptide
VSGSTISRTYPRVPYEAFSKNGEPLDLDEVLDGIRSDAELVARYALREMTEQNLALVTYFERFKPAEAGRRMGLFLPDEVKKQFRSGASRLERMFQEQVVSNLCSWAARSGVVSGGYTGYVSAGWKRTVNASRPNSMQPRLSLSAADKQYRKMSVTDERIELKMVIQGQWVTLHFPVPSRFLEAGCEPGVPDIWIDKSNRVMFGFHGVVDPGRPEFSERYVVGVDVGVTNPAAYVVWDKKNKEIVERSLLGQRARSLSNKIKRTQTQVASLRRQGRDEEAVSHREHLSNRRRELSILIAQEITDASWRYGNAIVSFEDLSHIKNTMRFGRWFRGEVYRRTRDMVEADGGRVMKVNAAYTSRKCHVCGENLDMQNYSQPRCTVCNITHHRDVNAAANIAQRVNLEKACRTRKKHATKKHVRRSRCHVKPLKHPGTKNRPTPKAPQNQPNTHTTSSGKKEVSKRMCPADTRVSAVDHSTWFQTTSGTTNPKENLSVNTVDWFYPKE

SEQ ID NO: 38547 - protein, 332 aa, unknown
  TnpB Polypeptide
VESLCGTDSQVLQKVWEVAAEVQTSKTSNQTEDSHAVCVPHRNRLAGVAGSHRPALQARKNGEKYGLPGFRKVRKYKSFTLKQAGYKLLSGNEVVICGQKYKYFKSREIEGKIKTLTVKRDSVNDLWLCFSVEAEVPNVVNSRPGHPVGFDFGLETYLTGSDGQRIESPEFFKQNLKEVKRLNRILTRKQQGSNNRDRAKRDLARLYRRITNQRSAWQWKIARELVERHAFIGLETLNIKAMQRLWGRKIGDYGFSDFVSILQYAASKVGTQIVHVDKWYPSSQLCSACGYRFNGTKDLSVRRWICPHCGAEHNRDVNAVCKHPDGSTVHCR

SEQ ID NO: 38548 - protein, 426 aa, Cyanobacteria sp.
MLIMNFTYRVYPDADQQAQMLDWLESCRRLYNYALRELKDWMNSRKCMVDRCSLEKEYIQSADAPFPGYMEQKSHLPVLKETWTGLKDVHSQVLQDVIKRLHNTWENFRKRAFGFPRFKKYGQFKSFLFPQFKDNPIEGNQIKLPKIGKVPITLHRPIPEGFTIKQVRVLSRCRGTQWYVVVTIQMDVNIPDVPIHGRAIGIDLGLERFITSSDGSYLERPKFFKTLQSRLKVLQRRAARKLYRSKNWEKAQIEVAKLHHHIANRRKDFHLKSAHNFCDQATTIFAEDLNTAGLNRGMLRKECVDASFGAFLSLLQWVCWKRGVYFEKVNPNGTSQTCPSCHASVFKALGDRVHNCPECGYQTHRDHAAAQMVLIRGLENVVPQEVGERKLPGHAVLSGAMSLDKWLSRNVQKRFWEAYADSSSTV

SEQ ID NO: 38549 - protein, 383 aa, unknown
  TnpB Polypeptide
MKRTLKIKINPPKTEFLELMLICNSIFNRYTKWSRKSKTYSKSKAHTELYAFLRTKFPQINSALIQTVRDTALEAVKATKFKRKIKKRKYSSLRYDRRTLTLRGQQITLTGLNKRHKEILSIPDYYKEVFSSWVCKSGTLSYIDGQFYINLIFETDSPKEVKGEVVGIDRGLYNLATLSDGTNMSGSPIRNVQRRYLYNRKKLQAKGTPSAKRLLKKISGKEKRFNRDVNHVITKKLTRLPYSVFVLEDLSSIRTQRRGKKMNKWIASWPFFQFEAFLTYKTEAFGKKVEYVDAHYTSRKCSRCGNRSRHNRYKSHFECSVCGYTNHADINAAINIRDNYILSTTEKSVEQGSVNDPYESPGIAIRNGPAMVDSSHAPCGRGS

SEQ ID NO: 38550 - protein, 406 aa, Actinomadura sp.
VTTRQGYRIELAPTPAQAARLGQHAGLSRVVENFCLEKVKAALAQREAERSYGVSIADQTPVPWTAPALERLWRVQHRDRYPWFTAEGLSSRVPKEACRVRAAGFTSFFDSRSGARKGARVGFPDWRKRKHGSRFRYDADRARPAHPRAVHLPGVGKVGTREDMTWLTGRIAAGTARVVGATVKQTAGRWWVSFQIETDRTEVNQAREVPQDAPACGIDVGVKTFATIVDDDGTVTELHAPKPLKAALRRLRRANQSLSRKAVGSANRASAFRRVAKLHLDVAHQRADFLHKTTTTLARTKRAIAVETLNIAGMTRNRRLSRAISDLGFGEFYRQLGYKADWYGAQVWAADRWFPSSRLCGNCGTVNAALTLADRAWQCGCGTIHDRDTNAARNLLTAMQQAGRAA

SEQ ID NO: 38551 - protein, 375 aa, unknown
  TnpB Polypeptide
VQLSETVKVYPTEYQKTLIAHTMTEYIGTVNSLVSDAVSGHSIAKTTTADVSADLPSALLNQCIRDAKSIVKKHYKYCHQAVIKNRNLKKRDSCIRVKAPNLPILKKPCCYINNQNFKVGDNCIEFPVMINGKSKRISVSVRLTDRQKALFADAKFGTMRIVTKNHTPVAQIIYEVAEPELKSDGNVMGIDLGIKCPAVSYCSDGSVKFYGNGRKNKYMRRHYAYLRKKLQTSKKIKAVKRINDKEQRIMRDIDHKLSHDIVETAVSHNVKVIKLEQLQNIRSTTGKSRKNNHSLHTWSFYRLAQFIEYKAKLAGISVEYVNPAYTSQKCPICGSIHHADGRNYACECGFHIHRDLLGAMNICNSTEFVGNRQTA

SEQ ID NO: 38552 - protein, 379 aa, unknown
  TnpB Polypeptide
MANKAIKYRVYPTTEQSIMFAKTFGCCRKVYNLMLSDKIEGYKATGKFPTVTPAKYKDEYPYLREVDSLALANKQMDLQGAFRNRFSKSRKKNNGFPKFKSAKHSRNAYTTNNQKGTVAIINNKYIKLPKIGKVKAVIHRIPDSGWIIKSATVSQESDGKYYISVLFEHDNIGNSYIADKTNAIGLDYASDGLYIDSNGNVGTNHKYYRESHDKLTKAQRKLSRMQGSKKHEDKSNNYMKQLRKLNKIHRHIANQRLDNLHKISTEIANQYDVVCMESLNMKAMSNKGFGNGKATLDNGYGMFLSMLEYKLSDRNKYFVKVDKWFPSSQICHCCGTLHPEMKNLAIRTMKCDCGLILSRDQNAAINILNEGLRLLTEVA

SEQ ID NO: 38553 - protein, 419 aa, unknown
  TnpB Polypeptide
MLTMNYRYRVYPNTAQEELLKEWMDTCRVAYNYGLREIKDWCNSRKCMVDRCSISHEYIMPADSPFPNEVKQLNALPSAKKVFPRLGEVPSQVLQQALKQLHRAWEGFQKIGHGFPRFKKFGQFKSLLFPQFVKNPVTEIHIALPKLGLIPINLHRPIPSGFVVKQVRIINKADRWYASINIQCDVNIPNPSPHGHPIGVDIGLSKFLATSDGAIVKSPKFLKVMLRKLKLLQRRLSRKKKRSKNYEKQRIKVARIHHRIDNTRKDFHFKQAHILCDAADMVFMEDLDYRTLAKGMLGKQMLAEGFGQFRAITKYVCWKRGKFFGEVSARGTSQECPECGAEVRKDLSVRVHSCSSCGYTTDRDVASSQVIRNRGIELINTDGQSGIQNAYADGLPGIEMPQSRSMSKSRKGVTRKSKK

SEQ ID NO: 38554 - protein, 421 aa, unknown
  TnpB Polypeptide
MQLTERHIIKSTEHRFAQIDELAFKSKNLYNAANYVIRQSFVYGWGHVNYNEMNRLMKSHQAYKALPAKVSQQILMVLDKNWKSFFEAVKAYKADSFKFTGRPKLPKYKDKVKGRNILVYTIQAISSKPLKKGIIKLYGTEISIKTKVNPDQICQVRLVPKCDSYVIEVIYNEPESTANDDKFAASIDLGLNNLVALTSNQPGFTPLLINGRPLKSINQFYNKRKAQLQSQLKGCKTSPRVQRLTRCRNQKVDNYLHHVSRLIVDLLAAKQIGTLVIGKNAQWKTEIDLGKKTNQNFVSIPHARLIEMLEYKARLVGIKVIVQEESYTSQSNFLGLDSIPVYGNTDKDAVFSGRRIKRGLYKTAVGQLINSDVNGSYNILRKAIPNAFSNGIGSCVVQPRRVNPLKAKVKGEGLDASHVMS

SEQ ID NO: 38555 - protein, 184 aa, unknown
  TnpB Polypeptide
VVVATSPLLYYEQTFHDPENRMRQAFVYRQHARIANTRKDYLNKLVIGLVRSYDLIAIEDLRITNMARNHHLSTSILDAGWGYLTDHLTRKAACAGRWVRVVDPSFTSKTCSGCGERFTQEITLSVRWVTCQACGLSLDRDHNAAINILKRAQGALDHQPAGTPPLGANVAGLPACVAQEAAPF

SEQ ID NO: 38556 - protein, 463 aa, Streptomyces sp.
MTESPARVVGEEAKRIKREALGIADRSKHHKRRAVPLRRRAKETGTQQRVYQYRFYPTVEQAAQLEQTFGACRWVYNEGLALRARAWEQHQVSVGFAETCRALTGWRRAEGTSWLRDVSSAVLQQALRHLDGAFSRFFKGTAKYPKRKKKRRSRDSATYVRTGFRWVEDPERPGTGLVTLAKQTEPLDVRWSRPLPRGEVPVKLTVTRDRAGRYFLSVLVEELIEPLPAAFLPGGTEPKAVGLDLGLATLVTLDDGSKLGHPRLLRKYADELARRQRELHRKEKGSRNRGKARERIARLYALISDVRRDLLDQFTTRLVRENQVLVVEDLPVANLLRPAVGKGRRRKAKLNQSIIDASWGELLRQLRYKCAWYGRTLVIVDRFFPSTRRCCACHAKGPRLDVSVREWTCEECGVLHDRDVNAAVNLRDEGMRLFWSVAMALPPGRPMPPVIKASELPEVHLAA

SEQ ID NO: 38557 - protein, 475 aa, Bacillus sp.
  misc_feature (2)..(2): Xaa can be any naturally occurring amino acid
  misc_feature (4)..(4): Xaa can be any naturally occurring amino acid
  misc_feature (42)..(42): Xaa can be any naturally occurring amino acid
  misc_feature (52)..(52): Xaa can be any naturally occurring amino acid
  misc_feature (59)..(59): Xaa can be any naturally occurring amino acid
  misc_feature (80)..(80): Xaa can be any naturally occurring amino acid
  misc_feature (170)..(170): Xaa can be any naturally occurring amino acid
  misc_feature (179)..(179): Xaa can be any naturally occurring amino acid
  misc_feature (203)..(203): Xaa can be any naturally occurring amino acid
  misc_feature (212)..(212): Xaa can be any naturally occurring amino acid
  misc_feature (214)..(215): Xaa can be any naturally occurring amino acid
  misc_feature (261)..(261): Xaa can be any naturally occurring amino acid
  misc_feature (280)..(280): Xaa can be any naturally occurring amino acid
  misc_feature (292)..(292): Xaa can be any naturally occurring amino acid
  misc_feature (379)..(379): Xaa can be any naturally occurring amino acid
MXNXNYKGVKPMVVNKAYKFRIYPTKEQLVLINKTIGCSRFXYNFFLGKQKXKDAYWYXCEEMKQNGQLPSNEWKGSFLXKYATIKELPCEEMKQNGQLPSNEWKGSFLNKYATIKELPALKKEYSFLKEVDSIALQKSVENLADSYSRYYKKQNKSPRFKSKKNPIQSXTTKHTNGNXGIVGNKKQNKSPRFKSKKNPIQSXTTKHTNGNXGXXGNKIKLPKLGLVRFAKSREVEGRIINATIRRNPSGKYFISVLAETXVQVLPKTNRSCGVDVGLKXFAILSDGTVYQXPKFFRTVEKKLAKAQRILSRRQEIALNQNKPLAEAKNYQKQKRKVAILHEKISNARMDYLHKVSTEIIKNHDVIGMEDLQVSNMMKXHKLAKAISEVSWYQFKKMLEYKAKWYGKQIVTVSKTFASSQLCSSCGYQNKDVKHLNLREWDCPFCSTHHDRDINAGLNLMNEAIRLLTVGTTGVA

SEQ ID NO: 38558 - protein, 348 aa, unknown
  TnpB Polypeptide
MLKAYKYRIYPNNEQKIQIAKTFGCCRFVYNQTLAYRKEVYEKEKKSVSKTDCNNYCNRQLKKEYEWLKEVDKFALTNAIYNMDAAYQKFFKEHAGYPKFKSKHDNHKSYTTNFTNGNIAVDFEENRVKLPKLKNVKAKLHRNFSGQIKSATISQVPSGKYYVSILVETEHVELPHIKQNTGIDLGIKELCITSAGKKYENPKIIRKHEKKLVKLQRQLAHKEKRSQNYYKTKKKIAICHEKITNTRKDYLHKMSHEIISENQVIVSEDLQIKNMVKNHRLAKSISDVSWYELTRQLEYKAKWNGRKYVKIDTFYASSQLCSVCGYQNTETKNLISKGMDMSCLWNKS

SEQ ID NO: 38559 - protein, 440 aa, unknown
  TnpB Polypeptide
MKQLMTAKLKLHTDAAQFQALRATQLAYRDALNFVSRYAYAHGKMSNKVGLQDGTYAELRARYKIPAQMACSIPRQVGATYKTLWTKVKQNAKARKAGLTKKRYKGLDQAPKYVSPTVTYQLGHDYGFKTEQRVSILTLNGRVVIPYTGYSKHVALLQSGAHIGAAKLWYDKPHKHFYLLVSLEVEVADPLPETHKEVVGVDVGQRYLAVVATPTNDVSFYSGKTARARTDHYARLRKRLQKKGTRSATRRLIVLSGRERRLKQDRNHLISRRIVDAHPQSIIGLEDLTDIRERTRRKRGKKATKKQRKANGHASKWAFTELHSYIAYKATLAGSMAVKVDAHYSSQACPMCGYTSKENRPNTGLLFVCQSCHYSLHADLIGARNIALRTLLARQDWTSTGVLSIRPHVSDDEAKAARRQRYAELRWSLDTSPRALAGGH

SEQ ID NO: 38560 - protein, 424 aa, Blautia sp.
  misc_feature (320)..(417): Xaa can be any naturally occurring amino acid
MIKAIKVMLIPNNVQKTKMFQYAGASRFAYNWALAREKENYEKGGRFIPDAELRKEFTKLRHSDEYAWLLSISNNVTKQAIKDACAAYKNFFKGLQKFPRFKSRKRSMPKFYQDNVKIRFSNTHVKFEGFSSGRKANKQKMNWVRLAEHGRIPTDAKYMNPRISFDGLNWWISVCVEFPDCRETLNGDGVGIDLGIKDLAVCSDAVKYKNINKSQKVKKLGKQKRRLQRSISRSYEKNKRGESYCKTNNVIKKEKLLLKRNHRLTNIRKNYLNQTISEIVNRKPRFICIEDLNVRGMMKNRYLSKAVQEQGFFRFRKQLXXXXXXXXXXXXXXXXXXXXXXXXXXXXXXXXXXXXXXXXXXXXXXXXXXXXXXXXXXXXXXXXXXXXXXXXXXXXXXXXXXXXXXXXXXXXXXXXXXESTRTCE

SEQ ID NO: 38561 - protein, 412 aa, Deinococcus sp.
LTHPVHSNADHELIRVTVQLFPTPSQDATFRAWLAALTQANGALTTVLHGTTLRAGAPALTRDEIAYLLTLVSPALEASLPPSVWPSVISQCCTRFQRRRDSSASEPSLPLDVQIQAIGEMHVHVTGQPDLVVADLWRLPLGLTEALVCTGNDHVRAVQHQGHTLRTADTAGSPAALTQLHDLIRLHGPVIGRPPGHTGVHRTQPHRAQFADLTCQIGVDGKEIWLLTCTVRVPPGWLPRAHRQDTVGVDVGVRALVTWADATDAGQLLRTTLPVGDWRPQQPATLLSAAWVRRMQFERTQAGLDQVIRHLLTYRRVAIEQLAWRGLTAGIREAMTLNGVSSLGVWLTGLGRLTGTVVCAVNPAGTSVQCGQCGQRGVLQANRVFRCQNCGDIDRDTNAARSIRRVSLEGWT

SEQ ID NO: 38562 - protein, 431 aa, unknown
  TnpB Polypeptide
MQLVEQHVIDQKDPRFAAIDAATFASKNLYNAALYELRQSFITQGIYLHYGEMDRRMQGHETYTALPAKVAQQVLRLLEKNWTSFFEALKAYKSDPRLFKARPHLPHYKHKTAGRTVLIYTMQAVSRGKRTLERRIIIPSGLAISIKTQQDPSSLAQVRIVPKRGYYVVEVVYEAEPRKTAVDALLYAGIDLGLNNLAALTSNKPGFVPVLVNGRGMKATNQFYNKRKAELQQKASQTGTTKRLQQITTKRNRRIDHDLHHASRFLIELLVAEGIGTLVIGKNDGWKQNSNLGKRMNQHFVQIPHARFISMLMYKAGRVGIRVILTEESYTSKASFLDRDPLPTYKQKGQKAEQSFSGTRLKRGLYRARDGRLINADINGSGNIVRKVAPNAFGSDGVEDGVGHSPVVHPVRLSFPLTKPKTVTCHTCPLL

SEQ ID NO: 38563 - protein, 308 aa, Okeania sp.
MKLVERHIIKSNHRFYKKIDRLCWQSKNLYNYANYLIGQSFILEGIYHSYPEIEKKVQRSEPYQAITAKVSQQILIVLDRNWRSFLATNQVDREQPEKFKGRPKLPKYKKKETGRNLLIYTEQAISKIQLKQGIIHPSQTDIYLKTRVDTDNIKQVRIVPRLNYYVIEVIYETELLQYELEENPMASIDIGLNNLATLSFNQFAGLKPLLINGRPLKSLNQYYNKARASLQSILPENQSSKKLKKLCNKRELKINDYLHKAWRFIINHLINEKIGTLVIGENQEWKQEINLGKKNNQNFVQIPHNKLI

SEQ ID NO: 38564 - protein, 231 aa, Symploca sp.
MLVLEYKVQAKQAQYRAIDEAIRTVQFIRNKCLRYWMDAPRQANLKRFDLNKYSTELRNEFTFVKDLNSMACQASAERTWIAINRFYDNCKSKKPGKKGYPRFQKDNRSVEYKTSGWKLHKSKRRLTITDNKGIGELKLLGKWDIHTYPVQAIKRVRCKRLVKKSLSTRTHVCQCGCTLHRDTNAAVNILLKAKSRGGHPRSNAKGVAASTLFGVTLVEQVATVNLESPRL

SEQ ID NO: 38565 - protein, 412 aa, Cylindrospermum sp.
MIVREAKLLKGTKEQYQALDDAIRAAQFIRNKAVRYWMDNQGVGKADLYKLCKDLAAEFDFALKLNSAARQASAERAWAAISSFYKRCKKQEKNKGYPKFQKHCRSVEYKVSGWKLSDDCMSINFTDGFQVGSLSLFCNNETRLDLHRLKINRVRVVRRADGYHAQFCFDTDRKEVGEFTGNVVGLDLGLKYFTKDQNDNAVIYPQFLKKSEGRLKKAQKRLSKKFVKGKKPQSINYHRSRKRLGRVHLKIQRQRKDWAIKQARCVVHSNDVIVYEDLKIANMVKNHHLAKSISDASWYQFTQWLDYYGKIWDKAVVAVSPNYTSQDCSHCGHRVKKSLSTRTHSCSSCGVEICRDTNAAINILKKGMKILGFEWQSNSTFGQKGSASQEGKHREKTTNTIDRKLDIASGFL

SEQ ID NO: 38566 - protein, 215 aa, unknown
  TnpB Polypeptide
MNNLLTITSNCFNPILYNGKPLKSINQLSNKNIATLKSKLSEHGLRNSSLMKSIYSKRSRRLTDLTHKITTQLVNQLDSYNIDTVIFGHNIGQKQDINLGKVTNQNFVQIPFTQIMKLLKYKCELRGIRFITIEESYTSKCSFLDNEEIKKQSNYQGRRLRRGLFETSSGTLINADVNGSLNIGRKYLTKVNMYTKELHEDLVKFMVNPKVVTIR

SEQ ID NO: 38567 - protein, 389 aa, unknown
  TnpB Polypeptide
MKCAFKTRILANNKQATYFLKACGVSRFAWNWGLAAWQKQYELWVDSGKQKALKPSGMMLKKQLNSVKKADFPWMYEVTKYASQQPFIFLNRAWSDFFKKKTMNGKPVGKPRFKRKGKSIDSFYVGGDQVVVRGRYLKIPNLGWVKMAEAIKYAGHINSITISRVADKWYVSFSMEVDVSFLPTKNQGRCGVDLGISTLATLSSGPVRYWDTPKPLQHSLRKLARYQRRLVKKTKGSTGYSRLKVKISRLHKRIADIRSNCLHQLTRYLTKHFGEVTIEDLSVKNMMANKRLARHIADVGMYEFKRQLNYKSQWYSILLIIADRWFASSKLCSDCGTKNDTLTLADRTFSCKCGAKKCRDYNASLNLENYTARSAGIYAVGDCGSALVA

SEQ ID NO: 38568 - protein, 367 aa, unknown
  TnpB Polypeptide
MRGYHDAQERFQKQRRLQVLKARLAEVESRIDEGRVSVCRGGARLARVHRNLEASDLTEAGWRQRWEAARLFVTADGEADKRLGNETIRWDPSNGWLELRLPSPLAHLANCSRGRYRIEGVAFPYRGDEVAAQTVAGAVRYDIRYDPVKGRWYLDASWSVSDAVGASMDGAGVVGVDLNEGHLAGSVLDAAGNPYGRPWSVRVDLAGLPTSTRDGRLRSAISEVLRRAASAGCKAIVIENLDFEADKATSKETHGRGRRGRRFRRTVHGLPVARFRDRLVQMAANAGISVIAVDPAYTSQVGRRALAGGAADQPSNFADLASSCGKRGDRKTRPWAQGAATDRCASTPEDSWGRESYRPGRARTHGR

SEQ ID NO: 38569 - protein, 412 aa, unknown
  TnpB Polypeptide
MKRTLRFRAYLPDDVASEACHQIDILRQIRNHAVRDYYNSDYNDRPSDYDQHNKLTEWADRWPSFADPSRHAAQQAISQIHRDLETLQERRNEGYNVGRLTWQGAGEFRSVSYNHPRRWNVDHNTGDDQFVRLRLEKIGWFTIRTERDVPPADEIDEIILKQETTGYWYVSLVSSVERTPEKPPLSEIDPEDCVGVDLGITSYIHTSENLSVGTLDLSDEYDRYAREQRKLDRKEHGSANWEKQRQKVAQAKRTIKRKVLDYQHKLTTWLVQEYDVVAVEDLDVKPMLETSQNAKNKQDAAWSRFIELLEYKADLHGTHVEKVKPEGTTKECAVCGVETAKPLWVREHSCPACGHTDDRDLNAAKNILNRGLKQLGAGRSESTPVQTALPTFTPQREVVNAKRVVEAGSPGA

SEQ ID NO: 38570 - protein, 446 aa, Paraburkholderia sp.
MKPESTARNILGHCIELIQTPEQADYFARACGTHRFTWNWALAEWNRQYASGGKPSAIALKKQFNAIKYQQFPWLKDIHRDAHAQPFTHLGKAWKRFFADVKAGKLANAPQFKRKGSCQDSFYVANDKFTIARDTIRLPLVGEVKMREALRYAGKIMGATVSRSGERWFVSVQVEVTDPQFFLKRTGSGVIGVDLGLKAAATLSTGQSVQAPKPLKASLRRLRIRSRRMSRKLQAAKVAASKIHGPQLPGRQRLPVTNNRRKSSMTLARLHARIANVRADFTHKLTTRLCRENQTVVIEDLNVRDMLANEKLARAISDVGFGRFRAQMQYKAKRYGTDLILADRFYPSSRLCCVCGWKNRALTLNHREWTCNECGTHHDRDINAARNLKRLATATALPVASHPATDDAAAGKVPVAAGKVTPVRYECGQQDASGQEENRAKLYAHS

SEQ ID NO: 38571 - protein, 398 aa, Kribbella sp.
MSRYRLYPTPTQQAALLEQCRHARYLWNMALEQWSMWTPDKRPTPGYVEQARQLTEARAASGWLRAGSQTVQQQALRDFDQAVRNFYAGTHRRPTWRRAGVHEGFRIVGSQASRVVKLNRKWAAVKVPKVGWVRFRLSRAVPDAKSYRITRDRMGRWHLAFAAIPPPIPAPGTGEVVGVDRGVTVSAALSTGELLTCPGLTEREQARLKQLQRRRARCRRGSKRRGRVKAAIAKLYARAGDRRKDWVEQTSTDLARRFDVIRVENLRIGPMTRRPKPKPDPERPGRYLPNRRRAKAGLNRGILANGWGDLVARLEHKAAGRVEKVNPAYTSQTCSVCGHCAPDNRESQAVFRCAACGHRANADVNAAVNIAAGRAVSARRETPARVSPKREPQLAASG

SEQ ID NO: 38572 - protein, 547 aa, unknown
  TnpB Polypeptide
MAQVLTIEAAILDRGVCGYLSARAAEYQCLLHRLHVEVNGRGKPVADVVKAMLRTEGWTARQLNALRIQLEGMARAWKEGLERRIKGLSDRIGKLEEVISKESDKNARHQRQRKRAKWKKKLSQWQGQLESGKPNFCFGGRKLFKAQYHLKENGYRDHEAWLMDWRSVRSDSFMLIGKAADANGCSDCRLEVVQASTESLAVMLRLRKLNREMPPGRARPQDYIHIPVVFRYNIPQILAAIAAEQPMNYQFFRRDGEWRVHLITRIPDVQRVSDLSNGSLGIDLNPECIATAQVKADGNPSQLVSYDLLPGSRTANQTKDELGKIVAQVVDRAVAAEVPIVIERLEFRQIQKELQARGLNRRLSRFKFSLFETMLRTRAAKQGIQVFSVNPAYSSIIGYFKFGYGNGLNRHESAAIAIARRIQRPGGGHFSERIRFRTQHPEAPDPKTLLPPATDGNRHPWKGWRKLGNLLAKSTRSGKSGDEPCPAGGGFREEDDLDYSPSVTTVPESDKPRLLQPQPAKRSDRVIRTVCDSSATGFDPGSSTVTE

SEQ ID NO: 38573 - protein, 262 aa, Cyanothece sp.
VVWSRPLPSDPSSVTVLKNKVGQYHVSFVVEVDIPYLPAEYEAVGVDLGIKTFATTSAGEFIESPHYDRLDRKIRRFQRQLARQVKGSKRWQRTKHCVAKLHLTIANIRNDFLHKLSTRLVTENQLISLEDLNVKGMVKNRTLARAISLQGWGIFRSMCAAKCAMLAREFQVISRWESTSQVCSSCGYRWGKLDLSVREIVCLNCGATHDRDENAAMTILRSGVEQSQDPKNGHRVSVRPGCQVVCDDVSTRPVVIQLSLGV

SEQ ID NO: 38574 - protein, 379 aa, unknown
  TnpB Polypeptide
MLRTFKFRLYPSKAQSIIFEQTLETCRVLYNNALEERKNAWENERKSTSYREQQNNLPKLKSNKSSLQSVHSQVLQDVLHRLDQAFHNFFRRVKAGEKPGYPRFKAVNRFDSFTYPQFGNGAKFRDRKLWLSKVGEVNIKLHRGGPFNGWIKNCTIRHDVDRWFVCFTVGLPDTKLGKREIKTAVGVDLGVTNLVALSTGELIENPRWLKHSEERLAVAQRWLSCKKGSKNREKQRLKVARLHRKIRCQRADFFHKLSRKLVDSYDLIVFEKLNIAKMIQNSYAAKCIVDAAWRQLVLFTQYKAEEAGAVVQFVDAANTSQQCSSCSTLVPKDLSERLHACPACGLVLNRDLNAARNILMRNTVGLTGRACGSAALAGC

SEQ ID NO: 38575 - protein, 446 aa, unknown
  TnpB Polypeptide
MKIMSTYSVKIKEYNHIFKDTIRLYRRAVDFYIQVILNEWDQFAQCFNQKQAVQLAEGFSVMTKNRPVVRYDFGMEFYKFPSYIRRAAIAEGYGKVSSYQSNLKKWESADPRQRGCAPSIPKAGCIYPAMYKGNMFLRTDEYKAKLKVFYHNTWDWISVSLRKTDVDYVKRHCTSRKECVPTLQKRGKQWFLDFAFEEKTELNHTEVFDQTVLAVDLGLNNACTCSVMRADGTVLGRRFFRLAREYDSLKRKIDHVKKSQRHGARKLSRQWKLVCGVNDDIAVKTAHFIMDLAVECHADAIVFEHLDLGGRTHGAKKMRLHLWKARYVQSMVTDKAHRYGIRIARVNAWGTSRFAFDGSGRVLRGNESSKTRGSYGLCEFPTGKLYNCDLNASYNIGARYFIREIIKSLPATDGQRLLAKVPEAVHRSTCTLSTLISLDAELHAAV

SEQ ID NO: 38576 - protein, 490 aa, unknown
  TnpB Polypeptide
MRVKTIERNDKIFRSVDLFVKHNAIKDIRLNELYSVYSKAYATALSFMLKSFYQTKNDNPYIAIKSLPTKEILEAIFENYLDIASKRLLALVYQQAYAAFKSHVKLVKYYVIEATRKTKSLNGNKSLYYDYKENIKNYLFKEDAILRSVLRHIIKRAAIRPSLKLRTMSLDSHVVKIEEANSSKSFDKWIRVAPLKDKEAIYLPYKNSEYKEANALKAYQFIKRDNKFSVRVSQTVDKLDYTPSDKVVGIDLGLSDFFATSSNKILGKGFISWIKKQDETLTKLQASLQSQGIKPRSSKRYRNLVQRIRDYAKNEINRLFNQVIRYDKPKTIRVEFLDFRNQNLGKSTNRLLTKLGNKYVEEKLQRIADIYGIEVEYVNPAYTSQTCSSCGYVDKNNRKGIDFKCLYCGKKLNANVNASLNISGRSRDSLKLAKNQSLIEILTRFTRNNSIKRVGTNSFSLCAKSCARTANVVNPYLEYYFASLNLSEVV

SEQ ID NO: 38577 - protein, 449 aa, unknown
  TnpB Polypeptide
MSSYEALKVRLDPTPRQERLMASHAGAARFAYNAGLAHVKEALENGEPADLSHYGLLRWWNTNKDELAVNRDTGVVWWNQNSKESYSMGLRSLAQGFSNWSKSRKGQRKGRRVGFPKFKSKNTTMRFAYSTGFTAPTACDPYGLKLPRIGRVHCMENVYRRVDGARLIRITVSRRAGRWYASLTVEREPTANPAPKDGAVGVDLGVKHLATLSDGAIIPNPRALGTRLKALRKSQQALSRKVKGSARREKARERVSRLYARVTDARMDAINKATSLIASNYSVVCVEDLNVAGMVKNRSISRSLSDAALGEFRRQLEYKTARNGAVLRVVDRWFPSSKTCSNCGVVKAKLSLSERVFHCDACGASMDRDLNAAINIVVAGSAPETLNARGEDVRRANSLLGNAVPGEARTKRSPAGGVRLGAGLGNEVMQTKAKLVCNGFRHVPSYSSR

SEQ ID NO: 38578 - protein, 491 aa, unknown
  TnpB Polypeptide
LAALTSEVRDISAYATFVVRNDVELGGELAIVVATAPAEAGRQAGVTMPDFLVTGKSGRSRKEKLVQHNVVTAYRSYQERVKAANGESSKYVSQGWKRTANPAAPSYGEDYVNLGAVDRNYALIENDPFADGEIILRMVIQGAWYRLIFGFDNKRFTEGKVTLPVIKVQDGAPVFIFTVVTDNPIVQFSGDYTIGVDVGINDYATVVVRDVKTGRIVHETTLSQRVHSLWNSVRASERQVRYLKKKSDHLLLYRKERMSALDEAQLHREAASRKKRELAILAAQEIAALSHVWGNAVVAVEDLTWVANTMQHGRWNRGALVQWITHYVSQNGGWVVAVNPANTSQLCYKCGAKVSHPTHEVSVCAEHGVMDRDVNAASNIAARAVPRVVKARATRAKNRKIGPQRPLRTPPARGSLKYPGRDRTKNAPTPKRKNLRITKGVILPVRPARAQAYSLDARVLADQGTCSALGTSKAVLKQGNITHECRLCSLI

SEQ ID NO: 38579 - protein, 405 aa, unknown
  TnpB Polypeptide
MGYYKAVKVRLDPTPRQERLLASHAGAARFAYNAGLAHVKEAIDAGEKPDWSFYSLVNWWNANKNSLAVGADGATWWQENSKESYCRALESLSKGLSNWSKSRRGDRKGRKVGFPKFKAKGRATPKFAYGTGCFGLVKDDPKALKLPRIGRVHCMENVAARVGDAKVKRMAISRRAGRWYAALTVERDDTPAERPPKGGAVGVDLGVKNLATLSDGTVIENPHPLKKSERKLKRAQQVLSRKAKGSNRCERARARVARLHARVANQRLDALHKLSTWLTETCSDISIEDLNVAGMVKNRCLAKAVSDASFGELRRQLEYKAARTGARLHVVDRWYASSKICSQCGSVKAKLSLSERTYKCDSCGLVMDRDLNAAINICVSGSAPETLNAHGGTVRRGSPSGHVLR

SEQ ID NO: 38580 - protein, 384 aa, unknown
  TnpB Polypeptide
VDYVNLGAVDKCYAVIENTPFTDGEIVLKMVIQGAWYRLIFNFDNKRFTEGKVTLPLIKVESGEPVFIFTVVTDNPVVQFSGDYVVGVDVGINDYATVVVRETKTGRLVYETTLSRRVHSLWNSVRASERQVRALRRKAATLLHDRQARMSALDEAQFHREAASRKKRELATLAAQEIANLSHTFDNAAVAVEDLGWIANTMQNGRWNRGELVKWLTHYVSQNGGWVVAVNPSNTSQQCYTCGQRVSHPTHKDSACPEHGVMDRDVNAAANIAARAVPRVAKARVTRAKNRKLQPQAPLKTPVARNSLKYPGRDRTKSKPTPKRNKRHLVSEGVNLPLRPARAQAHCLEARVLADQDARGYLGTNVAALKQGNVAYKCRLCCLI

SEQ ID NO: 38581 - protein, 389 aa, unknown
  TnpB Polypeptide
MVVRKVAQRIPFTPSKTQAALLEQCFGARRFAYNKQVEAFNTYDRDTNPRPKYPSTSDMKAENEWLRDSPVPSNALSNAIMDFRRAQAAYFRKAEYGKNRPCFVSKNDSVQSFRNGFPMRHMDGNRYPLSKKLGSVRIRRRDRIRYPLESLSSWTVKRENGVYYLVLLFNVDVQPKPLASGEVGIDVGVKDFLTLSTGEKINYPDRLHQLEERVRWEQRKLSRRVKGSSNYRKRRAIVAKGYAKVRHFRDNFQHQVSHRLIEDNQFIGMETLAVGNMTRKAKKRLDANGGYARNGQSRKRVMNRSILRNGWSGFVEKLAYKSQWYGRTLVQVDRFYPSSRLCHGCGYKYAGLRLSEREWVCESCGASHDRDVNAALNILDEALRLSQVA

SEQ ID NO: 38582 - protein, 429 aa, Kitasatospora sp.
VYLRYSYRIYPTAGQRQALARTFGCARVVYNDALAARKEARKAGLPFPKAGDLQKQVITAAKRTAERAWLASVGVDPLIQSIRDLDSAYRNFFESVSGKRAGRKVGLPRFKSRKDTRQSLRFTRNGFRIRGNGKLNLAKIGDVRVKWSRALPADPSSVTLVLEPSGRYHVSFVVDVEPDVLPESDTEVGIDLGLTTYAVMSDGTVIDNPRFLRKAEKRLKAAQRELSRKAEGGKNRAKARRKVARAHAKVADTRNNWLHQQTTRIIRETQAVYLEDLNVRGLGRTRLAKSVHDAGWSTFRRMLVEKAARYGRHVGIIGRYEPTSQVCSTCGVPDGPKPLAVRDWICEACGVLHDRDLNAARNILAAGRADRLNACGGPVRPGVAIPHRAQPVETGTHRNADGSGRKPRAEGAAGIPALQRGEDVNSIAL

SEQ ID NO: 38583 - protein, 377 aa, unknown
  TnpB Polypeptide
MLVKAVRVKLRTNNVTAAALADTMAKFNAACNALSQIAWHTQTLRAFDLHKIAYHQIRADFGLPSQLTVRALAKVADSYKADRSQRHTFGPRGAVVFDARCFKMVGVSSALLTTTQGRHSFSLAHGGKQRAQLSRGVTGEADLLFVDGAYYLSIAVKFPDPPKADTSGGVLGCDMGIVELATDSEGQPYSGSIVKAVRCRVREHRRQVQKKKSRSAFKRLQKIRRRASRFCKDINHVISKSLVQKASVLRKALALEDLLGIRERASVFSKSMRWQMGNWAFADLAAKIVYKAAEAGIPVIFVDPRNTSRTCSECGHCDKANRKSQASFECLSCGLCMNADANAAKNIEARGLLSKPLMFRPTAHGFNSNGFNPNACG

SEQ ID NO: 38584 - protein, 407 aa, unknown
  TnpB Polypeptide
MNVVKENIEVRIYPAKADMNDKCEKIVNISAVESNIGIYRFIYNKELEFINDFKRLLLHYGYDVDKIIVNKKSCDVILHMLRQEYSFLEKAESSSRQQSQIDLISAFKNYYNVNLKAQHPVYKSKKNNKDTFRIINNRNNVRIEKDKYVYDKIKLAVLGLVKFKTSKKYRELLHRGSDKNDPTVKIKHVTVKKVNDKYYAVFNIERIHIPKKITGSLQQVGIDIGCSKLAVLSNTQEIPNLDLRKEAAKIIQYQNEMSHRKPGSVRYQKAKKQLNKWYQKLIRKRNDYYNKITTYIVKNSSFIAVQNENIIAWHRNRHFSRKVQLNAPRTFLEKLEYKCQRDGVEFIKVPQYFPSTQICSECGEKNENIAGIGNIGIREWDCPHCNAHHNRDVNASKNILKKGLEWP

SEQ ID NO: 38585 - protein, 351 aa, unknown
  TnpB Polypeptide
MRMIRKTTLNLNNANIGKQQDLLDISKEYNRVANLVIDVLWEREQFSGSFVRDTSWIDTWLSARMKQCAAKQALAIVKSQRKRKKKTKPVFARLVMELDSRFVTIEQDINSFDCWIALSSIGKKLKLQLPSKKHQHFNAFLNDGWTLKKAIRIRVNDKGFWADVYFEKSSPNTQTTGAAKGFDIGYKKLLVDSDGNQFGTQFEAIAEKIARKHQGSKGFLRALEERNQLVNKVVKDLSFENVDTIVVENLKSVKHQSKGKIHKSFNNKLQRWVYPLVLERLANRCEREGILMTFINPAYTSQTCSACGVMDKLSRKGERFKCRSCGFEIDSDFNGARNILQKGLQQPIVAV

SEQ ID NO: 38586 - protein, 314 aa, Halolamina sp.
VKYDTRTMTVFDDGTVSLSTTESRIRCELALPEAADGYQRQYLDSEEWNVTESTLTARNGDYFLHIGFRRHKNDTERNTAEDGTVLGVDLGIENLAVTSTAYFFSGRELTHNLREFEKVREGLQRTDTRSAHRTLERSSGRELRYIRDVLHRASNAIVDEALRYECDVIAFEDLTHIRDQTGASWGHKWAFRTLYEQVEYKVEVVGISVEQVGSAYTSTRCAECGFTADENRQSRNGFQCQKCDSEANADYNAAKNIGMRYVRRGQQSSRRTGNSQLALKSGTVTPSGGFTAHPEGFEAEFTDKPLPPRANPSG

SEQ ID NO: 38587 - protein, 446 aa, Halolamina sp.
MEDVIRTVKITLDVPDERYDDLHHTKDQFLHCANTTAKWAWRYPSDYCVTSKQKAENALYERPRNETELTANLVQKGIRRAIEATKSGVARLKKGEKTSQPHFDAWSVVYDKRSATFYRDHVSLSTVNGRVECDYVFPDDPQGTPIGEYMLNEDYEFRMSTLQYDHHAERFYLHARMRRTTDEQEQSTIDSSDVHQTPSDATHQNAERSEDAKHRTVLGVDLNVDGSLAVTSTGAFVGNADEMNHRRREFEKTRGSMQQTGTRSAHLSIQSMSDREHRWMQDELHRASNQILKEARDHGCTHVAFENLTDIRDRMASAKRFHTWAFRRLYQYVKYKAEMYDIEVKQVSPAYTSQRCSKCGFTHENNRRSKHQFVCQKCDYELNADYNASKNVARKLLKRLHSGQKSSSGGAPCQCALTSGTLNLNGDFHASVQATAEGESTDKPTT

SEQ ID NO: 38588 - protein, 253 aa, Halolamina sp.
MTIRCRSPPQRTAWCELALPDADDGYQRQYLESDEWSVTESTLTARDGDYFLHIAFRCHTTETEGNTTENGTVLGVDLGIENLAVTSTAYFFSGRELAHDLREFEKVRAGLQQTGTRSAHRTLKQSSGRELRYVRDVLHRASNAIVDEALRYECEVIAFEDLTHIRDRTDASWGHTWAFRTLYEQVEYKAEAEGISVKQVGSAYTSKRCAECGFTPDENRPTRNDFRCVKCESAANADYNAVAGLRPAGSKIA

SEQ ID NO: 38589 - protein, 335 aa, Oscillatoriales sp.
MWGKHLNCSKLQAHIAKLRKRKPFWQRLGSQAVQDICQRIEKAYQLFFKHNKKGVRPPGFKKVRRYKSFTLKQAGYKFLLGNRVRIGNQVYQYWNSREIEGTVKTLTIKRSPLGELFMMVVVDPEIREPKIKSETSRIAGFDFGLKTFLTISDGTQIESPQFLKQSLNKLKQASRQHSRKVKGSNHREKARKNLVRQYEDVSNRRTDWFWKLAHHLTDRFDILCFETLNLKGMQRLWGRKISDLAFGEFLQILEWVAQKKGKAIVFIDRWYPSSKTCSACGHVLESLDLSVREWRCPSCQSVNGRDENAAKNICAVGASTAKLGYVRQVLPAIAV

SEQ ID NO: 38590 - protein, 381 aa, unknown
  TnpB Polypeptide
MIAYKYKLYRTDRTKHLDKMLREACFVWNHALVMQKRYYRLYGKYINTNRMQKHFAKRISRNLLHSQTVQEILQRLDTAYQRFFSRLAKRPPKFRKAKDFSSILFKQGGYSLNGNVLTINSIKKRFKFSLSRPYAGKVKTLTVKRNHIGEFFIVMVLDQSPQSIGKSHNGASVGIDFGLKKYMTMSDGTTVDNPQFLKSGLRQLQRKSRNLSKCVPGSHNRERKRLDLDRHYEKVVNQRNAFQWHLAHQLCQKYDRIFIEDLQLTGMSALWGRKMADLAHGEFVLKLQYVATKYGVTVHKIDRYYPSSKRCTCGYVNHGLQLHERTWVCPECGTVHKRDLLAANNILRQGIAELESVSKSKNAVGASSRSRLHPRISFLQG

SEQ ID NO: 38591 - protein, 418 aa, unknown
  TnpB Polypeptide
MEVRRTVPVALDVDSDDAVLLEDTVDTFLWCAQYVTDHAFEGEYVTTSKTTLDDETYDDVREATDGFNGGLVQAARNKAAEACKSVVAKWKQGKNVSKPYFTSPHVVYDHRTATFHDEYVSLATTEGRIEAEYVLPDEDSDTPHAEYFFSDEYEITGAELHSTNGNWILHIHCKREVESDTPAQATPENGTVLGVDLGVNNLAVASTGTFWTGDEFDHWRREYEKRRGDLQEHGTRWAHENIQSVGRKEAGRFTMTLHRISNELVAEARDHGCSVIAFEELTDIRERTGASWGHKWAFNRLYEYVEYKAEEHGITVEQVDPENTSRRCSHSGFTHPDNREGESFECLKCGYQNHADYNAAKNIGLRYLRRNQTGDGGGAPLGVRLNSGMLNVNGAYDPPASSEARTGVHAESHDFSRG

SEQ ID NO: 38592 - protein, 316 aa, unknown
  TnpB Polypeptide
MEKSLTKTLVFQLQSGDERLLSEAYHEARWVCNQTIQLAKDGMDWGDISPRLEDEADLVKNTTQRIVAKALDALQQSYGRDDYNTPSHEKIGPYPLRMNFTEGYNLSLKDDGIHYRISAKPYNPVKGTLRGAPDNLELLEQALESDDWRVGTAEAMTRNGNHELHVNVTHLEATVRDKHDAQTVVGVDINEDCVALSTLREDGIVDSVVIDYPEINEERHRYFTMRKRMQNAGQTAFDRVFEDKEERYVHDQLHQVSRRIVEWVQQFASPLVVFEDLKHMRDSIDYGTRMNRRLHSLPFHKLRCRVQSGVRGDSER

SEQ ID NO: 38593 - protein, 424 aa, unknown
  TnpB Polypeptide
VSIKAYKYRIYANKQTTEKLQWILDRCSELYNAGLQERRDAYEIGVRRHPNYYDDEIRKQLTHEHAVGYYEQKRELVDIKEERPEYQEIASHVLQDVAMRLKRAYDNFFRRVQNGEQPGYPRFQGRNRYDSFCYPDGAGWKLEAQERPAEKKGIVRINLKLTKIGTVKLHLHRDMAGTIKTLTIKREGEHWYAIFTCEISKPEPLEVAYEDVGIDLGVTHFAALSNGAFIDHPRYLRKAEKKLVKAQQALSRKKRGSHRRKKAAHRVAKCHRKIANQRKDFQHKASRKLVNQYQVIVFEDLQVKNLTRAPAPKQDEETSKFLPNGRASKAGLNKSILDAGWSTFTGMVSVKAAWAGRTVIFVNPSKTSQICPNCGTIRKKTLDERWHSCECGCELDRDTASAKVILDLGRKALSVGTRPTRATA

SEQ ID NO: 38594 - protein, 397 aa, unknown
  TnpB Polypeptide
MKIVRSSKCTTKWMTAEKRSTLRRVLEEYGRVVNLFIDHFWEMDSPPIKAELLKPIVDLPETWLTARLRKVAAREALDLISSSRSSCKVRREEMQEEENLRFRQGKFNQCHKLRRKLETLVPTIPHHSGRTMSVSTTIANLRDPEDTMEFDAWLEIRCVGDGVSIDIPIRFHRRFKKLEARGRQMQAYVISLDWVQFAFEIETGPKREGKMVVGIDTGIKHLAALSTGEMLGSDIEPIIERIKRCKHGSKGQQRARMALRQRIDEVARDITAREDLDIVVVERLAGIGKKTKVRRRLTKDMRRSIGAWNYRYWLNRLKWRTEDDRVGFRSVPAWNTSNTCPCCGDSDRGNRPSQDVFRCRSCGHTGRADTIAAENIERRFLSGKYGTGCKPLRLGLA

SEQ ID NO: 38595 - protein, 448 aa, Lachnospiraceae sp.
MRELFMYCVDRIIVRASDKVYSYLDENASRAKLLYNASLFRVRNHFTAAGKAVLTPNEQDVENEMALLPTKPGRVINAYALQKLMALTHNPDYYSGLPSQTAQHITAQAVTDFRNWLKALKAWRKDPSAFLGKPKMPHYVDADIKDYLFTNQTASVNDGILSFPKTKATLRCRIRDGVLREIKVTPYYGNYMLCVCYEVQDNVSEGRTHSAAIDFGVDNIMAVTSDTGDSVLFKGDAVKSENQWFNKRRAELVGIITKGHPTATCPASKQLEALSMHRSEWLHDTFQKMSSRLIEWCDAHDVGKLVLGSNKGWKQNSSIGRVNNQNFITIPFCTLQWMIRYKAERAGIVIAEQEESYTSQASFIDNDRIPVYGDTVARDMFSGRRIHRGLYKSKDGILINADLNGAANILRKSGADTSCVAISDLQNPLVLRQPDLNTRIPVTGIGAA

SEQ ID NO: 38596 - protein, 364 aa, Cytophagales sp.
VKLTAQIKLLPTPEQAQALEKTMLLANQACNYLSEVAWEKKTFGQYALHKLAYYACKERFELSSQIIVGCLAKVADAYKLDKQVQPTFKPLGALTYDSRVITFNIAKSLVSIWTLEGRQKIAFVCGERQRQLLQTQQGESDLCLVKGKFLVNATCIVEEPTLEDVKDVLGVDLGIVKLATDSSGESFSGEAVENTRKRYGKLRAALQSCGTKSAKRHLKKLSRKQAKFQADTNHVISKKLVLKAKAQKSALSIESLTGIRKGEKKRLRKTQRAKHSNWAFSQLRLFLTYKAKRYGVELVTIQPQYTSQRCYCCGYIEKANRKSQSHFECVSCGYSNNADINAALNIRLLGLPIVKQPIVSALAG

SEQ ID NO: 38597 - protein, 679 aa, Promicromonosporaceae sp.
METGLAVGGGTVAPARKFRGKTKAGKNWKREGDVSVIALELDLSGDPAMRGRLEKQWSAAFQLERAIKSDARDRIQAFDEWKSGWWYQRLPKSRRGPACRARQAELGLSQDALEKAAAAHIEKSKHLRDHVTKAQALHHASAVWATTSRHLYPDKNGDYFGAPKVGSWWDFTRMVGRARSHTKPRVWETFRLMGTLQGHLNRFATAPVQGLTVPQVRELAPSLLGQSLFDQPGAMPAPETPTNKQGGWWLYQGPLVVVFTGLPGGDMRLPVRLPSGAGDFDHLAHFLADPTVWHKLDLVRVRDRRAPGGWRHYAHLTVLKSGYQAPSTKLRRQTTPWTRVAGIDANVSNLAVASQPRSLSTNADSYSLAVTIVAPTQAEERQAVDSARQIAHASAHLDRSRRASNPDQYAPSKAQEKRAKRRDAKGLEPRKIDVPKGKRDSNSRGVPNRAYRNDQLTRGYRKTRADKAALQASGAQRKTAVAKRVAADLVAEHGNQWLTEDVSMATWQQTWGKRMAVTTPGRVMAALAHEIEATNGTLTKFGTAKTWLSQRCVCGHREKKPLSQRWHSCPECALEADRDVLSAALATTITVPNPDKPGSGSVDETKLGVLKRRISAQQEGRVRSTITLGIPGGDGSRQYGTAAGRDNSTGQPRNRQPRKGTPRRRRKSRATDGTPRADL

SEQ ID NO: 38598 - protein, 369 aa, Prevotellaceae sp.
MFFLQKNIRESVIIIIFASNKANNNMISIAHRIELKPNNKQKTYFRKAFGCARLAYNRGLAEWKRMYEAGEKPSGRKLRMQFNAIKKEQFPFTYEVTKCASDQPFLNLDMAFKRFFKGLGKYPQFKKKRDNNGSFYLQQASEVHLTETNKNSEAFVKILHNKSGKHQYLHFPKLGWVKMAEHIRFNYAKINNVCISQSGGKFFASFSLEITEEEYKRTHPNVDLVDGGSKVGVDIGIKSALILSDGIAIENPKPLKKNLRKIKRLSRQLSKRFHPKTKEERLKGVRKSNNYMRLSVRLAQAQGHVANIRRDFLHKVTTILTTHYGEIAIEDLNVKGMTKNHRLAQAVNDVSFGELRRQIEYKAETNGVK

SEQ ID NO: 38599 - protein, 201 aa, unknown
  TnpB Polypeptide
MKTCEYRLYPNKEQAHLLMQCLIESRLIYNQMLETIKQHVLCRRKKGSHRRRKAARNAAKTHLKITRQRRDHHFKTAQLYAEGYHHIIVEDLQITNMVKNHHLAKSIMDASWGQFLAILEAKAASAGHQVIRVNPRFTSQHCFQCGEIVQKSLSVRTHSCPCCVTPVKGHHLSGEQSPTSSGNGSMPNVSLTPERRVRTRV

SEQ ID NO: 38600 - protein, 240 aa, Lactobacillus sp.
KLGTAKLVQLKKHWFLHVPVTLEVNEWEKLRNQHIVGIDRGLRQIMTIYDEQGKTKFFNGKRVAYQRKKYAHLRKQLQATGTKSAKRHLKRLAGRENRWMEDVNHRLSKTLVQHYGENTLFVLEDLTNVSFDEKNQSTRDHNRDLHSWPFYDLQVKLTYKAQANQSQVLMASAKYTSQRCPKCGQIRKENRNHALHRYDCANCGFRTNDDRVGAMNLYELGKQYLTGNERPKFELNNVAD

SEQ ID NO: 38601 - protein, 368 aa, Planosporangium sp.
MTGVVKRAFRYRFYPTCEQAEQLTRTFGCVRLVYNKALHARTSAWNTERRIITYGETSALLTQWKRDADLAFLGEVSCVPLQQALRHLQAGFAAFFAKRAGYPRFKSRKRSRAAAEYTRSAFRWRDGQLTLAKMTEPLAIVWSRPLPEGTVPSTVTVSRDAAGRWHVSLLVETTVETLPPAEAAVGVDAGITSLVTLSSGEKIANPRHERADRRKLAKAQRALCRKHKDSNNRAKARIRVARIHARITDRRRDLLHKVSTRLVRDNQTVVIEDLAVRNLLANHRLARAISDAAWSQLRTMLEYKAAWYGRRLVVVDRWLPSSKLCSTCGQVAETMPLHVREWTCGCGAHHDRDVNAAKNILAAGLVER

SEQ ID NO: 38602 - protein, 370 aa, Paraliobacillus sp.
MATKTILVRLQNVTKKKHKHFVQEQTEFATCVNNCVKRLHNSEKLSSKNVNFNFKSAIKNEAIRRARKAISDFKKGKAKTLPTFKNSLGIKINNQNWNSVEKNGKWYIAFTSNLGKKSIPVVESEDVKMYFPFLLKENKEHRGTMELFRKGRDWYIAIPIQVSSELYFTETHKEVKKDFVDYTPVGVDLGLRHLAVLSEPTSGKRQFFSGKEVGYKRRHFRSQRCSLGKKKAQRAIERIGKKESRWMKDYNRKLAKDIVDFALQFDRPMMKLEQLDDIRSTCRSLKQANRTIHSWSFYQLKQFIKERALKFNIPVVDINPYKTSQTCFCCKHADKGNRHNETFKCKKCRYKNHADLNAANNIAISTSLAV

SEQ ID NO: 38603 - protein, 459 aa, unknown
  TnpB Polypeptide
MQVSEYRTILVINNRVVYAASHHVERRNWHCVMHRLTITVSAEITSLAERLRIHQPVVFFANVWVRTEKNTPVVRNQTIHMRNPIVSYDFSAKCYKFPSYLRRAAIVEALGKVSSYRSNLANWEAAESAKRGKQPSLPQVGYVYPAMYRSGMFIRTGIYQADLKVFIRNTWDWVLVDLRKSDVDYIEHHCANYKECVPTLQKRGKKWYLDFVFQTAVQLPGTDIRNTRILAVDLGLNSACTCSIMTPEGAVLGREFLSLPGEYDSLEHAISHIKHAQKLCARKTPGLWKQAKGINDDIAVKTARFIVDTAVKYDVNCIVMEYLDLGGRKRGSKKQRLHLWRAKYVQAMVTDKAHRNMIRTARVCAWNTSRLAFDGSGRVMRGKEADLPSYSLCRFPTGKQYNCDLNASYNIGSRYYIRELLKTLPATAGQAVTAKVPELAHRSKCTLSSLIKLNAALAA

SEQ ID NO: 38604 - protein, 369 aa, Methanolobus sp.
MILNKVFRYRLYPTKVQTTMLANTLELCRWTYNETLGLRKNAWEFEQENIGYYESKKMLPGWKMIKTELKNVHSQVLQDVVKRVDLAFQAFFRRCKNGEDPGYPRFKGKNRYDSITYTQSGFELQDNTLWLSKIGAIKIKLHRPVTGDIKRLTIRGTSTGKWFVSFLVDTEVQGTIPLTGQSVGVDVGIKSFLTLSNGQDIPNPRFFVTEEENLAKAQRKLSKAVKGSPEWRKALKVVEHIHERIANKRQDFAHKVSLELIRPYDLIVFEDLNIKGMVRNHCLAKHIADVSWNKLISITTYKAEWAGKHVELINPRNTSQICSGCGQIVRKDLSKRTHSCPFCSLVLDRDHNAAINILRLGLQSVAQNA

SEQ ID NO: 38605 - protein, 413 aa, unknown
  TnpB Polypeptide
VMQLFNLTYEFKLKPTKNQVAVFEEWLEQCRKVYNYALCERKDWFKSRSCQINACSLRSEYIIPADTKRPTYASQCRGLTVARANIPALKAVQVHVLQQTLKRLEKAFVSMWEQGHGFPRFKKAGRMRSFVFPQLGKDPIQRAAVKLPKIGLVKFNQSRPIPEGATIKQARVVKRASGWYVMLTLQWDLDVPQPTPHGEAIGIDVGITHFVAVSNGKLFPNPKPFRKLESKLKLLQKRVSKKRPGSNNLQKAQTQVSQLHERIANVRKNYHWELAHNLCDWAGMIFAESLNLKALAKGMLGKHCLDAGWGQFLQILEQCCFKRGVFFRKTDANKTSQTCPNCLTETGKKLLSERVHKCHHCGYTTDRDVAAAQIVRIRGLAAVGYTVKMLSEGKFIFYPVTKESPPYKGGEYQ

SEQ ID NO: 38606 - protein, 360 aa, unknown
  TnpB Polypeptide
METTRTVVCKLAPTPEQAAAINATLAAFAGACDHAADAARRLGSTNKVKVQHACYRAIRETFGLSANLAIRAIARACAALKVPARMHSQFEPTSIDYDARIFAFQEWNWTFGLTLLSGRVKVATCLGERQKSLLKGQKATSATLVQRRNGEYFLHVQLAGEAPEPLKPKGTLGVDLGRRRVAVDSDGTIHEATEVNRVRSHYPKVRRSAQAKGTRRSKRLLKRLSGREKRHQRAINHVISRRIVDTAKQTGRAIVLEDLKGIRQRTKVRKTDRYREQSWSFFQLRSFIAYKAQDAGVPVVLIDPRYTSQTCHVCGERGHRDGLLFRCANHGDFDADINAAKFIAVAGARVTGPEGAGLVA

SEQ ID NO: 38607 - protein, 377 aa, unknown
  TnpB Polypeptide
MRKTFQYRIYPTKKQQRMLNETLEECRWLYNHLLEMRKNAWEHDGKSLSCYAQQATYPILKEQRPSLNTIHSQVLQNVAVRVDLAYKAFFRRIKTGEKPGYPRFKGHGRYDSITYPQSGFSITHDDRVSLSKIGSVKMVYHRPIKGQIKTCTIRRSSTGKWYVCFSVECEPERLPECSEQVGIDVGLKTFATLSNEEEIENPRFFRKEEKALAKVQRKHSKLTKGTLERRKHRKAVARVHERVAWRREDFTHQQSRQIVDRFGLICVEDLTINRMVHNHCLAKSIADAAWSAFFLQLSCKAEEAGRRFVKVNPAYTSQTCSRCGHRQKMPLSNRVYHCPCCLLSIDRDLNASLNILAVGLHSIGSQSVEAPDFSRGE

SEQ ID NO: 38608 - protein, 401 aa, unknown
  TnpB Polypeptide
MGLVSKPYPEVRSVSIRFTEKAWSYEQFVKSVAPVRLELSLLGVRRVVWLRLHKRFWLYWWRVLSGEARLASTLIVKRRANKWYAVFIFNMKPREEEPKSIVAFDINENTVAVGRVDIIATIDKIASWNRQYLTPQLYSIRTDFGRLARRYEAIRNAIIVRLKQSFTLPSGNYVNVTNTREYRKQVRKLREGDRKLGRVRQVANKLTKTPGIIVTEKLGDNPQESMIDGIEKDELRHRIKQTPFKALEKAVGDKALERGSRVFYVSSYRNSKVCPIHFVRLERTDDWHTLKCPLGHYVDRDRASVMNMNWKLTPEAWVKGVWWDLRRKINWKEYEGKSNPLVPYFMAKILHATLKEFKASLEQSPAVLARGKPMNPTGEADEGGGEETSPRRGGGQLGRNT

SEQ ID NO: 38609 - protein, 508 aa, unknown
  TnpB Polypeptide
MKDTELITISIVIENKEQREKIKRLIEAYRRFENALLDLVIQNYSLYIDNKDINDFELFTSPGVIVNALSGDMSKNTKQVKYLTNKYKNNQLWKELKASVKNIDQNNLICIISKVAYKSKPYIQKLEQYKHYPCILEEVPSLLKPSLLVRENYYIELDKQNSLSFEKLEKDNLIGIKLSQKKKMMHIRLNKKQKEELEKQIVELTEINKLHSARLIYSNGNVRLEINYLKKIKYAAIDMGERNLMAVFVDDETTPSLLVDGKPFKHFNDKFNAFITRLKEIAMNEITEYYTSKTGVKYPVEYTEKGDIILNFISFLCSERNRIFKNQFSKIAKDVVEYLHQNGVTDLFLSENLAKSKDNKDCELIKVARQNDNKVVNRNIIKIPFAMLIKCIDQEAQKHGIRVKYINEDYTSQVSCISGDIKSVQKNPKLTNAYNGKRKGELFHDYVINEKFNADLNAAANYIKVGTGKNFEWLKDKLFKLREPYKIEVRINIDVIDIIAGMHKLILI

SEQ ID NO: 38610 - protein, 256 aa, unknown
  TnpB Polypeptide
MVNRNVKVTERHITLPKLGKVRAKISKPPDGRILSVTVSQEPSGKYFASVCCTDIEYPQYQKTHNDIALDLGLTTFAEDQNGNEYPNHKYLRKNEKRMARLQRQHSRKQSESSNKRKARIKVAKLHEYIANSRLDTHHKLSSMLVKNYDVIYIEDLKVCNMIKNRKLSKSIADASWGEFVRQLKYKAERYGKKVVQTGTFFASTQLCSTPGCGYKNPETKDLAVREWTCPKCGATHGRDHNAAINIFREGRRLQSV

SEQ ID NO: 38611 - protein, 489 aa, unknown
  TnpB Polypeptide
MSKTKSYIIELMLETSSNDDLVLKARFNIIHHITNVMVKHAKGMVNQLERDIQYRQIMNNRKGKKFTKEEKQQLTDLRLKYGLSEYQFHKYVVTQKKMYEKHISIHVAQKIASKVWKSVDKYLFSNGKEIHFKKKEDVNSFEGKSNATGIRFKDGYVYTNGLKLKTKYRKNDKYIKYALDSHRIKYCRIKRIWHKHQYRYYVDLIMEGIPNKTRNYGNQTLGIDIGPSTIAVVSDSECLLQELAHNVNGIEQDLRKLQRHRDRENRANNPNNFNEDGTVIKGKHKWYKSKRMKLTDDKIKSLYQKRANQLKEAHNLLANKIVSLGTNIVVEDMDWVTLAKKSKNTEKSLKTGKFKRKKRFGKTIANHAPSKLIDIINTKLSYIDKKVTKVDCFKTTATKFNHLTGEYMNVNLKDRYVNIDNNQIQRDLHSAFNLKHILITKTKDEIIYDYNLEAMNQSFNQFINNHNTCINELIKQKQLGIKFPSCMSI

SEQ ID NO: 38612 - protein, 373 aa, unknown
  TnpB Polypeptide
MFARKSFQFRLRPTKAQAKLLQMQLDECRWLYNELLSQRKLSHEELNTSLSKYQQLMLLPLLKEDRPTLKIVHSQVLQNIVDRLDKSFQAFFRRCKTGEKPGFPRFRGMHRYDSFCYPQSGFTLLGKEISLSKIGRIRIKMHRSIEGEIKTCTIKKTATGEWDVSFSCEVMAIRLEPKTEAIAIDVGIESFATLSNGEKIENPRFFKKGEKALAKAQRKLSKLEKGTKERRKTGKVAAKIHERIKNQRKDFCHKETKKIIDQYQYICIEDLNIKNMIEGSHFAKSITDASWNQFRQFLTYKAAEAGRKLGLVNPAYTSQICSQCGHLEPKKLANREHKCSQCGYTAHRDFNAAQNILAFGLDGLGVIPRSLRL

SEQ ID NO: 38613 - protein, 493 aa, Celeribacter sp.
MHEQVDVIVLAVALDQFRLEIPTDFGEDVTKVADSGFRQHIAAVFCNEDQVDMQHVNNVSSSSIIHIFQPWTHCYTGTMIQRGYRYKLKPTPAQERLFAQCAGVCRLIYNLALEQRRDHWRSFKRQTGSSISYPSQARELTELRAEYDWIANVSQTCQQQALRDLDRAYQNWFKGIASYPSPRKKGRNDTFRFQGREVRVRKLNGTWSDVRLPKIGWVRFRDTRPLRGKVNNATISLAPNGWHVSFTLAIEHEAPVNIAPAVGVDRGVANTLALSTGERMSVPASIAALERRQRRAQRELSRRKRGSKRYAKARARVSALSARRARIRKDWHHRVSLELARRFGTVVLEDLNTKGMTASARGTIDEPGRNVRQKAGLNRAILNQGWHIFEALLSYKLKERGGELRKVPARHTSQTCSACGAVDSRSRKNQAHFVCTSCGHFENADTNAAKVILRRNTAPMLVEEGHRISVEARTIGEAKSQTGNLRPSGRGRC

SEQ ID NO: 38614 - protein, 405 aa, Microcoleaceae sp.
MKARYRYRIYPTDQQKRLMSQLFGCCRVVFNDALAYCQEVYKTQGKYCGYPELSKRLTLVKQTEERKWLKDPPSLPLQQSLKDLDQAFNNFFKSCTGQRKGPKVKPPKFKKRKYKQSANFTRQGFKVNQHNVYLSKIGKLKIVWSRHLPSEPSSVTAIKDSTDSYFLSLVVELNPQQLPKNGQSVGIDLGITDLATLSNGEKVKSPKPFKKQLKRLRKRQRHLSRKQKGSKRREVARKKLAQLHAKISDTRNDFLQKLSTQIIRDNQTIVLEDLNVSGMVKNRKLARAISDLGWRSLRTMLEAKSVMYGRDFRVIDRWTPTSQTCSCCGFKGGKKELNVREWTCLNCGTSHDRDVNAAINILVAGGHSETLNGRGEKVRLPKESASRRSVNPPEFEQLSIFDLLK

SEQ ID NO: 38615 - protein, 442 aa, Bacterium sp.
MKICSTYKVRLIERNLAFSNTVELYRRAVDFFIDVMRSRPDSISECSTGSQAVNRIEPLTIPTAKRPEVQYDFSAKFYKFPCYLRRSAIAEAFGKYSSWVSNYRNWEENGRKGKVPGKPKAGFCFPAMYRDNTFVRTGTYTASIKVWIRNTWDWVDVTLRKCDVDYISKRCSNRKECVPTFCRRGKVWSLDFCFEEKVKLNNTKIQEQRIVAVDLGINNACTCSVMCSDGTVVGRKFLRLPAEYDCLNHRINRIKQAQQRGARRTPRLWGYADNVNRHIAELTARFISDIAMEYNADCVVFEALELKGKKRGSKKQRLHLWRARSVQSIVTGKVHRFGCRVSHVCAWNTSRLAFDGSGRILRGSESERTSNNYSLCEFSNGKLYHCDLNASYNIGARYYIREFLKSVTATRRLQLEAKVPSVRKRSTCVLSDLISLGAAIAA

SEQ ID NO: 38616 - protein, 423 aa, unknown
  TnpB Polypeptide
MNNPAAIRTTTHTAKLSRSTHEHLNDFLNQQTLLWNCALEERRNAYEKCGVSITKFEQIKSLTSVRADDGWFSGYHLKSQRSILMRLDKAFLNFFRRVRNGEKPGFPRFKSGRRKVRSFETDSFNIKRNKSWLAVSVKGIGKFRFKGELQGRVKMVRIVKTARRVKIQLITELQAADHVVDERAPIGIDLGIESVVALSNGIVVEGESLDSRKKKLNKKKHLQRKVARAKRGSNSRKKAKLQLSKECQRLKEREHGRLHELSARIIKEFSSNLILEDLNIHSMTKKGKRKSKKGLNRSVLEQKWGGLMHMLSYKAESAGGMLLKVPPHYTSQTCSVCFEKPDVKIGLKERTYRCGHCGHEEDRDVNAAKNILRAGLTGSLGGRPDAPGRVENQEGSSKRIIQSSSGGHPTGQNSIQWSGYHCI

SEQ ID NO: 38617 - protein, 408 aa, Hydrocoleum sp.
MRLVDRHIINRTHQYWAWCDQLAFRSKNLYNLANYYCRQNFFFTGHSLDLTKLYHATKDSDAYRALPTKVSKQIIKCLVATWRGYFQAIIEWSKHPGKFLGKPKIPKYKNKTQGRNVVIYSKESVYKAPLKDGICHLSMSDIKIPVVVDTVIVVRIVPATACYIIEVVYEKTNQPPIDSTYVAGIDLGIDRLVALSTNKPGVKPLLINGKPLKSVNQLYNKRKAKYQSVIKGQKKTSRKIEALTYNRNRFVENYLHNTSKLVVNYLVTNNIGTVVIGKNDNWKQGANIGKKNNQNFTQIPHSKLIQQITYKCQLVGIKVIETEESYTSKTSSLDLELPRRHENYVGKRVKRGLFRSGTGKVINADINGSLQIIRKKFPGAFTAVCVAFRRMGIVSCAVQPILVNPISR

SEQ ID NO: 38618 - protein, 388 aa, unknown
  TnpB Polypeptide
MWGVIDQNCFFSKNLYNLATYTIRQEFINNHNWIHYRDLDKMLQRTDAYKELKSQPSQCTLQVVDRQWKSYFKAIKDWKKNPSKYLGMPKLPGYKEKNGRFPWFIKNNSCYIDGEDLIFRVNRLKGFEWKTRAKGRLICVRFIPRGCVYVMEVVTEIEIPDTVDFESKNIVSIDLGVNNLVTLTNNIGLQPIIINGRGVKSINQYYNKQRAKLQADLKLRNGQHKSRKLETLSYKRGNRIKNYMHNSSRRVVDYCVQNGIDTLVCGLNKEWKQGVCINGKAAQHFVQIPFDMLIRQFEYKCQAVGIKFLTIEESYTSGTSFLDGEIPCAENYDKSRRKHRGQFLSGQGYINADVNGSLQILRKAFPVAFSEGIEGDLNPVVINAMKVA

SEQ ID NO: 38619 - protein, 419 aa, Natronomonas sp.
VSTVITKTLQATLAPPTAHKESKLNDLLDVFRDALREAFDSGARTMSAVSDIVTPYDLPYQAKAALCNHVPKLHKTNGANELDKDQPIRLTNQAATFDRSEDRDYEYTWCVPRSGWGTNFWIPLRITPDQESLWHDLVSEDVKPGQIRLQRYRTSWELHVTVQYAVEDPATDGDPTHIGLDIGETALITGCALKDGSPTDPFVCDGSRAKHLRKEMHTTLKRLQERAASEWRIEDRFSHYQNALTDIVEKTSRQTVEYATQFENPVLVMEDLAYIRERLDYGAYMNRRLHSWAFARLQSRIEDKATEAGIPVEYVNPAYTSKTCHSCHRIGRRVSQAEFRCPYEDCHVSTFQADINAAANIARRIDPWGESVPLDKAERDDSPRDGSGRDTATTPREQSSSQQMTLTAFRESEPSTSRN

SEQ ID NO: 38620 - protein, 417 aa, Natronomonas sp.
MPVVTKTLELHLVTPNTHKERKLRETKIAYQQALQTAFDANCTTRTEANDVVVKYALSGYVKNALKQYVPQLCGGSYDADELHDDHPVKFTNEGIRLDHQPQNHYEWYVKIPHHEDYNLWMPAAANPEQRPWLEALHAGDAEMGECRLLERDGKWYLHVTATRDVEARSVSTDRTPVGVDIGDAALATVCHRDERGTPTAPDIYSDDASQVRHLRKTYFTATRRLQRRDSERIAETYGDSLWDRIDHILHRVSRNVVERVQQVDSPVLVLENLQYIRENMEYGAFMNRRLHGWAFAKLHAQIQYKAEEAGIPVETVNPRNTSKECHVCGEKGARPEQARFRCTNDECWVGEYQADVNAAINIADRYRSGESQRRSNRDTGKKATGDDSATDGASLTGPQDTQADAESRQTTLGTHAS

SEQ ID NO: 38621 - protein, 403 aa, Natronomonas sp.
VDDYLRRTAITRIIVSDEQADMLEATISNWQHGATLAAHIGWKEHENSKYGLQKLAYDDVREETHLGSQHAILATHQAASALTGVRALKDNGRNVSCPDFTSPTIKYDANTLTLFEDNTVSLTTVENRVRCELVLPDDEDGYQYQFLNDDEWSVTESTLTARDGDYFLHLGFRKPNPFDEAESPAEDRTVLGVDLGIENLAVTSTAHFESGTKLVHDHEQFEQVRGGLQQTGTQSAHRTIVGRDNREERYSRDKLHRVSNAIIEQAVEHECSHIVFEDLSYIRDRMPNAKTFHQWAHRKLIQFVTYKAESLGIRIEFVNAAYTSQRCSECGHTSRGNRPVQAHFECERCEKTLHADYNAAKNVGWRFVRRGLNDSRRTGNSQLALKSGTVTPIRGFIPDSVPS

SEQ ID NO: 38622 - protein, 430 aa, unknown
  TnpB Polypeptide
MRQVERHWIRENHELYSVCDDLTFKAKNLYNAGLYQIRQSIFEREKCKDENKPSVLSWFKLEAQFRKEKQADMLNLPSKISSGILRMLGSTITSYYQLMKCYNDKSNLSVINEPRLPNYLHKTEGRYIVEFNYQTFSKKRGDKGELILFPKGLNLTIPTQVENPKCVRIIPRLGAFVIEVIYEVEEPPLKHTGIYAAVDLGVDNLASVTFSNGVQPLLVKGSKIKSISQGYNRLIAKAQSKLPTNQRTSKHIHRLWRNREMKLQAELHKITSFLSLYFDEMFVEKVFVGKNTGWKQEIALGKKTNQTFVNIPFNTFISQLTYKCKLRGIEVVEQEESYTSKASFADQDEIPIYGEIEEKPQFSGKRISRGLYKTKQGFLLNADVNGSYNILVKGLATVGKVVDRALVSYHTRSLKLCPNISNLDLLSNYM

SEQ ID NO: 38623 - protein, 454 aa, unknown
  TnpB Polypeptide
MKIISSYAMKLTGDLKALENSINSYREALNFVIPIVDKHWDEIKDFKSAKFRMSYIEKLVHNTKSNEALYDFDLNFPKLPTYLRRATLNKAIGIVSSYRSNLANWEEKRVELEGKGEKLPQRPRLETRHFDCPAYYKQNLFRNFNPSTKTIDLKVFKNGDWVYETYTLKTSDCNYYQKNLANKKQNVPVITKRGRRFYATFSYEESVPLIEEEKIETICAIDLGLNTDATCCIMGKDGTVYARKFIHFSEEHDRLNTQLGRIKRNQKRGNKKNTRLWKRASGISQDIADKTAQAIFEFGSQHGVDVFVLEFLEFKGKQTVKRAHFWRYKRIFSVLGMKAHRYGLRIARVNARNTSRLAFDGSGIVKRGWQISKETPYSIIQFASGKFYNADLNASYNIGARYFIRHILKTVSETKRLALEAKVPQVAKRNTCTLSHLISLRSELLALNVKRTQA

SEQ ID NO: 38624 - protein, 382 aa, unknown
  TnpB Polypeptide
MNVAIRAEVIGDDDLIRTIKLSNRACQECIEIGMREHTFNKTRLHQLTYQMIRKSHPELNSSLVTAVRDQASDMLKRLKLKKKPTKKNDSSIRLNHNTFRLLTDSKIISISTISGRKKYAIKIPSYFSKYDFKSSESARIKTKKGRIFMDIIVEVITPNPHKVKKVIGVDRGVYNPAVTSDNTFFNSRKLREVKGRYKYLKGCLQRAGTRSAKRHLQKLAGRERQFVTDVNHCISKKIVNKDCDAIALEELRTGSMKRKGKVGKKTRKLIGNWSAKQLLSFITYKAEMIGKSIILVNSHFTSQACNRCGDIRKSNRKGKIFKCCVCSYTLHADLNASRNIACLAKGVMSRLVVNQPNVACDELKASLREELRANIVTSFASI

SEQ ID NO: 38625 - protein, 300 aa, unknown
  TnpB Polypeptide
MAVVGHYSKPPNHVVSATACFHYLSWRPHVLCMRRNAVVNSVTITLTPSGKWFISLLTVEDIPELPKTDKVIGIDLGVKDYAITSDGEKVENPKWYRANEDKLTREQRKLSRRKPKGRNYEKQRVKIARLHEHTRNQRTDWLQKLTTRLIHDNQVICLETLTVRNMVKRVEPVMSDDGSFTRNGQAAHSGLAKSIMDASWYEFNRMLLYKSSWYGREVIHVSRFYPSSQLCSHCGYQNHDLTLADRSWVCPRCGAHLDRDVNAAVNILTAGLAVSHTMPIAWYDAPEIINLPHCTPAVRA

SEQ ID NO: 38626 - protein, 440 aa, Streptomyces sp.
VSSELAWEKRQFGHRARLALTPAQVLLMDGQAHAARAMWNQIHDLWQMTPKCRRSLSRMDQTLRQARKEIDWYGVLPAQAAQAVLRTYLQAWKNCWDGRAEEPNFKARTRSVMSVDVPQGRDLQIKRVHRRWGMVNIPRIGRVRFRWTKDLPVGKAANKENRITGARLVKDALGWHIAFRIQTLEPRPAPHAGPEVGIDVGVNLPLALSDGNHQDHGRVPRLPDATADRDKWLNPDEKARLLRLEQRAAHRKSFRKPTERGSKRLRSTYDQIKQLRARATRRAVDWQHRTTTGLARQYGTVVVEALTITNMVKSARGTTEEPGKNVAQKSGLNRSISQEAWGRTVTQLAYKTARQGGTLHKVPAPNTSRRCSACGFITPGSREDQATFVCKNPDCGWEGNADHNAARNVLHLYRTGHALVPAAGRAVARRTRGVKPTTAR

SEQ ID NO: 38627 - protein, 385 aa, unknown
  TnpB Polypeptide
MFQIRRQLNWLYNHALEQRRDAWKSQGKSVTLYDQYKALTALRREDPHGMGGVAVGPQRGMLRRLDLAFKSFFKREKAGKAPGFPRFKPLSRCVTIDATIVGSRMIRKQGSRCVIRIKGFPRIECFPSRELPDGHRLKSLRLTLRGRHWEASMVYEVEKQPLPPSVKAVGIDLGVRKRMTLSDGTMHGGHQRDWPRIRRLQRRVARRKKGSAGRRQAVAGLARCRRREFVRQRNAIHRATTRIIRDNGLVAVERLKVVNMTRSAKGTQGEPGRQVARKAGLNRGILSQNWSLLRSQLKYKAEWAGREYVEVDPKHTSQDCHRCGCRNNPGRSETYRCRVCGLVEDRDVNAAINILAAGVLAAGASTWADRSCVAPEPYRGVNPSV

SEQ ID NO: 38628 - protein, 223 aa, unknown
  TnpB Polypeptide
MLLETNAVLAMDAGITKLFHTSNNQRIENPRFFERTQKRLARAQRKVSRRKKFSKRWKKACILVAKIHQLIANQRKDFLHKLSTQIIRQFGRIAIEDLNVKGLAKGMLSKQVLDASWSMLFNFLDYKAERAGRIIIRVDPNGTSQTCICGNTVKKKLKDRIHQCGLCGLVADRDFVSALVIEQRAFHTTETNLTRRVVTLDSLNNTNHYPSGVKTECSRLVSA

SEQ ID NO: 38629 - protein, 533 aa, unknown
  TnpB Polypeptide
MLRRAVAVELEVARGLNRLLYSVEAMYLSIVREVVAYAVEHNVTNPTQLQRLFYSKYRQEYPSLNSQLVIQAIKQASEIAKSFMERKKRGLASKPYPEVRSVSIRFVVTTWNYKEFIKSIAPVRLELSLLGGRREIWLRLHKRFWLYWWRVLSGEAELASTLMIKRRLNKWYAIFIFELKPREEEPKSIVAFDINENTVAVSKVDIKSTVDKVADWNRQYATPELYTIRTDFGRLARRYERIRNTIIERLKPHFTLSSGKYVNVTSTREFRKQVKRLREENRKLGRVRHVANELTKMPAIIVTEDLGDNPQESMINGVGKSELRHRIKQTPFKSIEEAVGDKALERGSKLFHVSSYRNSRVCPIHFTKLEKTNDWHILYCPRGHYVNRDYASVMNMDWKITPEAWVKAFWWNMKSLSKNMDWRKHEGKSNPIIPYEIVQYLHATLKEFKAGEQSPAMPARGKPMNPAGGANEGWARETRPDSMSELYDGKISKDEFTKLYEQTEYEQGKADIKRSRGLEALARAAPQTHTHGA

SEQ ID NO: 38630 - protein, 375 aa, Butyrivibrio sp.
MDEYIYLRYQYRIFPNDLQKAKAQITADCCRFVHNYYLNLRSLAWRTQHRSMNYNACANDLKYLKLVYPWLAQADSMALQEELKDLQRSFENFWHGDASYPLYHAKKSTGISFRTRNQADGIRISADNRYIHLPKLGWTKIRLSRQVPGIIENATLIQKPSGKYFVSLTVKIASSVVTKRNDGNEHGLDLGLKSFYILDDGTKKDNPKYLYRYENKLVREQRRLSRMKKGSSNWRKQKLKVARLHEKISNTRHDFLHKESTYLARKCSLLCIEDLNIAGMTKNHRLARSISDVSWSKFISMLEYKMALHGGMLVKVPRFYASTQTCHICGHKEPKTKALSIRKWTCPECKAMHDRDVNAAINILSKGQTLLHSVA

SEQ ID NO: 38631 - protein, 357 aa, unknown
  TnpB Polypeptide
LEVFLVGASLLKLQRTIHTKLVLDRKGKREAIKREYWAWQRQLQGNDEQLYSATKQQAERFRHRIRKQNHHGPDTNLEYPLILRRDCVKVEHKPDAMFKWWLRLPVHPESIWVPIQLPQNQESLLKLELRESKLIRDGDNWYVNLTIQKEARLKRRYATMLPIDMGIRKLATTIEEGKPKFYGKDVRQTRGAYFRLRRSTGKARIVRKWKHKEQETVKHQVHAITRRIVEKAKATNAIIAVGDLEGIRRNGKGKGRVFNRRLSSQPFYLFKQLLTYKAAWEGIRVLTVPEAYTNQTCHRCGVRGHRVSGRFSCQNCRLVCDADVNGAWNIAKRAHGLLVHETGDLLTVPRTLAECEP

SEQ ID NO: 38632 - protein, 412 aa, Microcoleus sp.
MIVREAKLKHGTAEQYSAIDEAIRTAQFIRNKALRYWMDNQGTSKADLYSICKDLAKEFDFAKRLNSAARQASAERAWAAISNFYSRCKKGVGKKGFPKFKKHCRSVEYKVSGWKLSDDCKSIAFTDGFEIGTLSIFCNNETQEDLHRLKINRVRIVHSSDGYYAQFCFDAERKEQGEYSGNVVGLDLGLKFFTKDQNDNAVIYPQFLRKAQKQLKKAQRRLSKKFVKGAKPQSKNYHKARKRLGRIHLKVQRQRKDWAIKQARCVVHSNDVVVYEDLKIANMVKNHHLAKSISDAGWYQYTQWLDYYGKIWDKVVVAVSPSYTSQDCSNCGHRVKKSLSTRTHSCPSCKIEICRDTNAALNILHKGLNILGVEWNKNGTSGQEESAEKSGKHGEKTTAAVDKQFDTVSGFR

SEQ ID NO: 38633 - protein, 403 aa, Micrococcaceae sp.
MQHTTIRLRLMPDTASGQLLRKTLEVCNAEASRISQVAHERNIRNQFDLQKVVYGEAKAAIGAAQPVCLTVSKVHGAIAAHKANIRNGNRGKKGSARRAKAEATVIQFRPDASQPYDQRTLSLRIDDKIASIWVTDTGAGKPGRLKIPFTCWDRHADQLREAAKILETDLVRHHHGWYLHVTIATPKPQTSLPVTTTPSDWLGIDMGLENLAYDSDNHSFTGKTVDATRTRRLHNRTWAQQLLSQPNNRTAHRLLKSWSGRERRFATDTNHRISKSIVQLAYRTNRGIALETLDGIRDRARHRKPQRTRFHSWAFRQLGEFIVYKAAQLGVPVVFVNPAYTSQTCHQCGNRDKKARTTQALYKCSNASCAYAGHADHNAAINIQHLAPEAWQHQQTQAVSHAA

SEQ ID NO: 38634 - protein, 377 aa, unknown
  TnpB Polypeptide
MDVKRAYRFRCYPTPEQEVILARTFGCARFAYNHMLRLRTDAWFKEQKRIDYHATSAALTALKKQPEFVWLNEVSSVPVQQALRHLQTAFGNFFAKRARYPSFKRKDGPQSAEYTTSAFKWDGKALKLAKMGTPLDVRFSRTIPRAAKVTTVTVSKDAAGRYFVSMLCDDTVSAKPDADGKVGIDLGLTHFAILSGGEKVAAPNTFRKHEAKLAKLQRRLAKKQKGSARRAKAKRKVARLHAKVADARRDFLHKLSTRLINENQVIAIESLAVSNMQKNRCLAKSISDASWSEFVRQLEYKAQWYGRTLIGIDRWYPSSKRCSDCGHTVSKLPLSVREWVCPECGTIHDRDINAARNVLAAGLAVSAHGEAVSPVCI

SEQ ID NO: 38635 - protein, 372 aa, unknown
  TnpB Polypeptide
VANKAYKFRIYPDDEQKILFARTFGCVRMVYNHWLDRKIRQYEKNKTNVTYTACAKEMAELKKTEEYAFLKEVDSVSLQQSLRHLDTAFKNFFRQPKTGFPRFKSKKRNKNSYSTVCINDNIAIFNGYLKLPKIGQVRLKQHRPVPDGYRLKSVTVSQTSGGKYYASILFEYENQVQEKEMQSFLGLDFSMHGLYCDSNGNEAAYPGYYRKAEKQLAREQRRLSKMQRGSNNRSKQRIRVAKLHEKVSGQRKDFLHKQSRKIANDYDCVCIEDLDMKAMSQALNFGKSVSDNGWGMFTTFLKYKLEEQGKKLVKVDRFFASSQTCSVCSYKNTKTKNLALRAWECPQCGTHHDRDVNAAVNIRNEGMRLVIV

SEQ ID NO: 38636 - protein, 363 aa, Methanomassiliicoccaceae sp.
MIRTVKYELPYDKALVDTVSIGTDVFRFLSDTAFEYGTSSKYRLNRIGYHVARKLFPSFSSKLIQTVRDTVCEARKAVSARTGEKNPIVNPHPGRGLRYDKDCFTMKNGRISIATVEGRKKYMVVPAPGYEGRTCRTATLRIKKGRIFLHCQYETETPPVKYWTEHDVVGIDRGIKNIVACSDNTIVNSKHLRNVKGKYRYNIARLQSKGTRSAKRRLIAMYGRERRFVTDTNHCLSKQLTGSRYGVFVFEDLTHIRKNSAKGKMGKKTRKLIGGWSFRQLETFVEYKAEALGKLVVYVDPRYTSQTCSCCGHIDKKNRNGASFHCLKCGFSLNSDLNASRNIADLGISVLGRVVSQAPQCSP

SEQ ID NO: 38637 - protein, 432 aa, unknown
  TnpB Polypeptide
MSKFVLRTERHVITKNDKNYNNIKELCHRCKNLYNYCNYILRQSFFRGEGLPGKFDLMGLLAKENQDDYRALSAQTAQQIIQLLYRNWKSYFQSLKSYQKDKSKFNGRPRIPKYKPRGEKGHYVAFFTNQQIKLNNGEIVFPKLVKLKPIRTKASSIEQVRIVPASACFIVEVVYEKEIIPAETIDGSVASIDLGINNFVTFLDNQGYQPFIINGKGAKAYNQYYHKEKARLQSELKQGKYYSKNIQLLGLRRANFMQNFLHQSSSIVIKALKERKISTLVIGLNEDWKQKTNIGKANNQNFLSLPHRKLIDQLVYKCEEVGIEVILTEEAYTSKIDHFVEEPMCRQAKYLGKRIHRGLFRSSTGILINADLNGALGIMRKVFPEKALAIAELIRNSGVAFTPIIVHPINCHKVNTMALGNRIRMSTMKKAS

SEQ ID NO: 38638 - protein, 405 aa, unknown
  TnpB Polypeptide
MITVNYEYKLKPSTQQIKTFETWLDVCKQVHNFALRERKDWVNSRKSAVNSCSLVSEYILPADTPRPTYYSQCKALTVAKKLYPELQLPHIHVLQQTLRQLEAAFVAMWERGYGFPRFKKQMRSFVYPDVKQNAVAHGRVKLPKIGWVRMRMSRPLPEGFTLKQMRVVKRASGFFVMLTYQLGAAIPDVPFSGYPLGVDIGLDKYLATSDGELVSRPPFFSALHRELKLLQRRLKHKQKGSSNWLKLQTKIARVHQKIHDTRKDWHFKLAHRLCDRAQAIFIEDINFKAWAKGLFGKHTLDAAYGQFFNILSYICWKRGVFFLKVDKDYTSQTCPSCQTITGRKDLSERIHRCQNCGYTTNRDVAAAQVIVQRGISAVGQPVESQNASGGVLSGVSGNTGLDKIQ

SEQ ID NO: 38639 - protein, 345 aa, Paenalcaligenes sp.
MKRLQAYQYELKPNGAQRRDMRRFAGACRFVFNRALAWQKDRFRYPQGCQLDQENSRIFLPKLGWVRYRNSREVLGTVKNVTVSHKAGKWFISIQTERDVEPPVPQGTSAVGVDMGVARFATLSDGTYYAPLNRFKRHEAALRKAQQALSRKIKFSHNWKKAKTRVQRIHSRIGNARRDYLHKATTTISQNHAMVCIEDLKVSHMSQSAAGTTEQPGRNVRAKSGLNKAILDQGWFEFRRQLEYKLAWVGGWLVAVPPHYTSQTCPECGHCHNANRPTQAAFACVQCRFEAHAEVVGAINILRAGHAQFACEVSGAVRPPAAGTHRSDSGGGSMPPLSAVGVPGL

SEQ ID NO: 38640 - protein, 366 aa, unknown
  TnpB Polypeptide
MKQVAHKYRFYPTTEQVVLLSKTFGCVRFVWNNVLSWRSKEYTLNKTKINYSSSSKYLTELKKQPELVWLKEVSSVPLQQSLRVQDVAFSNFFSKRAKYPKFKSKHDKQSFRLTNSAFRIKNGLFFIAKSETPLTIKVSRPFPESIDSVTISKDTSGRYFISVQGEVEKKTLPKNGNAIGVDLGLTHFLITSEGEKVENPKVYYQREQRLTKLQRRVDRKVKGSKNRDKARVKVARHHAKTVDIRKDFLHKLSTKLIRENQTISVEDLNIKGMIKSSYLTKSIIDASWAEFIRQLEYKAEWYGRTVVKINRFFPSSQICSACGQRSDKKNLNIREWVCASCGACHDRDINAAININTAGLAEINAC

SEQ ID NO: 38641 - protein, 159 aa, Okeania sp.
MDALRYLSDACKRRFSKVSGQPKFKNKGRDDGFPAECYANTLDGSISVGFNRIKLPRIGWVKTFEILPDNVTPKSVTISKKADRWFISFNSREEETQITEKSVDVVGVDLGVKSLATLSTGEVFPGAKSYKKLEAKLSLVAILESTSSQVFALTGKKHS

SEQ ID NO: 38642 - protein, 335 aa, Pseudonocardia sp.
MVRRAYRYRFYPTPAQAEQLAKTFGCVRYVDNRALAERSRAWTQEQRRVTHAESDRWLTAWKRDPATAWLTEPSKGPLQATLRHLQTAYVNFWTKRARYPTFKRQGRSTDAATYFRGCFTHRDGRLTLAKQDRPLDIVWSRPLPTGAVPSQVTVSRNARGQHHVSILVEITIDPLPAAGAVVGIDAGITSLATLPTGEKLTNPRHEKRDRKRLALAQRRLARKQKGSANRAKAKLRVARIHGRIAGRRRDALHKLTTRLVREFDTSAIEDLTVRNMVRNHAVRIASVRVRTAAGSVTGRSRAPCSPARSAGRARNPSGSGQSAKYRQPAVWRGPP

SEQ ID NO: 38643 - protein, 537 aa, Bifidobacterium sp.
MKMTWWLEPEKRYEAQEGHSDAYREGYLAVIDKCVEYCHIVLDGDMYSLRLKTLQDHVNYLTALIDWDTRWIEVGYSKQVEKLVEAEDFIHASSLKLKRDRLKASMIFRQGTTTLVVVGECPFFSTKLVIDCFLVEVKNMAELALTMRVRLIADQRESETLSRLCDKYTSCCNDVSDWIGEHHTLSQRKINEAVYHPLRDRYGLLAQMTQSAIRRVIASYKTIHSRMEHRSDGKNKRKRTTYYSTRPKYSSAGVDLLWNRDYSYSPMTGMFSLPVMNGRIKVKAQWKGIPDEYRDARFGTARLVSKRGGWYLHIPITLQVPDPTSSPKTIVGVDLGIRMLATSYDGETTLFQRGGEVKSKRGKYKRLRQQLQKRGTRSARRRLKTIGDRENRWMTDVNHQASKALVNHYGRDTMLVLEDLTGIRNATERVKVKDRYVQVSWSFYQFRQMVEYKAKRKGQTVLFVDPAYTSQTCPKCGKIRKANRDKKRHLYICRNCGYRSNDDRIAAMNLRHKGYDLLTSQYAASMTDSVRVQSTTL

SEQ ID NO: 38644 - protein, 511 aa, unknown
  TnpB Polypeptide
MPSQATTSSFVVELQLRIGSDVEQVLERTFRLAQCLHNATLCTVLKRDGELRASDAWKAARAMPKGKERTAEFKRLMESAGLTKNGFEKILLDHLRKSGRRDQIDSNTEQKIADRLWDAYQRWRYEDGGKPRYKGKRRGLHSLEGKTNKSGIRWKPDNQCIEWLGCRMLARVDKRDDWLMRALADPQDPQKTRKVKYCRVLWRNINKRKRWFVQLVCEGTSPVKHVFAPADIKAGIDPSLRSMTCFVEDGTVEKIDISAGLAKSARTIRNVQRRVERKRRSNNPKNYDEKGRVKKGPLKWNISKKQRDLEAKLAESHRKAAAHRKNKAGELVNWLLGRAGCIHVEKNQFKAFQRSGFGRSILKGAPRQCITMLKAKAASAGLKVFEVSPRKLRPSQHDIETGEFIKHGLSERWIKLGESGLWINRDAMAALNLLWVDESGENYLPSDDCKKHWDAVKCVLLDAGWLVQLEARDEASEIFLRRFRRKDRPALTVGELRQKRNRGRSDDSLAA

SEQ ID NO: 38645 - protein, 408 aa, Okeania sp.
MRTAYQYKLRPNKEQIATIQLCLELLLRQYNYRLGQRFSWWQENRCPVNACPLIMPIPQLRDHPDYYSQKKDLVNTKDKFPEYKLIHSQVLQDCIKRVKLAFDRWFKVDKSGHKLGKPRFKKTSRYRSFTYPQIKLDCIEGNKINLPKIGNIKLIQHRPLPDGFQIKTVTISRKADGYYVTLSLEDKSVPASICEVEPTLKNTLGIDMGLKEFLVTSEGESVPIPQYYRKSQKRLKTLQKRLSRKKKGSKRWLKAVNFVAKKHKKADATPRRRQLACGQTPRRRQLACGMLTKRGNAHQAVADKRKDFHFKTANELLSKAEVIAHENLKIKGLAKTHLSKSINDAGWSQFLSILTVKAENAGQKTIAVNPKNTSQDCSNCGEKVPKELNIRTHSCPHCGIVIDRDLFA

SEQ ID NO: 38646 - protein, 459 aa, unknown
  TnpB Polypeptide
MAKCDVPDGWCVQAFRFTLDPTEDQARALARHFGARRKAYNWTVATLKADIAAWHTAGIETAKPSLRVLRKRWNTVKDEVCVNAETGAVWWPECSKEAYADGIAGAVNAYWNWQSSRAGKRAGKRVGFPRFKRKGRDHDRVCFSTGAMRVESDRRHLTLPVIGTVRVHENTRRVERLIRAGRARVLAICVRRNGARLDASVRVVVQRPQHPRAALSGSRVGVDVGVRRLATVATADGVVIERVENPRPLEVALRDLRRLCRARSRCAKGSRRYRERSTKLSRLYGRVNDVRTHHLHVLTTRLAKTHGGIVVEGLDAAGMLRQKGLPGVRARRRGLSDAALGTPRRHLSYKAGWYGSQLVVADRWFPSSKTCHVCGHVQGIDWAEQWQCDACSASHQRDDNAAINLARYEEPVSVVGPVGAAVKRGADRKTRPSRAGGREARKGRSPTAAEQPRDGVQVA

SEQ ID NO: 38647 - protein, 459 aa, unknown; identical to SEQ ID NO: 38646
  TnpB Polypeptide

SEQ ID NO: 38648 - protein, 197 aa, Microcystis sp.
  misc_feature (156)..(189): Xaa can be any naturally occurring amino acid
MEKAYSYRFYPTPEQESLLRRTLGCVRLVYNKALHERTQAWYERQERVGYAETSSILTEWKKQEELNFLNEVSCVPLQQGLRHLQTAFTNFFAGRTKYPNFKKKHQGGSAEFTKSAFKFKDRQIYLAKCTEPLHIRWSRQIPESCDPSTVRVRLHXXXXXXXXXXXXXXXXXXXXXXXXXXXXXXXXXXRMSRFANL

SEQ ID NO: 38649 - protein, 401 aa, Microcystis sp.
MEQILTLVVKLQPTSEQRQLLNETATAFADACDWINQNVKTNLTNRNSIQAVCYQEVKERFGLTANHVVRACARVAANRLTAKHKGKKVKGFVATSFDCDSRTFRVVEKDYLVSISTTGKRVKVPMRVSNYHLGKLSGQNPTSAQVCLHKDKDWYIHIQIKSEPPKPIKTNNVIGVDFGRRDIAVTSNNQSWSGKEIQDKRDKFNRVRASLQRKATQGTRSTRRRCRQILKRLSGRERRFQTWLNHNISKAIVSEAKQSQSFIAIEDLTGIRERTNQKPRNKTERRRSNSWAFYQLRTFLEYKGIKEGVEVTAINPAYTSQTCHCCLHIGLRSNKVFKCSNQKCGWIGDADLNGSLMIALVGLSVSQPRGSNLLACPVDLGLRQDQLIECVGESPRTLVGG

SEQ ID NO: 38650 - protein, 295 aa, Microcoleus sp.
MSFCIIMNLGIVKAVFHKELPLAKFTTVTISKNADGRYYASILFNQEDEPVVAINQAIGVDLGLKNFAITSDGSKYDLPKKRLAKLENNRKRKQKKLAKKTDKTSNKRRKAKRLVAKISSKIARVREDFLHKLSRSIAYENQVICVEDLAVKNMLRNPNLAKAISDQGWGMFLTMLKYKAERFGHTYQEINRFFPSSQLCSATLLPIPMLQNGYDSLGVRFVECPHCLHQHDRDINAAVNIKNEGLRLLVLGTKGSAVLGSPQIERLPCTSALGGDVRPKTSGRKKSTPVRGNPQ

SEQ ID NO: 38651 - protein, 455 aa, unknown
  TnpB Polypeptide
MDMMRAYRFRIYPDAKRQKEIDERLMLAQQLYNKILEKSIEEYKKSKNAGINKTTLNEYMKYAIKENKDFLRLYSQTRQDIFIRLQKAYSNFFRRCKEKKQGKKIKAGFPRFKSADRWRSLTYPQYNGSFSIEKERRIYMLRLSRVGRVRIDLHRGIEGKIKTLTIKREAGKYFAIFTTIQEEAKIPKVENANPVGIDVGLTVFAALSDGTTIKKPKFARQNEKRLHHWERIKARRIKDSKNRRKAIQKIQRVWQDTTNQNIDFIQKETTKLVNSNVYTAFVMEDLEIRNMVKNHKYARSIQEAAWRISRSILAYKAERAGMGFKTVPYQYTTQRCSRCGNVKEGEDKLKPGERIYRCFVCGLVIDRDWNASINIKALGSSSPNFGGYAVKSTEGPSGSNASGDVTSTMQRASQVVSMNQEHTSGYILEGSPYLQVGEEVTNISPYITKCIAESP

SEQ ID NO: 38652 - protein, 425 aa, unknown
  TnpB Polypeptide
MTSEQSLVKTLDFQLKIQSNNESLLKDATLESRWSYNETIRLAKQGVDWDEIPGRVADDANLVKNTTQRVVAKALDAMESYHEYDDFGLPSHTKDGVYPLRANYEEGYSLTLRDDDTIEFRISAKPYKHVEGVLEGDDAHLDILRAALAGDEWNIGTAEALFHDGTPELHINVTNTELTVREKQNSRTVIGVDINEDNVALSALSADEVEDTLVIDFPEIKFQRHHYFTIRKRVQNAGKDSIHDTLEGCEEQFVRDRLHKLSRHIVEWSQQFERPCIVFEDLKEMRDSIDYGTRMNRRLHHIPFRALQFYTSYKASFKRIPTGWIDPEYTSQKCPICGHTERANRHKKRFKCCSCQHQDHADRSASVSIAVKGIEKHQEWNVPALNSLPQVRKVRRQASGAVDAPTVTHDTATGYLTDGVTGVSD

SEQ ID NO: 38653 - protein, 394 aa, Actinomadura sp.
MARQVKRAFRYRFYPTDEQAAELSRTFGCARLVYNRALEERTRAWYSEQRRLSYVETSAMLTAWKRTEELAFLGEVSSVPLQQALRHLQTAFTNFFARRAAYPRFKSRKKSRASAEYTRSAFAWRDGLLTLAKMPEPLAIVWSRPLPESAAPSTVTVSRDAAGRWFVSLLCEDTITRLTPVETAVGVDAGVTSLVALSAGEKVANPRHERRDSGRLAKAQKDLARKAKGSKNGEKAKARIADRRRDFLHKLPTRLVHENQVVVIEDLNVAGMVRNHSLARAISDASWRELRTMLEYKADWYGRELVVIDRWFPSSKLCSECGTVAEKMPLNVREWECGCGARHDRDVNAARNIVAAGLAVTACGADVRPKRRKPSGQTATKQEPQPVTAGIPRL

SEQ ID NO: 38654 - protein, 357 aa, Blautia sp.
MLKAYKYRLYPNLEQREYLVKTFGCTRFIYNKMLADKIEYYKETGEMLKNTPAQYKKEFEWLKEIDSLALANAQQNLEKAYKNFFRDKSIGFPKFKSKKTNYYSYTTNNQKGTVYIENNHVKIPKLKTMIKIKYHREFTGTIKSCTVSKTPSNKYFISILVDTENKTLPKVDKKIGVDVGLKEFAICSDGYRVSNPKYLRKSEKRLIKLQKDLSRKQKGSNNRYKARLKVAKLHEKITNQRKNFLHKLSTKLIRENQSIAIEDLKVKNMLKNNKLSKVISEVAWSEFRTMLEYKADWYGRNIVVAPANYASSQLCSECGYKNIDVKNLALREWTCPECGTKHDRDINASKNLLKLVI

SEQ ID NO: 38655 - protein, 504 aa, Scytonema sp.
LLYIFFKYLSIGAPPTEETNKITNLSMNGLSFAADLCRIKLQTKYNTFDFWYCLHMAKAKKEKLLMGIQQNLIHCDADTKAILVFLCEQSNSLYNCGVYWARQIFFKTGRIISKFDAVYEIGKNIHAQAMPSVPAQQTLLSVSEAFKSFKGLRDLFFKGELNQKPKTPSYQASGGMFKVSYPNTGAGRPTLVDGLIRFHLGLQINRWFKIKEFFLPLPINLDFTKVYEFTILPKNGEFYLECSYEVQPIAVKLDVNQALSIDLGTSANLMACIDTLGNSFLVDSRQAKSMNQLFNKRVAKHKEGKPQTYWNNFLSTLTRKRNHQMRDLVNKAARIAINHCLTHGIGTIVVGWNEGIKNGCTMGRKSNQQFVQMPLAKLKERIRQLCEIYGIRYLETEEANTSCASYLDGDSLPEHGQKPDGWKASGSRIKRGLYRSKNGNLINADLNGAANILSKVARNLGIDLSRLGRRCLSTVGKIKIWATNSNLDRNNPRIGHAGELVKCI

SEQ ID NO: 38656 - protein, 249 aa, Clostridioides sp.
  misc_feature (246)..(249): Xaa can be any naturally occurring amino acid
VIVVEKAYKFRIYPNKKQQELINKTFGCCRFVYNKYLAKRIDVYKSDKETFTYKQCSSDLTNLKKELKWLKEPDKFSLQNALKDLDNAYEKFFKEKAGFPKFKSKKTNRFSYKTNFTNGNIMYCGQHIKLPKLGMVKIRDKQVPKGRILNATISKEPSGRYYVSLCCTDVDIEAFENTNNQIGLDLGIKEFCISSCGEFIENPKYLKRSLNKLAKLQRELSRKTIGSLNRNKARLKVAGLQEHIAXXXX

SEQ ID NO: 38657 - protein, 367 aa, unknown
  TnpB Polypeptide
MIYQTFRYRLYPTKAQARMLAETLDTCRDLYNSLLHWRTHDYDCFGHSVTRFEQQAALPRWKKTHPELKRVHSQALQDVVHRVDRAFQDFFRRIKGGEKPGYPKRRTNGYDSFTYTQSGFGLDGGRLCLSKIGAVKIRLHRPLAGAVKTCTIRRAQGRWFACLVCECEPETLPPSEAAVGVDVGLTHFAALSTGEFIPNPRFFRRAEKALAQVQRRVSRAGRGTRRRRQAKRAAARLQARVRDRRHDFAHQAARRLVTTYGLIAVEKLAITNMVRNHCLAKSIADAAWGIFRLVLARKAEGTGRCLAEVNPANTSRCCSGCGLVAPKSLSERRHQCPACGLAMDRDVNAAVNILHNAQGRLTCRRIV

SEQ ID NO: 38658 - protein, 391 aa, Erysipelotrichaceae sp.
MESVKTAKVQIHPQEKDAQLLLESMRVYAKGCAFVSEYIFRTKDLSQVSVQKHTYATLRSEYSLPSQMACNVVRTVIGSYKTNRTNRNPWTLCEYKNPQMTLSWNRDYSLNKERFSVGTLYGRVKCTYDIKGVERYFDKTVYSFGTAKVVCKHGKFFLHISVSAEMDILNDTDVVNVVGIDRGINFLANTYDSKGRSKFYSGRAIKNKRAHYKELRRELQSKQTPSARRRLKAIGQRENRWMRDVNHCVSKALVESNPKGTLFVLEDLKGIRHATERVLRKDRYEAVSWSFYDLEQKLGYKATENGQKVIKVDPTYTSQTCPKCGHIDKRSRHKKVHTFVCTNCGYTSNDDRIGAMNLYRMGIEYLVESQGSMSSLGGAQSIAPDVTSASE

SEQ ID NO: 38659 - protein, 515 aa, unknown
  TnpB Polypeptide
VKACEFPIVKCIDGKTQARICGRFFEEEDEKTCRKHVDMKFPEFDQYWPFTCQAIIKKQGTGIEEGQSRKGFACGEFCQENEQYCRVHQKSARKPKNPLIRCIKVRARPNKEQRQILEKWFGDKRKTYNLMVEERLEEQLDCKVFLKEKHEMEGKFKKEHVTDCLEFLKATPKDVRAAAIEEYFTGVINAWNRYEDRKKSEQWKRENLKKHKAKVINPPIMKFQRKYDQQCISLFSASTSAVTLPRDSEDELRLKYPRQGIRLYPRTFQDPIILDRRSRRNKTLQEILKLNIQYDYKLLKTKTGKYYFCLPYAATVKPTTATKQAACDGGVRTFQTVYSPQGSLEEYGNGANETIRLYQTQIRNLRMAYFKSKSLRCERIRQYRFLLQEKLKNMVHDLHSKTANSLCNKYKTIILPYYGIASMMKSNKVTSATKRENLALSHGLFRNRLISKAEIRACDLLIPPNEFKTTMACGLCFVENRNVGGSKIFICSNCGLIAGRDTNSGRDIFIRQLTY

SEQ ID NO: 38660 - protein, 274 aa, Microcystis sp.
MLSDLLNKGQKSFGTKSQNDRDLQNFLKEKEWLGEVSAIPLQQSLRDLEPAYSNFFGSCQGKIKGIKVKHPRFKKRKYRQSAKFTKAGFKLKGEKVYLAKIGNLKVVWSRPLPSEPSSVTVIKDSTDRYFLSFVVEIQPQTLADNGRSVGIDLGIATFATLSTGEKIDAPKPLKKRLKRLKKAQRNLCRKKKGSKRREKARKRVAKIHAKIKDTRTDFLQKLSKKIVRENQTIILEYVNTSGMVKNSKLALAIECVKIKTLADKFPGSDASKIN

SEQ ID NO: 38661 - protein, 339 aa, Lechevalieria sp.
VSRRCARRTWRCRAGRSRRTGPRLLGIASSSSEFLREDPVLQDRGGESGFFAGEHDQLFRGPGGTAVRTRPRASTVDCQVVVMGGQVKRAFKFRFYPTEAQTVELSRTFGCVRKVYNLALQARTEAWTQRRERVGYGATSELLTLWKRTEELAFLNDVSCVPLQQTLRHLQTAFSNFWARRARYPRFKSRKRSRASAEYTRSAFRWRDGVRTLAKMAEPLEIRWSRPLPEGAAPSTVTVPRDAAGRWFVSLLCEDPNVQPLPTTDSVVGIDVGLDHLLVFSTGEKIPNPRHERLDRLALVKAQRALSRKQKGSNNRAKARVRLARVHAGIADRRTDYLH

SEQ ID NO: 38662 - protein, 372 aa, Lachnospiraceae sp.
MKAMRGKHKELFKKIDAYCYRAKNLSNSVQYLICQCYRIHQKLKNGEIPDQWEQELIDNTNHAITAYNDGREEKKKLKHVDADNGFVADAYFLSWHMKTWDVYKAMPYATCSQICIQEKCRQWKSFYQAKKEYLKDPDKFLGVPRKPGYLDPMKGRDSLVITSQNFSIDEDDRITMPGFIKEIKLKAKHRSVRQIRIKTDKNSIRIMLMYEQETESIRSDGNIMGIDLGVDNLVTASLSSGGTPFIINGRPLKSINRYYNKRKGLLQEIAKRSNRLDITNRMERLTEKRNNKVKDYLHKASRKIIELAKTSQTFVSIPYRMLIDMIRYKAELIGIKVSVVKESYTSGTSYLDGEIPEKDFYDATRRVKSMPM

SEQ ID NO: 38663 - protein, 433 aa, Sphaerochaeta sp.
MKKRHKALKVRIYPTIDQKILIDKTLGSCRALYNMMLHERIAFFEENKEDRRVVNGHTYKTEKEYKVEFAWMKEVDAVALQQSTADLSQAYSNFFTSLKGARRGQTVGFPKYKKKKTGSSYRSVVTNNNIRVDFEPKRIKLPKVGWVSFRDKRDSAEGRIKSVTVSRSPTGKYFASVLFETEGEEIEKKAVTDPKKVIGLDMSLGTFYVDHEGNTPGFTRNTRRYETHLAQAQRRLSKKKKGSQNWYKAKHNVAIVHETIDNSRADFNRKLVTKLVTNYDAICIETLSLKGMSRALRLGKSVHDLGYAEFVARLKQKAETTGTHIIQADQWFASSKLCSVCGFKNQDLQLHERNWTCQNCQSTHSRDENAGKNLRNVGLDILGLGKPSEPVESMLDVGVSVPMQYSGKQEAHRPLLMGKSRDKQLQRHGPFRP

SEQ ID NO: 38664 - protein, 397 aa, unknown
  TnpB Polypeptide
MFLQYKFPIEPSRAQHARLASILQLQRNLYNDALQNRRAAFQRGVHLTYEDDTKSLPAYRMANRQHTALPWGINNWTLRCVDTAMTRYRDRLTANPNAGFPRFRSEERWRSFGVHGVRGCVVADGYLSVDGIVGKLRVRMHRPWPADARLAGLTFTRRARRWHVTILVDYKAGGQEHQNPGSACGVDLGIDHLASLSDGSLFNDTARWTTQNAALRRAHRALARCQKDSRRSKKLRERRDRASQSVINCRSTRLHQISAAITNRFETIVVEDLDLRQLSCPSRTRHPSDGAGAIATRENGQVLAEVRPKRLLEMIRYKAEKAGGAVIIVDPRRMAPTCNACGSPSSESNDGERHICACGVDVPRGTNNAINILARGLSAHAAALGRRVGKALPNASV

SEQ ID NO: 38665 - protein, 283 aa, unknown
  TnpB Polypeptide
VETVQQVRAMYNSSKNKWEIHLVCEDEVETPDAPGDETAGIDLGICNFAAVAYSTEKASLYPGNRLKQDGYYFPKEIAKCDDSSSKRATKLQATWSERRSHFLHGLAKHIITDCVDNNVGNINVGNLKGVRQDEDGEAKNWGKHGNLDLHGWAYDRFTNILEYKGKVEGISVNRVNEQGTSKTCCVCGRKDEDQRVERGLYVCKEHDDAFNSDVNGAENIRIDINKSNSESDDADCSTDGLHEPSGCTVSEDRSTGWLAQPSVYLYDLSYGFQPQEQVADCES

SEQ ID NO: 38666 - protein, 366 aa, unknown
  TnpB Polypeptide
LLKVFRYRIYPTKSQRTKLAKTLELCRWTYNEILAFRKNAYEQEGKSVSYYDTKKLLPQWKETKPELKEVHSQVLQDVVKRVDLSFQAFFRRVKNGEKPGYPRFKGYGRYDSFTYTQSGFSLKSGKLWLSKIGYIKIKLHRKIEGEIKRLNIRRTPTGKWFASFLVEAEPDEPLPKTGLSIGVDVGLKSFITLSNGEHIDNPRFFVHEEKALAKAQRKLSKAEKGTPEQAKALKVVHRIHERIANKRDDFVQKLSLNLVKSYDLIAFEELNIEGMVKNHCLAKHIADAAWNKLIATTSYKAEWAGKRVVLVNPSNTSQICSGCGQMVQKDLSERVHRCPFCGLTLDRDHNAAINVLRLGLQSVAKA

SEQ ID NO: 38667 - protein, 420 aa, Micromonospora sp.
MILCLLVQLRYQFRVYPTSGQQIGLARAFGCARVVFNDGLRLRQRAHEAGEKYISDGELSRRLITEAKATPERAWLSEVSSVVLQQALADLNTAYRNFFASVSGKRKGRKVAPPRFRSRKDNRQAIRFTKNSRFKVLDNGRLRLPKIGDLQVRWSRSLPSEPSSVAIIRDAAGRYFASFVVQTTDESLPPVDSEVGIDLGLTHFAVLSDGTKVTAPRFLRRAARKLRRLQQALSRKQRGSQNRKKAVVKVARAHARVADTRRDWQHKLSTTIVRENQAIYVEDLCVVGLGRTRLAKSVHDAGWSSFTGMVEYKAARWGRTFGKIDRFAPTSRTCSTCGRIDGPKPLSVRSWTCPCGAVHDRDVNAAINVLAQGRWDNPNACGTRGRPALVPAPRPTSRREAGIRPHAACPTRNVEGIPVL

SEQ ID NO: 38668 - protein, 402 aa, Escherichia sp.
VKRLQAFKFQLRPGGQQEREMRRFAGACRFVFNRALARQNENHEVGNKYIPYGKMASWLVEWKNATETQWLKDAPSQPLQQSLKDLERAYKNFFQNRAAFPRFKKRGQNDVFRYPQGVKLDQENSRIFLPKLGWMRYRNSRQVTGVVKNVTVSQSCGKWYISIQTESEVSTPVHPSASMVGLDAGVAKLATLSDGTVFEPVNSFQKNQKTLARLQRQLSRKVKFSNNWQKQKRKIQRLHSCIANIRRDYLHKVTTAVSKNHAMIVIEDLKVSNMSKSAAGTVSQPGRNVRAKSGLNRSILDQGWYEMRCQLEYKQLWRGGQVLAVPPAYTSQRCAYCGHTAKENRLSQSKFRCQVCGYTANADVNGARNILAAGHAVLACGEMVQSGRPLKQEPTEMIQATA

SEQ ID NO: 38669 - protein, 417 aa, Halanaerobium sp.
MRLSFKFKPKLSHKQLVIINELAWHISKLYNTVNYEVKNNKDIKAVYTELETRYKNNWHNDYLHSHNRQQALKQLAQDWKSFFNSLKDYKKNPQKYKGQPGSPNFKHMNSNPCEIIFTNLAVRIKDNKLLLSLSKKIQSKYNVKALNFELPEAVQSIIDLDAGQQIKIKQDRISKRWYLLIIYKVEEIKENNNPNIMAIDLGLDNLATLTFKNNSECYIINGKTIKSKNSYFNKEIARLQSIRMRQLATSKIRDTKRIKYLRLKRRNYIRDYLHKASCKIVDLAIENQVETIVIGDIKNIKKCSKLKSFVQIPIQRLKKLIEYKAKLKGIKVVEIDESYTSGCSSVDLEKINKSNYDKSRRITRGLFKTNEGLLINADQNGSFNILRKYHNDKCILRPIKEARDNGFVDNPSRLRVS

SEQ ID NO: 38670 - protein, 353 aa, Halanaerobium sp.
MRLSFKFKPKLSHKQLVIINELAWHCSKLYNTVNYQIKNNKDVKAVYTELETRYKNNWHNDYLHSHNRQQALKQLAKDWKSFFYSLKDYKKNPQKYKGQPGSPNFKHMNSNPCEIIFTNLAVRIKDNKLLLSLSKKIQSKYNVKALNFELPEAVQSIIDLDAVQQIKIKQDRISKRWYLLIIYKVKEAKESKKSNIMAVDLGLDNLATLTFKNNSDCYIINGKTIKSKNSYFNKEIARLQSIRMRQLATSKIRDTKRIKYLRLKRKNYIRDYLHKASCKIVDLAIENQVETIVIGDIKNIKQCSKLKSFVQIPIQRLKKLIEYKAKLKGIKVVEIDESYTSGCTKAFNFNYAR

SEQ ID NO: 38671 - protein, 273 aa, Halanaerobium sp.
VDNLKFELSDKVQSFINMDSIQQVKIKRKSGSNRWYLIVFYNKECKNNDGKNVMSIDPGLDNLAAITFKDSNKNYLINGKPLKSKNSYYNKEIARLSSIRMKQVGSRKFKNTNKIKALRVDRNNYVLNYLHKASRRVIDIALDNKVGTIVIGNIKNIKQNSTIKSFVQIPVQRFINMIEYKAELGGINVVRLNEAYTSGCSAIELEKINKSNYNKSRRVYRGLFKNKKTNINSDINGSLNILRKYLKDKCIPELINGARDNGVVYPPRRISVA

SEQ ID NO: 38672 - protein, 240 aa, Bacillus sp.
KAQYEWLKEVDSLALANAQLNLQTAYKNFFSGQSDFPTFKNKKSRKSYTTNRVNGNIMLFHGYIKLPKLKMVKLKQHREIPQNHIIKSCTISMTPTGKYYVSILTEYEKEITPKEVERVVGLDFSMVELYVSSEDEKANYPRFYRQMLDKLAKAQRVLARRAKGSERWNKQRIHVAKLHEKIANQRKNFLHHKSKELAASFDVVAIEDLHMKGMSRALRFGKSVADNGWRMFTTFLAYKL

SEQ ID NO: 38673 - protein, 332 aa, Bacillus sp.
  misc_feature (27)..(60): Xaa can be any naturally occurring amino acid
  misc_feature (268)..(301): Xaa can be any naturally occurring amino acid
MVPQAFSVLSSVILFQASLDSLFQASXXXXXXXXXXXXXXXXXXXXXXXXXXXXXXXXXXKVEYEWLKEVDSLALANAQLNLQTAYKNFFSGQNDFPTFKSKKSRKSYTTNRVNGNIMLFHGYIKLPKLKMVKLKQHREIPPNHIIKSCTISMTPTGKYYVSILTEYEKEITPKKVERVVGLDFAMAELYVSSEDEKANYPRFYRQMLEKLAKAQRVLARRVKGSERWNKQRIRVAKLHEKVANQRKNFLHHKSKELATSFDVVAIEXXXXXXXXXXXXXXXXXXXXXXXXXXXXXXXXXXGSVVSGFSGSVVSGFSGPGGAKEVNLFNTSN

SEQ ID NO: 38674 - protein, 610 aa, Streptomyces sp.
VSAGGGTGSGGRATRRRPERTWPEWPGRPGQGPRLGGRLGREPGGRQRDPLERLPGRRGPGEPDGPQRPVRQGRRQQRPGPGHQHLRDGARHGRQGDRRAPGRGRRRRPRHAAHPDLRRPPGHHPRCGRGTVQRPGPDARTSPLHPPRECPSGLLSRGPPASAGGGIESLGRSRAAAEHAALSVGAGSVSTPALVRGNGGGGVGVRRAYRFLLRPTVRQERALVEMVRDHCSLYNGALQERRDAYRHSSRTSVRYGDQSAQLKEIRAFDPERQGRWSFSSQQATLRRLDRAFQAFFRRVKTGGAPGYPRFKGVGHFDTVAFPRDGDGCRWDSTPHDTQTRVRLQGVGHIRVHQHRSVRGRVKTVSVKREGRRWYVILACDEVPAEPLPPTGSRVGIDLGTVHFLTDSSGRHVENPGFLQVSAGELAAAQQHLAAFPKRTRRRTKKHRAAARKVAKLHAKIRRRRLDYHHKQALALVRKHDVIGHERLNTAGMTKTPAPRPDPDPDGAFLANGAAAKAGLNRSILDAGWGQFLRILADKAESAGRRVIPVDARNTSRTCPPSIGGCGHVAKENRVTQAKFTCVNCGLVAHADHVGALNVKHRAGLVLCAGA

SEQ ID NO: 38675 - protein, 296 aa, Paraliobacillus sp.
  misc_feature (288)..(291): Xaa can be any naturally occurring amino acid
VKSVQKKFKEHIGSFEAQKLATRSFQTVEKLHFGKSKKVLFKKMTDNISVENKSNKTGLRYSEGAILWGDKPTKKNPKPKNWLLMPISPKPNDEYADLALMDKTKYVCILKREVGGKVRYFVQLIQEGYPPPKKNRKISNDEKKRVGLDIGTSTIAICSEDQVKLQELAPNCIYSEKELRRIQRKMDRSKRSMNPNNFNENGTIKKGKLNWVYSKKYEELREKRKEIYRKITVQRKMSHEKLANVILSFGSDVRVETMRFQSLQKRAKNPTRNKKNGKINCKKRFGKXXXXLLLCC

SEQ ID NO: 38676 - protein, 406 aa, unknown
  TnpB Polypeptide
MDKLKLKRAILLQTTATHRKNHVLTQFMRQALAEYNLLLSEREGCNTFMEFHHKTLVPSKERVGFNVQVRCSLIRDAYRRNADHVDGLTVKFNIPRNCKTFRTKTNFFVELRFRSGRAVAVPIKQNGNYQRFCLNMTNGWICKTFGLTRKLQLVAYLQKEKQIPKRPNVLGVDVNVKQFAITVLSPNGKVLCQTYLGKNIYVKRTRLMIRRALLQSLNAHKKLKRLRHKERNFVKNNIGQVVAEVLKIADKYNAEIVVENLQRFPRKSKKFNRKVMRMPFYRFKQNLRQRCFDYNVPLKVVDAYHTSKWCSHCGAVGYGHSPNYSLFKCKTCGQIVNSDRKASLAVAVKALLERIEPCSNQTCFSFQFSKRQVPVSGLIRLDEANNQRSVSKPLLAEGKPIPFRGG

SEQ ID NO: 38677 - protein, 460 aa, Symploca sp.
VATRRQTFRLYPNQSQQRQLFKARRLHQYIYNACLAGRKHAWETDRKNLKYFDQQNKLPQFKKDNPEFAVLGSQALQATVKRVDSAFQAFFKGLRKHPKFKSLRNYSGWTYPGSAGWKVYTNGKHGKVELRDLGLSIRMRGKAKQWGDPTTLTIVYRPSSYQWYASFTVEVATVEAKYDSTSDLKYESIIAYDLGTSTALTTYDGSEYVELTNPRFLRNKEQEVKRKSKQMRRKIAPNRKKKTKPSNRWKKASKTVSRLQRKVSNQRQDWQHKVTSDIASRYDIGVTEELRVRNMTRKAKKGSKRKKQKAGLNKSILDVGMSTLNKMIGYKIEAKGGLLLVLDTKKVKPSQRCPNCGKVHKHWASLSGRYHICDACGFEIARDKGSALVMYQVAINKQPGDGTALVDVDAVSSTCKKRSRKDTGSLKQLQQKKRSKLSKSSPEDRVFETPSYAVRRGSSC

SEQ ID NO: 38678 - protein, 374 aa, unknown
  TnpB Polypeptide
MKTIQTVIEETSEQRAILNENIVLMAKAQNFSVSSCYEHNETNTFRMHHINYPILRERFGLPAQLAVVANKYACAAVKTTLRKKMSRQPKFSGTFIHYDKRSSTINLVKGTASLLTKEGRIKFTFFIPKYFRKYTDWDVKESNLVKCRDGRFRLMISIEKPTIISSKKGNVLGIDRGINNLIATSDGWLYDSSHVFSIKKKYAGLGSRLQSKGTHSASRHLNKVRGREQRFMRDVNHVISRRLVDSVGKDGVIVLEKLNGIREARHRRKQNWLFSNWAFCQLEQFLTYKGEEIGVAVEFVRAKDTSRTCSICGHCDKSQRQGSAFVCKACGVVLHADLNASVNILHKYTLMGCCQPAYCSSNELSKPTFSKVGS

SEQ ID NO: 38679 - protein, 412 aa, unknown
  TnpB Polypeptide
MWRAKEKNNKIQLSFKYRIYPTREVEEKLLRVMQIEAKVYNALLDAVNNARKEGKKITPEDTQGMLKDLKIEGKELVYSKALQMVNNQLWYNINSLHELKKKGKKVGKLRYKKTMKIINYNQSGFKVVGDKLILSKIGEIKALFHRPLESEVKGVIIKKSATGWYAIFQVEVEKEPLERTGKVVGIDLGVEKLVTTSDGVVIENPKVFDKVEKRIKILQKTLSRKKKGSRNYEKVRKKLAKIHEHVKNLMNDYIHKVTSWLVEQYDEIYVEDLDVKEMVENSSSKTLRKHILHSDFSRFMSYLSYKASRAGRRVVKVNPKNTSKTCTECGYVKKDLTLSDRVFSCPKCGWVTDRDYNASLNTLRAGSGLPREPVDRKPLLYIPFSEGVYSKFPGRSRKSSPRGGDAPSVMAG

SEQ ID NO: 38680 - protein, 337 aa, Clostridiaceae sp.
MGKWTPYGKPKLVSENHAMPVFYRDVMYREAEPQEDAAYLKLYDGHDWKWFRVKLLHTDMEYLRKNWVGEKASAPTLEKRHHKYFLRFSYTEEVSLTKTDIKEQTICSVDLGINTDAVCTIMQADGTVLGRKFVDFPSDKDRLHHVLGRIRRFQRQHGSGQTQSRWAYAKRLNMELARKTAAAITAYAAENHADVIVFEYLEMQGKISGNKKQRLHLWRKRDIQKQCEHQAHRQGIRVSRISARNTSRLAYDGSGPVVRNPENHSLCIFQTGKQYNCDLSAAYNIGARYFIRELLKPFSETERSLLEAKVPSVKRRTSCVYADLRLLSAELASQKAA

SEQ ID NO: 38681 - protein, 380 aa, unknown
  TnpB Polypeptide
MFRAIKVRLYPNKAQEQELNKVLGAYRFVYNHMLDRKQKAYETDKANLSESDLSKYFHGTLLKDEQYAWLKEQNTKVMNQAIKQMIDAYQRFFKQHNGFPKFKSKKDKQSALFPRGAISRRNTFETKHITLITSLQKLRFRCSDLYHKRLQKYKDNIRSATLSKTKSGNFFLSILVDIPEAEYVRFEKTNKQVGIDLGVKDFVITSDETVFENKHFFKKEEKKIIKLQRQLSRKVKGSNNRNKQRIILAKVYERLSNKKENYIHSVVNEILRSYDTVFMEDLNVQGMIKNHYLAKAIQEVGFHRFKLVLQSKALMNDKQVVLIGRFYPSSKTCSCCGYKKKDLKLRDRFWICPECDEHHDRDINASKNILLEGQRKLRTC

SEQ ID NO: 38682 - protein, 416 aa, Methanosarcina sp.
MQLTEKIKIHPTEEQVDVLWTTSNLCRLTYNFALTERQEAWKNENRRVRYVEQQNKLPEIKEKFPQYKMVYSKVLQGVLKKLDANYKSFFALRKNGDTGARPPKHRGKNYFFTIVYNQSGFKFGDGNVSFSHKVNEVPLSFEIDRGFEKRKVKQVDIYNSDPYKARGDWFISVTYDYEPEVQYHDNGLYQAIDAGVTKMVTAVNSYGKFFEAKTARPDKYWNKKIDTLKSRRDHCKKNSRRWQRFNSNVKKMERKRSNQNKDYQHKLSLKMVKNTKANTIIVGDLKVKKMAKSKKLKGKRKKGLNRSTQNQGFISRFIGFLTYKAKKVGKKVIKIDESYTSKECYVCKKRHDMPLYQRTMSCDCGNVIDRDKNSAINIIERFLSQNALWTGYRFFADNLRQTGLMMGIEFLEPIPG

SEQ ID NO: 38683 - protein, 208 aa, Methanosarcina sp.
MGVDVGINYLAVASTTDKKCEFFAGGELKNLRNTYKKMRARLQSKGTLSAKRVMKRLSGKEKRLMKDVNHCISKKIVEFALENNVSVIGLEDLTGIRDRTQYRVRKKQRYTHSSWAFRQLQTFIEYKAKQVGILVEYINPEYTSQTCSRCNHISKNNRKGLRFRCGACGFEMNADLNAARNIEHRTRDFRYSVESQGCLSTIHTNKMI

SEQ ID NO: 38684 - protein, 371 aa, Methanosarcina sp.
MMLKAYKFRLYPTTEQKTMIAKHIGSCRFVFNWALELKIKSYQEEGKSFSRYDINKMIPELKKEHEWLKESNSQSLQAMTKNVENAFTKFFREKAGFPNFKSKKNPVQSFEIPQHYIVDFDKNIIKLPKIGKIKAVLHRNFEGKLKTATVSRTLTGKYFISILVDDEKDLPEKQTFTENTTVGVDVGIKDFAVLSNGEKIDNPKYLSKSLQRLKVVQKQVSKKVKGSNNRKKAIKRLAKIHEKVTNQRTDFQHKVSSRLIRENQAIAFETLKVENMVQNHCLAQAISDASWSSFITKMEYKAEWYGKTILRIGQFEPSTKLCNVCGYHNKDITLKIREWVCPKCKTEHDRDINAAINIKKFALQDQNLIVI

SEQ ID NO: 38685 - protein, 279 aa, unknown
  TnpB Polypeptide
MRFAYKYRLYPNKAQVPFLENQVHEACDLYNAALQERRDAWKVCRKSINYYDQANQLKPMRAEGLLGLANFSCCQDVLRRLDKTFQAFFARVRRGEKPGFPRFRSFRRYDSITFPSYGDGCRLLEDGRLRIQGAGLVKVKLHRPVEGEIKTVTLKRDVNQWYVCFSVERDSVVLPESSEDVGIDVGLDGFVALSNGKEIDNPRHFKRGLAHLVRAQRRLSRRKRGSHRRRKAATQVAKAHRKIRNQRAAFHHDLSRWLVERYGLIAWKTSISRDFRAEY

SEQ ID NO: 38686 - protein, 457 aa, Moorea sp.
LYRTIPVRATFSDEEKAFWVFQCEQANSLYNCAIYYAKQKHYQWLQDQDAYTTFWCKDELKCGWKTYKCATRYPELDKALKLSPHYKGMAAQSAQQTLKTVGEAIASYNQLVGLYYKGSVDRPKFPRYRKKGGLASVTFPRQALTYKEGLFYPSVSKESKPELLTKISLELPDFIDSDWVKEVTIRPCYGQLWIDWVIDDGKKPVSVNSKLDYSQALGIDHGGDNWLTCVTTLGQSFIIDGKKLKSMNQGHARLVAKHKAGKSDFYWDSNLDRIQLKRNNQMRDAINKAARFIVNRCLADGIGNIVFGWNEGQKQRSNMGRSGNHKNVIIPTKRLIERLRQLCSEYGIKLITTEESYTSKASFLDGDSLPKYGEKPAGWNPSGKRVRRGLYRTASGNLINADTNGAANILRKVTTQSFDMTKVAREALTLPHRYDLFNSMSKSYRYKSEEGRVYPPS

SEQ ID NO: 38687 - protein, 448 aa, Moorea sp.
VKSPAKIIRTDKWKLNPSPEQKVLFGETVRLYRQACRYLVGIIYTHWSELGELTADQLTPAVEKLMHKTAKRPKIKYPQFNNTFYKFPSYYRRAAIAFAAGQVSSYVTRYREWQSGCRKRKDSKPPRLNADTGCYPALYKGQCYKLYGFDKIEIKVFDGFDWIWTTVKITSLRERHEITTNKMMSPSLIFNDRYCHLSVPFACKPEKRKPEANVTAVDLGINTTATVAVVTHDGTVIHRDFIHLGRDIDRRDKRLKSVSTRASKTMGKGGRLHKGFCSKTYQKCQRINTQIAHVVSRRIVEIAEKFNSEAIVFENLKGWKPKGGRKRSNLRQRFHGWLKAKIRDLTEMKWAELGGKVIEVVAAYTSKLAFDGSGKVKRDSKKYSKATFPSGKQFNADLNGAYNIGARGVFKLTRRNDSEGLSSKRSGRPPRSWACLCDLWTLRSSRLA

SEQ ID NO: 38688 - protein, 383 aa, Moorea sp.
MHETAKRPNIKYPQFNKTFYKFPSYYRRAAIAFAAGQVSSFVTRYGEWQSGNRKRKDSNPPKLNADTGCYPALYKGQCYKLHGFDQVELKVFDGKNWVWTIVQITGLRERHQVATNKMMSPSLIIKDRYCHLSVPFACKPEKRNPETNVTAVDLGLNTTATVAVVTHDGTVIHRDFIHLGRDIDRRDKRLKSVSKRASKTMGRGGKLHKGFCSNTYQKCKRINNQISHIVSKRIVGIAEKFNSEAIVFENLKGWKPKGGRKRSNLKQRFHGWLKAKIRDFTETKWAELGGKVIDVVAAYTSKLAFDGSGTVKRNKKNYSLATFPSGKQFNADLNGAYNIGARGVLKLTRRNDSEGRSSKKPGRPPRSWACLCDLWTSGSSKLA

SEQ ID NO: 38689 - protein, 440 aa, unknown
  TnpB Polypeptide
VGWAKKKGKKQENRLYLTRVAPLPLDKWLPVFEIPMLAGTKLWNSCVWESREARKNGTKYPTESEMKEKFKGYESWKRLHSQSSQSVVEEYFEAVRSYVKHKDNGRDEMRPPGFKPKATLRTITWKRQGFECREGLLTLKLSRKLDDIGVSLPEGFDTLELPDGTVLKGTPVEVKVKAVYRKGKVVGLEMHVTWDFGVVPMVLAGKVSAYDLNAALVARGSTEGSQQLLVCRELLSLIQYRNKVIAEFQQKMSRCKEGSRRWKALLSAKRKALKKLERRIKTLTNALTKLMAGLDQAEDITFSVLGDLTDIRRKSRSGDKDKKASQKINQLPYAQIEQQHAYKSLLRQVYPDKASERYSSQTCSHCGTRNKSYRVHRGLWCCKKCRATMHADLNGVNGIMKNYLFGHCGIEQPFPLKPPEVYRWNKRLNRFVKVSPRASA

SEQ ID NO: 38690 - protein, 507 aa, unknown
  TnpB Polypeptide
MQATYRARIDERVHYPYFDAMVEYFGRLERKLFVGHYVRGAPVTELKKRYIKEYRITARQFNSLNNSLSGKIESIREIQEYQERDLLGRIASTEKAIKEKEEKRDKIIKSLKKLQPRTEKWQEKIDRLKGIKFIIHQKKRRLRNLRQRLENLSKDMARGIVRICFGTRKLFKAQHNLAANGFKDHAEWVTAWRKARSSSFFILGSKDETCGNQTCTYFRDNTLRIRVAGKFTKEFGRYIELTGIVFPYGQEHLDRARTVRRIVKGRKECTAAISYRFLRRGDSWYVHATTEVEASPLRTSRWNGAVGIDLNDDFLRVSDIDRFGNPLNEFEIPVPMRDRSKNQVKAALGEAVKKAVLYAKERGKPIAIENLDFAKKKQALRESGTKHARMLSGLTYRQFRMMVESCILREGVELLKPDGKNVDPFATSVIGQLKFMVRYGLSSHGSAACVIARRGLGFKLEKATKSSVLKLPERKRTSRRNYWLRVSNRLKKTHFSDRVALLYADRF

SEQ ID NO: 38691 - protein, 327 aa, unknown
  TnpB Polypeptide
VPEDLDIRSFQIVEVRNACRGANGALRKRRYALHLQVAVEYPDPPAPEAIRSAEDILGIDDGVKRQLTLSNGDVLHHDDGDNINRQRRMRARAQRKRRGSKRKARLLRKVRAEARKTRANRRRVLLTEVKNIYEVMKPKAIAVEDKSHRQLSTSARGTRESPGTRVRAKSGLNRSLRDAALSERLSLLASEARKSGIAIYAVWPQGSSQTCSACGYRHRDNRESQAAFRCLSCGYAQNADMNAARILRNRAYHVVCSIVGRERDECAPTGWRVKPSVSERLSPAKSVLKPEGGSMRHNAAGREAAASGSAAQGRFVTDYEPRRPKTT

SEQ ID NO: 38692 - protein, 308 aa, unknown
  TnpB Polypeptide
MITISHKIELVPNNKQKSYFRKAFGCARLAYNWGLAEWQRRYKEGDKVDAYGLKKAFNAIKKEEFPFVVEVTKYATQQPFINLGKAFKKFFEDLKKGIVSYPQFKRKKDNEGSFYIGGDQVSLSDTNRNSKAFRKIPHNGKQKHQYLKVPNLGWVKMTERLRFIGKINGVVISQQGNKYFASFSVQATEDEYKRTHPNADTDKGVRMAGIDLGIKSALILSGGVAVENPKPLKKNLRKIKKISRQLDKRVHARNKQERLEGKKKSNNYRKLSVRLSNAQRKWQICDVISHRRSLQYLPPTMRILHWRI

SEQ ID NO: 38693 - protein, 330 aa, unknown
  TnpB Polypeptide
MDGFQKFFKGLTAFPKKHKKFVTTDSFRFPQGFKIDEGRRQIYLPSIGWVKYKRSRFIQGKAKNVTVSRQTDGWYVSIQTEYEMEPPKHAGDSIGIDMGCVRFCTLSDGTFFEPCGALKKALKKLARMQRRLARMQKFEKNWRKQKAAIARLHQHIANVRRDFIEKVSLNICKNHAEIFREDLKIKNMTASAKGTVEEHGTRVAQKSGLNRSILDQGWRIFFSKLDWKALRLGGHVHTVPPQNTSRTCPICGCVSKDNRKTQALFKCISCGHQGNADVVAAINIKERGRSSLACGESERNAQAQVNLGRSKKPAPNQQQESTEVISSASC

SEQ ID NO: 38694 - protein, 380 aa, unknown
  TnpB Polypeptide
MKKRKYYSTKNKRNKKRNRLFLTYKFRIYPTAEQQQKMNLWFFILRRNFRLLVDWLHYLYRKKKKDIYRTFDQFAKKYLLEHNPLCDLIPSEVIDWQVKEFRSQISKYIKPSSCISYRKYRSFVFPAIRYLDIHKRNSRFVDINFPMLGRIKTRFHRQLKCKTIVNVKFTKISKHWYIHILCSVKPSHKNNAVGSVGVDIGIKNLITTSDGKVFKPFVPDIRLLVKIKKLEKQLMRKSPGSSNYIKLKEKIMKLRCKIYNAEVDYYHKITASLVNKNKKILLEHLNIAEMGNRSSAIRQLIQRRRWHLLLHHIEYKSVRDNCQLVWVDPAYTTQLCSMCGAKVYKRLSDRIHICPFCGLEIDRDFNAAINIRQRGIFGNI

SEQ ID NO: 38695 - protein, 384 aa, unknown
  TnpB Polypeptide
MMPVEKIKLTARFKVNLVDVDEAAISEIHRLFKEYRRIVNELIEYAHLHGIASFISLYHAKCRELRQRHPTLPSHYIFTACRYAASIYESFIEMKKMGMCDKEKPTFKGQAIWLHKQLFKLDVEGWKVSIAAHRGRWVTLRLLHGRYHDKFKGMKPGEAWLVLRDDGNLYLNVVFRQAVMLPEVGADAKVIAVDVNENAIVYGNDEFIERFETNEGIIRTRYFLKRRRIQSKIRGRGLRARLLEKYRGRERHRVREIYHRAAKEIINKAREVGATVIVMEDLRRLNEEDKGSKGLNGRIHRWSYRRFQQILEYQAKLHGLNVKYVDPAYTSSLCPVCGSELDLSSNGHRLMKCQRCSLEEDRDVIAVKNLVKRHYEEYMNTENP

SEQ ID NO: 38696 - protein, 544 aa, Calothrix sp.
MVKFSDLSRKSISSRGGVETKRFMVGIETKIKSSDQKILDFLEEWGALYQKIVRWSTTRLLQGKTKNELLPTVQSTFNIDWAWADSILTDAVGIISSAEELRKLNIENIETDIKSGMEKVEEMISEYNKFVLSNDQNAAKIQAFKINNKLARLERRTDKLVKLRNSKLSITFGTKELARKQHFLSENNFSSHSEWLAEWRLARSGNFSSVGNANSTGKNRVMKTFYKQDNIFILKITVPKCLTKKYFQELSLEFIVPERRLPDLLYAVNPKNLLSSESSQPITVRCFRREHKNNAWYLHFSTYVPEVPTLTQNNGTLGIDLNAKTIDVVYVSVDGNIKKSLVKSFSIPVGTTGQVNAQLGNIVKDIVDVAFQIGCSISIENLDFKDKKAALRHSGSKKYNQMLSGFVYSKFKEFLVVCSEKKGIRVNLTNPALTSTIGLFKYTKLYGLSSGFAAALVIGRRALGFNEALNADSKILLSSFGFKEIIPRAKSKNWKLWNKVHKKMKESKIRRNRFYEQNISKIIITEINNLKNQSKKSKKSKKYA

SEQ ID NO: 38697 - protein, 340 aa, unknown
  TnpB Polypeptide
LINKTIGCCRYVYNHFLARRIKTYEEEKKTLNYNACSAELPALKKELEWLKEVDSTALQSALKDLDSAYQKFFREKKGYPKFKSKKNPTQSYTSKMNIKVDGNYIILPKLGRIKFAKSREVDGKILRATVRRNPSGKHFVSILCEVEVQPLPQSEESVGIDLGIKSFAVFSTGEQIDNPKYLNKYRKQLAYWQRKLSRREKGGKNREKARRKVALIHEKIANCRADFLHKLSSRLINENQVIAIEDLNVKGMMQNHKLARSIGDVSWSEFRRQLTYKAGWYGREIRLVGRFEATSQVCSECGCKNSAVKDLSVREWICPECGAQHDRDINAAKNILRLAV

SEQ ID NO: 38698 - protein, 386 aa, unknown
  TnpB Polypeptide
MQTLTYKYKVYKQNRNHEKRLQEWFRTAAWIYNHAISLHKRYYRMYHKSLSMYRLQSHLLKLRKSSYSQWKIIGSQSVQQICERINNGYKNFFNRTAKHLPTFKNWRKYRSVTFKQAGYTLNGNVLTVNALKLRLKFHLSRPVDGRIQTLSVKRDAVGDYWIIMSVRRNEESSTSKPMTGKTAGFDFGMKHFLTQDNGTRIESPLILFNHLDELRRKSRNLSKKKKGSNERNKARLSLARLHRKISNIREDFQWKTAIRIVSDYDVICMETLNMKAMQKVWGRKINDLSFTSFVSKLSWLCAKYGKKFVQIDRWEASSKTCSSCGYKTEKMPLNIRKWTCPQCGREHDRDINAAKNILRVGTSTLGRGGVNPAMQVATNDARIPFL

SEQ ID NO: 38699 - protein, 384 aa, unknown
  TnpB Polypeptide
VDYVNLGAVDKQYAVIENDPLTDGEIVLRMVIQGEWYRLIFGFDNERFTEGRVTLPVIKVEDGQPVFIFTVVTDNPVVQFSGDYTIGVDVGINDYATVVVRSVETGRIVYETTLSQRVHSLWNSVRASEQQVRDLKAKAATLLHDRQERMSALDEAQLHREAASRKKRELAILAAQEIADLSHPWGNAVVAVEDLSWIVNTMQNGRWNRGELVKWLTHYVSQNGGWVVAVNPANTSQLCHKCGSRVTHPTHELSVCAEHGAMGRDVNAAANIAARAVPRMVKARVTRAKNRKLRPQPPLKTPVARNSLKYPGRDRAKNKPTPKRKNHRRTVREVNLPLRPARAQAHSLEASVLADQGATCALGTSRAALKQGNAAYKSRLCSLI

SEQ ID NO: 38700 - protein, 297 aa, Pseudoalteromonas sp.
LKDVSNVPLQQALKHLDKGFKSFFKSGFGYPKFKNKHGNQSVSYMSNGFKWEADKQSLTLAKMKQPLKIKWSRSFTGKPSSLTVSKTKSGKYFISILVKEDIKKRPVANKTVGVDVGIKDLVICSDGTKFNNPRLTNKYASKLAKAQRKLAKKKKGSNNFNKQKRVVARIHEKIANSCKDFTQKMTTKLVNENQVIGIESLKVKNMVKNRKLSKHIHDANFGEIVRQLEYKADWYGPKVSAISQWFTSSKMCNECGSLHSGKWSLAIRTWSCECGAIHDRDHNAAINIHNEGLRLIA

SEQ ID NO: 38701 - protein, 226 aa, Pseudoalteromonas sp.
MEYDTIERNCGTKAVGLDWGVSHYFSTIDQDGNFEQVENPRYLRNSKERLTSLQRDLALAKKGTRTQRKLKHQIAKLHQKIARQRLDFTHKETAKLVEVAALIATEKLTVKNMTRSAKGTVEKNGKMVKQKAGLNREILNTAPAMTLNLLRYKAEEASSEFVEVPTKQVKPSQTCPDCGAKKKKSLADRWHSCECGCEKPRDVASAQVNLNWALGIQAGNQPKKVA

SEQ ID NO: 38702 - protein, 432 aa, unknown
  TnpB Polypeptide
MELVRSEDTKARIKASMAETHARRKSQICRVFELKVSIRHNPKSVFEKLAQCFKEAKWVINDMLSLSKDNPDNSMFDYKYTEHKDVVHYDRDKNPITDTVTLPSVLHRATVAQKKTDIVNLAKAKKKGIKVGALKFKSEVNCLPIITGFTRILDGCRITIPGFRKLRVHGLDQLHQFEKFELADAKLIRKASGYYVKISVMLPKERRIPTNRNVGLDFGITDSITTSYGDKYKCNVRETDRLKFLSRKLNRRGKKKNEKGSKLYYRCLRQLKREYEHIVNVRKDMANKIYHRLVTDYDVIYFQDEQIANWHKGLFGKQVQSSCLGSLKQRLKSLQDSGRSFMISKWEPTTKLCPQCGARNILSLNDRIYKCDCGYEMDRDIHSARVVLMIGSSKRAECLEQASPEQGPLPKCNPIAPRQDSVMMARQEAHTL

SEQ ID NO: 38703 - protein, 376 aa, unknown
  TnpB Polypeptide
VIGASSHAGPGFPCAHSGQRRPGLDCGETAPWWAENSKESYAGGIADAVTGLKNWHDSKTGKRHGPKVRFPRRKKKTRDRLRCTCTTGALRVDGSRTVVLPGAGQVRTAENIRPIWRHVRRGTARLLSATIREKAGRWPVSLRLEITAPRQPAPRTSTVGVDVGIGNNLLIVMYPDGTVAEKVPNPRALRESLADIRKANKALARKTEGSPRWWRAKRKLARTQARAANIRSDAIHNATTHLAKTHGRVVIEDLAVRQLIRGLRSHRKSWADAAAGEMRRQLTCKAGWYGCDLRTAGRWYPSSKACSACGHINADLALADRRWACPSCGTVHDRDENAGVNLARLPASQAEAQSDGKTGLARHVAMKRVNHLRKVA

SEQ ID NO: 38704 - protein, 369 aa, unknown
  TnpB Polypeptide
MKLTAQILLDTTDEQADALRRTLRLTNACCDYMSKLAFERKVFNRFGLQKIAYREVRDTFPTLAAQVVIRAFAKVADAYAMNQKTPRTFKPLGAISYDNRILSFKPSDKTISIWSVNGRLKLPFKCGLRQFELLQGKRSAADLCLIKGQFYLFVACEVETPKPIDVHGSLGVDLGIVNIAADSDGQVYSGQDVEDNRCKFAHRRRNLQRNGSKSAKRKLKSISGRQARFQKDTNHVISKKVVQKAQDTGRSIALEELGGIRDRVTVRRSQRARHSNWSFSDLRLKIEYKALRAGVPMVLVDPRNTSRTCPKCGHVDKANRKSQSLFSCVSCGHAGPADTIAAVNISARAAVMRPMVSAQSSGQGQATPL

SEQ ID NO: 38705 - protein, 316 aa, unknown
  TnpB Polypeptide
MRKLLKSFKTEINPTEEQKAKICKTIGTCRYIYNFYLAHNKELYNKGEKFMSSNQFRVWLNNEYISKHPECFWIKEAYSKAVTQAVNNGQAAFTRFFKHQSSFPRFKKKNRSDVKMYFVKNNPKDCRCQRHRINIPSLGWVRIKEKGYIPTTKDGYVIKSGHVSIKAGRYYVSALVEIPNNKIANSSNEGIGVDLGIKDFAVVSNGKVYKNINRSARLKKLEKQLIREQRSLSRRYENLKKGESTQKANIQKQRLKVQKLHHRIDNIRTDHINKTIAEIVKTKPSYITIEDLNISGMMKNRYLSKAVASQSFMNSE

SEQ ID NO: 38706 - protein, 462 aa, unknown
  TnpB Polypeptide
LLGSIVKQKGAVMQKRKFTTITQLHEKNNLDLIRYVESSRHTYAKAVRETFYALKTSENFNKSNFNTYLQSFYGITERTANSIISDTQGRFNSLKELKQYEAKQLEHKISYLETHLIPKLVKKRNNNSKLLQSGSYALLTRQRNLRLKIVAKKNKLNRLKQKLSNLNYQLESSRLKLCFGTKKLLKQNHDKFIEQRDSQITFIGAKAETCCNQNLQLTYNRKNNQFSIKLRKDFGGYKSAKGNDRYVYGKVYFNHHKDKIISILKNKNSPLSYKIIKKDDRYYLCCTFEIQADTNNFATCSDCGTIGLDFNKGFVTLSETNQYGHLVRTQFLPYRFRSGNKTKTELQKIANHVTALACQTGKNVCIENLDFKTKRSKIETTETRQGKQYNDMIHSLAYRQFVETMESIAYRNKVTLTKVNPAWTSWLAEQLYCPTMKLNVHVGASYVIARRGQGYKDTVKSF

SEQ ID NO: 38707 - protein, 620 aa, unknown
  TnpB Polypeptide
LGRGRPPSGRTNSWEPPSLQALGHRGSTRARRVRGRSHRGSCRHLLSGEQPRPKEERRFRTSGRAGHDPLCQTRLQAGRRPGRRGLGHVGEPPSTPQAVQARQRTQDRPGGGRTQRSAFPVRRWPPRGLLRQPRRRDRVGTGDSREVLSGGACRRHPLADGIVLRSYLRATLSRKPETSEGRSRGRPVRLAYRAEIRPTPRQRQALLQHAGNARWAYNWGLRQHRDAYEQWVTEGKPKKWKGWLNAISLHRDLNVLKKASPEEGGIPWMYEASKAAPQEALRDLDRAFKNFLSGRAKYPRFKSRSRGVGGFRLTGTIKVDHRTVQLPVIGKVKFQPGERGYLPWGKHAQVSVTEKAGRWFVSVVGPEVVGAAVPNGNPPVGLDLGVARLAALSDGTVIENPRALQKGQKKIKRLQQEVSRKKRGSKNRGKARAKLARAHARVRNVRRDVLHKATTMLAKSHGKVVIEDLKVRNMTAGGGSRKRGLNRVVLDAAFGEFRRLLEYKGKLYGCEVVAVPPHYTSQRCSACGHVEKDNRTSQSEFCCLSCGHEANADLNAAINILRAASSSDLTKNACGEDVRPSVSLAIRRQTSVKQEPGISLRGESDRGPISQETVTEHRIT

SEQ ID NO: 38708 - protein, 389 aa, Azospirillum sp.
MNLVECSYRFRFYPTAQQAELLNRTFGCVRVVYNRARALRKAAWTEHKERSGFLQTNAMLTALKKDPAFAWLKEVSSVPLQQCLRHLEAAYQRFFLKRARYPQFRRKDSRQSAEFTKSGFTYRNGTLTLAKMTEPLAVIWSRALPGEPSTVTVIRELDGRWYIACRVVASIEPLSGGSTVGIDLGLTSLAVLSTGEKIANPRHLSKHQKRLTREQRRLARKQKSSRNRTKAKLKLARAHAAVRHARQDFLHKLSRRLISENQVIAVETLSIGGMLRAKRHSRAIADASWGELLRQLTYKATWYGRTLVQVDRFYPSTKTCSACGTTGHALTLADRAWVCPHCGAHHDRDHNAAQNILAAGLAVTACGGDVSPGVPRHPGQSSMKQELTP

SEQ ID NO: 38709 - protein, 258 aa, Methanonatronarchaeia sp.
  misc_feature (49)..(49): Xaa can be any naturally occurring amino acid
  misc_feature (140)..(140): Xaa can be any naturally occurring amino acid
  misc_feature (147)..(148): Xaa can be any naturally occurring amino acid
  misc_feature (160)..(160): Xaa can be any naturally occurring amino acid
  misc_feature (165)..(165): Xaa can be any naturally occurring amino acid
  misc_feature (173)..(174): Xaa can be any naturally occurring amino acid
ISRFFSIVPLYIKPVRSLHRHHIIILSTVYKLCYRDSSSPLKEGSLLPXSHVSYEVEEKTSINGIYGIDLGLRNPVVEVALSVAESCHNLQTVDFHAQSIQKIQSRYAYLRRNSTTGKKWKQSESNKVEDILHKVTTEIXDYCKENXXAVAVGDLEGIQXKDRGXEMNRKLHXXPHYKFKQLLRYKLKEKGLPLVEVDEAYTSQTCHKCGEKGSRYRGRFRCSGTEMDADYNGAWNIAKRASGKLETKSLADAGATVT

SEQ ID NO: 38710 - protein, 449 aa, unknown
  TnpB Polypeptide
MAKSVKRAYKYRFYPLPDQASELLRTFGCVRKVYNLGLEARTVAWHQRRERISYVQNSALLTQWKREQGLSYLGDVSSVPLQQALRHLQSAFVAFWEKRAGYPQFKSRKRSRATAEYTRSGFRWRDGELWLAKMDAPLDIRWSRPLPAGAEPSTATVSRDQAGRWFVSLVCESRTTPLPRRDNVVGVDAGITSLVTLSTGEKIPNPRHEARDRVRLARAQRALSRKKNGSANRDRARVKVAKIHARIADRRRDYLHKLTTRLVRENQAVVIEQLSVRNMVRNHSLARAISDAAWYDRWYPSSKTCSACGHLATALPLSVRAWVCESCDTQHDRDINAAVNIRAAGLAVRQENQQATAGIPRLRTSGRCQPNAFTSAPSSATWQAAWWPGRIWDSSGVTWWHFSIASGQRARNRQPGVGLITLGGSPRSVSAPTPSGARGSGAADSSSWV

SEQ ID NO: 38711 - protein, 408 aa, unknown
  TnpB Polypeptide
MRYNDEDGFEGDVWDADTGRLEGKYKSVLGASTAQQVIAKNSEAWRSFFEIKKAYHNASNTSVTEHPEPPGFRGNSDDGRVLKTVIRKDAYSVEWGDCSRVEIVVGERLRGRHNSPKSRLRLEIAGKPSWPEYDDQSRLELWYDETDCTFRASQPVTVSNGARDTPLASEKAALDIGANNLAACTTTTGEQYLYEGRQLFHRFRETTREIARLQSKLPEGRDSSKRIRRLYRKRTRRRDHAQEALCRDLLERLYDEGVDTVYIGGLTDVLETHWLVETNAKTHNFWAFKQFTERLACTAEEYGISVEVRSEAWTSQKCPQCGSKDRTTRHQNTLTCPCGFEGHADLTASKTFLEWQTEQAVRPMARPVRFKWDDHEWSGKSHPHESPNEQRTDPSTVHRDGNVTSGES

SEQ ID NO: 38712 - protein, 587 aa, unknown
  TnpB Polypeptide
LANSDTRTLTINTKIKSSAFTADELSFLDVYLNHYNHIKFITTSKIKKKSLDGLKIADVKSLCDKNDVLPYRIFNAGLFQQVQGQIKSQLSNKKNYLDNVQDKIKSVENRLQKQVNTIALINSMTPVMRSYAANRTRLSEAVKKKTVFLYQLERLRCREQKLEKDIANNDFKICYGSADLLSKRNRIHPNDKEKISAWRKQWNALRYGHMLFVGSTDENLGNSNANINIDKNNEFMLNITVPVALKKQFSFSKLSVPITVSYYEDELRNHILFHREGKIKYTKAQKEAAKAEGRTLVSPTSSLSIRLMRNSKGDFDIGIGLQTSHDIKPKIKTVENYGLIGVDINPDHLDIAETDEKGNYLRGWSVPLDLKDKSAKQRKTVLSQATKGIVDYALICGKSIVIEDLDFTKKKKALKDNYNKNYARMLSAFAYGKIREYFTGQCWKLGVNLLTVNPAYTSFLGNLKYRSKITTKNNEHMPAAYVIARRGQGFRERIPSSILKIKKDKAGVITAERILLRKMVLDAGAASGWSKLKHLHKTVSKRGESIDLNTGSVLSKISFLMLGSTGIPLCQELFISSRHASGNNSLI

SEQ ID NO: 38713 - protein, 442 aa, unknown
  TnpB Polypeptide
MNLYSTYSCKIKHYNHILKQTVVIYRSAVDYCIQVCLQHWDEISLEKTNNQKQQFVERMIHSTKNHTAIYNFDQKFYKFPSYLRRAVISEAIGKVSSYKSNLENWDNENPATRGRKSSLPKAGLIYPCLYRENMYEQTGEYTAKIKVYVRNTWDWIDIQLRKSDVDYITRHCSNRKQCAPTLQKRGRQWFLDFPFEESITLKNTSPYEQTILAVDLGINSSATIVVMKSDGAILGRHFLRLTKEYDSLTHAINRIKKAQQHGNRRMPRLWARVNGINDHIVTKTAIFIMDISVLYNADVIVFEHLDTSGKKRGSKKQKLHLWKSQYVQSIVTEKAHRLGMRVSHICACGTSKFAFDGSGITLRGKNANLSSYSVCKFQNSKIYNCDLNASYNIGARYYIREILKSLPVKVRLAIEAKVPQLAKRSTCTLSSLFNLNAELILS

SEQ ID NO: 38714 - protein, 612 aa, unknown
  TnpB Polypeptide
LYRRIPARSITRCDGRLAWVVSASTATTSGRASAQATTTRSASVAYPCPRAPGASPYPTVTDPRGLGGPWNPMSPTTTASLDRTSWYTPYTPGSAPLSSARTNASTAISVPCIGYPAIHGRSGSPFPCSSARASSTSNCRRHSRSLRIRFPIHSSRWDCWIHPPAVGVLRRDPSVSRRCRYRVVSKGGTRRRWSPGSVTRTDDMDPLQVRRAYKLRAYPTRPQEARAHRLLHDHCDLYNAALQERRDAWRMQQTLISYRDQSVQLKEIRANDPAGQGRHSCTAQQQTLRRLDVVFGAFYKRVKEPDQEKRRPKRRGDNESERRIGCPRFKARQRFNQVLFVAGDGAKWEPAGNGRWAHASFQALGRLKVNQHRQVVGRIKTLQVKREHRRWFVIVITETEAEPLPSTGRTAGIDVGVARFLVTSDGEIITNPRFLDGAQATISELQRRMERATRGSSKNKRIRRQLVREWRKVRNQRQDFHHKTARTLVGAYDVISLEELRIGNMTGSAKGTVDAPGTNVAQKAGLNRSILDAAWGQFTRILTAKAESAGRRVVRVDPAYTSINCHACGTQCTRPRQDTVLCPKCGAWDADLNGARNIAARAGLGSGQALAA

SEQ ID NO: 38715 - protein, 373 aa, unknown
  TnpB Polypeptide
LYNGALMERREAWHMRKTRICYAAQSAQLTEIRKADRDGQGRHSFTAQQQTLRRLDAVFTAFFDRMTTVEKAGKKNKPGYPRFKPYQRFSQVRFVNGDGAKWVPADSHRWAQARFQAVGSVKVCQHREVTGTVKALQLKREHRRWYVIVIAETEPLQLPAAGRAVGVDVGVARFLTTSDGEVITNPRFLATSADVIADLERRKARAKPGSGNRKRLRRALAREWRKIRNRRRDFHHKTARALVDSCDVIALEQLNIAGMTRSPKPKPDPGRPGAFLPNHALAKAGLNKSILDAGWRQFRSILVGKAESAGRRVIFVNPAATSIACHQCGRPCTRPRQDTVICPVHDAVDADVNAARNIFTRAGLGSGQAATAA

SEQ ID NO: 38716 - protein, 414 aa, Cellulosimicrobium sp.
VTGGDVRGAWEGDVVTLQGFKVELGPTRDQVGRLAQHAGLHRVVFNHGLAHVKAVMGQRAVEKTYGIGDAELTPAVGWSAPALEKYWRATHGRAYPWFVAEGLSSRVPKEACRALAAALSNWAASRTGQRKGRRVGFPRFRRRKNGSRFRMDADRARPVDVRHVRIPAVGMVRALEDMSWLTDRIADGRARVLGSRVEARAGRWWISFQVDVDRADIDARRVAPVHGPVVGIDLGITTFATIAADDGTVTKVANPRHLGRRLHRLRRANKALARAQPGSKNRAKAARRVAEVHLGVSDARADFLHQLTTSLTRSNSTIVVEDLSVAGMIRNRSLARHIVDAGWSEFRRQLTYKAAWYGARLVVVDRWYPSTRTCTTCGDINHDLRLADRTWTCPCGAVHDRDGTAAINLLRLAV

SEQ ID NO: 38717 - protein, 442 aa, unknown
  TnpB Polypeptide
VATSPNLRCGCPGVQAKEWAHTARLPWFYGRGCHPVRMRTAYRCRAYPDEAQQQMLARTFGCIRLVWNRTLAARHARYRVEGKGISYAESDRALTELKKDPDLAFLAEVSSVPLQQALRHQQAAFTAFFAGRARYPRFKSRDARQSASFTRSAFRMKDGRLWLAKTATPLSFVWTWPSVDVTSIDPTSLTVARDSAGRWFVTFHVDTADPVPLPALGESVGVDVGLTQFAVLSTGEKVAHPRDWERQEKRLKRYQRRLARCQRGSANRARARVKVARVHARIADARRDFLHKITTDLVRRFDVIAVEDLNVSGMVRNRSLARAISCTGWAEFRDMLDYKAQRYGRQVVAIDRWYPSSKTCSACGHLLAVLSLGTRRWTCPSCGTRHDRDINAAKNILAAGLAAGAGNGADACGGTVRRVGATRTCVPVKQEPRPAREGIPVS

SEQ ID NO: 38718 - protein, 597 aa, Scytonema sp.
MYHQESLLPDWELAPKLLKGGSKKGKSKASSPLAVKEDTTWTQLSLLDLPINQTSELSCFMPEFQAAIKKVTLQNKLSFLSLVTQKLSLSQTLEADSNKREKVFKPYWTEFSQMLSELLSLPTKIGFAALGSILSHGSVLGSKLRYWFSSKRTSAQNARWSLISLPLSTSSVVDCTDLENTKSKSLKTVTYRVYPSKELAAIWKKWVAAVRKVYNISIAYLNEHQGFEKVGNKGGKHGFRTLLKATGLIPQWCLDLNVSKILDNASMSAYKAWSETARNPQTIGKGKNKKPHPQAGLKIAKFRSIRDQKITIQFDPTAYKNGRWMVSTTKHLPKPEFKGQEFCVLTDGSTELTYNKGRWFAHFPVEYEITPQVTNKIIAIDPGVRTFATCFNGSDFLEFGSGDFNKIAKLCSHLDKLKSKHDKFQGGKFKRLRYKLRQAMERIRTRIKNLRSECHKQVGSYLARNYDVIVLPTFETSKMVVKKKRKLKNKTARAMMTWAFYQFSQILEHLCNRYGSKLVRITEEYTSKTCTKCGKVHRKLGSSKNFKCPNCGYEIPRDFNGAVGIFLKAMWDTTFADSVGDVVLDIQDVSDVGKCQG

SEQ ID NO: 38719 - protein, 548 aa, Frankia sp.
  misc_feature (185)..(185): Xaa can be any naturally occurring amino acid
MDVRHRHDRIMVRQVTVGAGGVHDLGYHVVWCPKYRRPVLTGPVRDRRDELIRQKCTEHGWGVGALEVMPDHVHLFVNAHPKHSPSYVANQLKGFTSRVLRAEFPHLRSRLSTLWSWSYFVATVGAVSADSGAPVHRHPVRASMTQGAAVRRTFKFQLRPTVKQAAAFTAMLSSHRALYNAALQXRRDAYRHPSRTTVRYGDQSAQLKEIRADDPDQARWSFSSQQATLRRLDTAMAAFFRRVKAGEKPGYPRFRGVGWFDTVTWPKDGDGCRWDSQPDHPTQTRVRLQGVGHVKVNQHRPVLGTVKTISVKREGCRWYVLLSCDDVPAAPLPVAGAVVGVDLGVVSLATTSDGRHIGNPRYLAVVAGRLARAQRKLARKKRGSARRRKAVARVAALHGTVRRQRLDLAHKTALGLVREHDLIAVEALRVGNMTRRAAPRPAPDRPGAFLPNGQAAKTGLNRSILDAGWGVFLAVLHAKAESAGRTVVEVPPANTSRTCAVCGHCHADNRRTQAVFACVACGYTAHADVNAAVNILRAGLARQAAQAA

SEQ ID NO: 38720 - protein, 117 aa, unknown
  TnpB Polypeptide
MEVGKINHVTIEHTPAGKYFAVLNVDFEPEPRQNGGGTIGIDVGIKTFYSDSNGNTVSNPRYLERSMRKLIREQHRLSRKRKDSHNREKQRIKVARVHEKVTNQRNFSRHKTNLLYV

SEQ ID NO: 38721 - protein, 447 aa, Lachnospiraceae sp.
MDNASKLSKCLYNAALFRIRQVFTGWDKKERTDNEKDIFEEIRVMQAAYPHIKVRRVLSYRALDAIMRADKNPDFFAGLPMQTSQRTLKEAVGVFKAWLSALKEYKRDPGKFTGRPRMPGYLKNDRHTFYISNQDAVLYPVYRDIDAGGTGAAGRKYDGAKLKLPLMKERLYLPHIPEGCRLKEVQVKPYYGKIMLVLVLETENLTVSVSRPNMAGLDLGTDNIAAIVSTDHASRIYKGGAVLSESRSFHKRRAEAVSIITKGTKHKHADSAHLKRLSLHHDGFMRDVMHKVSTDIIRWCVEHGVGTLVIGTNRGWKQAMDIGKANNQSFGSVPHDMLRKLIAYKAAKEGIVIVEQEESYTSKADISAMDRMPVYGKEEDRPVFSGKRTARGLYMCRKGYTINADCNGAANILQGAFPDAWEGTEDFRFPAYPETIGFRDLHRARTA

SEQ ID NO: 38722 - protein, 192 aa, Lentzea sp.
VNLATTSDADDFQGRRLGRYRRWHARVRTELQARRTKSATRRLTKRARREQRHSTQVNHKIAKQMVAVAERTGRGIALEDLSGIRDRVTVARHQRATHSSWPFHQLEAHIRYKARRAGVPVLVVDAHHTSQMCPRCKHTSRSNRPTRNTFCCRRCGLAGPADVVAAVNVRNRARSAWVHVNAPEPATAQATG

SEQ ID NO: 38723 - protein, 390 aa, unknown
  TnpB Polypeptide
MRKSYKFRIYPAKAEEAIIQDTLNTCRILYNDSLSARKDAYEERFECINYYDQADLLKVQNKESKWLAAVYSQVLQDVLKRLDKAYQNFFRRVKAGDKPGYPRFRGYDRYDSFTYPQKGYKIVDNKLVLSKIGTIKIKMHRPIPEEAKIKTCTVKREANRWFAVFTVELPDSVPEECEIRNTIGLDLGLTSLITTSTGEKIDNPRWLRTTEKKLAKSQRKLSRNKKGSKNRKKQKLEVQIVHRKIRNQRSDFLHKVSKKLVDKYDFIAMEQLTIKGMMKNRYLAKSISDVGWNQLTSLVAYKAEGAGKIMELVNPKGTSQECSRCGAVVSKTLAVRTHRCPYCRLVMDRDENAAINILNRAMAKVGMGRPEFTPVEILAGVSMKQDAYAL

SEQ ID NO: 38724 - protein, 386 aa, unknown
  TnpB Polypeptide
MPKARKRKDTQFNNKMSKCVFLYGEPTNDKAVKIKKMQAEFVKLINNYIKALNDNTKITLQLVKSDNKDSQMRAFEKSIRPEKVNASYCQNAFDMAVIHLSNRLDNIRLDMCRECKSIFTTSKVLFAMSIDGRSKTEMITAMQDIAKSAKSKKDTFFYDDCAEELKSIEDSEFEFMQQEFRVIYDMVSCEYKIPYVTRSQIPLDSRIMTIEPSENIKAPYVIAISNMLDVGGGRIVVPLNTTKHSIHKINTHKMAGMVSISMDIQKFLKVDWSYKNCVSQPKTSKIIGVDTGISDAFHTSEDKAIGSMSPVIDFYKNDVEKSFASLSDMRNKKRKISHYLRRHENLSEDVRRSLILPETLSQPGRPHGSDPDGFSHPFPCLPPFPE

SEQ ID NO: 38725 - protein, 383 aa, unknown
  TnpB Polypeptide
MFGYLERIMREDTVFKALTIEDTDSLAGLFGAVRFCYNKALYLKTHFYKVKGVNLHPIHDLKKLIAIAKNTKKYAWLAEYDCMALQESVRNLNKAYGRFFKKEAGYPRFKSRRGEQSSYHCTGVSAGDDFVKVPKMKKIKAVMHRKIEGKVKSITLSMDACGDYWASVLYEDGLPEAVPATCVRQTKTVGVDVGIETFGTCSDGEKIKSPKALKRAEKKLKKAQRAFSRKQKGSKNREKARKRLAKLHRKVKRRRSDFLHKTSRRLVNDNQALIFETLKIQGMMKNHHLAKAIADAGWGEFMRQCEYKAKHEGRIFAKIGTFYPSSKTCSACGHKLKELSLATRSWTCPHCGAHHDRDLNASLNIKQEGIRMLKAAGLTVLRS

SEQ ID NO: 38726 - protein, 394 aa, Streptomyces sp.
MTRLTRVFCVKIVAQVKLLPASAHDADALAATLRACNRAANAASEVAFTRDLKRRNVLQEAVYHRIKADFDLGAQPAVRVVKKVCDAYATLKGNIKAGNLGPEGSKRRMRAESKPIAFHEDAAQPYDDRILTWNLDVRTVSVWTVAGRIKGIPFVGSPEALKLLASRKGESDLVMRDGMFFLVATIDIPEPQPYKPDGFLGVDLGIVNIATTSDGDILAGRGLNRYRKRQRDLRAKLQKKRTKSAKRVLKRIRRREARHAANTNHIIAKRIVATAERTSRGVALEDLGGIRQRVTAKKDQRARLHSWAFAQLGAFIAYKARRAGVPVVHVDPRNTSRQCSECWHTHRTNRVDQARFVCRSCGTVLHADHNGSRNIAHRADAAWQRGAVNRPSTA

SEQ ID NO: 38727 - protein, 523 aa, Thermococcaceae sp.
  misc_feature (408)..(523): Xaa can be any naturally occurring amino acid
MKRTVTLKLQPSKGQEKILLELAQATAVIWNKINYERLKQFKEFGKIDFGTTEKEAYHTFKDWVGGSTVQQLARKNAEAWRSFFSLLKKKKNGELPDWFKPQPPKFVKEENGGKLFIIPLRNDQYKIENNTIELRRLGKFGRLKIQFKGRTHLKGKQGRLEIIYNEARHKWYAHVSYTVEEKLTSEEWVEVPRQPKGNLTAGIDLGVNNLIAVYVENGEAFLVNGRLLKSIAFYWQKRIADYQSKLNRSGAKTSRRLKRIHQKAKLQARHYINTAVRQTVERLYEMGVSKIVVGYPEGIARNSDKGRKQNFVLSHVWRFNTVIQRLKEVAEEFGISVIVVDEAFTSQTCPLCGQRHSNGRIFRGLFKCRREGVVMNADLVGAFNILKKIKTITPSLPALAGGRGNGGXXXXXXXXXXXXXXXXXXXXXXXXXXXXXXXXXXXXXXXXXXXXXXXXXXXXXXXXXXXXXXXXXXXXXXXXXXXXXXXXXXXXXXXXXXXXXXXXXXXXXXXXXXXXXXXXXXXX

SEQ ID NO: 38728 - protein, 235 aa, Clostridioides sp.
MYYGQHIKLPKLGMVKIRDKQVPQGRILNATISKEPSGRYYVSLCCTDLGIKEFCISSCGDFIENPKYLKKSLSKLAKLQRELSRKTIGSLNRNKARLKVARLQEHIANQRNDFLQKLSTKLIKENDIICIEDLQVKNMIKNHKLSRSISDVSWSEFIRQLEYKANWYGRQIVKVGKFFASSQICNKCGYKNEEVKDLNIREWICPSCNETHDRDINASINILKEGLRLITIQNK

SEQ ID NO: 38729 - protein, 168 aa, Okeania sp.
LLVIEAKLKGSQNQYKVLDEMILTSQFIRNSCLRYWIDHKDVKRNDLQKLCSQLAKDVNFPWAKKLNSQARQASADRAWQSIQRFYKNCRQNKPGKKAYPKFPSECCANKKFTRSVEYKTTGYKLSPDRKKIEFKDGFQAGVFELWTSRDLVWYSEQQISRVRVVRRE

SEQ ID NO: 38730 - protein, 226 aa, Streptomyces sp.
VRCGAAGQAGVQYRFYPTDGQAAELSRTFGCVRLVYNKALEERTRAWYGEQRRISYAQSSAALTEWKKTGELAFLGEVSCVPLQQALRHLQAAFGNFFAKRARYPRYKSLKRSRASAEYTRSAFTWRDGRLTLAKMSGPLDIRWSRPLPQGVEPSTVTVSRDAAGRWFVSLLCQDTITEGPATGAAVGVDVGITSLVTLSTGEKIANPRHEGRDRARLACAGVTSW

SEQ ID NO: 38731 - protein, 369 aa, Deinococcus sp.
MLTTYNVRVLHEATPTLAGLIADRHLCPCPGETVQGLSGTVYRPAPTLLDRGTVAALSDLEFQLGPGILAASVYTLPPEEYAGLLLGSPGFRQYDVGGLIAPLTHAMDLAEQRDWQRALASALLREARSDSTPALLPHPPARPATWLPDGTRLIHGQAGWFLCLRFDVPAQPPRLRINRSAAGIDLGLRTLAVAAYKSGLIHKAGGITEIRTDAAALSEPLARRPDLWSKARLMSVVVQHAAARGELAQFMDVVLAAATVVGYEKLTYKDMDEPVKRRFRALGLRDFLAVWLPQRLRQHGLTGQSVTPHLTSRLCNRTYLGGVRDQGQLRVTHGAAEVVLDADENAASNIRDLALAHLIQYKGQRTFTD

SEQ ID NO: 38732 - protein, 388 aa, Streptomyces sp.
VPSEYRTGGGAVVETAGKDERIRVTGAETKRVKREALGVPDRAKHQQRVAVPMQRRTPEADTRQRVFRYRCYPTPTQAEQLIKTFGACRWTYNEGLALREKAWREHRVSLGFTESCRALTGWRNAEETRWLQDVSSTVLQQALRHLDAAFGRFFKGTAKHPRRKKKSRSRDSATYVRTGFRWLEDPEQSGTGLIALAKQSGPLRIRWSRPLPSGVRPVKLTVSRDRAGRFFVSVLVEERIAPLPPLFLRDGGAPKAVGLDLGLTALVTLDDGEKVDHPRLLRKYGAKIAKLQRSLHRKKRGSKNREKARQEIARLYALISDVRRDALDQLTTRLVRENQVLVVEDLSIDSFVRSPRGRGRRRKAGLNRAILDAAWGTLLRQLRYKCSW

SEQ ID NO: 38733 - protein, 413 aa, Halorubrum sp.
MRRTNTFEVFPQSDQDEAILRRLLDASASLWNQLTYERRQQFFAGESVWEGDGYYDEYVDVLGSATTQQITRVNDAAWRSFFETVEEADHKVSPPGYWGNQNDGRDLRTYIRNDAYTIRWGERSRLEIPIGSQLKAEYGFGRSERLRVAVRGEPHWQGDQGRLHLTYDDVDETYRAHQPVTVSEAEQTTPTGTDVAALDIGANVLVACTTTAGDQYWYSGQEPFRQFRETTERIADAKAKLPEGQNTSKRIQRLYRKRSRRRDHAVNALLRDLVERLYDDGVETIYHGDLTGVLGEYWSVEANLKARTFWAHRQCLDQFANVCEEYGIEVASLSEAWTSQTCPKCGERKQTRRHRETLRCPCGFEGHADLVASRTQLEQATNTAVRPTARPVRFQWDDHQWYSVEEDAVAPNE

SEQ ID NO: 38734 - protein, 420 aa, Oscillatoriales sp.
MILTYSYRIKPNAEQEATMLHTLELLRRHWNYCLGQRLDWLQRTRCQVDRCSIVSEPIGEIPTTVNYYTQQSELKHTKVLFPDYKNIWSESQQVNLQRLNKAWERWLFPDKSGKRGGRPKFKKAGELRSFVYPRVNCLKAGAYLNNGVLKLSKIGEMPVVWHRPIPDGFILKTCTIVRKADGWYCCISMQDDTVPEPLPLEEIKSAVGVDVGLKEFLTTSEGETVPIQQTYRKTQSHLVRAQRKLARSNKGSNRSNKQKNKLARIHQRIGRIRENFHYNTAHALVKKYDLIAVEELNIKGLARTRLSKSILDAAWGRFITILEAVAVKRGVRVVKVNPHGTSQNCSNCGAKVPKTLSVRLHECHKCGLQMDRDENAALNILNRALNEVGLILSAQGGLGDTQPVKCEAFSGWGSVQLSLF

SEQ ID NO: 38735 - protein, 424 aa, unknown
  TnpB Polypeptide
MKAGFKSSDEKKRKIKETLQLTREKRKSQAVKVYALKIDESHLNIPQKLWFEKIFLEAKWFFNYAIGRDDLFSLDLKIKNVLCKNKEGNDEWRKLEFLSSQMKLGLHSRIIDSIKGLSVLKKKGHQVGRIKHTKNIDSIPLPQFKNTWNIQNGRIRIQGLKKTLPVTGLDQIPENAEFANAVLFKKASGYYIHVTAYLPKQERVKTGRDVGLDFGIKDNIVTSDGEKFNIKIPESKKLKNLQKRFSKKAKGSKQRFKVQKQVKREYEKIGNQKKDKVNKIVSHLIKEYDIIYMQDEMIKQWHSGLFGKQVQHSALGAIKARLKQLESVRTISRSFPTTKMCYNCGLINQISLTERTYKCSCGLEEDRDIKAAKTILKVGRLKFHCAERTLTPPEELTATQIESNFELSKLISMKEEACCSLDNR

SEQ ID NO: 38736 - protein, 277 aa, unknown
  TnpB Polypeptide
MEQLVEGRIVEYGKLNKIYSDTVYLRDYLKALGKVGNQTGLSPPPGMPKQLFSQIVNGAPPRLGPLPVEGDNPYLVKELGCKVSTDRGERPLGAIVDLSKGVRVYLVFEKPQTVVGVDVGLRHLVTAVAVSSGRPVKARMWGDEKLSMEFMRFLGEPQGLSRVSGLRQRVEKMFEEVVVYIASWNPKAVALENLRETTGRMGTSLRILQETLEKVMYNHGVKYRRMSPLNTSRICSNCGYRKGDLVGSLFQCPVCGYVADRDYNAALNLALKCYYTC

SEQ ID NO: 38737 - protein, 275 aa, Clostridium sp.
MDFSKWLNNEYIPNNQEMKWIKEVSSKATKQAIMNGDKAFRDFFKKSKGFPKFKKKKNQDVKAYFPKNNKTDWTIERHRVKIPTLGWVRLKEFGYIPVNSIVKSGTVSQKAHRYYVSILVEERYIKTSNSNIGIKISNSNTGMKISNTNNEGLGIDLGIKDFAVCSNGNKFKNINKTSNVKKVEKKLKREQRKLSRKYESLKIRNKNIKEGRATGQNIQKQVAKVQKLHQRLANIRTDYINKTVFSIIKQKPSYITIEDLNASINLKNAKKYKIA

SEQ ID NO: 38738 - protein, 413 aa, Cyanobacteria sp.
MATRRVTFRLYPRKSTERKLHYARKAHCELYNAALSHRKTQYKRLGVSIGYLDQQNSLPEFKAALPEYAQFGSHTLQATLKRVDFAFQRFFKGLARYPKFKPKRTYRGWAYPDAAGWQARTDGKHGHLELRDLGLNIRMRGQARTWGKPTTCTIFWNGRNWYASITVRCAPTRETGRGSVGLDFGCKTAIVPSQGEPIEAPQFQAEVEEKRLYRGLRRKRRPNKRQGIQASRRWKKQQARIRKVRRKVARQRHDWSHQVAAQIVRRNSLVATERLNVQGMTRKGKGKGKRPKARLNRSMLDVGIGMTRDRIRYKVEEAGGVYLEASTQQLKPTQRCASCWELTPKALDERTHCCQSCGHLEGRDRNAAQVMLAWARGAGRASSDAELPSATPCGSMAQLGAKKRRKPLAQRSG

SEQ ID NO: 38739 - protein, 510 aa, unknown
  TnpB Polypeptide
MQVRWNYKLQPNKAQQALMGEWLVTLRKHRNYCLGERKRGFESNNQDSEQAVMYGYGSFCDTETRDEYGSFCPLSCPVIKHGVLSSGLLKTNKPREDKKTKEIIPAKLSWGNASDVQSKRTTELRHENAYFARIYSGVLQGNLAKLDAAYTGFFKHERGFPAFRKAANFKTFQYKPGQAKLEINRASKSKRCYSHISLPGIGDMRYLDSRTIPIDAEIGTITVMKEADGWYISVLLELAEELPPCAEIETVESAVGIDVGINKLVSLSDGSFIENPKFATNKKIRRQLRIRQGRVSRKVKGSKNRRKAGIEVAKLHKKIADKREAYQWQAANKVVKTADAVVREDLNIKGMKSRCKPKKQKGRFMPNGQSAKRGLNRSISDASWGDLFSKIGWIATKAGKPVLAVNPAFTSQECSACHHVSKDNRDGEKFICVECGHIDHADTQASRTIVKRTNFEFVSTRRKNLRGDFSKVTTVRHDSAIRGKRDQGSNRTSKAMPEKRILGTQLELFG

SEQ ID NO: 38740 - protein, 209 aa, Thermosporothrix sp.
VPSSLTPKATPWLLLRISARRNNGSSGCIVGSRRRRSAVAIGAKPVKPSAKRLSRCNGSARTSPGRRRTRLSRLTILFAYEALQIRYLVKHRHLAGSIADAAWGRFLWWVRYDGTLHRIPVIGVEPAFTAQECSHCGQRVKKSLRVRTHLCPGCGLLLDRDHNAALNILHKALQGTIGQTGTDEEVSSNASGQPAATRRRTGAPRKQAG

SEQ ID NO: 38741 - protein, 439 aa, unknown
  TnpB Polypeptide
MEIVSSYKVQILDNSSIFNDTIRIYRSALSFLISVFDAEWDALHSKKAKERFNVAEHLVHGTKHNIAKYDFDARFHKMPSYLRRAVIQEALGSVSSYRSNHANWEKDGRQGKEPKLQAEHLAMPTFYNKEMYCASDDPCAAYLKLFFNNDWVWVKVRLRGTDVRYLKRYWQHCKPSAPTLEKRYGKYYLRFAFTEEVKLSETPVTNQRICAVDLGLNSDAVCSIMSADGTVLARKFINFPSEKDHLWHVLNRIRRYQREHGSQNVQSFWKYARRLNDELAKKISSAIIDFAVLYSVDCIVFEYLDFRGRKAKGSKAQRLHMWRKNGIQQYVEHKAHRCGIHISRICAWGTSKLAYDGSGEVVRDETNRALCAFQSGKRYNCDLSASYNIGARYFVRELLKPLPVTVRSDLWAKIPDAQRRTSCTLSTLRAMTAAMQEAA

SEQ ID NO: 38742 - protein, 578 aa, unknown
  TnpB Polypeptide
MAFGSKNSTPSFVLTLPFDISLNEQDYLYKEFKKCGVIYNQLVSATTKMWHQLRKTRKYRELMAAIAKATSDSDEQKTLFKQREKMLKEYRFSEDAFHKLVVPYAKHYAINSHIAQAVASDVWKAWSTFFFSKGKEVHYKRLDDLAAISGKNNFTGIVLRPANLTTSNIESAKRKAQKAVEKRYDDMYGRPDPKDDKKVVLPDEVKPQMEAEIAAAIAKVKPSVGEGSLRIVYGKHEFPVVVRNPSTQTGRYQQEALKCGVKYCRITRKWVRNKWKYYAQLVLEGYPPVKCDSNGVMKHPVNQGRVGLDIGTQTLAISGSDICDLRVLAPSARAQAKSLVNEIARTQRAMDRSRRATNPKYYNPNGTIKRLRRQHGHKQKRDWKYSKHYYRLHAKLRDLNRRMADIRKMEHNALANELLSHGNEFVVEDMNYKALQKRSKETKVNAKTGRAHTKKRFGKSLSRCAPAMFITILTNKAIRYGGHVIKVSTFETKASQFDHTDESYTKKKLSERMAHLSSGEVVQRDLYSAFLLEHINTETLEYDTEALKAAFPAFLTMHENTKRRLQEAESYLPASVGF

SEQ ID NO: 38743 - protein, 418 aa, unknown
  TnpB Polypeptide
MPKGTYYKALKARVEVVDGSINDLLWDLAVHKYALQRAIDALWELDRIPKKSQVHQMLYPMLRSYGFRAHVARNIYTTALALVKSAKENNGSKPTIRRMSARLDYQDARIDINNHIMKMILRDRWYTLKLVHRREYIKRFKGLKWKEIHLKYCNGALYVSIVFEVRYTPYTLRGDLALDTNLRHVVAYDGSSVRRYRTRFTDALSKKARAEELQKKYPKRWRYNNRILDRIRVLHRRARNIVTDWCRKFAKEIAIKAKGYGYAIVLENLEHLRENVVKNGGSVVWKLSLFAYRKLQEAIVAKTIEYNVPILFVDPGNTSSICPRCGVKLTHTHRLAVCRNCGYVADRDTVGAVNIWLRALYAYAGEPGSSPSAPAMNDETRGSGGTRDEGMKKGNQKYSKVIKSINQPKPCRTHNYNY

SEQ ID NO: 38744 - protein, 434 aa, Zestosphaera sp.
VVRVARTVVVRSVRLPKRVFKVFVELEGMYRNIVEQLVMYAVSNGVRSFTKLKALKYGGVRNLYPQLPTHYIYTACQDASTRVKSFLKLKKEGIAEKEYPEIKNITIWLDDHLWRCDGYTSINIATHKGWITIDIESHKQYWKYVNRGWVLSSEAKVKLNKRNKQLVIYLTFVKDVNKYKHRGFIPIDVNENSLAMLVNGVAYLFETNMKDVVLGYYYRRKRVQKKYDKLYGKRSRIKRKIFKKLKERYRKNDVKLKIANIIVRAAYEKQYAIVLEDLGEKPAESMIKKIKNDQLRHRIFQASFKGIQKAIEKKAKEYGIPIIYVNPKNTSKTCPIHKVKIRYNNNTRIGKCSKGGELWHRDVVACWNLLIKAYLGDGSDAPSLGRSDQNIDGRVMPLPSTAAHDPIVVKKLLWTRWKSLPQTQNATVLNKMKR

SEQ ID NO: 38745 - protein, 431 aa, Desulfurococcales sp.
VNEVARTVIVRSTPLPRKLFRVFVELEGMYRNMVEQLVLYAVRTGVISFTRLKALKYRELRSQYPQLPSHYAYTTCQDASTRAKSFLRVKKEGLAKRGYPEVNRVSIWLDDHLWRMKSLTSIEIATHKGWVVIELELHKLFWKYMNSEWRVASEAKIKLNKWERRLVIYLVFKKIVEAYRPRGFISVDVNENHAAVLVDGKAYLFKTDFRDIILGYYYRRKRIQEKYDKFYGASCRVKKKVLEGLKERERKSNLKWKLANIVVRIAVDKQYTIVLERLGKNPAKEMVNHFRDDQLRYRIYQASFKGVQRAVEEKAREHGVPVVYADPRNTSRMCPIHSSLIVYENDSRVGRCSRGGELWHRDVVACYNLLLRARLGNGSNAPSLGGLKVDGSPVPLGSTATYEPTEISRSLWARWKSLDATNKNKSMRISI

SEQ ID NO: 38746 - protein, 399 aa, Streptomyces sp.
VKATPVKRAFKYRFSPTDAQAAELLRTFGCVRKVYNMALAARTEAWTRQQRVNYNATSAMLTAWKKTEDLAYLNHVSSVPLQQCLRHLQAAFSNFFAKRARYPRFKSRRKSRASAEYTSSAFRFRDGRLYLAKMSEPLDILWSRPLPQGARPSTVTVSRDSAGRWFVSMLCEDASVKPLPPADAAVGIDAGLHHLVTLSTGEKISNPRHERRDRSRLAKAQRALSRRSRGNGTNRAKARRKVARIHAQIADRRRDALHKLTTRLVRENQTLVIEDLTVRNMVKNSSLARAISDAAWSELRTMLEYKCAWYGRNLVAVDRWFPSSRLCSDCGALQGRMPLSVRTWTCACGTTHDRDVNAAKNLLAAGLAVSVCGAGVRPQRETSRTGQSATKQKPSQREP

SEQ ID NO: 38747 - protein, 405 aa, unknown
  TnpB Polypeptide
MAVNRKMEFRLYPNATQTKALEGYCGACRWVYNRALQVRKETFEAEQRTVGFAEQCKMLTQWRKDEQSAWLAGYHTHALQLSLKRLDLAMQAFFRRVKEGGKPGFPRFKSRNRFSGFGFKEHGNGWRFEDGALRVSGIGMIRIRGKSKHMHGTPKTCEIVRRVDKWYVSITVELAELPERERKQSQRVGIDWGVETFVTVALEDGSCHQEANPRHLQQSLDAIKQVQKELSRKKRGSKRAAKTRLRLARKHQQVANRRKDFLHKLTAWQVAHYGHIAVEKLSPLAMVKPQGGSRKRGLNRSILDASAGLYHQLLRCKAEEAGSAYVEINPLIHKPSQTCHVSGRVVKKPLSQRWHELPNGQRIGRDENAARVILQLSLGWEPPQRVEDGASAQASTIRETVSRAA

SEQ ID NO: 38748 - protein, 415 aa, Okeania sp.
LYGCQQELIKNHELLPFLEYLCTTANKLINCGIYLARQWYFKLGYITGKYNLEKQLKSNFNYQFLHSQAAQQTLRAVAESFQSYKELYHKHLAGELSNKPQLPKYRKKGGLGVITYPKQALRLKENKVRVPLGKKVKAAFKVDSFLLNFPNNLDWKKIREIRIIPRNNCFYVEWVYLLEIEPHLALDKDKVLGIDHGVDNWLAGLSNLGTSFIISGKHLKSVNQWYNKQVATIKENKPQGFWSKKLANITEKRNRQMRDAVNKAAKLVVNHCLKYRIGRIVFGWNKGQKDGINIGTKNNQKFVQIPTAKLKERINQLCELNGIEFVETEESYTSQASFLDDDFLPKIGEKPDSWKPSGKRIKRGLYQTKNGLLVNADINGAANILRKVSTTLRFSLKGVSRGSLIMPLRVQFWIA

SEQ ID NO: 38749 - protein, 439 aa, unknown
  TnpB Polypeptide
VVEEAFQYRAIPEDTTTGQTAWNHIQNCREVYNHALTQEYRPAPDHDKPSYNTMQNQLPDWKQDWPQWTQVYSKCLQMAIRRIKHSETVLESLKERGFNCGRLKWKAPREYRSITYNQSGFDVDSNTGRAGHAVVNFSKIGDFHLDYHRPLPDDADITEVILKKQKPGDWTVSIVVDYDADYPDTPAIEDIDIEETVGIDLGITKFIHDSENRTFARLDETADRKRVERRHCSLSRKQYDSENWGRARQSLASAYERLRARREDYREKLAHWYTHKYDAVFLEDLDVAAMTQQKGNARNIASMSWYATLQAFERHGRKNGCHVVLVDPDGTTKQCANCGVETEKPLWVREHSCPSCGFTVDRDYNASLEVHQRGLEQLGVAFEQSELGLGQSESLSVETGVTVGRRRRDALLANTVAEAESPPREHGSPCLKERAKASE

SEQ ID NO: 38750 - protein, 449 aa, Thermococcus sp.
VKIILTYKMNHNWQIDDLLTAYQQTLQRAIDEIWSKTVWKEKKVKHYYSIGNGKRKHYETTRLIPHFPKSNEFKRKLRNELLQNWPFAKHYVDSAIKTAYSILESWRQNYLKGRRKRKKPALRRKFIRVKTTLMKINDSKIRITVKPREEYLELDYSNEWFYERIKGWKVGELIIRENDVLLTFSKEIEFSGEVKIGIDSNLMSLDVYHPKKGWIKVDLSELHRIAETYDRIIDGLKSIQRKASKRIGKLLKKYSARRKNRIEDYLNKLAVQLSREFPNAVFVFEDLNKFNMLKNGSKKFNRKLSRSTWGKIIRKLSYRVPIEFINPAHTSSTCPKCGSRLESRNGLVECPNCSFVGDRQFVGAFNIWMRGLGVALSGVEANDLLPNEPRGELRLMRPKSVVRVNLNGKVFTHKPPKNSRRTDPNPSKTKVYKTAQPSHIYENRNQKAE

SEQ ID NO: 38751 - protein, 360 aa, Thermococcus sp.
MKLTLKMKIRQLTRNKEWMLEQSIDAFRNCVNDWLSAIAQLGEKPNRGNLHTFAYKKIREKYSQLHSNVVQDAMNLAIEIYRSWLKNGGEFPEFHSDVIYFKGVDVKVENNGLVVPLMGKRVYLPLYVPKKYKKYLQYKHGRVIIKRIGRDWYAFISINVPEKEPIKPVGTIGVDLGYYNLLVASDEKGREVMRVQGDTLIKHKEHLEKLTTRRQQRLMKKFGIYAKTNHKDRRFVNDLNHKIAKELVLKARQLNRMIVLEKLKGLKRQKRSKPLRKILHRWSYADLISKITYKAKLYGVPVIFVSPRGTSKTCSNCGHYVKNFKDERVFKCPKCGFGTDRDYNASINIAKIGLQTLPPP

SEQ ID NO: 38752 - protein, 398 aa, unknown
  TnpB Polypeptide
MQRRQAFKFELRPTGEQQRHMRRFAGSCRFVFNKALALQKDRYEHGEKKLGYAGLCKLLTEWRNSTETIWLADVPVHPLQQKLKDLERAYSNFFAKRADFPRFKKKGRSAHFRYPDPKQFTLDQPNSRVFLPKLGWLRYRNSRDVLGTAKNITVSCAGGKWYASIQTEREVEQPVHPAKTIVGIDVGIARFATLSDGTVFEPVHSFKLQHARLARYQRALSRKVTFSHNWRKAKARVTKLHRTVGNIRRDYLHKASTTISHNHAMVCIEDLQVRNMSRSAAGSTEKPGRHVRAKSGLNKAILDQGWFEFRRQLDYKMAWQGGWLIAVPPQNTSRTCPCCGHVSAENRQTQARFECVECGFEEHADVVGAINVLRAGHARMACGSNRDGGRKQEPAEAA

SEQ ID NO: 38753 - protein, 178 aa, Ruminococcus sp.
VDLGINTDAVCTIMRSDGTVLGRRFIDYPSEKDRMYRTLGRIRRSQREYGSAQTQGRWAYTKRLNTELGKKIACAIVRYAEENQADVIVFEYLEMQGKIPGKKKQKLHLWRKRDIQRRCEHQAHRKEMRISRICAWNTSRLAYDGSGAVTRDWENHSLCTFQTGKRYNCDLSASYNII

SEQ ID NO: 38754 - protein, 414 aa, Lactobacillus sp.
MAKKMADLNYYYGIKMRLFPSSEQKRVIDNNINASRFAYNEMVAIDKELYSLRQVKTPIAIVQDRIAYLQRRKNNTQMLFAIHPWLAGTGVGTDVVDQARRAYQRAWRLFRQVHRSGVPVFHRKRDAGSYQLPTRYAKTGVGLTNGSNRFLDKKHVVLSGLGKIRVSGSQKRLFSQVKSIRIGTITIRRDATGRYFVSIQLGSDTPFVHAAKPVQSAVGIDLNTDNFLTDSNGTVVANPRYYRAIKGRLAKAQRILARRRLRAKKEHRSLQNAKNYQKQRVLVANLQRNVANRRNAFLHLVSTTLIKNHDLVVAEELRSKNMLRNHALAMSIADVGWRTFLSMLAYKADLYGRQFVTVNPRNTTQTCSDCGFVMAGDQKLTLADRKWTCPQCGAFHIRDHNASKNILAKGLALN

SEQ ID NO: 38755 - protein, 544 aa, unknown
  TnpB Polypeptide
MAMRTITLKLHKPGKRKREIIDEAIYNYSMAYQYLLDKAKEDIDKIQSQYRDGKGRYRSAQISKWIDKDMAKELNKFGIEPFKDSLVIDFGMTVAGYLALKEVRSKTGFPVAYISPERWIRDYDENFSELVDGAISESTFERNITKLAKKTSALKPILFCRYDTKRNYCLLYDEKKDRYYAKLYLLNAKSEKRQVIECRKDYRLRYIHKDGGELEASGRRERFILVPLSFGKWQEAFLKKALEDPTILKTARLAKRGDEYFLSLNINIEDKEPIKTENYLGISRGIKNYLNITVVNREGVILDKSSIGCTATDLKTQCFNDSKQVSTGIMSRNDLHKLANMVVQKAVDSKAQVIVESFVDKGDRLQWKGENDQVYFPALSCYMYNSLVEILDYKLTGSGLPPPVKVSPVGIFYTCPSCNFHSKDNRFSHDMLICIACGTASYIEEAGSLNLSKKLIQYKKDLLKIKVKRTSDGIEFINEDLGLKFIPSGEKDFLQEFRDEINRISESLKTGNTNSKDKSFKKRYSLIKKLEECENFSDIIELEM

SEQ ID NO: 38756 - protein, 439 aa, Paramecium sp.
MSKLKPWWSEKCQQITKIIPLNPENISFQQTKTNMFQNDVGVKKVFRTRKVKLNPTKQQKMMLMKFANDARYSYNAALSAVNDKTHKANKIELQNAFLSLKRRDGTFNQFFQKRRWLLSTPQPIRQQAIFEVAKNFKVAFSNLKNKNIDHFKMKYKSKKNQRQYGFSLGIGTHLKHKDGVLTIFPRSLGQMRYFGSLPFEGVPDAECRIQRDPYGDHWLLVPVYKTTKTQTIKPIVAIDPGVRTPFACFKSNGESKTLGEDMNVKLTDIRTRVSLIDRRISKCQDVTLKRKMSEHRRRLFRKHQRVRDAFHWDIINDITNECSGVLLPPFETQRVSRMLKNKTNCSMFGVSHYTFRMRIKGKCEEKGLLYVEPTEEYTSKTCGVCGRINYLLGSKKTFECFCGNVCDRDVHAARNILLKWLSTEAGARVVETFLASRSR

SEQ ID NO: 38757 - protein, 329 aa, Paramecium sp.
FQKRRWLLGCPQPIRQQAIFEAANNFKSAFTNLKNKNIDHFKMTYKTKKHQRKCGFSLGIGTHLKHNDGVLIILPRNLGQVRYFGSVPFEGKPDAECRIQRDPYGDHWLLVPVYKTTKTQTTKPIVAIDPGVRTPFACFGSNGGSKTLGEDMNAKLTDIRTRVSLVDRRISKCQDVSLKRKMREHRRRLFRKHQRVRDAYHWEIIKDITNEYSGVLLPPFETQRVSRMLKNKTNCSMLGISHFTFRMRMKGKCEEKGLLYTEPTEEYTSKTCGVCGQINYLLGSKKTFECFCGNVCDRDIHAARNILLKWLSTEAGARVVETFLASRSS

SEQ ID NO: 38758 - protein, 383 aa, unknown
  TnpB Polypeptide
VKTIRSVKLKFSGSSKIKSVTWNYLQAINWLSSIIYESKELNSNRIAREHYATLREKFNLTSQLSCSICKQISATYRSAKSNKRWKKAVFRKITIPLVWKRDFAKTKKNITLWSEPIIISHPWLPVKGWKDSKLKIIKDIAYLILSYEIDIPEPKSTGAVVGVDLGANRIFVARSSNNKTLFFNGGELNHLRKRIRLTRTDVQAVGTRNSRKLLQRLSGKERSVTEHMLHVASKALTQFCNDVGAKTVVFENLNGIRIKSSAKKKRRNSRDKINRWPHAKFLFLATYKLQACGITVKFINPKNTSRGCPKCGYVDEVNRHGLHFKCLSCCHRGDADFVGSVNILQKFVMVEQDSIITGSVNPLKRSGLLISDKVVHKALPGRV

SEQ ID NO: 38759 - protein, 369 aa, unknown
  TnpB Polypeptide
VKAIKIKIYPNKSQSELIEKHFGCCRFIYNWSLNKKIDHYKNTKKSLSIYQIQKEITQLKKQKNTEWLTEIDSQSLQQTTFDLDSAFSMFFKKVGKFPQFKSKKNPRKSYRIPSRFKINNTKHTIKIPKLGWVSFKDKFDFKEKYDYRQITISKNAVGNYFVSVLYDNKLKELNSKKVNAEKTLGIDVGVKTLATLSDGTKIENPKFYQLYQDELGKSQVIFSKKIRGSNNYFKQKKIVAKKYEKASNCLKDYLHKLSNKLVENQDYDSFAMEHLDIKSMDAKHVNQVGWNMLKNMMVYKCKDKGKNLLTIGKYDPSSKMCNKCGYINETLGNKRQWKCPICNTEHDRDLNAANNIKLFALVRAEPLKL

SEQ ID NO: 38760 - protein, 363 aa, unknown
  TnpB Polypeptide
MWMLKAFKYRLYPTKQQEAALNEMLETCRRLYNHSLAERRDAWEKEGRSVNYYDQANTLKERRKQDPYLARVNFSATQDVLRRLDKAFKAFFRRVKAGEKPGYPRFKGKGRYDSITFPSYGDGCKLKGNRLYVQHVGQIKIKLHREIAGRIKTVTVRRQADLWFVTFSCEVESHRLPPTGKAVGVDLGIESFAITSDGEFFESARYLRNAERNLKRLQRQVSRRKKGSNRRKKAVQQLARAHMRVACQRRDTAHKVARSLVNRYDLIAVEDLNIRGMLKNHHLAKSISDAGWNLFVTILKAKAAEAGRQVVEVDPRNTSQICSGCGEIVPKPLSQRWHSCPYCGTSLHRDVNAAVNILRRAAA

SEQ ID NO: 38761 - protein, 363 aa, unknown; identical to SEQ ID NO: 38760
  TnpB Polypeptide

SEQ ID NO: 38762 - protein, 643 aa, unknown
  TnpB Polypeptide
LQIFSPLFAKNGIFFTLFCQNFRFFLAYMGKYIYLCTVIHGDMTDNQFFDIIEKRLKNGLSILNAGDDKHREMLTLALEVHRLLPYCPLVSTRYVFRMVYMKLNNIAPDKSRTHSFFEFYQLLEVSMGSHKWPDPKIPNNKHDGVRTKLQATNSYIASALDGEKLTDEQQRIVVRSATDNAKQSIKDATESRKRQEKEAKMRKIALQAAERKQKAKIKNRGYRPSSNYEHSSLLLATDHIDLPYCVSHKIRLSLNNRQKQYLRQCFGIARKSYNWCYDEWVRRRNNGERPFANEIIQSFMSISQQAFPYMYRVTHFAKKTGIDAFDRAVSNFFAGAGFPNRKHHGLGLGSLHYDVTDRKDPILCDVNPDVPGGKPSRKRQYLLIPTFGYVKMMEKLRFRGYLSRVTIKLEADGHYYAVLNVYIDQQEWKRTHKIREDATETPIGIDMGLSSLATLSDGTKIARLAADEKLEKRKKDLQKAVSSRRDAMPNQTSKSTRRLQWRLAKINAKLRRQREDYIQKVTSRLAYTYKYISVENLNVADMLSDGRVSAKSVIRASFYKFRTLLEQKTSMAGHNLHVADKFLPSTRTCSVCGCIGDIVPLQERTFRCKECGAEIDRDVNAAINLAKLIGLDDPNQKQVGLQT

SEQ ID NO: 38763 - protein, 511 aa, unknown
  TnpB Polypeptide
MWFVKVFMGGRDMEKVRRAVAVEVENPQPELYAVEEPYRKIVEEVAVYVAERGRLEKEKYNELYRRFRKQYPLPSQLIQQDMNQGVEIGKSFLELKRDGRVHKPRPEVRQVSIRFAKDSWSYRKTVVSAAPVKIAVSLPGGRREVWIKPHRRLWLYWWKVLRKEAELASTLILKRRRNKWYAIFVFDLAPEREPPAEVVAFDVNENSVAVARVSLLSTVDAVARWNWRYVDPAVYSIKTDFGRLAKRYEAVRNAKLEELKRKYPYAGRDEEERRQNVADTREYKKFARRLRERRRKEGRVRQIASEVTKSPAVIITEELGKNPQEEMIGLEKEKVRKRELRHRVKQTPFKKLVSAVEDKAAEGGSVVFYVSSFRNSKVCPIHFAKLEDGGDWHALHCPHGHVVDRDAAAVLNMLWKATPTGWVKGVWWDVKEARKRLRKKVVPKEVVRKTNPIIPRPVAYAVWTSLMALKASPQWPAMLARAAPMTPAQGADEDGTRAPPHGAPALGEEVR

SEQ ID NO: 38764 - protein, 460 aa, Kribbellaceae sp.
MALKRYRYRAYPTGEQKQMLARTFGSCRVVFNDFIAERDRLYRAGLHREVSLTETARLVTTIAKTTPERAWLAEVSAVSLQQAAADAARAYRNFFASLTGKRRGPKMGLPSRKRRSHRQAARFTANALKIFDTERLDRSGSKWGRVRLPKIGDLKYIRSRDLPSKPTSVTMIHELDGTYWVSFVIDEPIAAQAPATRVAALDLGLIDLAAIVSVDPETGEAVREKIPNPRPLKAAARRLTRQQRSLDRKRKGSANWAKVRVRVARIHRKVRDIRADHHHKLAARLVRDHDVLVLETLALAGMGRTRLAKSIYDAGLGILIRLIKEKAENQGRTVTRIGWWEPTTQTCSVCGKPGGKKPLHIREWTCEGCSTRLDRDYNAAVNVFVAAGLAETLNACGPDVRHRLAGAVGDEAGTHRTEGRMTTWRRSPRLSGRGGGQNNPPIKPIFLAGGVRDGVSESSH

SEQ ID NO: 38765 - protein, 552 aa, Thermus sp.
MSSCLHQGTNSGQVWGKKKTAKGSRKINTPTYYVGVSAKLVFSNKDDESLVLQILRIFSAAVRFAFNRLVEGVPPKDLWSVKGPIGQKFGLDSYYIQAVLLKAQTILSSAKERGIDPRKVVFGGRRLFEDLKKNHNPKLRSERKKLWKERRQGLLYCRGNSKVGNPNLKLFVQNGILYLRINVGEGKHVKARIQTSHPNLGQLVQRALLNRYYNVELTLKDGKIYANFTWEEAAPAVFHNKRNGVLALDLNANPYHIALALLDRYGNLKHYFTIPLDELDQAPNRGAKETLLWMVAHEVTDFAAASGVAIATENLKYLRKSRRGDGSGRRFRGIQHRFAYASLLRKIHTLALKKGIQVIHVDPRDTSTIGMLKYAPQLSLSKDVAAAYVIGRRALGIEEKLPKNYQALLEDPHFLENAKAFYRERVKELKGEIEKERNEAQKLRLTREKTKAEKALVLLSPKSSHKSCGTDGRNSHSSNVSGNPWRVLRVGLFLPFLGLEVPRDLSPLKPILTSSPSSSNPLGPWERGKGRPRSSLPGSGRGDSRFIVNESA

SEQ ID NO: 38766 - protein, 356 aa, Oxalobacter sp.
MILVYRYRVKSLNGLLDRQARAVNFVWNFCNNTQKHALKWSKKWPTGFDLNVLTAGSSKELGIHSGTVNAVCEQYARSRKQFKRPFLRYRGKRALGWIPLKGRDLKREGISFRFAGNRFKVFYSRPLPEGKIKDGTNFAQDAKGNWYLNIAIEVAEVDQRPVSNAVGIDLGLKEFAVLSTGEKIENPRCFRTLEKKLAAVQRARKKRQMTNIHAKIANARRDFLHKLSNRLIRKFDYIAVGNVNSKRLARTRMAKSVNDTAWSSFRNMLRYKAIAHGAWYEEVDEKYSSQVCSQCGAMPPQRPRGIADLGVRQWICGNCGYVHDRDVNAALNILARSGHRTPVEGIHQLWLGEDVN

SEQ ID NO: 38767 - protein, 205 aa, unknown
  TnpB Polypeptide
VSVLVETEHSPLVKTNGQIGLDLGIKDLCITSDGKKYENPKTIKKYEKKLTKLQRQLANKTKGSRNYHKKRRQIALCYEKITNTRKDYLHKISSEIINENQVIVSENLQIKNMVKNHNLAKSISDVSWYELTRQLEYKSKWNGRNYIKIDTFYASSRLCFSCGYKNTNVKDLKVRDWICPFCNTKHDRDINAVKNILAEGLRQVV

SEQ ID NO: 38768 - protein, 368 aa, Pyramidobacter sp.
MFKAYKYRIYPDNQQRIQLAKTFGCVRFVYNQALAYRKTTYKTEQKSLSKTDCNNWCNRELKPQYDWLREVDKFAFTNAIYNMDTAYQKFFKEGAGYPRFKSKHSSRQAYTASMTNGNIAVDFEGSTVKLPKLRHVKTKLHRQFTGNIKNATVSQDADGKYYVSLLIETERQELAHTDKSVGLDSGLTDLCVTSDGNKYENPRTLRKYEKKLARLQRSLVHKNKGSRNREKARKKVAVCHAKIRNMRRKHLHQISAELIRENQVIVSENLQIKNMEQNRHLAKTIADASWYELTRQLEYKAQWNGRQYQKVDAFYASSQICSQCGHQNPETKDLSIRQWTCPMCGAQHHRDHNAAKNILAEGLRLLAS

SEQ ID NO: 38769 - protein, 447 aa, unknown
  TnpB Polypeptide
MCKVEVIRGNHYLISKKTPEAKILEKETDLFIDLFKALKQPYWNYLKQLPLATAPFARHGEIILFTDQDVIKGVDGKDYPLKELDDGKKKLKDSQLKDMFTPILNQAAGKELPNSWKATLIYYISRLIKSRKRNFKRGQKLGDWIKEPDSHCPKHEAHTIHSPKSMFKFNKEGELLFCLSDQDSSTRRLDYLSIPKANYEGKTPIEKFYGKSAGGNLVKNIKKRGKHHRFTMQHKRYVHFDYIPEDFVGFDINRSPENWLTFADLKDDKIWVIELKGEAAELVERRRLLNRDVDNNNRERMKSSQRKPLRYELKKVLPKRQKKLIRKIFIPILTNLKKEKKGLAIDGCAAGGRSGSFLQDTINKTLPLLCEDMGVPYEVVDPRGTSQTCSACDETVTRKKSGKSKDHNVFRCTTEGCTNHKNPIIAHHNEAINIAKWGKKSFMNRIE

SEQ ID NO: 38770 - protein, 398 aa, Streptomyces sp.
MATRVKRAFKYRFYPTDAQAAELSRTFGCVRKVYNMALAARTEAWARGERVNYNQTSAMLTAWKKTEELAYLNEVSSVPLQQALRHLQAAFANFFAKRAKYPRFKVKKKSRASAEYTSSAFRFRDGSLTLAKMADPLNIVWSRPLPEGASPSTVTVSRDCAGRWFVSLLCEDASVKPLAATDTALGIDVGLDHLLTLSTGEKIANPRHERRDRERLAKAQRELSRKARGDGANRRKARQKVAEIHARITDRRRDVLHKLTTRLVRENQTLVIEDLTVRAMVKNRSLARAISDAAWSQFRSMLEYKAHWYGREVVAVDRFFPSSKLCSHCGTLQPEMPLSVRTWTCDSCGTAHDRDVNAAKNLLAAGLAVSVCGAGVRPQRRTPGGQSAVKQKTPRREP

SEQ ID NO: 38771 - protein, 382 aa, unknown
  TnpB Polypeptide
MLTYKFRLYPTKVQERRLEDTLETCRRLYNQMLDDRIKNHTGFFEQKKKLVELKKEDKYLKEVYSQVLQDIVLRLDKVFQSYFAGLSKFPRFKRRGRYNSFTYPQHVIGFRLIGNNRIKLGMIGRIKAKIHRAIEGEIKAATIIKDVDQWFVALNVEEPMQRMHHGNDRAVGVDLGITNAIALSDGTLIEGPKFLRKAEEKIKELQRTLSRKKKRSKRREKARILLSKAWRKVRRQRDDFAHKISGSLAEEYGTIVFENLNIRGMVKNHFLASAIMDSCWYKLRQFTVYKAERCGGRVVFVNPAGTSQKCSGCGEMVQKPLFERVHSCRKCGLITDRDVNAARNILALGLEQALTETEPLLVHRRISKFGRGSEKPTSFRRG

SEQ ID NO: 38772 - protein, 394 aa, Microbispora sp.
VRQSFKFLLRPTSKQAASLAACLEDHRQLYNAALEHRRTAYRRAGVTVRYGDQSGELKHIRADDPAGQGRWSFSSQQATLRRLDKAFAAFFKRVREGHVPGFPRFKGRGWFDTVEWPKDGDGCRWDSQPEHPTATFVRLQGIGHVRVHQHRSVRGRVKTISVKREASRWYVVLSCDDVPAQPLASTGAAVGVDMGVVSLVTTSDGERLANPRHLQASAHRLAVLQRDLARTKRGSRRRRKAVARVAALHAKVRRQRLDGAHKAALTLVRSYDVIMHEDLRIAIMTRSASGTIDNPGRKVAQKSGLNRSILDAGWGVFLRVLAHKAESAGRELIAVNPANTSRTCARCGHCARDNRLTQAEFACTSCGHTAHADMNAAINILRAGLALRDAAEAA

SEQ ID NO: 38773 - protein, 391 aa, Parachlamydiaceae sp.
MVQRTVVFPIFPDARQAEALAKTAQLYKEAQQHCIDVAWEMENLSAINLHKKVYAPLKAKLGLKSQYLCSARNRAVENVKAAKKLSKKGRTVSKPELKSVQIRLDARTLSFDKPRKIASIATQHGRIKIPLVWHKHARRYSDWDCKAGEIGINRKGKWVLRLIFEKEIVKPARNGKIIGVDRGIKRAVVSSDNRFIGEREWKEHERKILSCMSKLQSAGTPSAKRHLKKSAGRLKRFKGNCDHIVAKELLSGLQPGDTIVLEQLTNIRKRCGEKGQVRKKQRAHMGRWSFKRVENAINYGAESRGIYVEYVDPHYTSQTCSQCNIVLKANRKSQSLYSCSCGLTLNADLNAARNISDKWCIANGYAPGLPVNQPIVANSKIQLQAFDFSRE

SEQ ID NO: 38774 - protein, 460 aa, Paraburkholderia sp.
VKTPRISSRISFVNTPRRYLVTKTKCTCIKNMQWRPFRISLSVVIDQIMIVSMERLQAFKFELMPTAGQVRKMRQFAGACRFVYNKALALQKENHAAGGKFIGKFAMKKCFTEWRNSAATPWLADAPRHPVDEAILDLDRAFQNFFAKRADFPQFKRKGKSSDSFRYPDPKQIKLDRENGRISLPKLGYIRYRNSRMVLGEVRSATVSHRAGKCYVSILTKREVAQPVPHGPAVGIDVGVARLATMSDGKFIAPLASFKKHEQRLAKYQRRMSRKVKGSSNWKKAKARVQRIHARIADARKDFLHKASNTISKNHAMIAVEDLQVRNMSKSASGTADAPGRNVRAKSGLNKSILDQGWFEFRRQLEYKTAWRGGFFVAVPAANTSRTCPCCGHMSADNRRTQALFACVRCGHEANSDHVGAINVLERGQRLLACGETVQSGRSKKQEPAEAAQAIAAWVQ

SEQ ID NO: 38775 - protein, 376 aa, unknown
  TnpB Polypeptide
MSSDTSSQKAIRNYMFRIYPNKEQDRKLTSWLETCRRIYNAALAHRKEAWDREKRSVTRVEQQVWLKEAKKENSFFQEVHSQVAQEVLFRVERAFVAFFRRVKNGEVPGYPRFKGKGRYKSITFTQFGDGLGASFSNGKLRLSKIGLVKIEPHREIPGSIKIVTVKHEASGRWYAVFAVETELNRPESHPGPAVGLDVGLEKFATLSDGSIVENPRYLRKTENRLKHAQRNLSRKQKGSRNRDKARYKVALLHAKIHNQRRDFLHKVSRRLVNTYSVIAVENLNVKGMVRNHHLAKSISDAGWSEFLAMLCYKAEEAGSRVVRVNPSGTSQECSGCSTGVPKELSVRIHRCPSCGIVVDRDVNAARNILKKALKAA

SEQ ID NO: 38776 - protein, 454 aa, unknown
  TnpB Polypeptide
MSEWLNMLRSSYNWSLADRIAQYNHQFIQGDYCDIRTRAEACPITCFVTKNGASGEPWKDSKTDKKGILRNPRRTAGDIQITVLPELKKARPWFGRIDSTVLQQNVKRLDTAYKNFFEGRGFPKFKNRSNFTSFTYQMGIKVQGSKIYLPKLGWMRFHNSRTIPNGFTIKACTVRKRQDGWYVSIRIEDKSLPDYISKPLADVKSILGCDLGITKLVHLSDRYQIENPRFSTNKKAKRTLKIRQRRVSRKIKGSNNRKKSAKRLGRLHKKIADRRFSYQWQTANKIVSRKVDAIAVENLNISGMLRRCKVKVDEPALFAQRLPFLRNAARTEKTGFPSQATGGEKTGRFLKNGQSRKKGLNRSISDAGWSDLILKIEYLAVKQGKVVIKVNPKHSSQECRSCGHIDKSNRDGEKFICTQCGYHEHADIGAAKTIRDRGLEMVRGDSAKLAGISS

SEQ ID NO: 38777 - protein, 391 aa, Symploca sp.
VLVLEYKAVVKPNQVKAIDEAIRTSQFVRNKVLRYWMDNHGIGKKELYQYNTQLRAQFWFVKHLNSHACQASVENVERAIHRFFDNCKKKKPGKKGYPRFKKNCRSVEYKQSGWKLHSSKRRLNFIDKKGIGEVKLLGKWDIHTYPVELIKRVRIIRRADGYYVQFCLKADSQQNAPFTTSEVGIDVGLEYFYSDSNGNHEENPRYLRKAEKDIKRVQRKIYKKKKGSSGRRKARSVYARKHLKVTRQRNEHAKRLARNLCLANAKVVLEDLNISGLVRNHKLAKSISDASWYNFRQWLEYFGDKFGREIIAVAPHYTSQECSNCGIKVQKSLSTRTHSCPHCGYIEQRDVNAAIVILSRATTEGHSGSNANGDVSSTSVGRKTCRGKKRR

SEQ ID NO: 38778 - protein, 409 aa, Mycobacterium sp.
MAHRYRMYPTAAQARFMLERHCSDARFVWNLAVEQFSYGVRGRRGPGPAARQKQLAQARHAFDWLAGGSSSVQQQALRDFDRAVGAYFTGTHRRPSWRRKHLDEGFCVRDSRVQGVNRKWAQVLVPKLGLVKFRLSRPLPPGKLGMARVTCKAGRWHVAFPAPQPAVSARPGRADRQVGIDRGVKTTLALSDGIMLRAPIMRRREQHKLARLQRQLSRCRKGSGRRGKVKARIARLHAGVADRRRDWIEKTTTRIAGSYGVVAVEKLVIGNMVRTPQPKPDPEVPGHYLPNGKAAKAGLNRGIYANCWGLIAQRLDHKTSASGTTVVEVSAAYSSLQCRQCGHTASGNRKSQAEFQCVKCGHHDHADIQAANTILARATRLALTSGPEATPEPSGVLAQARRPEAAHAA

SEQ ID NO: 38779 - protein, 374 aa, unknown
  TnpB Polypeptide
MECSYKFRIYPNNEQQAMIARTFGSSRFVYNYFLSLRKNTYETTGETIGFVKSSAMLTQLKKELTWLKEVDSIPLQEALRDLDLAYQHFFRRVKQGEKPGYPHFKSKRDKRKSYKTKQHISNGKPTIWVASYHVRLPKLGLVKCRISKEVKGRILSATVSQNSSGKYFVSLCCTDVETDTLPNTGAAVGIDLGLKAFAVASDGTEYPNHKYLAKSQKKLARLQRQLSRKSKGSKRREKARIRAARLHEHIANQRQDMLHKLSTELVRQNDIICIEDLAPKNMMQNHKLARSISDASWGEFRRQLEYKAKWYGKVVVNVDRFFPSSQLCSRCGAQWSGIKDLAVREWICPVCGAVHDRDHNAAKNILNEGLRLLA

SEQ ID NO: 38780 - protein, 355 aa, Oxalobacteraceae sp.
MVLVYRYRVKSLIGLLNKQSRACNFVWNFCNDRQKDALRFGRRWHTGFDLNKLTQGSSKELGLHSGTINAVCEQYAKSRAQKKRPFLRYRGKKNLGWVPLKGRELKREGDAFRFAGNTFRVFNSRPLPEGKIKDGTNFSCDSRGNWFLNIVIEVDATAANARAPVRRVGIDLGLKDFATLSTGEKIRAQRIYRGMEQALAVAQRARKKRRVRAIHAKIANCRNDFQHKLSSRLVREFDYIALGNVSAAGLAKTSMAKSALDAGWSSFRNKLAYKAVKHGAWFVEVNERFTSQTCSNCEKQFQIRAPRRGPKGIAGLGVREWQCSDCGCVHDRDLNAALNILRRGRATLDVGIPVL

SEQ ID NO: 38781 - protein, 226 aa, Oxalobacteraceae sp.
VKSLIGLLNKQSRACNFVWNFCNDRQKDALRFGRRWHTGFDLNKLTQGSSKELGLHSGTINAVCEQYAKSRAQKKRPFLRYRGKKNLGWVPLKGRELKREGDAFRFAGNTFRVFNSRPLPEGKIKDGTNFSRDSRGNWFLNIAIEVDATAANARAPVRGVGIDLGLKDFATLSTGEKIEAQRIYRGMEQALAAAQRAHKKRRVRAIHAKIANCRGVYWILCKRVFV

SEQ ID NO: 38782 - protein, 416 aa, Actinomadura sp.
MLTGRKYRAYLDVWQADYAEQIGAVCRAVWNTALEQRRSYRRRGAFIGYRNQARELAEAKVEHPWLRTVPAHCLQQTLMDLDRACRTYSPWKVNWRARVGRHFWSPSFRFPDGKRIRVKRIGRKWGLAKLPKMGWIRFRWSRPLGGTIRSATLKRDGSQWHISFLVETGEPERSVSLERGRVGIDRGIVQAVATSDGRFFDRAFLTPGERQRLLRLERQCHRCRPGSRRREAVKAKIRTIRRRERDRRADFCGQTAATVVRGNALVVLEALNTRGMTASAKGTMEQPGTNVAAKSALNRKILDKGWRMFELACRNKARHAGTAVLTVNPAYTSQTCPNSGCGHVHPDNRKSQAKFVCTACGHHEHADTVGAKNVLARGHSGHRAWRPRDAPVCEAPTSGNPQGITAPGPRPRNPRL

SEQ ID NO: 38783 - protein, 293 aa, Bacillus sp.
VDSLALANAQMNLNKAYANFFRDKSAGFPKFKSKKDNHRSYTTNNQKGTVYIEGGYIKLPKIKTLVKIKQHRQFFGLIKSTTVSQTPTGKYFVSVLVEENEQLFPKVDIKVGIDVGLKDFAILSNGKKYENPKWLRKAERRLAFLQRSLSRKKKGSNNRNKARLQVARLHEKIANQRNDFLHKISNEITNENQVIVIEDLKVKKMQKNHKLTKAISEVSWAKFRVYLDYKAIWKGRDLIIAPKNYASSQLCSCCGFKNKEVKNLNLREWTCPECNSHHDRDVNASINLLKLAM

SEQ ID NO: 38784 - protein, 506 aa, Lactobacillus sp.
MVVKYRRRVINDEISEYLKHRFVIVGQSYGINLQKWNHDQDHVHVLFRATPHTEMAKFLNAYKSSSSRIVKKQFPEIKQYLWKSAFWTQSYCLISTGGALLEVVKRYIESQGEKIMVLKAVKMRIYPNSAQRDQLWQTFGCVRFVWNQMLNMQIERRKNNPEAKFVNAFGMNNLLKQLKVEYPWLKQAESTALQSANRNLADAFQRFFKGQNKFPRFKSRKYSQSYNSKYVNGNIRILDRHHIKLPKLGVVYFRAGRLPLGKIKNVTVRLNVAGQYYITVLVESENQTLPKTGKYIGGDLGLKSLLNLSDGYKEPLNHFESKYSKKLHHWEKLRSRRYLIAQQAIAWDHHNKVLKPCQLDDFKNYQKARIMVAKYRQKIANQRLDQLQKFTTILVKKYDIIVLERLNTKGMMKNHHLARAIANASWSKLVDILQYKCEWYGKKLIQINPSYTSQICANCGESNHRLGLSKAEWLGIREWDCPNCGKHLDRDINAAQVILQKGLAIQ

SEQ ID NO: 38785 - protein, 193 aa, Lactobacillus sp.
MGKIKNVTVRLNVAGQYYITVLVESENQTLPKTSKYIGGDLGLKSLLNLSDGCKEPINHFEDKYHKKLYRWEKLRSRRFLKAQQEIAWDHHNKVLVPRQLDDFKNYQKARIMVAKYRQKIANQRLDQLQKFTTKLVKKYDIIVLEKLNTKGMMKNHHLARAIANASWSKLVDMLQYKCKSTTSLCWKNLILRE

SEQ ID NO: 38786 - protein, 364 aa, Nocardia sp.
VKRAYKFRFYPSPAQRAELTRTFGCVRLVWNKALDARTRAWAAGGRSTTYVQASAALTEWKRSDGLAFLNEVSSVPLQQPLRHQQAAFAAFFAKRARYPRFKSRKKSTASAEYTRSAFRWRDGQLTLAKMTEPLDIRWSQPLPDRAMPSTVTVSHDAAGRWFVSILVEETIAPLPMVEATVGVDVGLSSLAVLSTGEKIANPRYERRDRRKLARAQRDLSRKQDGSNNRKKARRRVARAYARITDRRTDFLHKLSTRLIRENQAVAIEDLSVRNMITNHTLARAISDASWRQLRSMLEYKAGWYGRELLVVDRWYPSTKVCSACGVLTDRLPLQVRLWTCRCGAGHDRDVNAARNILAAGLAER

SEQ ID NO: 38787 - protein, 154 aa, Pseudoalteromonas sp.
MVRKVTLSVKIQAKVNFEGMGAKPLKAMQKFNGSMVADNVMALITQLSKYKAELEGKLYHEIGRFEKSTGICAECGQHHVLTLNDRYFTCTACETNQNRDLSAAKSIAKTGELDLIAAGIVARVAPTSQQKAANKMKVFELSKFAVGSEKKEAA

SEQ ID NO: 38788 - protein, 417 aa, unknown
  TnpB Polypeptide
MNRTIIVQLNPTPEQAQSLKATLEHYSACFNAVAQEGFSTACSNGVELHKRTYYPLRAQFPDLPAQLVCSARLKATEAIKSALTWKIKKEKAYASKVEKARKEGKPIPVFKPVRCPHSELVCIRYDQRSYRVKWQTLSCSLATVNGRVEMPFKVPPHLMQYVGYNVCSADLCLRQGRFTLHIVVSFPEPVVPPSQDVIGVDLGLNRPAVTSNRQFLGKKRWKEQEHCLFRLQRKLQAKGTRSAKKHLKKLNKKRFRQRRDHDHVLSKRIVSTSPAGATIVLENLTNIRETSRMGRGKKNKNVSNKRRLHSWSFAQLYSFVQYKAQARGIAVVKIDPRHTSQTCSRCSYQHRSNRRSQSVFHCRSCGYQLNADLNAAYNIREKYLTFLAQDGRPALSGPTCQAASRVGSSGPDASPRL

SEQ ID NO: 38789 - protein, 316 aa, Methylobacterium sp.
VKEVIITRRRHGNSWRWAASFICTQQADRAVPEPTGAKRIAIDVGWRRVPDGLRVATVVISGQSPSFIVLPASMLESFSLIDELRSRLQASNRLGIEMLQSANLGSFAQPFQDLLRDFQSISEKRPVDLAKFCESDFFLLQARENVGMDLWAWRKGHKRLTEWLRNHHRKTVGHRNHFYQNKIIEALDQASEVIVNDVKVGEIAARRTSRSESPFVPNRVGHYRRIAAPSELIRALKLQAEKRKIAFNKLEAESPVRCPTCGSLSRKTRADALPQVCANCDSSFDQDVVACESLLSPAPTARTTRSVKARSAAATT

SEQ ID NO: 38790 - protein, 412 aa, Cyanobacteria sp.
MINQEVMQVFTLTYEFKLKPTSAQIAIFEEWLEQCRRVYNYGLAERKDWFKSRSCQVNACSIQSEYIIPADTKRPNYASQCKGLTEARAKIPALNAVQVHVLQQTLKRLEQAFVSMWEQGHGFPRFKKVGAMRSFVFPQMGVNPIQNSAVKLPKIGWVKFRQSRSIPDGAILKQVRIVRRASGWFAMLAWQWDVEVPDVMPHGEAIGVDVGISHFVAVSNGKLFPNPRPFKKLERKLRLLHHRVSRKVKGSNNRRLAQVKVSKLHERIANTRKNYYWLLAHNLCDWVGMIFVEDLNLKGLARGFLGKHCLDAGWGQFFQILEQCCRKRGVFFLKVDSKKTSQICPNCLVETGKKKLFERIHSCEHCGYTTDRDVAAAQIVCIRGLAAVGHTVKMLSEGKAVALPVTKESSPL

SEQ ID NO: 38791 - protein, 466 aa, unknown
  TnpB Polypeptide
MIIGMKSRIGYAHPECNSGKVGALNELHGVYREDIQKYVNEMVKAKRHHIKPSAYKTFFSGSVMSSHLKKCAKAQAVNMVDGWVRSLYSRLKYRIYEQPFTDQQRMELRCVGKYMLTKAGKFGKGTISQEMVDLYWSWVWDKDIAGNTPVVSDNFPMWLSEACVVFRGAKKANSLGGWWVAVYCLRNGKRVQIPLSNNPFLKSTDVFAKSVLICKRNGRWTFQFVDKTPDVVFAKTSKKLGVDVGLNVLAATSDGELFGQRVKPVFDKRYRQLQELRANRFRQNLKEDSKRLGCLERSITGFVKTEVGSVANQLVKRHPDTTFVIEDLDLRGCKGQKRFAYRLLQKSLVGKAPTEEANPAYSSQECPSCHYISRSNRDGVEFHCRCCGRISHADVIGGKNLLGRSGDKQIIPSLHYRQVGTILRERFRRSRTSSSGRRKKRLTVSPDAYCDASGRIASNAVMEVTS

SEQ ID NO: 38792 - protein, 395 aa, unknown
  TnpB Polypeptide
MEKAYSYRFYPTPEQESLLRRTLGCVRLVYNKALHERTQAWYEKQERVGYAQTSSMLTDWKKQEELNFLNEVSCVPLQQGLRHLQTAFTNFFAGRTKYPNFQKKHQGGSAEFTKSAFKFKDKQIYLAKCTEPLPIRWSRQIPESCEPSTVTVRLHPSGRWHISIRFDDPTIKPLPVTDKAIGIDLGISSLVITSNGDKVSNPKHFKKHYRRLRRASKNLSRKQKGSKNREKARIKVARIHAQITDSRKDHLHKLTTQLVRENQTIVVENLAVKNMVKNPKLSQAISDVSWGEITRQLAYKCRWYGRNYIEIDRWFPSSKRCSNCGYIAEKMPLNVREWDCPDCGTHHDRDINASKNILAAGLAVSVCRATIRPEQSKSVKAGAKNPSGKKQKPKS

SEQ ID NO: 38793 - protein, 328 aa, Kouleothrix sp.
LACCATDKAAEAVRAVRAAPERRDKQTDQLIPKTCPAFDADSSIRYDARTYRLMSLDRVSLNTLTGRVIGQLALGDFQRRYLYDTSWKIGGAELLRRDNVWYLCITQSKAAPDPDEPTGYLGVDLGLVNVAADSDGEVYSGAQIQTVRERRFKHRRRLQLANTRRARWRLRRNARREHRFQKAVNHRISKALVQKAHATRKAIALEDLSRIRERVTVQREQRRVRHSWAFRQLRTFINYKARLASVYVVHIDARNTSSTCAMCGYCDKRNRPDQARFRCLQCGHTAAADTNAAVNIARVAAVNQPIVSLLSQSIERADTSPGAKALGC

SEQ ID NO: 38794 - protein, 496 aa, unknown
  TnpB Polypeptide
VTETYGDQLILIDLPPFETEVLKFICQRSNSLYNQAIYFVRRNHEMTHPGLLPNMPYSLLCSELKDQWNYSMLCAQAAQQTLKSVQEAFDSYKGLMAAWKTCGLEVKPRVPKYRQRGGLFPVTYPAAACTFYLDKSEVRIPLGNGVKDDSGLAELFIPCPYGVRREQIKEVQILPRNGTFYAVYVYKSQSFTADVDFNIVLGIDHGLSNWLTCVSTDGKSFIIDGRQVKSLNQHYNKRVATLKEGKAQGFWSDELAAITEKRNRQMRDAINKAARFIINRCLASRIGTVIFGWNQGNKDGIDIGKKNNQEFVQVPTAKLKDRIAQLCKQYGLRFVETEESYTSKASFLDDDFLPTFGEKSERWKPSGKRGQRQKGVRHNLGRGGYQTADGSRINSDCNGAVNIIRKVATQLGIGLSLASLGQFWLCHNGIILILYLDHIVRNTKRHGLSLPRSNFLESSVLQPEEKSTLRCPRTGASLWAPLFCVNWGGNAWRPNP

SEQ ID NO: 38795 - protein, 439 aa, unknown
  TnpB Polypeptide
MKILKAYRFRLKTNPEIEDKFGRQSGCTRFVWNKALSLNKERLEHKIPLIWYNDMAGFLQLWKQSEEYEFPKEAHSQVLQQSLKDLEKAFKDFLNHDKGFPKFKKKDMYNSFRYPQGFKIEGNRIFLPKIGWVGFFKSRDIRGIPKNVTIKKENSHWYVSIQTEEEIPEQAHPKIGSIIGIDVGIVHFASISDGTLNEQFIDFPSPLQKYEKKLAHLQRKLSRKKKFSKNWIKQKNRISKIHEDISNIRKDYLHKASTAIAKNHGIVGVEDLKIKNMTKSARGTIEDPGHNVRAKSGLNRAILDQGWGMFKEMLEYKLNYSGGMLVSVSAKYTSLTCPVCGNVSKENRESQVVFACKSCGFMHNADWVGAENVRKKTLKELGLVENTSNYPDVVGHTVEACGGKGHKPPCEAGTSRKEQSSTALLESLTSEVREDVNKL

SEQ ID NO: 38796 - protein, 400 aa, Streptomyces sp.
VSCDTNVKRAYRYRFYPTDAQVAELSRTFGCVRKVYNMALAARTEAWARQERVNYNQTSALLTQWKKTEELAYLNEVSSVPLQQALRHLQAAFTNFFGKRAKYPRFKSRKSSRKSAEYTTSAFRFRDGKLTLAKVTEPLDIVWSRPLPESAKPSRVTVSQDPAGRWFVSLLVEDPFVQPLPGNENAVGIGVGLGHLLTLSTGEKIANARHERRDRRRLSLAQRRLAKKARGDGANRAKARRRVAKIHARITDRRCDHLQKLTTRLVRENQTLVSEDLTVRNMVKNRGLARAISDAAWTKFRSTLEHKAQWYGREVIAVDRFFPSSKLCSHCGTLAGKLPLNVRTWTCDCGMVHDRDVNAAKNLLAAGPAVSVWGAGVRPQRESSRMGQSAMKQKPLRREP

SEQ ID NO: 38797 - protein, 369 aa, Sphingopyxis sp.
MILTYRYRLLPTRAQHGRLRAALEHSRQLYNAALEERIDCYRKTGKGRTYFDQTAALTQLRQDGTPYTWGMESAPLKALDLAYKAFFKRGGFPRFKGRDWFKTIAFADAKGWAIDGGKFRAKGIGKIRLHMHRTLPGKPKIARIKREGRHWYVSLVVEVECAAANDRPPVGIDAGLNTLAALSTGEMIDNARPYLRAMRKLRVKQRALARCKRGSKRRGKVKSALAAAHLKIRRTRDTHLHQVSASIANRFGMIAVEALNVKGLAASNLARSVNDASWTKLFNFLRYKAERAGGRFVEVDPRYTSQTCPECGAIEPKALSQREHRCPCGCVEDRDVAAAKVVLLRAVVQDRGEANVAGCGERIPGKVAA

SEQ ID NO: 38798 - protein, 413 aa, unknown
  TnpB Polypeptide
MATYSLELKLNTKKASDCRYLENYFREVAKISNTVRRFAMRRIERLKRDKKYRELLTQYIKLDKGEEKDAVSKKLSAVVWSYGLTKFHLQKTALDLRKNLRYVHSTVYQKICDHVWRGVEKVLYADGKRLHFKKWDDFLSFEGKSNTTGIIYQNEKVYINCTPKRPKGGIILSVKLPNNKDSDHWNYETRCLCDPTKYCRIVRKKFSSGWHYYVQLIQEGIPPQKHARGIGRIGIDIGASTVATVSETACHLDVLGDSVETKEKEIRRLQRKMDRSRRATNPQNYKEDGTIKKGKKRWTYSHHYQKMRDQLKAMRRKRAAVLKQWQEIYANRLLEEGDEVYVEDMSFKGLQKRKKKTEKKKNGRFKSKKRFGKSIGNHAPAQFLSIVKRKLDQTGANTMRSIPESSKPVSMTM

SEQ ID NO: 38799 - protein, 416 aa, Halorubrum sp.
MEYSHRYYAYPTQEVAAELDYHIDIHRQAYNYTLYEYDNVDADNIGSAYKHHSRLPDWKDEFPVFSEVNSKALQRTVTRFYHNLDGLSEQKQNGRKVGKLTWKSPREFQSITYSQSGFELKNTSGRRATLWLSKIGDIKLRYHREIPDEAAIKEVTVKKETTGDWFVSFGLETDEADLPEKPDVDSLNTDNSVGVDLGILNYIHTSDGTTVDWIDLEDEYERLCREQRKLSRKEHGSNNYENQRQAVAKVKRHIRQKVLDYQHKLTTWLVTEYDAVFVEDLNVAQMLQGDGNARNKQAAAWRQFITLLEYKGELYGTHVVQVEARGTTKECATCGVETAKPIWIREHSCPSCGFECDRDANAAMNVLQRGFAELGLGWPESTPVETALPTDTTRVSAKRVVETGSPTLNEATPVAE

SEQ ID NO: 38800 - protein, 456 aa, Mycobacterium sp.
MVGFAVELEQAHGFTADAAQSFAWSLRQSWVREHLPAQETQNLGARAFDAVRLWHVGRKGKPRFKPAKRGLRSLAAKDGNGALRPKTDEAGRLVGLQWGAGFVIPIAAPALSGRRGKEQRAELAEIKALIAAGKVLSTRIVRTLINGRATYRMQVVCDGRPTRRYPVGDGQVSFDLGPSQIAVAVARADGSWSGWVEPLADAIRLDTLRLRRTQRHLDRQHRAGSPDCFDGDGSHKWVRCGWRRSAAAQHTVMRVAELHRRLAEHRKTLHGCLANRLIARGTDIACERLGYVAWQKNFPRSVRDRAPGLLVEMLRRKAESAGGPQLYEYNPPATALSQTCLCGAKKKKPLSQRVHRCGCGIREDRDLFSAYLGLHVRTEADGVDRLDLQAARQGWLHRQDVDESPKSSRSALARKRHPPSRRSVARIKARRKAKTMMRQSRSARTSTIDQPTAIAA

SEQ ID NO: 38801 - protein, 439 aa, unknown
  TnpB Polypeptide
LKSNQYKIDNTLRDKLAQEKLYPTNAYLENLANAKDMPVLPKRKTFILDFSVSDKQMFRVGKNSNAYEIKIYNKKEIKENNLKTGWISFDMYLPTYIREGFTGKTAKPQFYWDCNKNEFVCAIPCEIKKLPHEYENIMGVDLGQIKAYSATVLREDGSISDEYVPTEELQNLVNKLKRMNQHIKSVYEKRKRSSKYGNFTNRQARRKLDYKRSRNKRTKLQFAIARLVAVEVVNIAIKEQCKEIHLENLSWIKNSSGKWNFAQVQACIEEVAELFSIKVVKVSAYNSSKTNPVTLEIGKISNRDVIFKNGQKVDRDQLAGLNLALREPKKVKQRKIKTLNVRNSVVIQRQSRRFNNYLMKKSVMPEIKSKRKIHKEYLRAKQVSSKPDLIKKENKKIVMFSHDKAKSDFAIVSVYKSSNIKLKYYFTNNLQFKHIYSDL

SEQ ID NO: 38802 - protein, 394 aa, unknown
  TnpB Polypeptide
MIRKRFFYQKRGIMMVMLKAYRYELRPTEEQAQQMAQIFGNVRFVYNWALGVKTTEYQQTGKSPSCFELMRKLTQLKQEHEWLSLAPVHSLQKSITRLDASFTSFFAKKSRYPRFKSRKDMKQSFQIPDKHSIGVDFDGWTVTIPKLHKVSFNRDRRFEGEVRQATVSRTATGRHYISILVEDGKQTPQKKTCTENNTVGIDVGLKDFAVVSDGTRIPNPKHLEHQLQRLRVEQRSLKRKTGEKNREKQKMVVARIHEKIANQRRDFLHKLSTAIAKQHVGVCMEDLNVQGMMQNRRLARHIGQSGWYMFKSFLKYKLDWNGGSLLEIGRFEPSSKTCHKCGWIKRDLVLSDREWDCEKCGAHHDRDLNAALNIKLFGLRTQPFGVNRPVSACC

SEQ ID NO: 38803 - protein, 378 aa, unknown
  TnpB Polypeptide
MQLSETIKLYMTKEQKALVIETMNQYINTVNSLVSVATNGTSISKYTTTDVNANLPSALTNQCIRDAKSIINKYNKDFRKVFAKNKKLAKQKSSFTIKEPTVPILKKPCCYVNNQNFKIKNNHIEFPVLINGKSKRISIRTSITDNQKLMFADAKLGTMRIVYKGNKIVAQIVYEVAEPEYINNGNIMGIDLGIKCPAVSYTSDGSIKFYGNGRKNKYMRRHYKYLRKKLGKAKKPDAIKRIKNKEQRIMKDIDHKISHNIVKTAVAHNVKIIKLEHLANIRSTTRTSRKNNHSLHTWSFYRLAKYIEYKAKLAGIKVEYVNPAYTSQTCPKCGHVHHANDRNYTCKCGFHIHRDLLGAINICNSTEYVGDNNIRHTA

SEQ ID NO: 38804 - protein, 383 aa, unknown
  TnpB Polypeptide
MNKGFKYRIYPTKTQQKQIKIMFNGKRFIWNYFLALNKERLKNNERIYTFYQMSSLLTQLKKEQEWLKQCEKSILQNTLKNLYKAFQDYFKKAKGFPKFKSYKNNHHSVKMNITHNNIEILEKNTQYTSTCKYKKQNCKIKLPKIKKVKIAYSRQYEGRILSATISQVPSGKYFVSLCCTDVENNKFNKTDNTIGIDLGIKEFAIFNTGEKINNPKYYKKYEQKLKKNQRKLSSKQKGSKNKNKQRIKVARIHKKIYNTRLDFLHKLSTRLVKENDIICIEDLKVNKMLHDKKNKKLHKSISDASFYEFKRQLQYKILWNDKILSIINQYFPSSKLCSDCGFKYDDLTLDIREWQCKNCGSIHDRDVNAAINILNEGLRLLVS

SEQ ID NO: 38805 - protein, 404 aa, unknown
  TnpB Polypeptide
MQRLQAFKYELMPDGGQQRDMRRFAGSCRFVFNKALAMQKERHEQGEKKLGYAGLCKLLTEWRNSAETPWLKDAPTHPLQQTLKDLERAYANFFAKRADFPRFKKKGQSDSFRYPDPKQIKLDQGNSRIFLPKLGWLRYRNSRSTLGAVKNVTVSQSGGKWYVSIQTEREVEQPLPQGGAVGIDMGIARFATLSDGTFYAPLNSFKRQETALRKAQQAMSRKTKFSNNWKKARARVQKIHSRIGNARRDYLHKCSTAISQNHAMVCIEDLQVRNMSKSAKGSAAQPGKQVQAKSGLNKSILDQGWFEFRRQLDYKLAWNSGHLVAVPPQNTSRTCPCCGHVSAENRQTQVRFACVECGFEENADLVGAINVLRAGHARLACEVSGAAMPPAAGTHRSDLFRLDA

SEQ ID NO: 38806 - protein, 416 aa, Anabaena sp.
MLKVVKVRLYPDAQQQQSLAQAFGSCRWLWNYCLNLMNQTYKETGKGLSGYEVKKLIPQLKKEHDWLALTYSQCLQQVCLNLGVAFNNFFEKRAKYPNFKSKYNKQSIQYPQNVKIADGYLTFPKIGDVSAIIHRPIEGKVKTVTISKNCSNQYFAAILLDDGKDKPVGSMDGKAIGIDLGITHFAITSDGSKFDNPRILNRHERNLKLKQQQLSRKQKGSNNRIKSRKKVARVHRKITNCREDFLHKLSRRIVNENQVIVVENLNIKGMMQNHCLAKSIHQVGWGMFCTMLKYKAEIEGKIYQEVDRFFPSSKTCHLCLNQVGSLSLDVRFWTCENCYTKHDRDVNAAINLRDEGLRILTRQSPQVGKPAHGAGSSGTGDKACRPDVSRSNRGRKKSTTTLYVGQEAYTVLEESV

SEQ ID NO: 38807 - protein, 179 aa, Anabaena sp.
VHSFEYGLLLNNTPQVSRILPPSKVKGSSNRERARKNLVLKHEDVCNRRRDWFWKLAHKLTDKFDVLCFETLNLKGMQRLWGRKISDLAFGEFLQILEWVARKKNKQLVYIDKWYPSSKTCSHCGHILEKLDLSVRKWRCPSCNSVNGRDENATINIQMVGVSTIGLGDVRLATPAIAV

SEQ ID NO: 38808 - protein, 379 aa, unknown
  TnpB Polypeptide
MLRAIKVRLYPNKTQEQTLQKVLGSYRFVYNHMLARKQETYNSDKTNLGLNELSKYFHHELLKDEQYQWLTEQNTKVVRQAIRQMLTAYDKFFKEHKGFPKFKSKKDKQSALFPIGAISKKNTFDTRKITLTKKLKSISFRCSDLYLSRLQKYKDNIRSATLSKTKSGNYFLSILVDINDNELVKFNKTSRDVGIDLGVKDFVITSDGEVFDNKHFYKKDEKRIAKLQRQLSKKRKGSSNFHKQCKRIARVFETITHKKENYIHSVVNYLLRKYDTIYMEDLNISGMLKNHKLAKAIQEVCFYKFKTTLQNKALQNDKKVVLIGRYYPSSKTCSKCGYINNELTLNDRHWQCPNCGTSHDRDYNAALNILYEGRRISVA

SEQ ID NO: 38809 - protein, 375 aa, unknown
  TnpB Polypeptide
MKITRGVKSNYRKFLTKKKQKQLDLIMEEYSRIVNAYIGRFQKMVPRESKMELLKAKNIHTIKSWLSNRMMKSAMLEAYGMIKSAKSNAKKRKQNYIRPRHRGKNMLLSENNITININPKIKKFDLIITLKSIGKKGTKIKINILLKRHINFNNYNEWKLAKSIIIHKDTIQFTFTKNIKKKDSGKAIGIDFGINKFMATSKRETFGEGYKELLIKLLRKKAYSKAWYRCKEEIKEHIDKTIKEFPFYKYGLIVVEKLDKVHHKMKLKRSLSKNMRRLVSKWTYRYIYDKLFMECNKNCVRYLQVPSYRNSITCPQCNHTNKKNRQSQEFFSCQKCGFSDNADYTSANIALRRGLTGAYGPSLKNFTPVYSYGVV

SEQ ID NO: 38810 - protein, 519 aa, unknown
  TnpB Polypeptide
MRYAYQRLLEGKKRKNLKKDLPKVFNINTRYSDDAMLLAQSTIASCREIGQNPKKVIFGTRKVFEQLKKNHLTGKKRRQLKKKWKESRQGNLYSRGDKSKQGNLNLRFEWISNELYLRINTGDRQYVYAKVIRDVKREKDKWIEFTFMLENAYRYKAWFPYSVNLKIKNGNVYAFISIEEKYPPITIKRNNGIIGIDVNAYSFHLALAFTSKDGNLEKYQRINLNELLESNSEKRQYLEWQIAHEIIEIAKEENKAIAIENLEKLPKGKRGDGFPKLRRKLQKWSYKRLLEKIEVLAKRNGIELIKVNPAYTSVIGKLKYTPQYNIDKDIAGAFVIARRVLGFIEKLPKNYKELLNDSDFLSYTIARIEDNIKETKQKLKKEKNEYKRKKLENKLNKLRKNLKKIQKHLESGKSETASQQPVNQRKEQVRGLPTGKHKSWQVLSIALAFCCLEKSYRDFSPLKRVIISKDWIAVANRLVPIPGIGTMASPKYRLSGLEMPELAEYKYPDPNCVSFIQFG

SEQ ID NO: 38811 - protein, 434 aa, unknown
  TnpB Polypeptide
MLEAVRVALDPTPRQERLLESHAGAARFAYNNGLAHVRDMLERGDKPEWSYYGLRRWWNRAKAVLAVDETTGEPWWPENSKEAYNSGLESLADALRNFSRSRKGQRKGRRMGFPRFKSKDRAVPGFAYTTGSFGLIDCDPHALRLPRIGRVHCMEDVSRRVDGARVLRMSVSKRGGRWQASLTVERADLPVPSPPKGGSVGIDLGVKELATLSDGTVIHNPHALKSNLRRLKKAQRSLSRKRKGSNRRRKARAQVARLYARVANLRSDALNKTTTMLAHAYADIGIEDLNVAGLVKNHGLAQSIQDAAFAEFRRQLEYKTARTGARLHVIDRWYPSSKTCSRCGTVKAKLSLSERVYRCDGCGLVIDRDLNAAVNIQVAGSAPETLNAHGGDGRRNDASRRATQTPVKCEPSSHASGVRLGADDRKTVLQTKTN

SEQ ID NO: 38812 - protein, 580 aa, Nonomuraea sp.
  misc_feature (106)..(165): Xaa can be any naturally occurring amino acid
  misc_feature (330)..(415): Xaa can be any naturally occurring amino acid
  misc_feature (489)..(577): Xaa can be any naturally occurring amino acid
MVQLRYNFRLYPAAGQRQALARAFGCARTVFNDGLRARQEARENGLRYISDGDLAKQVITQAKKTLERAWLGEVSAVVLQQALADLNLACRNFFASITGKRKGPKXXXXXXXXXXXXXXXXXXXXXXXXXXXXXXXXXXXXXXXXXXXXXXXXXXXXXXXXXXXXGKRKGPKVAPPRFRSRKDNRQAVRFTRNARFAITPGGKLRLPKIGDMPMRSSRDLPAEPSSVTVIKDAAGRYFASFVVETAGEPLPEVAPEVGIDLGLTHFAVTSDGRKIANPRILRRAAKKLRKAQQALSRKEKGSANRAKARLKVAKAHAQVAGTRRDFAHKXXXXXXXXXXXXXXXXXXXXXXXXXXXXXXXXXXXXXXXXXXXXXXXXXXXXXXXXXXXXXXXXXXXXXXXXXXXXXXXXXXXXXXVYVEELAVKGMARTKLAKSVHDAGWSQFVNMLEYKAKRYGRTFAKIDRFFPSSKLCSACGALQEEMPLNIRSWXXXXXXXXXXXXXXXXXXXXXXXXXXXXXXXXXXXXXXXXXXXXXXXXXXXXXXXXXXXXXXXXXXXXXXXXXXXXXXXXXXXXXXXXXRCR

SEQ ID NO: 38813 - protein, 292 aa, unknown
  TnpB Polypeptide
MKRCSTRAKRSEERSWLAEPFRTMLQQSVRDLSQAFKNWWKGKGRVRSPRFKSRRNRQSMGVCGREFYPTDRGVRFPKIGELKLRWSRPLPSPPTSVTIVRECSGKYYASFVVEAEEAKLPWTPHEVGIDLGLESLAVTSGGEKIAPPKFLRSALRQIGRLQQSLSRKVKGSGSRQKARLLVARAQEKVAHQRLDFLHKLGTQYIRENQTVVLEDLNVAGLSRNRRLAKNIADSGWRMFRTLLEYKASRYGREVVVVSRWEPTSQRCSSCGHLDGKKPLYPLLDLLGLRRRA

SEQ ID NO: 38814 - protein, 306 aa, Lactobacillus sp.
MIKTQVVKLKVNKTMQKHLDALCDYRRYCWNKGLETWQLMYEAYTLNKQDNPSPNERRVRDELVAHKADWQYDLSARCLQLAVKDLANAWKNFFDKSQSDWGIPSFKSKKAPRQGFKTDRAKIVNGKLRLDRPRSISKESWFDLKSYEALKMDEVKVVSIFKEKGSYYAALPYEEDMPAKAKTHQKTAVDVNVGHFNYTEGQINVLPAKLQKLYRRIKHYQRMLARKREVNGKLATKSNNYFAVRAKLQRDYRKVANIQNDLLQKFTTKLIDNYDQIVIEDLAVKEMMMTHVASKGMQRSLFSKFR

SEQ ID NO: 38815 - protein, 467 aa, unknown
  TnpB Polypeptide
MSKENIVLKLRLEADELSANLVDGQSRICNWLYNHLLEKGQQLKQEFVQSSNKEAAKTLYTKRGLRNLLPKVKAEHSFLKVVHSSPLKNTALRLSGAIQTHQKSKKGLRRGKQVGWPKFRSWKKSWFSLFYDEPGKGFKAQDKTLILSLGMGQDRKQRSITLGLPESNLLKNKTIRNLRIVSELGVYYAIFTIQKELPLRKPISKILALDPNHKNFSYGVDSHGKAIEIAAPKWLKIYDKRIDELKSQRDRCNKKSKKINVLDEKGQPTGKDFYLPSKQWEKYQHALKNALRKRREQTKTFTYTCAHRLYRDYDCIAIGDYTPSGEGITTQMRRAMNNRSLIGRFKQTLSWVARKSGKTFFEFDEKGTTRTCNHCLHVVEQGIPLYIRQWQCPQCQTRHIRDENAAINGLRKVLRDLPTKTEGEIPSQVSGSDLALAQERWAWCVLPSGVIITPRGQSSEIFATLGN

SEQ ID NO: 38816 - protein, 574 aa, unknown
  TnpB Polypeptide
VSHRGKKLRVIQEPFVVAAPSGARIRTRLFVTDEESAVLRQVGEHLGSLVGKDLAVRCADGNSDAQVKAYSRRFRKQELTAASSSRWAGAITRTSEDSYQLRMRNLKAEVQSLHTRVKVITERLTRPAGSQDGSGRPGYADQAERFAKQQRLQVLSARLAACETTLGSGRLSVCRGGWRLAHSRHHLDDADLTAEQWQEQWRAQRLFLCADGEADKAWGNETIRWNPNQQTLQIKLPAPLAHLANGKFGRLALSAPVDFPHRRAEISAQAATGAVRYDITYNAIKHRWYLDASWKTDPAAPLTLDEVRYGPVVSVDVNLGHLAVAALTPDGQPITVPFTITLELDGLPATTRDARLRETISQILRFAAEHRCGAVVIENLDFERARIEGRELQGNRPSRGRKVRRSVAGIPTGQFRDRLVQMAYNAGVTVVAVDPAYTTRWGAEHWLPTLRAQFDNKLSGHHAAAVVIGRRGLDQRAKRKGERVTGPHQRMKRATPEGVARVGELRNPFDGPSRAVAPGLITTTARQGKRNREDSRRPSSDGSKTERPNRRTLSEQAQDRLGPTTTANFLLRRV

SEQ ID NO: 38817 - protein, 437 aa, unknown
  TnpB Polypeptide
VKVYQAYRFALDPSPAQERALRSHAGAARFAWNWGLARCKERYEAEGRWYSGVDLHKLWNAEKKADPALAWWRENSKCAYQDAFRDLDRALRDYTASKKGDRKGRRLGFPRFKKRGRCKEAFRFGSGVMRCRGATVTLPRLGTIRTHESTRKLARRVERGTARILSATVSRTAQRWFVSFTVEVERAVPRRHARPGSAIGIDLGVKTLLTGVDDAGTVVTVDGPKALRSSLRRLRRAGRACSRTEKGSANRRKAAARLARLHARVARVRADALHKATSGLARRYETVGAEDLNVAGMVRNRSLARAISDAGFGQARRMLAYKTTWNGGALVTAGRFYPSSKTCSGCGAVKAKLALSERTYACTACGLVMDRDVNAARNLLKLAASGAESQNACGGTVRPGLAGHVPVKQEPGTAPAGKTGTAGGQPLAAGQEPTHAH

SEQ ID NO: 38818 - protein, 393 aa, Atopobium sp.
MERAYEYRIYPSADQCALIERTFGCCRWVYNRCLETKREQYEKTGKSPTVYQLQKLVTAWKGEEAPWLSEVDSHALQQAVVNLGRAFDGFFRRCKTGGKPGYPRFKSKRDSRQSYRTNWGIAVPDAGHIRLPKLGTVKARVSRMPEGRVVNATVKRTPTGKYFVTVCCTGCPAPDMPEGPVEVMGIDAGIRCLMARSDGKAVASPRSLAKSEKRLAREQRRLSRKRKGSNRRSKQRVRVARVHEKIANQRKDAIHKATTSAVRESQAIAVEDLNVAGMEKSRHLAKAVSDASMSEMARQLEYKCAWYGRAFVKVGRFYPSSKTCSCCGYVNKNVVLGVEEWTCPACGARHDRDLNAAKNIAAEGARLLAEGNGTAGLAGTGGARVPRTLVEQA

SEQ ID NO: 38819 - protein, 330 aa, Chromatium sp.
MLLAHKIELRPTPEQMVYLDKACGSKRHCYNQLLAHFSKPENKWSKNEAYQHYINVLRKEFAWYNEVSSRVTCNAIDDLDNAFKHFFRHVKAKRKAGFPRFKKKDIKDSFALRESAKFDVNGRELRIEKLKTKIELRQPLRFQGIAKQVTISKHAGKYFASILTETEDYNPHDVDRQQSVGVDFGIKALAVLSTGKVFSTNQKLKASLRQLAKLQRNLAKKVKGSNRRAKAKLKIQKLHFRIARQRQALLHEVSDDLTKTFDVIAVEDLNVKGMVKNRNLSRAISDAGFGYLRQMIEYKAQLRNCVVVVANRFFPSSKTCSCCGKIKAEL

SEQ ID NO: 38820 - protein, 441 aa, Roseburia sp.
MQMYTTYRVKIKQYNNIFKETVAIYRHAVDYLITVCLENWEPVSALTGRNRFAYVEHLVHATKNNPCPAYDFDAKFYKMPSYLRRGAINEAIGKVFSYKSNLADWKKNPVGRKPSYPKAGYVYPSMYRTVMYNQTGDYTAQIKVYTRNTWDWITVDLRRSDMDYIAKYCRDRKQCAPTLQKRGKEWFLDFPFEERCTLNNTSVHNQTIVAVDLGINTATTVSVMQSDGTILGRHFCKLPKETDHLTHSVNRIKKAQQHGNYKTPRLWAKAKGINHDISVKTAEFIMETAVSYNADVIVFEHLDKTGRIRGSKKQRIKLWRSQEVQSIVTNKAHRMGIRVSYICAWGTSSLAYDGSGKVSRGRDGGFDTYELCRFQNGKIYNCDLSASYNIGARYFIREILKSVDENSRLRIEAKVPQCCKRSTCTFSTLISLNAELVSVAA

SEQ ID NO: 38821 - protein, 468 aa, Streptomyces sp.
VKVTRIAYSQRLNQSKYAQLDEQALLLGRVRALVWRRYGSVTGLGISDRTIRDQWMADGTAAGFGVLANAWKETVRDAVADIKACREAAKVPVRQAIHRHYTTEEERKQAYTALKRDTWTPDPYLSRMMRRHWRRGVSRTTNQIVVRSDQYRTFTLAEGGSIWLAAPGLKQRQMVTIPLNTTVAPTGTLRLILRGGRVEVHYTIDAPDLRETRPCGTVKVGVDKGYTEALTDSDGNHHGTELGELLRAESDFLKVKNARRAKIRSVAEKAREKGDLAKADRITANNLGIAKRNRRRNRFESRVRTVTFTAVHAVVDKAAHVVAEDLTRSFPSRKKLGKNTNRRLAAWTKGVTAEALTNVSERRGSALTLVNAAYTSQVAPCCRILGKRSGDRLHCTRCGDVWQADHAGAINVLERDGDPDISLHTPHTRVKQLIQERTDRHRTRLPVQDSSTPVRRANYPIRAEMLNK

SEQ ID NO: 38822 - protein, 313 aa, unknown
  TnpB Polypeptide
VTDNPVVQFSGDYTIGVDVGITDYATVVVREVATGRIVYETTLSQRVHSLWNSVQASEQQVRFLKKKSDNLLPHRQARMSALDEAQLHREAASRKKRELAILASQEIAYLSHVWGNAVVAVEDLSWVANTMQNGRWNRGELVRWLTHYVTQNGGWVVAVNSSNTSQLCHKCGAKVTHPTHKDSVCPEHGTMDRDINAAVNIASRAVPLVTKARVTRAKNRKIGPQAALRTPVARNSLKHPGRDRTKNKPTPKRKNHRLISKGVILPSCPARAQAVCLVAMVLADQVARSALGTVQAALKQGNKTYEYRLCSLI

SEQ ID NO: 38823 - protein, 328 aa, unknown
  TnpB Polypeptide
MFKHFSKRYKPILLNGHTIREILERLDIAYQRFFKHDAKRPPKFKKASEFCSFVFTDCGYSLSGNELAINKIKKSFKFFLSRSYDGKVKRVSVKRNKLGEYFIILCLDKEARPYGKSHDGASVGIDFGLKKYLTLSDGREIDNPQFLKADLQELRRRSRNFSKCKKGSNNRKRKKLELERLYRNIVNKRSDFQWKLAHELCKRYDLICLEDLNLEGMIKRWGRKMSDLAHGDFVVKLEHVAKKYGVQVHKIDRFFPSSRLCTCGYKNDKLSLSDRIWTCPSCGAVHPRDLFAAENILRQGIAELGSGSKSPKHSQGRSHVSHPTIPCK

SEQ ID NO: 38824 - protein, 403 aa, Roseofilum sp.
VKSFKTSLNLNKKQRTLMAKHAGVARHAYNWGLAICLEAKEKGEKRPSANTLHKRLVAEVKSQYEWYYEVSKCAPQQALRDLDSAFKNFFTVKGRGFPRFKKKGRHDSFYLEGNIQIRGNQIRLPRIGWVKTYEKPLPPILVKSNSNVTISRQANKWLISYKVDVEPEKIDHSKGVVGVDLGVRTLATLSNGVIFPAVHAYRSAKRKLASLSRSVSRKVKGSNNHKKAIKRLAKAHYRVACIRKDATHKLTSYLAKNHSEVVIEDLNVSGMLKNHRLAQAIADGGFYEFRRQLEYKCQWYGSFLTVVDRFFPSSKTCSDCGEIKKDLKLKERMFICPSCSFFLDRDLNAAINLSKACPERSRRAGSSPVSACGVSDKRNAMAKWTQRSRKKTSDYVQLSLGLS

SEQ ID NO: 38825 - protein, 383 aa, unknown
  TnpB Polypeptide
MITYKYKLYRTKQTKHIDAMLRETCWIWNHALALHKRYYKIYHKHIDVTRLKKKWPKWYGISDRIGAQTMQEVLDRLEISWQLFFKRIQRRPPKFKKAEKFTTFVFTQWGYSLNGNVFTIHKINKRFKFSLSRPYEGVGKIKRVSVCRTPAGDYYIILFIDNEVKPIGKTHNGASVGIDFGLRTYMTLSDGKRIQSPLFLKHAMREKKRRDRRMSRCKEGSNHHHQATTAKARLEERITNKRDDWQWKIAHQLCREYDNICIEDLELEGMKKLWGRKMEDLAHGNFVKKLEYLACRYGVNVLKVDRFFPSSRLCECGHIYKHLTLNDREWVCPVCGRHHDRDLHAANNILRQGIASLGSPRKTRKSTSVVSALGRKHPRIPRQ

SEQ ID NO: 38826 - protein, 400 aa, unknown
  TnpB Polypeptide
MLVNQAYRYELKPNNIQKTILAKHAGTARFAWNWALAQRTKPQNRAAINQHRDWNVWKRKNAPWWVEISKCVPQESFRDLDKAFSNFFKIRKDNSFRARTAKAKPRKDGEPYGYPKFKKKGVHDSFMLTGTIHVLDNTIQLPRLGKIRTKENTAKFKGRILSATVNKEADRWFVSLSVEVEREIPVWNDNEVVGIDLGIKSFAVVYDGNNTEYIYAPKPLDKNLKKLQRASKKHSRKQRGSNNKLKSTIRLARLHRLIRNQRNDFLHKTTTTLAKTKSVIVIEDLNIKGMVQNHCLAKSISDVGWGDFRRMLEHKTTWYGSKLAVIGRFVPSSKTCSECGAVNNNLTLSNRTWVCMNCSAVHKRDENAAKCIRHAGLEILVPRVPREFTPVEIPLTAEQR

SEQ ID NO: 38827 - protein, 544 aa, Streptomyces sp.
VGGLREISAPFVVPGPSGVAVRDRLKRLSVVDERALRLVGDHLGSLAARDLKARCEAGLEHDSDQWAERKRLLTAESSSRWAGSLTKATHDQWGLARRAQLAHVRGLEAGVRSIAHRLSLPVGAKGSKRAPGGYRSRQEWFAKSRRLRVLEYRLRSARGDWRAGVVRGGKRLLNSRHHLDAAGLTEEQWRERWRAARRFLSADGESGKRFGNETIRVAPDGEVSIKLPVPLAYLANASHGRYVLTARVAFAHRDEQWRDHVTANRAVAYRIHEDTARGRWYLTASWTRSVATVLPLTAARSYGLIGVDMNADHLAAWRLDAHGNPVGAPRTFAYDLSGTAFHRDAQVRHALIRLVHWAERHGLAIAVEDLDFSAEPTREKHGRQKRFRRLISGMPTSRLRARLVGMAADHGIPLIAVDPAYTSRWGAQHWQKPLTSTHRTPTRHHAASVAIGRRALGHPIRRRTAPPRHHQSDDGGHRTVQAGPGTPGRAEPRPRVPGPRIRSVRAGRGAKAGDQRAQHRSGHTAEHETWQQDFLPLSLQERSD

SEQ ID NO: 38828 - protein, 381 aa, Actinomadura sp.
MPRPSGRGRNPDSVRSVPAKPGHSRTPGTPEEIFRTTARQPHEHVNSQSVRTAYRCRAYPDPEQAAMLGRTFGCVRLVWNKTLAERTHAHRTEGKHTSYKETDAALTEWKKTEDLAFLSEVSSVPLQQALRHQHTAFANFFAGRAKYPRFKSRTGRQSAHYTRSAFRMREGELRLAKTTAPLEFVWSFDDVDVAGLEPTMVVVSREPDGRWYLTFGVDTCDPDPAPPVGYAIGIDVGIKDFAVTSDGRRIPNPKHLERKQRNLARYQRRMARKQPGSANRRKAKTKVARAHRKVRDARQDFLHRTSTNLVRDADTIVIEDLAVANMVKNRNLARAISDCGWGEFRRMLEYKAERAGRTLIVIDRWFPSSKTCSHCGHAWSI

SEQ ID NO: 38829 - protein, 410 aa, unknown
  TnpB Polypeptide
LVNIRKYTKIVSINFSFSFFLYIYNKKEGIVITYNTELVPTNPDDMNLIMSIMEEYRFVVNEASKLQFSDLKNLSALKALHNAFYHPTRDSRPDFPSQMVIKAEQESLATYKTIRSNKHNIAKPFEKKNLSLRLDKRLYSHVKGEPTKIKITTKERKKEFSIVLYPKLEELMSQHQFVDPMIFVRDGKLMISLTFDNSVELEKPSVALGVDLGIRRVAALSDGRLIIDKKFNKEKRRLRYLKRQLQSKGTKSARKKSKKLKRKERNKNKNQTHLVANEILKTSANVIALENLKGIKAKKHKFQKKNAVSQVPFFELRRVLTYKAKNMGKHVCLVSPAYTSQIDSVSGIREGERRGVRFYAKSGLVYDADINAAINIARRSKHPVSQGNLLDGQGIVNRPIACQPKTTIKV

SEQ ID NO: 38830 - protein, 608 aa, unknown
  TnpB Polypeptide
MAKLKSNEQFIKECTEVHGNKYDYSETFYTGAHNVITIICPIHGSFQQKAYSHVQGCGCLECAGIKKLTTKEFIEKSQKVHGDKFDYSEVDYQGNKLKVKIKCKKCGHIFEQQAQSHMKGFGCPFCSNNNKSTTKEFIEKASKVHGDKFDYSEVNYQGNKVKVKIKCKKCGHIFQQTPNSHLNGIGCPKCGNKELVTTEDFIQKARKVHGTLYDYSQVCRSPKFSFFFLKKYLSFNFTLLDKNVNKVIRSSSHTLKYANRDKIDLYWKIIKDYKELLQSYLHKIHDGELPLKQNLSSKFCPQLNDISNSRWRALCYREASQIYRSQVTLLKKKRIKKITESVIKSHSINLNYMLWDIEEDKTKEFDCFIKIFSPYFQETKHRAILLKLPINHHRVSLRFKNNGWKLKNSFMLSDNFSLKLFWEKEEAEKKKNKLSAGVDCGYKKLLACSDGKVYGKELEDIYEKISRKKQRSKAFKRALKERDEAINLAVKKFYNEHKDCGQVIIENLKCVKYKSKFSKKFNNKLQRWSYIKVMNKFESLSETEGFQLIKVPPAYTSQRCHVCNTVDKSSRQGEVYHCKTCGGTFDADINAAINILRLGVYGPHDKIS

SEQ ID NO: 38831 - protein, 434 aa, Blastococcus sp.
MTARGFVGGVGQGAGVPRRRESSAPPVVYRTARVALRVTVGQRRRLFGLLRSGGDVWAAVLLLNRWRRQRGDRPIVGYQELCRELAAAGEGTFGELSTVGARSVLRAYSDAWMSAARRRRAGDETARFPRRRRGLVPVRFYAGTFTVTGGRVRLPVARGRPPLWVRLARPLPYPAEQVRSVRLTCAGRRLCLEVTAEVPVAVYPAGAGPDPARVAGVDLGIIHPYAVLAPGGGEGPEAALLVSGRALRAEHRLHLAEAKARARAAARRAPARGQRGSRRWKQFRRRGRALEGRHRRRLGQARHEAAKAVVSWAVGQRIGTLAVGDPRGVLARDAGRRQNKAVRDWAVGDLLRALADKAAQAGIAVELVDERGTSSTCPACAAAWPSRGGGSLTAGTAGSPGTAIWSVPPTSPPAPPPSPVAAPVVDLSSAVRRR

SEQ ID NO: 38832 - protein, 407 aa, Klebsiella sp.
MLIQKAYKYRLNPTDAQAQRLRQMCGCARFVWNYALAETQRILEAGQKLPSAFELNKMLTGWKKLPELAFLSDAYTDNLQQKLKDLHGAWERCFDKKLAAKAPVFKHKSHGNDSVRFVNFDKYCQLQHRRVKLPSGLGWVTFRQSRAVVGKIKNATVSQHAGGWYISFQVEMVVEQPAHPSTSAVGLDAGICKLVTLSDGTVFEPVNSFKQNQSRLARLQRQLARKVKFSANWKKQKAKISRLHAHITNIRRDYLHKVTTTISKNHAMIVIEDLKVSNMSKSAKGTAERPGRNVRAKSGLNCSILDQGWYEMRRQLEYKQLWRGGQVLAIPPAYTSQRCACCGHTAKENRQTQSKFVCQVCGYTANADINGARNILAAGHAVLACGGMVQSGRPLKQEPTEASQAPV

SEQ ID NO: 38833 - protein, 385 aa, Ktedonobacter sp.
MKTFEYRLYPNKAQHHLLMHCLIESRHIYNEMLETVKQQYEAKGTFPTKYDLTALFKGRGGEHVPATTVQMLADRLAKSLKRFLARKELGDNVGFPRFKQGNQWHSIQLRQYGTSRDVWLDDDHKHLHIPAKLGKLVKIKMHRPLEGTPKTAHLVLRADGHWYALIVCETCKHPEHLTASCSHPDIGIDVGLKVFLADSNGNTIENPRYYRSSQHTLRRKQRALCRRKKGSHRRRIAARLVAKTHLKINRQRRDFHFKTAKQYTEQYHSIAVEDLQITHMVKNSHLAKSIMDASWGAFLTILEAKAENAGHQVIRVNPHFTTQKCSQCGELIQKSLSVRTHICTSCGYVADRDVNAAKNILLKAGALPSGTVSAGSPVELRSLRL

SEQ ID NO: 38834 - protein, 391 aa, Proteobacteria sp.
MELTLQLKLLPTAEQVTALRETMSRFNAACNWLAQQAFAQQCSNKLTLQRLFYHELRSRFALPAQMAVRCLARVAGTSRRDKTVCPTFRPDAAMPYDQRLMRFTRLDTVSLLTMTGRALVVFLLDPYHQQRFDAHEPRQCHLVVRGDGTWFLLVVVQVPDGTPFPPTDFLGIDLGVVTLATTSNGITHSGAAIEACRTRYATRRQRLQRAAHGAQMDGKRPKNIRRALKRTAKREARFRKDTNHCISKALVTAAIGNGEGIALEDLKGIRTRSRFRKPQRAKMTGWAFAQLRCFVEYKAQLVGAPVVLVDPKHTSQQCSVCGHIARANRQRQAHFPCKQCGYTTNADYNAALNIRARARVSWPIVAVRPPQQLWLLAGEASDKLRHSWRGY

SEQ ID NO: 38835 - protein, 405 aa, unknown
  TnpB Polypeptide
MELTEKEMIYSTDERFDLIKNLCHLSKNLYNASLYDVRQYYFETKSYRTWQSQRPIFTKNNNPDYYALQSHLAGEVLMQVGRQFIGFFNNKSNKKKRIPKYKDKNGYNVITFPKLTISKQIDFDEDKSIYTYTLCKRIYNLKIKSTKSNLKMIKFVYDEANDLIKCFKIYEVEKQKLKKDNSRYFSIDPGLNNIVSIYNNIGIRPLLYNGRPIKSINQYYNKTNAKLRSELPTNVKSSKRLKQLSFKRNNKIDYEMHKISTHIISEAVRNDISKIIIGNNIGWKNEINIGRRNNQNFVNTPHTKLFNQLLYKGLLNGIEVIFTEESYTSKASFFDRDELPIYGENDSPKFSGRRISRGLYKDSKGNLWNADLNGGGNIMRKISDKAYKNIRKTKEMMKRPILITL

SEQ ID NO: 38836 - protein, 189 aa, unknown
  TnpB Polypeptide
VYDKTPIALQLDKRRVIGIDIGLNNLVTVVNNAGLAPWRVKGGVVKSINQYYNKEQARLTSCKDQQGLTNQTRRLHRLRLKRKNRITDIFHKVSRRLIEYCISNDFGRIVIGYNKTWKQFIRLGKRTNQAFVNVPFRKLVLQIQYKAALVGIEVSLIDEAYTSKVSFLDDEPITQNETYVGQRIHRGLF

SEQ ID NO: 38837 - protein, 392 aa, Epulopiscium sp.
LKKAYKTELKLTDKQAEKVIQNLGVCRWLYNEYLGTNQKLYKDFKDGKIVDKTFITAIEFDKYINNEVKTKEEFKWINDCGSKARKKAICNAEKAFMNFFNKKAKFPNFKKKNKCKISLYFPKNNKTDWEVERHRIKIPTLGWVRLKEFGYIPTNLKVISGIITKKADKYYVSVIFEAEKIKNNKVSSESIGIDLGLKDFAVISNGEVKKNINKTKKIKDLEKKLKREQKSLSRKYESEKQKKLKKGEATRQNIYKQVIRIQKLHKRLTDVRTDYINKIISEVIDQKPKSITIEDLNIKGMMKNRHLAKSVSNQKFYEFRVKLENKCKENDIELRIVDRWYASSKICSRCGNTKKELKLSERKYTCEKCGIKIDRDLNASINLKEAKTYNIA

SEQ ID NO: 38838 - protein, 402 aa, Proteus sp.
MKRLQAFKFQLRPNGQQEREMRRFAGACRFVFNRALARQNENHEAGNKYIPYTKMASWLIEWKSDTETQWLKEAPSQPLQQSLKDLERAYKNFFQKRTAFPRFKKRGKNDAFRYPQGVKLDQSNSRISLPKLGWMRYRNSREVVGEVRNVTVSQSCGKWYVSIQTEYEATEPQHESTSIVGLDAGVTKLATLSDGTVYPPVSSFKVNQRKLARLQRKLSRKIKFSANWQKQKRKIQRLHTHIANIRKDSLHKVTSEISKNHAMIVIEDLKVSNMSKSAKGTTERHGRNVKAKSGLNRSILEQGWYEMRRQFEYKQLWRGGQVLAIPPAYTSQKCACCGHTAKENRQSQSKFECLECGYTANADINGARNILAAGHAVLACGGRVQSDRPSKQEPAEVIQTSV

SEQ ID NO: 38839 - protein, 518 aa, unknown
  TnpB Polypeptide
MKTTTPSFILELPLKTTTVQESTILVRLDAGRQLYNACLGESLKRLDLLRQSKEYQQIRTLPKVKSMTEAFNALNKKFEFTEYDIHHYAAGIRHSWIQDHINIHIAQKLATRAFKTVQKKSFGKAKNVRFKGKNQFDTLEGKNNETGLIFRNNTLYWAGLEISCIIDEKSDVITYGLGHEIKYCRIVRRKINSKNRFYVQLILEGTPYQKSKNNIGTEEIGLDVGPSTIAIVGDTKAELKQFCSEIAPKQKEKRKLQRKQDRQRRANNPENYNENGTVRKGKKKWKKSNHYKKTSSELAELDRKLAAHRKSLHGKDINEIIAMGTRITTEKIPYTAWQKTFGTSVLMRAPSMFMSSLKRKAENAGGYLIEFPTNTTKLSQICHICGEALPKPLSQRWHICCGIEMQRDLYSAFLAKCVDIETSSLDIAKAKQLWPGLEPVLSEAVSRVIQSANGGKVPSSFGVPAKGLPKAPACCEETQSLDQRQSGSPVKPVATVTEAADDVIRDNIYEDESRREVI

SEQ ID NO: 38840 - protein, 416 aa, unknown
  TnpB Polypeptide
LGFRRHDVDTARFTHRLWYNRLVQTLCLKYRLFPSKEQERKLSDTLETCRLVYNSLANDRVFQYETAKVSVSRYGQQKMFPRWSINFPEVKAVHSQVLQNVAVRVDLAFRAFFQRVKATKTPGFPRLKGKGQYDSITYPQSGFKAGESSVWLSLQGKQVQVKAKLHRAIVGTVKTCTVRRYGAKWFVCFSVDQGDNPLPPCTDAVGLDAGLNSFLALSDGTFIDNPRFFRKEEEALAKAGRKQARTKKWSRERRKANRVLSRIHERIRNRRHDFVHQTARRLVNRFGVIAVEKLNVKNMLGNHCLAKSISDASWSLFRTVLTQKAESAAREVVAVNPAYTSQDCSVCGYRPDGLGDRTKKRLSDRWHHCPMCTASLDRDTNAAINILNLALRGTSHGGITPCQVTPVEAPAFRHGE

SEQ ID NO: 38841 - protein, 397 aa, Nostoc sp.
LKTSYQYRLKPTKEQAKIIDNTLNMLRCQYNYQLGQRFEWLEQNRCSIDRCSLVVCHLPELKDKPNRFSQQVSLTQLKKDRSWYKCIHSQVLQEVPKKVEIAFDRWLKGDSNGKRSGKPRFKAKGQYKTFTYPQFKKEHFSNDKITLSKIGTIKVIVHRQIPDGFDIKTLSVTKKSDGYYVTLSLEDKTVPTIKPDFDTNNIVGIDVGLVDFIVTSDNEIIAAPKLLRKAERKLKSAQRKISRRKKDSNRRNKAIKKLGIQHKRVADSRKDFHFKTANNLLKKYDVIAVEKLNIKGLAKSRLAKSVNDAGWGQFISILTTKAENAGLKVIAVNPNGTSQECYNCGQKVKKLLSQRMHNCSNCKASLCRDLNAAINIKNRGTHDLKAQIMSSLRMRSL

SEQ ID NO: 38842 - protein, 240 aa, unknown
  TnpB Polypeptide
LQRKTGRKLAVKDGPLHLALVFRREVTQMTPKRLLVVDFNALHNGVVLATVEEGRVLQRGVLRPHIAKIRHLQRQIARLDSLCAEREDGAVCNRAASTKSRLWRLLRQWEDETAKKIVKLAVRYKAAIVADVPLDESMRELKEGNYSAEKKAMLNFGRLRRRIRELAEWYGILYREERLYSTICPVCGAKMEEAPNRRVKCQCGFEANRDEVPIHWAMKRFKELLTPSFSTIAIGIMTAT

SEQ ID NO: 38843 - protein, 410 aa, unknown
  TnpB Polypeptide
MIIRKAFKYRLNTHTDTEQLLSQYAGNCRWLWNKTLALNLHYLENKQPILWYQEMDWFTKLWKKSEEYGFLKRSPAQTLQQTLKQLERAFKDAFDKKQPLKKIPVFKKRGDRDSFTLPQGFKLDGRRIFLPKIGWLGFRKSREILGEPKNVTVSRQGKYWFVSAQVEIELPEPVHPSLSIVGIDMGVKRLVTLSSGIDDDYIDGRAIDTGFYTQKIKRLQKRLAKKVKFSANWKKLKEKINQLHTKIAHVRRDRLHKLSTILSKSQAMIVLEDLQIKNMTKSAKGDKENPGSMVKQKSGLNRVILNQGWGLFKTLLEYKQQWRGGQVIYVDPKNTSQICPVCDHKSKDNRQTQAEFECVVCHYKEHADLVAAINILERGHRLLACGERWVASLGEAGTRQRSNALEPVFN

SEQ ID NO: 38844 - protein, 402 aa, Oscillatoriales sp.
MFQAYKHRIYPTPEQQIALAKSFGCCRWYWNHALNLCQKTYKITGKGLSRKAIQGLLPELKKEYPWLTDAYSQCLQVVALNLYTAYKNFFEKRTRLPQFKSKHGRQSINYPQNVKFEGDHLKLPGKVGLVYCRRHREFEGTIKTVTISKNPDGKYYASVLVDDGKQLLNPSTNGKAIGIDLGLTHFAITSDRDKYSNPKHFAKHQRNLKRKQQQLSRKVKGSNGRQKARLKVAKVHAKISRCREDFLHKLSRKIVNENQVIAVENLGVKNMVKNHKLAKAISDCGWGMFCTMLKYKAEKEGKTYIEINRFFSSSKTCNVCLNQVSSLPLDVRSWTCQHCQTAHDRDINASINIKNEALRVLELGTSSTATLRGCQSSDQTSVSSDAIPIEVGSPHLLVEKCG

SEQ ID NO: 38845 - protein, 403 aa, Streptosporangium sp.
VKVVVQVKLTPSPEVAVALEATLFTCNNAANWLPWRAQGREDDRDRTRKALQPFAYAELKARGLSAQPALHVIRKVADAYATRKANLKAGNYGKKDSTRYQRIVDTPVRFRPDAAQSFDDRCLSWQYDAGTVSMWTITGRIRGVPFVCSPGALKMLSGYRKGETDLIRRDGSWYLIATCEIPAAELNTQPSGFLGVDLGIANIATTSDEGETFAGEKLNKYRRRMMRVRAELQARGTKSAKRKLKKRARREARHATHINHVISKRIVTEAERTGRGIGLEDLTGIRERVRLRKPQRVALHSWAFAQLAAFVKYKAERAGVPFVQVDPAYTSQTCSWCGHTEKANRPTQELFACRSCGVVAHADHNAARNIAARAEHVWAAINQPHAADTSGAPAANPAPLRAW

SEQ ID NO: 38846 - protein, 345 aa, unknown
  TnpB Polypeptide
MLKNKEVYKKLPSQTSQQILRLVDKNWKSFFNSLKKWRAQPRKYLGRPRPPKYKKRNGEFLLIFTNQQCRIKEGYLYFPEKVAILPIKTRIKGQLHQIRLVPKGLYYAVEIIFEKDVKNLKLDKKRILGIDLGLTNIVTMVNNVGLQPAIIKGGIAKSTNQFYNKQLARYKSVKDKRGIAFETRRIQKLTKKRNNKINDQFHKISRRIINYCVYNNLGTIIIGYNRSWKQKVNMGRRNNQKFVQLPYFKLIFQIQYKSKLVGIHVILEKESYTSKCSFLDNESIQKHKNYAGKRISRGLFRSKKGIILNADVNAGYNIIKKVIPNAVLVDGIEGVGLYPYSIAVS

SEQ ID NO: 38847 - protein, 388 aa, unknown
  TnpB Polypeptide
MLKVRENQKMLANKFRLYPNKEQTEKLEFALDTCRQAYNLMLGELNEQVVIDRNMIQAILPDLKICEPKFKQVYSKTLQYECYRLFSNLSALRVLKGNHKKVGRLRFKGKNWFKTINYNQSGYSLENNKLHLSKIGNIKIKTHREVNGNIKQIQIKKEIDKWYAIIITDENKKLICGTKVIGIDLGINNYLVDSDGNKIENPKILEHNLKKLKHLNKELSRKKKGSNNRKKARIRLEKLHLKIKNQRADFLHKLTTKLITGCKIIVMEDLNIKQMSQQKYFNARNMVDASWGKFAQLLDFKAESAGCQVIKVNPKNTTKMCSQCGGLQEMPLYKRTYECANCGLVLDRDYNSAKNILKLGQELSYVENNPSVPLVQGLSMKQEATSFM

SEQ ID NO: 38848 - protein, 407 aa, Candidate division WPS-2 bacterium
MKRVEKVRLYPTGRQMEVLRFMLDVTRDLYNAALQQRRDAFRHRGITVTEDLQYADLTDLRKGDSRVAAVYRECEDAVLWRLDLAMKAFFRRRKRGEHPGFPRFKPANRWRHLHFPHGDRAFKFKQNQRRVYVPGAGNIALRKGRKIPTKFGRGWVVERNGRWYLCVEYELCAPEKRSTRSVLGVDRGVHVLAATSEGELIRNLAVGERRKRAIARLQREMDARTSKDPHSRCINRNDPLRIAAVKRYARSREKAANARRDYAHKVSRRLVGSADCIALERLNLANMTRNAKGTCAEPGCGVSAKAALNRLILDSGFGLLQRMIAYKAESAGVTVVSVDARFSSQTCYRCGNCDRGNRRRRRFSCGSCGFTTHADVAAALEIRRRAQRTLSSEPIPVEEAGRRVTAA

SEQ ID NO: 38849 - protein, 388 aa, unknown
  TnpB Polypeptide
MELDGKLHLRITTGNREFIYAKVLREPSNSKDKWLIFMTMLLESWQTKKYFAYTVELKLGDGEVYGSVSFELPTPEVKYTKENGVIAIDTNASPIHLAIAEVSKTGELLSYQTISLHHLLGLSQNTKDHQEWILAHQIVDLAIEKGKAIAIENLKKLKKGVRGDGKAKLRKRLHQWNAKKFLQKLKRVAMLKGVEVIEVNPAYTSVIGMLKYVPQLSIDKDVAGAYVIGRRALGFKEDMPENYEKLLKDKAYLEFALKRYEERKKELKELIEKESNEYKRNALESELRSVENSKKLLTHLIQSLQSESSSCEGANGRNPEQGRVAKTTLQSAWQVLKVALLFPILGKVLPRDLSPLKPVLVEGVWDRVRRSNGLVPLETGGTVPTRDF

SEQ ID NO: 38850 - protein, 293 aa, Methanomicrobia sp.
VITRKYGCYWMHIFVKAEDAKADVDIERRLFIDIGEIHPFVGWNDVDNEFVFFNGRHIRSLKQLRLKLIAKKQSMLSKRQKGSGRWRRVKQSFDEQIWKLERKITDLECKYIKALLDYCLEHRIGRVVIGDLKGIRENNDKGNGVNQKIHNVWRFRKLVDRLKYKLSTYGIRVVEVSEEFSTQLCPVCGESNKPNGRIYKCKCGFIFHRDFVGAIGIARNFYNFELKRGFKWLAPEKICVEVFKVDIDKAEVKSIVVCLRPRSWNGTPAVRRSSPFGARNPHFSAGSVMCVMA

SEQ ID NO: 38851 - protein, 429 aa, Marinobacter sp.
MIWNAKCDEDRYLRAFARKFLPVGTYPKPDKAYSQYKTELTPWLKKCPSQILRNSATIWAQTYQDFFKGRCGRPQPKNRIRGNYIWLTRELFQLVKEDGRWVLRIGTKKNDLGELKVKWHRKPRADRLPNSIWIRVEHGRWSVSFSYDDGKLDDNHLTNVEHLRWLRRCSVDQLESLITPLDRGVARPVQTHDATYTVDTTALRKQRGREKYLKRCQRKLARQKKGSNRRKQTLARVARIHQKTASARDDFLHKTSRAVVDSAKVIVLEDLKLANMTKRAAPVPGIAPGCWLANGARAKSGLNKALLGVGLNRLETYIDYKAYRQNKPVFKVNPVNTSRECAACGHTHPENRRTQATFRCLYCGHADNADRNAALVIRQRAICLILHSGTELAGSKKNVLRPGANANPRKTPAAQAASATGGSSKKKAA

SEQ ID NO: 38852 - protein, 539 aa, unknown
  TnpB Polypeptide
LPWTGSLSLTATSFTPVRAFFSIPQARILVAQKSNSDTVDKLLFRCHCRGRTIESGQKVHSSSKEEVRMLVAYTYKLSPSRQQVLVMDKHLEMLRLQYNFRVRERTEAYEQASAPVLGNYCNLRTKAECCPLTCSVSKNALYGNPWTRSGKKRGAYAQQDASLPNLKRERPWYKAIQHHVLQQMLRRVENAFQRFFKGEGKYPKPKRRSKYRSWSYPPKDVRFEGNKVRLPGIGWCKFFSSRAFPDGFSTRTVTVRKKADGWYISVQLRDESVPATPTPDAAQTAIGVDLGIKKLASVSTGELIPNPQYGKKAQRRRQLLSRRASRKSKGSARRRKAYAALARLEQKVERQRTDYHWKVANQLVNLGECIIFEDLNIKGMMARCKPKVDPETGKYLKNGQAQKRGLNRVIADAAWGELKQKVKVVAAKSGVLVHEINPLYTSQECSCCGYVSPTNRDKEKFLCESCGWVADADVDAATVIRQRGLTELGINIPLPVVHGKVTLKEPVKDRGNHLGCQMSLRTLGWNGFNSAYSSGGESE

SEQ ID NO: 38853 - protein, 150 aa, Fusobacterium sp.
MEKAYKFRFYPSKTQIKILNSTFGCVRYVYNHFLDLKQKLYKAEKKSMSYSECSKELTVLKKDKEWLKDVDKFSLQNSLKDLDKAYKNFFSGKGYPKFKSKKDNRKSYRTNYTNNNIEFLDKWIKVPKLGKLKIRDKLKPQGRILSANKR

SEQ ID NO: 38854 - protein, 383 aa, unknown
  TnpB Polypeptide
MKRAYKYKIKPTVKQQHQLLQAFGCARFIYNWGLDIKTKVWTNEHKSISYFELAKELTQLKQTEEYKWLKDVPNECLQQSLRCLDNAYTQFFKAKKGFPKFKSKKHSKDTAKYLAAVHFDFDNWKVKVPKCGWVKLCKNKTFDLSNSKIGTLTVNRDKCGDYWCTIVVEDNTPQKSKTKISEETSVGIDLGIKDYAILSDGTKYSNPKYYENNRLKLKVLQQKFARTQKGSNRHQVMRLKVARQYRKITNSRIDFLHKLSTDLIRKYDTICLENLNVEGMMKNHNLAMAIQSASWGEFVRQLKYKAEWEGKNIVFIGRFEPSSKTCSKCGYVKCDLKLSDREWVCPICGEHHDRDVNAAVNIKRFALNPQALVAIEDKANEVE

SEQ ID NO: 38855 - protein, 351 aa, unknown
  TnpB Polypeptide
MFKRAIKLKSYATEAKQNKILALISRYRCQVNMFIDHIWNNKETAKLDAKTLKSIDKVQDLSERYKSNALKQALQICKSEKNKTKPIFTGYPVLDAKFVSIDTNKSSKEFDLWIKLSTLKSGRRIELPTKKHAHLNKWLKTGTLIQGCELRPDGFIVWVEANPPEKKNSLKIGVDIGMNKLLTTSYGEKLGTDFNRINNKILRKKKNSKSYKRAIAEKKNYINQSVNLLPWSEMEVLCYENIKNLKKGSTKRNKQTRQKQQYWSYRQVIEAMKMKAQANRVSLVYVNPAYTSQKCSSCGNVAASSRNLENYCCISCGHTQDADVNAAKNILHKGLDWITSLESVKSKSAII

SEQ ID NO: 38856 - protein, 334 aa, unknown
  TnpB Polypeptide
MKAWRNGKIPDEPKLPNYKKKSLKLVSYPHADVQLRNGQLRFPLGKKVKAWFGIDAFYLPMPTNLKFEDIREFRILPRNKEFYLELIYRTEPVQVDVDFNRALGIDHGIDNWLTCVSNVGTSFILDGRHLKSLNRWYNKRVATIKKGKPQGFWCKLLGNITEKRNRQVRDAVNKAARLVINHCIENKIGTVVFGWNPRQKDGIDLGTKNNQQFVQIPTGKLKERIKQLCDQYGLRFVETEESYTSQASFVDGDSLPTFGEKPEGWKASGRRVTRGLYRTAKGWFINADCNGAANILRKVAATLGLDLGGVGRGGLYTPLRVPLWTCSRIPALGT

SEQ ID NO: 38857 - protein, 402 aa, unknown
  TnpB Polypeptide
MQRLQAFKYELMPNGQQQRQMRRFAGSCRFVFNKALALQKARYGNGDKKLSYAALCKQLVEWKSDATALWLKDTPSQTLQQTLKDLERAYANFFAKRAEFPRFKKKGQSDSFRYPQGFKLDQLNNRLFLPKLGWLRYRNSREALGTVKNVTVSQSCGKWFVSIQTEREVEQPIPHGGAVGIDMGIARFATLSDGRYLEPLNSFKRLESKLRKAQRAMSRKTKFSHNWKKAKARIQCIHSRIGNARRDYLHKASTTISQNHAMVCIEDLKVRNMSKSAAGSAEQPGKQVRAKSGLNKAILDQGWFEFRRQLDYKLAWRGGHLIAVPPKNTSRTCPACGHISADNRQTQARFECVECSYENNADVVGAINVLRAGHARLACADTSPEVRASGQEPAEATRQLSV

SEQ ID NO: 38858 - protein, 446 aa, Lachnospiraceae sp.
MNIYSTYSVKIKHYNQIFKETVSLYRKAVDFFIDVFLQEWDSFAEIISSTKSSVSTMEKLTLVTSNRPIVAYNFNAHFYKMPCYLRRAAISEAAGKVSSYKSNLVNWEISDANIRGKQPSYPKAGYVYPSLYKGNMYELTDTYEVKIKVYVRNTWDWITVELRKSDMDYINRKCLSRKKCTPTLQKRGKEWFLDFPFEEKAELNDTNIFNQIVLAVDLGLNNAATISVMQSDGTILGRHFCKLPKEYDSLKHSTNRIKKAQQHGNRKTPRLWARAKGINDAIAVKTANFIIDTAVFYDADAIVFEHLDTAGKKRGSKKQRLHMWRSQYVQSMVTDKAHRLGIRMNHICAWGTSKLAFDGSGRVLRGREAGLGSYSVCKFQNGKVYNCDLSASYNIGARYFIREILKSLPERDRLVLEANVPQVTKRSTCTFSTLVNLNAGLVLLTA

SEQ ID NO: 38859 - protein, 402 aa, unknown
  TnpB Polypeptide
MRRELLAYKFRLYPSYEQEEKLLWTKEVCRRVYNKFLELYDAGEHDRFKMQALLPMWKESDANLRGVHSKVLQYELHHLFSSLAALRELKKRGRKVGKLRFKSSQRFRTITYNQSGFRLEPKNEKFSLLHLSKIGDIPIRLHRAVEGDIKGVTVKHMPSGKWFAYLLVDDGRDSRELTIIDKMVSIDVGLEHYAVDSDGQEVENPRFLKRELKKLRREHRRLSRKEKGSNNWNKQRIIVARTYERVCDQRNDFQHKLSRYYVDNYDLIVTKKLDAREMIEDGHLSRSISDASWSSFNQKLAYKAERAGKLFVQVDPRGTSQTCPVCGHVEAKTLSQRYHDCPCGFSASRDHASSLVILERGTRKVRSERPELTLVDRRPLQPSANELQAAWVKQEVTLERAG

SEQ ID NO: 38860 - protein, 246 aa, Crocosphaera sp.
MYAIKRELKLNNKEKSFFAGCAGFSRFVYSHGLSLLKSTWDIPEISGSDSKRLDAIKKVFTNITKKQTEYLWTNKYSSRIYQNAFRDLKKAFSRWREPKIKAELPRFKKKKHNCSFTVDSSNGKVLVTEGKKIKIPTLGTFRLKESIPYNCVSQTFTISREAGKWYVSFAVSASYIPEMKHRYKKVGIDLGIKTFATLSDGNTFESPSSIKKAKTKLGKIQWRNRNKVLVQLGESNPPDFYRNFRD

SEQ ID NO: 38861 - protein, 134 aa, Crocosphaera sp.
LVKSGINFGETFSANPKYPRFKSKRGRQSIQYPQNVKVFDNYLKIPKIGDVKAVIHRPIEGKIKTVTISKNCCGQYFASILFDDGKEKPEASTEGKAVGIDVGLTHFAITSDASKFDNPRFLTKYEKNLKLKQQ

SEQ ID NO: 38862 - protein, 566 aa, Crocosphaera sp.
MAKKRSLKAKLTRISRSKQKTDKPIYQRLIGIESKIEYHPFLEDWGNQYQSLLRSALNDRQKGISEINIEKSYQKKYNIQWGWADSLATNASSVFDQLTTGKENQISFLETDLKAGFAKAAENLETLENGYKNPSQQNLRNFNKKLLGVKSKLKRLQRKQQQLLKLKQEERLHICWGSKKLFKAQYNLEENGYSNHEEWLEDWRKKRGGNFYSVGKGSVNGNNPVTKIHHKQDDIFSVTITVPRCYQEIYGQKITLEFEITKQRKHDLLYALESNKPVTVQIFRREHKDNPWYIHLSTYVQAVPYISHKRNGCLGIDLNAESIDLVYVKKDRNLHHTDGKKTLFSWEIPTGTTGQVEAKLRDIVAEIVRIGESYQCPIACEDLDFSKKKATLRHSSKKYNRMFSGFIYDKFRAFLVARAEKYGIEVIFKNPFATSVIGMVKYMAKYGLNSAYAAAMVIARRALGFSERIPRSKEPIIGVCISSPEDKEVQSWGQWGKICKLLREQKLSRHQMFESAKVLEALHDAVSRTRMGKSPPRQGRKVKSASKPVVFSNSKIQGESPMPQNC

SEQ ID NO: 38863 - protein, 312 aa, Crocosphaera sp.
VGNFFLEITLAKNKDTPWVTLLNSQARQSAADRAWQSINRFYQNCGAPTRHLMAHVAAPSSRAKISGKKGFPKFKKYSRSVEYKLTGYKLSDDRRKIKFSDGFKAGEFDLWCSQRTLVYYSEQQIRRVRVVRRADGYYCQFLIDVERQENHEPTGQVTGIDLGLKEFYTDAQGNTVDNLRYLRRSEKRLKKAQRRLSKRFRKGKKQSNNYHKQRVKVAKLHLKVSRQREDKAIKYALALVQSNDLVVYEALKVRNLVKNRKFSKSISDASWYQFTEWLNYFAKIYRIVCIAVPPHFPDFSQINLKAQSRDEK

SEQ ID NO: 38864 - protein, 406 aa, Crocosphaera sp.
LVKIRLKAYKYRIYPTEAQKDLLIRSFGCARWFYNYALNLTSQTYKDTGKGLSRNDIIKLLPTLKEEYEWLPEAPSQALQQVALDLSSAFLNFFGKRAKYPNFKKRHKKQSIRFPQGIKLEGDYLTLPKIKKVYCKVSKLPQGKLKSVTVSMTPSGQFYASCLYDDGKEKPEPNSQGKAVGIDVGLTHFVITSDGTKHGNPKYYRKYEKKLAIKQKQLSRKQECSSNRNKAKVKVAKVHEKISRCREDFLHKLSRNLVDENQVIVVENLAVKNMVRNAPPLSTLNSIQGGSAVKNHSLAKSISDAGWGMFCTMLKYKAEWEGTTYIEVDRFFPGSKTCNVCLTQVDSLPLNVRTWTCEHCQTTHDRDINAAKNIKDEGLRILAGGHLAAASGVRVRPSKGTAFARR

SEQ ID NO: 38865 - protein, 370 aa, unknown
  TnpB Polypeptide
MIKAYKYKLKPTFKQKKLFSQAFGNARFIYNWGLQRKKEEWENNEKKLSCFDLCKELTVLKKQEEYAWLNNSAAESLQQSLRNMDSAYKMFFKTKNGYPKFKSKKNRHDSIKFVNNIKIDYNTNRINVARVGAVKFCENQTIPENAKIGTLTITMDHCGDYWATIVVDDGKGQKEKAEIHEDTAVGIDLGIKDYAILSDGTKYGNPEFLEKGQKRLAGLQRGLSKMQKGSKNYEKMRLKIARLSREIANRRNDFIHKLTHKLLSEYDTVCLENLDVQGLLEKSSHKIANSISSVAWSEFRRQIEYKAEMLGKNVITIGRFEPSSKTCSNCGYVKNNLGSAREWTCPVCGQHHDRDVNAAMNIKTMALSQL

SEQ ID NO: 38866 - protein, 372 aa, Bacterium sp.
MKLATKVKLVVGQKEKEQLTQTMIAFNRAANYVSKVAFENKTFGQVNLHKLVYYEIKQKYNLSSQLAIRVIGKVVDVYKNKKQRAGIVNFKEMGSIDYDTRNLSIKKDNTISLATLGKRISIKYKYHKPLKDYDLCTQSELNFDKPTNRFYVSFFYDKTELAPYDTEKFMGVDLGVVNLATTSDGEVFSGEQVENYRKKITKLKAELQSKKSVSAKYKLKKISKREANYKKDVNHCISKKLVQKANALKVGIKLEDLNFKKKVNSKGYTKKWKDNNAKLGKWAFFQLRQYIDYKAKLLGVPVVYINPAYTSQTCSKCGHCHEDNRLSQGEFKCLSCNYENNADLNAAVNISRASINKPIVDNRKVKSQTQSL

SEQ ID NO: 38867 - protein, 448 aa, Okeania sp.
MTRKQYNHRLAQRLNWFEATRTPVNACPLNVSVVPIERIYQNIPELRVQMRDGRKKDIFGNPITKKGDKHPNIVNGYVLWETVQLADLAQTKKLFPEYKSIHSQVLQDVIQRVQTTMDNFTKPDKNGKTSGRPKFKGKHYYNSFSYPQLSNTNIVKNANGLTSVNLPKIGLVPFVYNRQIPLGLKVKTGTVIREADGWYISFTIEDKTVPLRRAEIQPTKENSKGIDLGLLHYGVTSDGEFIEVPKFFRFSEHQLSRLQVRLAKKRKHSKAGKVLKGKIAKLHQLIARQRLDWQFKLAYHLFSDVSVIFLEDLQIAHLVRRCKAKLGDNGQFLPNGQSAKSGLNKSLQDAAFGQFVRVLEYVAWKLGKRIIKVDPKGTSQHCWECLNKVSKSLSERWHSCSNCGQELDRDYNSALLIQKIGLLSTQEEDITSHETAVRVSLTEESRAV

SEQ ID NO: 38868 - protein, 395 aa, unknown
  TnpB Polypeptide
MVNKGYKYRIYPDIDQQKFLNETMGACRKVWNISLDQAIQEYEKYKLDKLLSKPKVSGYEFSNKLTILKNEEKYKWLYNYSSCAMQQKLLDLGKAFTNFFRDIKKKSKTGYPKFKSRYHTDSFRLTPMYFKLVNKELYITKSPTSLKIKLYRNLPSEPSQVTITKTSTGKYYAVFLCKTEPKLTYGIGSVGIDLGVKDFIVTSDDEVISSPRSYMKYQDRLKLYSRRLSKKTKGFSNRNKARIQLAKVHEKISNLRQDFIHKTTRTLVNRYKTIVIEDLNVKGMSKNRYLSKHILDNSFSMFRRFLEYKVIDSSWCNLVIANRWYPSTQLCSSCGNRPSEKIKLSTREWICSTCHTQHNRDLNASKNLANIAKTHIQDILDKSCGKLLISEPYIV

SEQ ID NO: 38869 - protein, 518 aa, unknown
  TnpB Polypeptide
MSSVTRTYSLRPYTCCDKKTGISLDLHTVLEEIRNDATLCATEALKHITVANLEKVSEYDGLKPAEAGRQIGIKLSSTGRGTGRSRFEKMIQEYAVSQLRSWNERCKTHPGQTDKYTSIGFKRTANNNKPAYLKPRLALSATDKQYHVIRVKGSTTELDMVVNKRWVTFKFKAPERFIESGVRIIAPTISIDDRDRVMFNWYIDVPVERTPFSDTYVVGVDVGLTHHTTAVVRDITTGRVVEASFMNQRVRSLENKIKRSKTQIATLYCKGRVSEVEPHRRALSNRRKELAILIGQEVADLSWKYNNALVAVEDLSHIQNTMKHGRWVRGLIVKRITEMVESNGGRVMTVPAAYTSQKCYRCDTRLDMTDYHTPICLSCRVGWDRDENAAANIASKLKDKDKHRKACQTRKKHSSKNRRRNSKGSLRPLKHPLKKTEPTPKAPQNQPKKRESTHHVHHKHTMVKKRGGGVYQILCAAGWSLRDRNVRVPAVAPVHGCSDKKPHDYSYNGAALTGVYKG

SEQ ID NO: 38870 - protein, 484 aa, unknown
  TnpB Polypeptide
MAKCNTSSYAVIYELAFDNDNPSSVLDKLEKIAKAIYNDCLNECLKRYHKLIHDKNYQKILKVYKTSNNKKELSKQLNDIALSYGYSEYDMHKYIKKPYEYFNKKLGSHECQKIATRAYKAVEKLRYHQADKVNFKNKYDSFSIEGKSSTSKLHYCDDISISYGNYKFKLKVKRNDIYSQQALLDIVKYVRIYPQIIRNKRRWFAQLILKGTPPSKNRQYGDNFKVQGIDIGTSTIAVVSSNEAKLMELAPNCKENEHKIKVFSRKLERSRRANNPGNYNKDETIAKGKHCWYKSKNYLKNQAKLKDEYRKLSVKRKQAHEMLANQIIANSTDIRVEEMNFKGLQKRSRKTTINKNGKINSKKRYGKTIRNRAPSMFLTIIDRKLKYKNLTLKKVDTFKIKASQYNPIDGTYKKKQLKDRLIELDEGTIVQRDLLSAYIIAHTNDDLETINTVSCYDDFDTFKNLQDNEIQRLKDSNQLSWYIS

SEQ ID NO: 38871 - protein, 286 aa, unknown
  TnpB Polypeptide
MRKQIALLLKDEEYRNWRTEYGSLSKIEKPSKAEKKRKKALASDMNTRRTKLGLSRSELEKYIKVCGARYKKLLSSQQVQAEAANVWKGVEDFLFSNGKQLHFKKFRDFRTIGGKSNINGICYDTETRQIQWLGLQMQCYLSKKASDREYVLQSLDHKISYCMIKRQMFPNGWRYHIILVLKDDAPQKLEHGFGDMGIDPGVSTMACTADTGCVLEELAPETDRYDRQIQEILRKMDRSRRKSNPDKYNLDGTIKKNDHSRWKNSKNYIRLLRRLQILIVKDPNIS

SEQ ID NO: 38872 - protein, 394 aa, unknown
  TnpB Polypeptide
LSADNRRCSHRNNSQIHRKPRQVTIVNKAYRYRLYPTTEQKIMFAKTFGCARFIYNKMLGDRIDYYKKTGKKLNNTPAQYKDEFPWLKEVDSLALANAQLNLNKAYNNFWSNRKHFGKPRFKSKKTSHTSYSTNNQNGSVRIEGSKVKFPKIGWVKLCLHRPLMENSTIKTVTISKTPSGKYYISILVEYENQILPIIPKKFLGLDFAMHGLYVASDEDDADYPNFLRKAEKRLAKAQRKLSRRQKGSRNREKQRLRVAVLYEKIANQRRDFLHKKARYLVDRYDAIGVEDISVKAMAKHKKGGKFSFGKSVADNGWNMFTNILEYKLAWQGKKLVKIDKWYPSSQLCHVCGYQNNETKDLSVREWDCPNCGNHHNRDKNAAINIREEARRISA

SEQ ID NO: 38873 - protein, 393 aa, Nostoc sp.
VLKAYKYRIYPTGEQSILLAKSFRCVRWFYNFALNLTSETYKATGKGLSRNDIINLLPTLKKEYKWLTEPPSQCLQQVALDLSSAFLSFFEKRAKYPNFKKKGQKQSIRFPQQVKLDGHYLTLPKLGKVYCKVSRLPEGKLKTVTVSLTPSGEYYAACLYDDGKDKPVPSLRDATRTSEGKAIGVDMGINHYAITSDGTKHGNPKYYRKYEAKLAKKQKQFSRKQKGSQNRNKARIKVASVHAKITRCREDFLHKLSRKLVDENQVIVVENLVVKNMVKNHNLAKSISDAGWGQFCTMLKYKSEWEGKIYIEVDRFFPSSKTCSNCLHQVDSLNLDIRSWQCPKCQTIHDRDINAAVNIRDEGLRLLAGGHLATASGQRVRPSKGTAFRGNVG

SEQ ID NO: 38874 - protein, 413 aa, Nostoc sp.
MIIYEFKCKGKDSQYRAINEAIRTSQFIQNKCLRYWMDNKNSKVDKYALNKYCAVLAAEFPFADELNSMARQSAAERSWSAISRFYDNCKKKVKGKKGFPRFKKNCRSVEYKTSGWQLSPNRKTITFRDKKSIGTLKLKGTYDLNYYDIKQIKRVRLVRRADGYYAQFAIDVDIRIETQPTKKAVGLDFGLNYFIADSNGNLEPSPKFYRKSEKQLNRANRKKSKKFSKDRKKAKQPQSNNYHKARNRYARKHLKVSRQRKEYCKKLAYSVVHSNDVIVYEDLNVKGMVKNRYLSKSISDAGWSTFRQWLEYFGHKYGKVTIAVPPYNTSQNCSNCGKKVKKSLSTRTHVCQHCNYVEDRDINASINVLRLGLNTLGHSGTHATGDLPSWAIGVNLSSNGESLNVESPDFLQK

SEQ ID NO: 38875 - protein, 493 aa, unknown
  TnpB Polypeptide
VGEVLGGMTQGGTIPRFVLTDGDPDPLQALREEIEERLSSNWRDVRLRLLPTEVEHGSLMGIGLTCVRLYNELNYEKRQAYFRGELTRDKMYEIDRKYYYKYKDVLGVNAQAVIQKNNEAWKSFFELLKLKKRGRLPSHIKKVSPPGYWKDRFTGRREVRILIRSDRYHLEPVDENGGYLVLEDFGLRIRYAGRIRWEGKQGRLEIVYVNGKWYAYLPIDVGREPPKSNRKGYVKPNYKDKKGRIINPRSIRQRDPIGDEKAFMDMGLNNLFAVVTTNGYVLLVKGGSIKSEYYWWKREISTYQAVRDLLRNAGLPTWILYHEKYLEAMYTRDERLRHLYLTSIRFLAETLWSRGVRKLYIGYPIMLSQDNGNEYNTNIWWYRKIVLWIVDVFREYGIEVELVPEHYTSKECSVCGEIHENSRVYRGLYVCRRTGRKINADVNAALNMARRQGYRIKVTRKIESYIVTHNGVKPLNPHRRANTQDPEIRNPAL

SEQ ID NO: 38876 - protein, 520 aa, Vulcanisaeta sp.
MGMPPQTTTNETRKPLRRAVAVELETTKELNKLLHSIETAYLNIVRDVAEYAVKHNVTSATQLHRLFYHKYRLEYPGLHAHLVIQAIRQASGIAKSFIARRRKGFVSKPYPEVKAVSIRFTEETWSYEEFVKSIAPVKLELSLLGVRRVVWLRLHKRFWLYWWRVLSGEAELASTLMIKRRANKWYAVFVFEIKPRQELPQSVVAFDINENTVAVGRIGIETTVSKVVDWNRQYIMPQLYMIRTDFGRLARRYERVRNAIIERLKPHFALPNGNYVNITNTREYRKLVRRLREGNRKIGRVRQIANELTKTPAIIVTEELGSNPQESMIDGIEKDELRHRIKQTPFRKLESTVGDKALERGSKIFHVSSYRNSRVCPIHFVKLERTDDWHTLQCPLGHLVDRDYASVVNMMWKTTPEAWTKGVWWSLKGLSKNMNWRKHENKSNPIIPYEIVKYTHTILKTFTASEESPAMLARGKPMNHHQMQDEGGGEETSQKREEASEQMVTEGRVGIFARSAKSAT

SEQ ID NO: 38877 - protein, 373 aa, unknown
  TnpB Polypeptide
MMLAKRVRLYPTKIQEQRLWQSAGTSRYIYNWTLARQEDNYKNGGKFIKDGDLRKEITQLKKGELAWLNDVSNNVAKQAVKDACNSYKRFFKGLAGKPRFKSKKKSKPSFYNDNVKLKVKDNVVNIEKVGWINIKPHSIPLDVKYSNPRISFDGKYWYLSIGIERELKNVELTGESIGIDIGIKDLAICSNGMTFKNINKTKEVKKLKKKLKRKQRQCSRKYDMNKKGKEYVKTKNIAKLEKQIRLLHRRLANIRSNHIHQATNKIVKTKPSRVVMETLNIKGMMKNRHLSKAVAEQCLYDFKVKMKYKCEFYGIEFVEANKWYPSSKTCSECGHIKTKLSLSERTYICEDCGCIIDRDFNASINLSRYGLVE

SEQ ID NO: 38878 - protein, 480 aa, unknown
  TnpB Polypeptide
MINEVVDEAERKRLYQARVKKDIKRYTSYVNNYSNTILRPQPDLQYTKIPNTNTWFNIEKHDMQNPEFNYKQVNIKPPKKKQKIPYRTIQVKLLLSANQRKVIDRWFNACILTYNETIKYLETINRIPSFISLRKLLSKKRDMYKLRSKPFKSAHIDTIIPTHILDESIKEARTNFKNAKEVNGIVKPKFFLEKTKVMHIEADFFNPTSVFRLQVNAAIYENQPYNLDDIYNIHGSTCIIQKYYNIYYMFIPILVIVKDSHPRKNFIAGDLGSRKFMTAYADGEILKIGEGIHDTMSKCITREKQSRQIMKQELNKKSELLKLNQTPEIKTEIKKSKLNIKRLSKNSKQCKKRMLNLSNELHWKTANYLTANYKNIIIGDIKVSQIVKKKNNLPKIVKKVMLKLRFYKFKQRLKYKCQANNCNYIAVGEAYTTQMCSQCGERNLNVGASKIFTCAKCHSNLDRDVNASINILIRYYGENK

SEQ ID NO: 38879 - protein, 224 aa, Scytonema sp.
MESVGIDLGVKTFATLSDGSTIVAPSSLKKAKTKLSKLQWRHRRKQIGNHRQGIRASKNALTYFEQVAKSHAHIASIRRDFLQKTTTEISRKYYRIRIEDLNISGMIANGKLSEAVSSLGLYEFRRMLTYKEAFYGTKVELVDRWFPSSKTCSRCGSIQPMPLSERVYKCGAGCGHIMCRDLNAAINLDNAPTKKIRAASAKSTPVDRSGADSPERSRKQTSIA

SEQ ID NO: 38880 - protein, 391 aa, unknown
  TnpB Polypeptide
VLKAFKYRLNPTKEQTVLLNKHIGATRFLYNLALETKQTAWASNKVNLTRYDLQKQLTDLKSECEWLKEVNSQSLQVALMHLDAAYLLFFKGQNSFPNFKKKSNGGSFNIPQNVLLENGKLIIPKFKKGIDIVLHRETKGTIRQATISRTPTGKYFVSILCETGEAIKPKAKIKESTTIGIDLGIKTYIVASDGKEFDNPKFLRKAQSKLKYVQRKYSKRKGKRTSKKLAILHEKVANQRKDFLHKTSSELIKNHDSLAIEDLAVSNMVKNHKLAQSISDAGWSTFVTMLEYKAEWYGKNILKIGRFEPSSKLHASCGHINKDLTLSDREWVCPKCGEVVFRDVNAAINIKSFALKNHLSAEHRLKNRNELPTLVGVMTSEAHPISFAVGG

SEQ ID NO: 38881 - protein, 196 aa, unknown
  TnpB Polypeptide
VGIDVGLSTFAYLSTGEQIENPRFFRAEEAALARAQRKLSQAAKGSKKREQRRKVVARVHERIKRHRKDFIEQETCKLIKRFDFLAVEALTVRNMIKNPQLSKSIADAAWSAFTQTLLAKAEEAERTVVRVNPAYTSQTCSACGHRQPMPLSVRIYECPICGLVIHRDHNGSTNILAEGLKAVGRHSRVIPEASGL

SEQ ID NO: 38882 - protein, 528 aa, Vibrio sp.
MKDKKTVYVTEFSVRASSQDLSKVKVRMQLATKLYNSILGVGLKRLDVMRKDPSYSPLMDGLRVINKSLKLAEKKGEKKKISALKKEKKPISGELNALRKSYLLTKYDLIKSVTPMRVNCYFNQHISSKVAQGLATRAWDAIERHMFSGFGRPRFKSKHRPVRSLEVNAHESIMVKMGSTKKPTRLIWQGIEAPLNLLADRDTDGYQGNVLSDIQSNKIKYNRVILRTVKGKERLYVQSVISGLAPQKQKHLDGQAKAKGRRVAFDIGVNSIAIYSETEAKLLGFVADIKKLDGKLAKLQRKSARIQRLLNADNYQRVAKVRGRKTVHIWQRKKGTRDTVKSNHWHKINSQIVELHRLLAAKRKQYHDIIANDILALGDEIVTEKVSVKGWQKMFGKSINAFAPSGLITTIKRKAENADAKFEFINTVKARLSQYNHETDQYIKKSLSARWTKVDGEWYQRDLYSAYLAWCICDSRLTVERTKAITHWSSARQHLDAAAQHVTQHANRTEFFGSSAGLQRPPVEPVAA

SEQ ID NO: 38883 - protein, 458 aa, Vibrio sp.
VKLTRIHHCKTLNDSKYEQLEKQAALLGVVRSKVWREYGSINGVGLRDREIRDLWLKLGVDFKVPANPWKETLRDAVSDIKAYREAAKEKVKKAIRERTSCKQELKRLYTLLKCDKWMEDNFLRRQMRKHFKHGVNHTHNQIIVRADMCKTFELNGQCWLKVPSLVPRKTIQIPLNTTMEFAPKGTLRIILKDGDVEVHSQYEIEVVENCGTETVGVDKGFTEAFVDSDGDSFGEGLGKLISSESDYLNQKYKNRNKLRSVANKKPHKRQNILKNNLGRKKLDKRQDRQKSKLKTVIYTGAHRLVDKAGLIVCEDLTSPIQSSRNYGKNTNRRLNTWTKGILADALSTVSQRRCSTLQVVNAAYTSQMDSFCHGLLVGTRKGDRFHRENGDVVQADHNAARNVLARNEDPEISLFTPYKKVREILLARTDRYEKSGLTDLGSSYTLGNETLTECELVA

SEQ ID NO: 38884 - protein, 436 aa, Vibrio sp.
MARKKKSKFDNSSRVLMANVKNGSTNHKTAKRLTQISRRISNRANYIMRKDLFTGRKPDQSKVDKLLKKGRLSESDIELYNRLPAAVAQRVIQIVGDNWKSFAAAKADWKKDPTKYLAMPKPPKYVKHSKAVYIPCSSFFIKDDAIHFAKKLGLEPVRLEKGKFEDQLYNPKATTKVVNEVRLVPTGSGFRFEIIYDKHKTLEFVSSNTHSVLLDKGSFLSIDLGVTRFASLVSNKADLSPILINGGDMKRINQWYNKRCAQLRSLKKYGHIKAVAEKRNRKIKDKLHKISKLIVNLCLTHDIGTVIVGKNKLWKQDINIGKRNNQTFTNLPHALFISMLKYKLREVGVNLVEQEESYSSKASFLDNDSVPTYDEKKIVKHVFSGKRYRRGLYRSRDKTVIHADLNGAANIARKAGHEGAILVSGGVVTTPILVGL

SEQ ID NO: 38885 - protein, 412 aa, Vibrio sp.
MQKTLRYNFRLKPSPQQELKLVEFGSYARGLWNFLLSENQRQYEADKTFSFYNEMASKIKEIKKLPEFSWVKAFDSGAAQQVARDLDTALKNGTSKKSRQHFPKFKVSYRVKKQHNDSYRSVNNNNCIRVENGTITLPKVGAVPIVLHRKLVSSIKTATVQYRHGKWEVSLTQEVMCDEAKKVLKSIAGYDINSKQTVVGSNRLTVDNPKYLKQAKQKLTRLQRQLSRKKKGSARWKKTKSRLNNLHGSIARKRMDFAHKTAHRIANESDIVVFEDLNVAGMQKFNGRMIADNIMGLISDLAKYKIELRGGIHHEIGRFERTTGVCSHCGQHHRLTLKDRHFTCISCGTFSDRDYSSAIAVQRIGELNLMAGGIVARVSQSPSTQQKSGIKTKVFALVAKLSVGSEEKEKAA

SEQ ID NO: 38886 - protein, 453 aa, Sulfolobus sp.
MDGNHIVRTVMLSLKVNSEVYARLKEVEEEYKQILEDAIDYGLRNNINSFTKLKAGIYRQERAKHHSLPSHYIYTACEDASARLKSYLKRRKQGKAYTDKPEIRNVSVHLDDHLWKFSLSEVRIVTRKGWVSLKPFFTKLFWRYYNDGWALASESSFKLCKGNVVKLYLVFKRPLPKPFEAKGYIPVDLNEDNVSVLLDGKPLLVETSVKKITLGYAYKRKRISEGRSTKDRVVRRALKSLKERFKKLDIRRKLAKLIVTEALREGKGIILEDLPKNTPEKMVQDIKDKQLRDRIYKSAFASLKNAIVEKAKEFGVPVLLVNPAYTSSVCPIHECKIIYPPDGSSAPRVGVNPAYTSSVCPIHECKIIYPPDGSSAPRVGVCERGRERWHRDVVALYNLLKKAGNVSPMPLGSKESHDPLTVRLGEWLRAKSLHLTLNVQCRWARRSPMTHSP

SEQ ID NO: 38887 - protein, 376 aa, Leptolyngbya sp.
MSNKAFKYRFYPTVEQENLLRRTLGCARLVYNKALSVRTEAWYGEQKRVSYSDTSKLLTSWKKEAELSFLTEVSSVALQQGLRHLQSAFTHFFAGRAKYPNFKQKRNGGSAEFTKSAFKYTGGQVYLAKCAQPLPIRWSRFLPANAEPSTITVKLSPAGRWTVSLLVDVDIEPLPKSDNQIGIDLGITSLMTLSTGEKVANSKGFKAKYRKLCKAQKALSRKVKGSNNRYKARERVARVYAEIVDARRDLLHKLTTRLVRENQLIAVEDLAVKNLMRNHKLAQAISDASWGELVRQLEYKCEWYGRTLVKIDRWFPSSKRCHSCGHTVNKLPLSIRNWTCPSCAVQHDRDINAAMNILAAGLAVEVCGASVRPARA

SEQ ID NO: 38888 - protein, 454 aa, unknown
  TnpB Polypeptide
MLTGISQKCFPGPVLANTLSQWIGCARLIYNAKCDEDRYLRAFAQKYLPVQTYAPIDKQYSQYKSELTPWLKDCPSQIMRNSATIWYKAYIDFLKGKSARPHRKNKVNGNYIWVTNELFRIRWEGSTCVVELGTIKNPAGSMRVKWNKSRIPKIPPKSIWIKKNHAGWKLSFSYEDGNLINQDDNDQHLKHLSTLSADELEGLITPIDRGIAKPIQTDQTSFDLDIKAKCRLAYREKCLKRFQRKLARQNKGSNQHKKTQQKIAKLKEKDTNLKNDFWHKTTHAIASNAKVVVMEDLKLKNMTLRPKPRQDVNGKWLKNGAKAKAGLNKALLHLGLNKFEVYLSYKMAKLNKPIFKISPYQTSQECAHCGYIHPDNRKTQSDFECLSCGHVDNADHNAALVIRKRAMDLILNSGTELVGTQKNVLRLRANHNRSKTVKSQYLAANDDLLKKKVA

SEQ ID NO: 38889 - protein, 363 aa, Ruminococcaceae sp.
MNRAFKFRIYPNSSQQELISKTFGCVRFVHNRMLGEKIEYYNECGQSLRVTPAKYKREFEFLKEVDSLALANAQLNLEIAYRNFFRNKSFGFPKFKSKKNERRSYTTSLVNNNIRIDGGMLILPKLGKVSIKQHRSIPEEYKLKSATVSQSASGKYHVAILYEYDYIVKSKPTENIVGLDFSMKELYISSEDTKPNYPGYYRQSLQKLARLQRSLSKMTKYSNNYRKQRNKIAILHEHIANQRKDFLHKQSRQITNAYDCVAIEDLNMKGMSQALNFGKSVSDNGWGMFVSFLDYKLCEEGKVLIKVDKWFPSSKTCSVCGAIKKELSMSERIYQCDCGNVLDRDVNAAICIKNEALRLLAVA

SEQ ID NO: 38890 - protein, 391 aa, Iningainema sp.
MSFAAKNLYNVANYNCRQAYFNGGEKLVPSYNTLYHLIKDSEQYQALPAKVAQQTLMLVSQNWLAYFAGLEKYQIAPHEFTGKPKPPKYLDKDGRHVLTFTEQATSKTSLAIGLIKLSTIDYVFDSQIVLGRVNIYCQSRIVPKLNHYVLEIVYEVADPAIKQSDQVASIDLGIDNLMAVTSNVPGFQPVLINGRPLKSLNQFYNMKRAQLQSDSGLRTSKRLKHLTTSRNHKVKDYLHRASRVVIDLLVDADITTLVIGKNPDWKRNTQLGRANNQNFVQIPHSQLIAMLSYKGALAGIKVITQEESYTSKSSFLDLDLIPTYGAKPSYWKPSGTRIKRGLYKSKRHLINADVNGSYNILVKAFPDAFGIGDREVLVHPRKINLPGYAPM

SEQ ID NO: 38891 - protein, 450 aa, Nocardia sp.
VLTGRRYRLQLTPEQAEFAERIGGICRAVWNTGLEQRREYRRRDAWIGYQQQAKELAEAKSEHSWLAEAPSHCLQQTLMDLDKACRRHGTFGVRWRSGRRWRPSFRIPDGGKIQVERLNRRWGRVKLPKFGWVRFRMSRALGGTVRSATVSHDGGHWYISLLVEDGVIQGERHVSTSSVGVDRGVAVAVAASDGRLYDRSFAGKAEGQRYKRLQRKLARQKKGSANRRRTLDMMRSLKRRERNRRADFNAWVANRLTARHGLIAIEMLRVRNMTASARRTITEPGKNVRQKAGLNRSILDKGWYQFELALANAARYTGTQIVKVAAAYTSQTCSRCRTTDPESRESQAVYRCRACGHSENADVNAAKNILAAGLAVTACGDLGAGRSVKQEPQPSQGEIPRPQAWGGRQHPDQCLKCVGTDVEVAGALVYGLDDPIPGQTSADLCNKAIA

SEQ ID NO: 38892 - protein, 457 aa, Alkalihalobacillus sp.
MTCWQRGWTQVARKKPIKVLRKQKKTENIQRFTQKQNIGHGILTAKEFRLLQRMSHSSKALRNVGLYTLKQNYLIHNKMATTKEVDAAMKADVNYWGVQSNSVQAIRRTLFSEAKSFFEALKKWKKNPENFTGRPKFPKFSSTTEKRIIEIYQVPKVDKDGYWSIPMNVEFRKRFGSIKIRMPKNLLNKKVSYIEIVPKQKGRFFEVHYTYEVQVAQMKKQPTTTINVLSCDLGVDYLMSCATNHGDTFLMDGKKIKSINQYFNKTISEQQEKNIENGISKRVVTIRMATLWNKRSSQINGYISQAVGLLFKKVKKLNIDTIVVGYNASWKQESDMGKKNNQQFVQIPFHKLISAIENKCLKEGIRFFKQEESYTSKASFLDRDTIPVWSKNDKKNYSFSGKRIHRGLYRSKTGPCIHADINGALNILRKSEVVELDENLKIKTPIKLGVQKRKAVA

SEQ ID NO: 38893 - protein, 445 aa, unknown
  TnpB Polypeptide
MWTRNPERIMDWLCDGWRSRYNQHRAHRPQRRLVEDVETRERIWVDVPLGGADVKPAVKDSQARLDCLWLACIPSPILSSCERVENTGWFAGLKRKKTNGGRVPGFRSRHKAPQYFVCWRNQSKTGNALYRRTGKRTGVVVITGSVPRQYRREGENEARWRIAIHVRVSQPIREYTSVAVNWTNRTLVFTNSPLPISRTDTGMMVGLDRGCVHTLATSDNIFLDIPQPSVKEMDEYKRLQRKLARQDRTNEKRGGRNAKFTSKNRKRTLQAIRSIQRRIDNRKDDWIAKTTTMLVREYDFIAMERLNVKAMSRSVRPKPDPDNPGHYLHNGRKRKSGLNRSILANRWTDILHCLEYKTKLAGTRLVQVPAYDTSRICNVCGYCDKENRESQAVFHCRKCGHEANADVNAAKNILDRALGTNGMDDAEEWRQQASTLVKTSGKQRR

SEQ ID NO: 38894 - protein, 488 aa, unknown
  TnpB Polypeptide
MGKSTTPSFAVSLRLLPIKEDERELEYRFCAGTHLYNLCVKEARKRAHKLLKDAEYKTRRKAYSGTKEERDALLEIRAQYGLAGNYSLESYIKEGRKKFAKHLDSDTCAKISQTVWSATADFLFKNGEQIHFKKARDFRSMESKTNKQGIRFKENCVHWCGLCIPVRVRKKDAYAKQCMQNNRIKYCRIHRKWHKHKWRYYVELVMEGVPPLKERRMGNGRVGIDISTSTIAAVSEADVLFKELNDGIDSIDREIKCLNRKADRQRRANNPDNYNENGTIKKDSRNFHKKWKVSHNQKLTYDKIKELYQKRSNKLSQFQNQLANEIVAMGNEIVIETMNFKALQKKAKKTEKSKKTGRYKKKKRFGKSISIHAPSQLVGKVKQRLAYFGGTLLEIKTTQMRASQYNHITGEYMSSDLNKRWKELIPNLCVQRDLYSAFLLFNAEDEETIDDKLCMQTFDKFYDSHNRLIDELKQQKKEGKHFPFCMGI

SEQ ID NO: 38895 - protein, 358 aa, Enterococcus sp.
MPQTMTVKIKLNPTKTQEKLIQTSSLAYIKTVNSLISEMVVAEKVTKKTSKDVLAPLNSAVKNQAIRDAKSVFQKAKKNHFKKIPVLKKTVIIWNNQNFTICPSGIKMPFVINGNSKKIEISAVIPEYELSLLKNASKIGTLRVTRKRSHYMAQIAIEIPERLNTSTKIMGVDLGIKIPAVCCTDENEVKFSGNGRMNKYIRRYHNSRRKELGNNKKLNAIKKSKDKEQRWMKDQDHKISREIVDFAIEHNVGIIRLEKLANIRKQTRKSRKNNHSLSSWSFYRLASFIEYKANLVGIKVEYVNPAYTSQRCPNCGHLHHAKDRRYSCSDCGYIGHRDIVGAKNIIFAPVLDGKSQVA

SEQ ID NO: 38896 - protein, 273 aa, Oscillatoriales sp.
MLLSIKTKLKLNKSQMTIMSKHAGIARFTYNWGLATWSGLYQDGLKPNKYLLKKFFNNHVKPEFTWIKEAGICQKITQYAFDNLGDSFSRFFSKKGGYPKFKKKGHHDSFTIDAGGKPIPVGGTSIKLPTIGWIKTYEGLPHTTCKSITISRTADSWFIAFAYEQEHEPTVKSHEIVGVDLGIKELATLSTGVVFPNPKHYKAHLAKLKRLSRVLARKAKGSENRYKAKTQLARHHAKIANRAKKHSTSNYYLLMQKPRKNSSRKLECFRDVS

SEQ ID NO: 38897 - protein, 412 aa, Lactobacillus sp.
MRKSMADYQYHYGLKVRCYPSDRQKQIIEHNINGSRFAYNEMVAIDKELYQLRKCELYIKQVQDRIDYLTKRKESTKYLFFLHSWLRQLNVGTDVTSMAIRSYKAAWKMFRKVHSTGIPKFHKKQYSGSFQLPNRYSSKISTPSLFNGKIRFIDNKHMNIFLIGRIRVSGGHKILLNYSDIRMGTVTVSKDSIGNYYISLQLASDTPFVESNKNTCGSLGIDLNTENFLTTSNGDVVANPRYYRKNKKLLAKQQRILSRRHLRAKKEHRSLRDSKNYQKQRVLVAKLSNSVSNRRNNFLNETSTALIKNHDLVVAEELRSKNLLKNHALAMSISDAGWRTFLQMLEYKAEMYGTIFVTVDPTYTTQTCSDCDYVMKGEEKLTLSDRTWICPNCRQYHVRDHNAAKNILAKAI

SEQ ID NO: 38898 - protein, 375 aa, unknown
  TnpB Polypeptide
MEKTFEYRIYPNVWQKALIAKTFGCCRVVYNKVLGICQDEYKAGKKSKSINSYITQIPVWKKTDMPWLGEVDSMALQQSLRNLDKAYKNFFRNPGKVGFPKFKSKYNRRQTYRTNVFSVVNDKQVKLPKLGLVKARISRPIEGRVLSATVKQVPSGKYFVTVCCTDVPEPKASKPTVCMLGIDAGVHDIATCSDGERLPNPKYLAKSEAKLKREQRRLSRKVKGSTNRDKQRVKVARAHEKISNQRKDVLHKFTTNVVYKSQGIAVEGLNVKGMMCNHHLAKAIGDASMSEMIRQLEYKCAWYGRDFVKVDKFYPSSKTCSKCGHIYSELTLAERSWSCSECGTVHDRDLNAAVNIAREGKRILKGTAGLVGTAA

SEQ ID NO: 38899 - protein, 396 aa, Streptomyces sp.
VKLVVQVKLLPDAVQAPALESTLHAANKAATWVSALSFEHFGLTGSVRELRKLCYGELKAQGFGAQAAQHIIKRVADAYTTLRANIKAGNLGPPGAQRRRKAESRPVTFRPEAAHTYDDRCLSWNYDAQTVSIWTLDGRLKHVSFACSPGALKQLAQSRKGETDLMMRDGKLFLAATIDVPDPEVSEPKGFLGVDRGLTNLATTSDGDNHTGRRLGRYRRWQARKRAELQARQTRSAKQLLKKRARREARHATHINHIIAKTVVAVAQRTERGLALEELRGIRERVTVPRDQRARQSAWPPSTSSAPSSSTRHAEPACRSSRWIRPTPRSAVRAAATPSAPTGAPGTTSAVVGAASLGRPTTSPGSTSPRERPRRGYSSTCPTRPPRSAGTGGCDP

SEQ ID NO: 38900 - protein, 406 aa, unknown
  TnpB Polypeptide
MFQSRKVKVHLNKFQKELVHRNFGASRFLWNWGLERLNKWWEENKDTPKDQRPKRPSAFDLGNEIRKLKKEDSNFMWLNECDSQIPKFVFDNLSKAFQRFWSHSASYPKFKSKKELRQSYSSVSPTVPRLEDGNHLRLAKLGRVKFYNKGYIPDVKLKRATLSTDGIDYYCSVLFDYPVESLPLVNKEVGIDLGLKSTVTCSDGKVFCWNPLKRSLRRIKLSQRHFSRCHKGSKRRTRAKIALAKRNRRLMRQHTDFIHKMTSFLVRENQAIRMETLNTKGMMKNHHLARSIGEQSFYEIRRQLEYKCVRAGRTFELVDPWYPSSQLCSCCGERHRAMKDLSKRTFKCPFCGYTADRDLNAALNILKYCTDEESETYARGDSSSLETGRTSGRLASCRSENHRNLF

SEQ ID NO: 38901 - protein, 382 aa, Escherichia sp.
MRRFAGACRFVFNRALARQNENHEAGNKYIPYGKMASWLVEWKNATETQWLKDSPSQPLQQSLKDLERAYKNFFRKRAAFPRFKKRGQNDAFRYPQGVKLDQENSRIFLPKLGWMRYRNSRQVTGVVKNVTVSQSCGKWYISIQTESEVSTPVHPSASMVGLDAGVAKLATLSDGTVFEPVNSFQKNQKKLARLHRQLSRKVKFSNNWQKQKRKIQRLHSCIANIRRDYLHKVTTAVSKNHAMIVIEDLKVSNMSKSAAGTVSQPGRNVRAKSGLNRSILDQGWYEMRRQLAYKQLWRGGQVLAVPPAYTSQRCAYCGHTAKENRLSQSKFRCQVCGYTANADVNGARNILAAGHAVLACGEMVQSGRPLKQEPTEMIQATA

SEQ ID NO: 38902 - protein, 402 aa, Halorussus sp.
VAEGYEHRTAITRLQVDDGDQQLLEETVNNWRQGCQIAVNEAWDSCDGKREVQSLAYDEVRSRTSLGSQHAILATHQAATAISSCLEQRRTGKNPTKPEFTAPTVKYDARTMTLFDDYSVSLSTIKNRVRCDLSLPEDPDGYQFEYLADKDWELTESTLTIRDGKFFLHLGFRQPTTSCGQSTAENGTVLGVDLGVENLAVTSTARFFSGKELNHERREFEKRRGELQQTGTRSAHRTLKQVAEREKRYVRDYLHRISKQVVDEARQCDCTTIVFEDLSDIRESIPEADWFHIWAFRRLFEYTRYKAKENGIKTVQIDPTHTSQKCSECDHVARTNRPRRNHFHCERCGTQANADYNAAKNIGLRFVRRGQQSSRRTGTGQCALKSGTLAPDGTFSPYPTNS

SEQ ID NO: 38903 - protein, 461 aa, unknown
  TnpB Polypeptide
MIASDRVAIRVGTAKLVVDGTDETLTRQAKIALSPNRIQGRSLEGLVEWSRELYNGALQHRRDAWRIARVSISRYDQFLELGALRGDHPQVARYGNQPMRGALSRLDEAFAGFFRRQRDGRKAGYPRFRSAGRFRSVFYDEPVNWALRGLANCGGGQFERPVLYVQGVGELALSTRAARQLRRLFDRGGEARTLTITKTCSGSWRATVGFRGVHVSHLNQNAEVGGVDRGITVTAALPNGTLLRCPRFLDEARLQISTLQRERAQHPKFSRDWKRCNRSIAKAYRAAHRRSENWARHAAKEIVAAYGVISLEDLALRNMVRSARGSEGHPGKGVAAKKGLNRSIQEAALGRLAYWICVKAEEAGRRVWKVDPRNSSRECAACGHTEPANRHREHFACRRCGHREHADVNAAQVLSSRGQAADVRWRTEGSPLLKRPVPKNLRNRRKEQYGAGSAPHAAAVA

SEQ ID NO: 38904 - protein, 424 aa, Parvibaculum sp.
MVALDGAMVSTRIMTVHRVALDVNKTQDELFSQCAGIARFSWNWALDRWKSQYSAHRADNALPKPNEAALRRELNAIKGTEYPWMLQAPKAVPQQAIKNLGAAFKGFFAGRARYPNFKAKDRCRESFRPDNGPGTFRIEGRRLKLPRIGWVRMREDLRFGPDREPALKSVTISREAGRWFAAIAVEINHSFTPRPDEEVLGVDLGVTDLATLSDGRKFAGPKSLGRNLKRLARLQRSHARKAKGGKNRARSRAKIAKLHARIRNIRQDGLHKLTTGLARKASAVVIEDLNVRGMMANRHLSRAISDMGFYEFRRQLSYKLERLGGALMVADRFYASSKICSACNTKAETLPLSVRSWTCANCGAQHDRDVNAAINLKNLAGSEDFAVRPVTACGAEGSGDGNDPVTKPAASKQELGSDQKRSSP

SEQ ID NO: 38905 - protein, 493 aa, Parvibaculum sp.
VSEAQNNGLLSTSGKAASSPATRARELCVTLDPVSISGDQGFTPYWNARCAESQSMWWLPHQVGSRGQGSRSSATSSNFQEAASNFWKKTIVPSRSTSNISLCLSFASATSCTARGQVKGTRKIRVYPRGESFFFALIRQQRRAYNLAIGCFIEADKGFVDYNHPDLRKIELRRTIREFVAAECAERDEAFVSAWCDEAVLAAFRTREAVIGKRKNGESAGYAFRSLKDPRQRFYIQKLSAGFVAKQLSLSEGLPPEAFGKLTTIVFERGQWFICAQKHITTIGQDEIQARSIVAIDPGVRCFATAYSMNQTTSYGEDFYASRVFPLLLQIDKLIGQRARAKHDQWKRHYQKKIDRLVLRIRNLVDDLHRRVAYDLVQRFDIILLPRFETKQMSLRLERKIRTKTVRSMLGFSHYRFRQHLAWMCRKYGKRLIIGNEAYTSKTRSWDGSVVQNLGGAKTITDGKIYVDRDINGARGFMLRALYGNSGHSQATA

SEQ ID NO: 38906 - protein, 426 aa, Parvibaculum sp.
MHVNKAYRFRIYPNKEQEVFFARVAGCCRFVYNLGLEQRRVFGRPGRGFTYITQQNQLPALKKEAEWLAEVPSHTLQMALRALDRAFVNFFEGRAAYPQPRRKFENDSFTFPDPNQIRIDFGRSLLILPKLGRTKRDNGPVAIRQHRRLKGTLRSVTIAREGEHWYASILMRVRVKAPTQRRDNPVGVDRGVDVPFMTSDALALGQETETNRMRERECRLARTVSRRKKGSRNRAKALNALRRHKSKMVRRRRNATHKATAALAKNHGIIVVEDLKVANMTASAKGSVETPGRNVRQKAGLNRSILDKGWGEFVRQLEYKLGWTAGVLIKVDPAYTSQTCPACGVVDPASRITRDCFVCRSCGHADHADVVGAKEILRRGLEKLAAQGIILPGGGHPLAACGELGVTRSMKQEETANRLEILEVAV

SEQ ID NO: 38907 - protein, 382 aa, Parvibaculum sp.
VCRTRLHPPSIAGRTERLRNAARSLNKTERRAVSGPPRFIRIARETRRSGRGGKRPSIICICAACVHIDAMKVFRAYRFRLKPTEEQAAHMWQFSGVVRLVYNLALEQRRDWWRQYTANTGKSLTYVAQARELTELRQSFDWIAVVSQTSQQQALRDLDRAYANFFAGRAGYPTPRRRGVNDAFRFLGRECRIRRLNRNWGMIHLPKIGEVRFRWTRDIAGTVKNVTVSRAALGWHVSISCEVEIDKTKKLNAEAVGVDRGVVHTLAYSDGEFADLPLERLRVLDRRARKQAQALARCRHGSKRRKKAKARLARTRAKAARIRKHWIHERTAHLSRRFGTVVIEDLNPLATQSPSFRKGSRSLWLSLILDILLHDFQRRPAA

SEQ ID NO: 38908 - protein, 381 aa, unknown
  TnpB Polypeptide
VNRVFRYRLYPTSRQDTALGQMLRDHCDIYNAALQERRDAYAQRKHSVRYGEQSGQLKDIRADEQYGRWSFSSQQQTLRRLDKAFAAFFSRTKKGEKPGYPRFRSSRRFDTVTFIDGDGGKWLDNTVRMQGVGHVKVKLHRPVRGTVKQFSVTRTGRHWYVNVICVGVPVQPKPFTGAAVGLDRGLTHLIADSDGRFVDNVRPLRTAQDRLSDAQRDLARKKRGSNRRRKAVARVASLHRKVKNVRKDHLHKVARSYVDAYNLIVVEDLKVRNMTRSASGTVEEPGANVAQKSGLNRSILDAGWGVLLELIRQKAEEAVVEVVEVNPRNTSRTCHACGHVGAENRCGEAFLCQRCGHSAHADTNAARNILRLGLSLREAAA

SEQ ID NO: 38909 - protein, 502 aa, unknown
  TnpB Polypeptide
MQPLFKRNIIFFDPPFILISLFVPFYNRYYFNCIKLIIFNKILRYFEDFKLTINKFYNIFYDYRLFIFSLHEEEPLKEKFIKFLLSFNFLSNRILGSLTMRLTEQIQLPLNKRLSYLCHLAKNLFNLANYYVRQELFYLESWLRYHDLWYMLKNKTAYQQLPSQTAQQVLKLVDHNWKSFFRAMAEWKCHPEKFLNRPKPPKYKTKNGEYTLIFTNQQCHIREGYLYFPKKTSLSPIKTRIQEPLHQVRIIPEGLYYLLEIIYEKQQVDLGLNKGRIVGIDIGLNNIVTLVNNAGLQPAIIKGGVVKSVNQFYNKRIAHYRSKKDKQKIPFETKQLKRLTQKRNNLIKDKFHKISRSIINYCMEHDFGSIIIGYNPLWKQKIKLGKKTTQQFVQLPFRMLIHYISYKAELIGIEVRIYEESYTSICSFLDQEPIQKHSRYSGRRISRGLFQSQNGTLINADVNAGYNIIRKALPNAPWVDGIEGVGFHPYCLTFSKGVRMTE

SEQ ID NO: 38910 - protein, 262 aa, Thermus sp.
VVAKVDQVRFYRVKALAPRPYTPRTDRLALDVGLSPLLATDRGDLLGRGFLRMLLAYDAEIQAIARKAQREGKRLREVEAYREAVGRLREFLRNEVNRLLNRLLALHAPAALVVERLDLRSPELSRRMNRLVSNFGRRYLKEKLQRLQELYGIQVVEANPAYTSQECARCGYVDPRNRQDTQTFRCLACGHRGNAQVNAAKNLLRRSSPGSGIQPFTPKRQVLQILLAEYLERHQGGWSAARERAWATNPYTKALARSKPPG

SEQ ID NO: 38911 - protein, 306 aa, Bacillus sp.
MLFGKKNHGSYFPIYLLPFVKLDLDSSQSPPMFELNVRLHVLVIITSNEQMNFPTGLLFPHAIVLPILVSLQNEFQCRHLIVATVRRNPSGRYFVSLLVETEVQELPKTNSCIGMDVGLKDFAILSDGTTYKNPKFFRSLEEKLAKAQRVLSRRTKGSSRWNKQRVKVARIHEYMTNARKDYLDKISTEIIKNHDVIGIEDLQVSNMLKNHKLAKAISEVSWSQFRTILEYKAKWYGKQIIVVSKTFASSQLCSCCGYQNKDVKNLNLRKWDCPSCCTHHDRDINASINLKNEAIRLLTARTVEIA

SEQ ID NO: 38912 - protein, 411 aa, Nonomuraea sp.
VKLAVQVKLLPTPEQAEALESTLHQLNQAANRVSQLAFDTQTFGVYALRRRIYGELKATGLGAQQSQHVIKKVVDGYATLRGLIRNGQLTGKRRRKAESKPITFRPAAAHPFDDRCLSWSYDTRTVSIWTVRGRVKDIAFTGSAEQLKTLATYRRGESDLLLRDGAWYLLATCEIPEATLRADPDGWIGVDRGIVNLATTSDGINYSGDKLTRYRRRMARVRAELQARGTKSARRKLKRRAKRERRFAAHTNHVIANEIVADAQRTGRGIAVEELAGIRERVRLWPSQRATLSSWPFHQLGEFLAYKAHRAGVAFVQVDPAYTSQMCPNPWCGHTGRGNRPTRDTFRCGSCGFAGPADHIAALNVSRRASTVWAFVNMPNEPAVESGPSASRAGQPDPTARRKPKAPALGR

SEQ ID NO: 38913 - protein, 402 aa, Crocosphaera sp.
MIVLEFKIKGKTKQYQAIDEAIRTFQFVRNKCLRYWMDGQKVNRAELYRYNTKLRSEFSFVQDLNSHACQASVERCWSSIARFFDNCKKQIPGKKGYPRFKKNTRSVEYKTSGWKLLDPKHIEFTDKKEIGKLKLIGTWDLAFYPQDKIKRVRLVRRADGYYCQFCISVDIKEELPPTHQTIGLDVGLKEFYTDSMGQTEPNPRFYRQGEKRLKFHQRRISRKKKGSTNRKKAINKLGRKHLKISRQREEHAKRLARCVIQSNDFVAYEDLRIRNLVKNHCLAKSINDAGWYQFRKWLEYFGKKMGRVTVAVNPAYTSQICSNCGAVVKKSLSTRTHVCACGCRLDRDENAAINILNRALGTVGHTGTWILDPNTSGDLSSTFVGAILHQQDESLIEESPCL

SEQ ID NO: 38914 - protein, 372 aa, Aneurinibacillus sp.
MQMTITAKIKINPTSEQIEWLKSTLDAYRTGCNYVSSLVFETKQLAQAKVHKMTYGTLRSVYFLRSQMAQSVMKTVIARYQSLKSNGHDWTKVMFKKPEYDLVWNRDYSLTQGLFSINTLRGRVKVPFETKGMEQYFDGTWSFGTAKLVNKYRKFFLHIPMTKKIPEASEYTINQVVGIDMGMNFVAVSYDSQGKSLFFNGRSIKDKRSNYKHMRKQLQQVGTASARRKLKRIGERENRWMSDINHQVSKALVERYGANTLFVVEDLMGVRQAIERVKIKDRYETVSWAFYQLRQMIEYKALMAGSKVIAVSPRYTSQTCPKCGHTEKANRNRKNHTFCCKTCEYKSNDDRIGAMNLQRKGIEYIAEVTTQV

SEQ ID NO: 38915 - protein, 348 aa, unknown
  TnpB Polypeptide
VFKDVSAHAAQQTVSQIHKDIKNLREKQDKGYNVGRLKWQGSGERRSVTYQSEGYDVDYNTGQDGYATLRLSKIGTIRIRVHRDLPPTEEIKRVVLKKETTDEWFACLVHEKPDDDLPEKSKIDDLSATDRVGVDLGIQSYIHTSDNLAVDTLDLSDEYDRYAREQRKLDRKEHGSNNWEKQRQKVAKAKRRIKRKVLDYQHKLTTWLVREYDMVAVEDLDVKPMLETSQSAKNKQDAAWSRFLTLLEYKAELHGTHVVKVEPAGTTKECSRCGVETDKPIWVREHSCPACGHEEDRDLNAAKNILSRGRTQLGAGHSESRPVQTALPVFTPSRVDAKRVVEAGSPEA

SEQ ID NO: 38916 - protein, 347 aa, unknown
  TnpB Polypeptide
MIQTQIKLRINKKQEVKLNSWLLSLTRVWNWGISKIGYDAKHGIYHKEFDFVNLLANHSKKLEIPSHTLQAILKMGHTAWQRCFKKIGKKPRFKGVRNKLASIPFPDSIKYPTEGRVRIPMLGLIRYHKQDIPQGKIKCGRIVKRASGWYLCLFIDSKSNVILPNGEGKVGIDPGYKTNLTLSNGVKIDTIKHFKKRQNRLAQAQRGKDKKLTARLQERIKNRRKDENHKLSHKLVQEYDTIVFSKDNIKGIAKKYGKSVAEAGHYQLRQMLSYKCSISNRKYIEVDSKYSTMTCHACLSKNGPTGISGLQVRQWECSDCGVQHDRDINAAINTLIVGLGTSLERCA

SEQ ID NO: 38917 - protein, 459 aa, unknown
  TnpB Polypeptide
MSHKTIILRLSPNLADETKLLDLCRKYSSCVRYAYNRLLEGDIYGDLRKSLQSKFELNARYAAEAVLEAQAKISSIEELGHIDPTKIVFGSKKLFEQLNNKGISDTQRSKLRDEWVEKRQCNLYNSGDTYKDGNQHIRFVDGHKLRITVGHREWIYLDYKGHHKLYWSDFQISVALGTPYAVRVQRRNNIWLAYVTFEIVKKKAVAKQQMLGIDFNASPHSIAITSVNEIGNIVNSENIKTGELTYLSTKRRELKRYELANQIVDLALQTKSSIAMDGVNVQNSKKGSGSSKRLRRVIGNFGVQSLRDKITSVAERKGVVIVETPCNYTSVIGVLKYAPRYGLSNHVAAAMVQARRAQGRIEEVPKNLRCLSSLQDESSTNGRKLDSRMNSKESFGKWQTLKKVTLTELGTGWRLLKRQPSPIQSLNRQIPMLSKNTLEEIPGIPRLTSFCKFIQPGRG

SEQ ID NO: 38918 - protein, 277 aa, Bacillus sp.
VKCYFPKNNKTDWTVERHRVKVPTIGWVRLKEYGYIPKNATVKRGTVYQRAGRYFVSVLCELEEMATKLARNKIGLGIDLGVKDFATRSDGIVHENINKTIKVKKIEKRLKREQRSLARKFENLKKRGEKSVTNKRVNIEKNVLRVQKLHARLANIRIEYVKSIVTNVVKTKPTFITVEDLNVKGMMKNKHLSKTIAKQSFFAFKTWLLTKCEEYGIELRQVDRFYPSSKLCSCCSQKKADLKLSDRVYTCECGNVMDRDLNAAINLLQAKKYTILT

SEQ ID NO: 38919 - protein, 239 aa, Okeania sp.
LWNAAYKNGYKPNARKLREVFTNHTKPLYPWMKNLSSRVYQYAFPTECCANINLGEAFKRFFQGLGKHPKFKKKGRSDSFPSECYANTIDSCGKPIELNGWSHKLPFIGIVRTYEPIEATTKKITISRQAGDWYLSCSYEFHAITTPKTTDVIGVDLGVKTLATLSDGKVFEGVKSYHKFEAKLSRLQYLNRHKEVGSANWKKAQLKIAKLHGRIANIRHDALHKLTTYASLEPRHGLN

SEQ ID NO: 38920 - protein, 415 aa, Okeania sp.
MFRAYKYRIYPNTEQLKALAKSFGCCRWFWNYSLNLCQETYQKTGKGLSRSKIQGLLPNLKKQNHWLKEDVYSQCLQVVALNLSTAYKNFFEKKARYPRFKSKHGKQSISYPQNVKFEGDYLKLPKIGLIYCVRHREFDGKIKTVSISKNSDGKYYASILVDDGEENPKLSSEGKAIGIDLGLTHFAITSDGSKYDNPRHIRKHERNLKRKQKNLSRKQKGSKNRNKARKKVAKIHSKISRSREDFLHKLSRAAVATTGGTPATRCLKIVNENQVIVLENLAVKNMIKNHNLAKAISDCGWGMFGTMLNYKAEREGKIYLEIDRFFPSSKTCHICLNQVGSLPLNVRTWTCKHCQTTHDRDTNAAINILKEGLRKLSLGTSDTALRGNVSRVGKTSVLSNAIPNEEGSLHYIPCD

SEQ ID NO: 38921 - protein, 302 aa, Okeania sp.
MVEKAYKFRFYPTPEQENLLRRTLGCVRLIYNKALTARTQAWYENKERISYKQTSAMLTSWKKQEDLDFLKEVSSVPLQQGLRHLQTSFTNFFSGRALYPNFKKKRNGGSAEFTKSAFKWKDGQVYLAKCVEPLPIRWSRQLPPGCTPSTITVKLSPSGRWSVSLRVNDTRDLSLKPTNKQVGIDLGITSLLTTSDGEKFANPKNLNKLYKKLRLAQKSLSRKTKGSNNYQKARLKVARIQAKIKDSRLDFTHKLTTQLIRENQTIVVEDLAVKNMVKNHNPPPSPPGGEQEGWVVTLTGGS

SEQ ID NO: 38922 - protein, 281 aa, Okeania sp.
MKARFKYRIYPTLGQKYRLARLFGCVRVVWNDSLACCQEKYKSGEKKPINSELQKQFITQAKKTEYREWLSEVSAIPLQQSLNDLNQAYQNFFKSTQGKRKGRPVKPPKFKTRKSRQTARFTKGGFKVGQHKVYLAKIGKLKIVWSRELPNVPSSVTIIKDSANRYFLSFVVEILPETLPKTDNSVGIDLGIKTFATLSNGQKFDAPKPLKKRINKYRKLSKSLSKKAKGTNRHEKARLKIAKFSYGMLRKHAKLKDTRIDFLHKLSTEIIRENQTIVLEV

SEQ ID NO: 38923 - protein, 259 aa, Okeania sp.
MNGEALYLNFSVTITKTPTRKYYASLLFDTKQETPEVVLTGKVIGIDLGLKDFCITHDGEKHLKYNHPRHLKKHQKNLARKLALLARKKKGSISRQKAPQLVARIYERISNARQDFLHKLSRKIVNDNQVVVVENLNIKSMVYNHKLAKAISDVGWGMFVNFLDYKLQQKGSLLIEIDRWFPSSKTCCNCLYQMSEMPLEMREWTSPNCGTHHDRDENVGKNIRAEDIRQLSVLEGLLLFVQRPVGKEGKSEQKVGLIN

SEQ ID NO: 38924 - protein, 408 aa, Francisella sp.
MLKAYKYRIYPNMEQKELMEKHFGCTRKVYNIFLDYRQKEYAKGNKINYLTTQKELTNLKKQEEFSYLKECSSQSLQMALRDLDNAFANFFRKTGRYPRFKSKKDNHHSFTVPQNIVVGDKKLIFPKFLSGVRIKLHREIPKNTELKRVTISRVQDRYFASILVDDLQEKPKPIKAKKAIGLDMGIENFIISSDGVKFENKRYFDKSSKTLAKLQRRLSKKKKGSNNRLKAIAKVQKLHTKISNQRSDYLHKISHEIINHNDIICVESLNVKGMIRNKKLAKHIGDVSWGKFIEQLAYKAEWNGKTLIKIDKWFPSSQLCCVCGSNTGKKPLHIRKFDCPECGTKKIDRDVNAAINIRNYGLGQIDDRYTAGTVGIQACGVSSSGTMSLDVVSYDILKQEAQRSLAVG

SEQ ID NO: 38925 - protein, 456 aa, unknown
  TnpB Polypeptide
MYQVTRTIVKRNEYPEYCSYFSALGVSVTNLYNAGLFRVRQNFTIRGKEHPSDLELQVQEEIKLTVVQKHTKTPKSCLSYTFLEKLMRVTNNPDFFSGIPMQLAQNVVKHACQDFKNWLASVKEYKKAPDKFLGAPQMPHYKKKGSVSGLHFTNQDCVIRDNNGKSYLKFPHFHGDYLPIGYVSGSLKEVRVRPYYSDFLVICVYETESTEPLPENGNVCGIDFGISNIVALVSNTQKCMRYKGGALKAQNQWYNKQRSYYQSIAMQGHEAKEAKQPGVLNTRHMEQLNRKRNQFFHDALHKIASDVVKFCLENDIRAIVLGKNKNWKQNCNLGHHNNQIFVQMPIATLSYCIKYKAEENGLFVMEQEESYTPKASLVDGDKIPVVGDQEKPSFSGKRVSGRLYCTKEQMLINADLNGAGNILRKAYPTAFEGITDYHFLNKMIVKKCNTMYSRNG

SEQ ID NO: 38926 - protein, 306 aa, unknown
  TnpB Polypeptide
LLLKPLKPIFKEFIPLDFDRRTFTFSFDKVRISTLNGRKDIPINIPEYYWKYLDWNYQTMQVRIDKLNRMFLHITFSREIAIPQSSDGLLGIDVGINNIAVTSNKQFFNSKQTKYIKSKYKYLRSRLQSKGTRSSRKLLKKISGKEKRFMRQCNHEISKSIVNSINPGDTIVMEDIKGIRRCKVSKKQRYWLNSWSFYQLQRFIEYKARLNGNRVILVNPRNTSKRCSKCGGLNTIRQSSSFHCLDCSYHLNADLNASFNLKFLGKVLITKADVNQLHIPNVDSKAIFNVNGTADDFRDKAITSTY

SEQ ID NO: 38927 - protein, 412 aa, Thermoplasmatales sp.
LSHAWSSSGEKRTIWWYYVPSGQIVDYLKDMRDAIHFGLLKAEEMRRTNGKIPSPIDLRKEIKPWFDSTYDYAKHHINPVCRSSVTILRSFRKNRKGKKYPEAKKLAMRLDSELVKLQDGFLRITIRPHEYEYILVNDKHAKYSEYNQYGISELLITDRKVVLSFTKPDQKEIRERKIGIDVNFRNLSMTLVANGKVEKVMGQSTDNIVKIQNDYSRRRRKVQKHVTNPRKRQRKLREARGRQANRVKDALHKTSAKLVDENPDATFVVEDLTNIRKTSHPYGEKLRTYLNRWPYAEFLRMLEYKSPNKIIKVNPGGTSSECPVCGGKVKHPAWKISRCENCDRDYDRDRLASLAISLRGLDLCGDPFPVSAVTSVPSVMDEYLYVRKQPGLSGAGSTEAAYVPNNVVHKIA

SEQ ID NO: 38928 - protein, 115 aa, Clostridioides sp.
VIAVEKAYKFRMYPNKKQQELINKTFGCCRFVYNKYLAKRIEVYKNDKETFTYKQCSSDLTNLKKELNWLKEPDKFSLQNALKDLENAYEKFFKEKAGFPKFKSKKTNRFSYKTT

SEQ ID NO: 38929 - protein, 401 aa, unknown
  TnpB Polypeptide
MRKINRTYKFRLYPNNAQTELLAKHFGCTRFVYNYFLNQRKEQYRLNGKSDNYYAQAKYLTELKKQEATAWLKEINSQTLQFAIRSLETAYVNFFQKRAKFPNFKSKHSKNSFTVPQSASIADNRLFMPKFKEGIKCCVHREIKGKIGKVTISKTSSGKYFVSVFTEEEYVTPLEKTNKSIGLDMGLKDLLITSDGETFKNNRYTRKYEHKLAKAQQHLSRKKKDSRGFESQRLKVAKLHEKISNCRADYLHKCTISLVRRYDTICIEDLNVNGMLRNHHVAKSISDASWGSFVSMLTYKADWNGKKIVKIDRYFPSSQTCNVCGYVNKEIKDLSVRDWECPNCHSHHDRDVNAAINILKIGLNNISAGTVDYTGGEEVRTNYSKGHSSVKSEAHEPLAHG

SEQ ID NO: 38930 - protein, 378 aa, unknown
  TnpB Polypeptide
MLRAVKIRLYPNKAQEQTLNKVLGCYRFVYNQMLALKQNTYNENKTTLGLNELSKYFHGTLLKDEQYVWLKRQNTKVLQQAIRQMLTAYDRFFKQHNGFPKFKSKKDKQSALFPIDAISKRNKFNERKITLTMPLKDIKFRCSKLYFKRLQTYKDKIRSATLSKTKSGNYFLSILIDLPQEELVKFEQTNKHIGIDLGVKDFVITSDGDFFENKHFFKKQEKKIAKLQRQLSKKQKDSNNRNKQRIKIAKAFERLTNQKDAYIHNVVNELLTYYDTVFMEDLNVQGMLRNHKLAKAIKEVGFYKFKEILTNKALVNNKQVVFVDRFYPSSKTCSNCGYINNELTLNDREWICPQCGKHHDRDLNAAINILLEGERIIS

SEQ ID NO: 38931 - protein, 382 aa, unknown
  TnpB Polypeptide
MRTFEYRIYPNKEQHYLLMQCLIESRMIYNSMLEMVKEQYEQDKTFLGKYDLEAAFKGHGTHVPATTIQMLSDRLSKSLKRFLAAKTLGLPNVGFPRFKKPNRWHSIQLRQYGNEKNRRDVMLAPDKKHLYIPRMLGGSVKIKYHRFIEGTPKTAHLVLRADGHWYVLIVCETEPKNEHIATECTHSDIGIDVGLKSFLTDSEGNTVDNPRFYRKSQATLRRKQRTVCRRKKGSRRRRKACKSTAQTHLKIARQRKDFHFKTAKQYADTHKTIVVEAVQIDNMVKNHHLAKSIMDASWGAFLTILSVKAENAGHQVIRVNPRFTSQKCYTCGEIVQKSLSVRTHLCPFCGYIADRDVNAAQNILKRGLGLGHSLQESTSRDT

SEQ ID NO: 38932 - protein, 375 aa, unknown
  TnpB Polypeptide
MPGLSVPQELIANVALLCHNNAMQTVVKTLKIRVKDKHTGVLRRMARDVNQVFNFVNETSSRAIRERGKWLSAYDLQKLTAGYSKCDDVSVGSGTVQLVCVEYATRRRQFKKTRLNWRVSNPKSAKYSLGWIPFKGGHAKYKSGQVQFGGHKFSLWDSYGLSHFELRAGSFNEDSRGRWYFNVAVEVEVLPSQGASAVGIDLGLKECATTSDGDKLQGRWFRELEPQLAAAQRARKKKRVKAIHAKIANRRKDAIHKFTTSLVKDNAAIFVGDVASAKLVKTKMAKSTLDAGWAMFKTALEYKCRQAGVVFEVVNEAYSTQACSSCGSVEGPKGLNDLGIRRWTCSCGAEHDRDVNAAKNIARRGLATLAEGAPA

SEQ ID NO: 38933 - protein, 395 aa, unknown
  TnpB Polypeptide
MLRGIKIALDLTNEQEQQMWKSVGVARWSYNYAITRCKEQYSDYLKDNTLPKTLSEGQIRKELTVLRNTTHPWLKEVGSNVIKQAVKDWNDSRNRFFKGLGKAPKYKSKATSKPSFYVNCESLRRVSGGFRGERLGFVKTTQPLPKIPKGTHYKNPRISFDGKYWYLSISYEVPDVSVELTDSVIGIDLGLKTLATLSTGEVIENINKSHRVKQLEKQLRREQRHLARQLQANTKGYTTTAKGARKPTYKRSLDLCSNIQNTKRNIKLLYRKLSSIRLNHVHQATSHIVKQLPKGVVIEDLNVRGMMKNKHLAKHIQNSMFHEFRRQLEYKCSRYGIELVVADRFYPSSKVCSCCGFIKSDLKLNDRVYKCGSCGLEIDRDLNAAENLANYFYRG

SEQ ID NO: 38934 - protein, 394 aa, unknown
  TnpB Polypeptide
MRQAFAYRLYPSRTQERAMESILTTTRHFYNDLLAERKQAWEEHQETVTKTVQLRRVKERKATNLYAASVHSHILQVVAVDLDTAFQAFFRRLRTGDKPGYPRFRGAHRWTSFGLKEVGNGFKSDGRRLKVHGVGRIPVRWHRPIEGDIKTVRISKKAGKWYAAFSCVIPDKEPLPATGTSIGIDVGLTHLLTTSDGETVENPRWYRTEQAKLRIIQRRIARRQKGGSNRKKAVVQVQRQHERIGDRRKDYLNKLVAGLVRSHDLIAIEDLRITNMTRNHHLSTSILDAGWGYLANHLTRKAACAGRQVSVVDPSYTSKTCSECGKRFTQEITLSVRWVTCQACGASLDRDHNAAINILKRARDASDWQPAGTPPLGANVTGLPACVAQEAAPF

SEQ ID NO: 38935 - protein, 371 aa, Roseiflexaceae sp.
MQKAFKYRIYLTKGQRRIVEQQLEECRWLYNELLATRKRAYEASNISLRRYDLQNMIPGLKVARPSLTSVHSLVLQNVNIRVDVAFQAFFRRVREGAEEVGFPRFKGRGRYDSITYSQYGNGVRLEGDRLILSKVGAVHVVLHRPVEGTPKTVTLIRSRTGKWYACLSCETEAHPLPPTGSVVGVDVGLASFATLSNEQKIDNPRFYRRDEADVKRVQQPNDAAKNAANWPENAKQNGILARIHERIANRRNDFAHKQSRALVNAHQVIVFEELAPIQMGARKGRGMRKSIMDVAWTQFISMTLGKAAEAGRTVMLVNPRNMSKMCSGCGELVDKTLSERTHTCSYCGLVLDRDVNAAINILHRGLQTLQT

SEQ ID NO: 38936 - protein, 196 aa, Bacillus sp.
LYYSSFSGDGQKHPKWFRKLEGKLVHAQRILSRRQELALKRTCKLDEAKNYQKQKRKVAKIHDKIVNARTDYLQKISTYIIKNHDVVGIEDLQVSNMLQNHKLAKAISEVSWSQFRTMLAYKAKWYGKEVITVSKTFASSQLCSCCGYKNKDVKNLNLREWECPSCSTHHDRDINASINLKKEALRLLTVGTTGIA

SEQ ID NO: 38937 - protein, 541 aa, unknown
  TnpB Polypeptide
LAKNQTYKAFTARPTYVSDLNGEVLDGVPVLALLASEVRGISGYSTFVTRNDTALWVELAKIDVPQPAEAGRIAGVKMPDFLVPDKKDKNGKPLKDKKTGKPIKIKTGKSRKEKLIQHNAVTAFRSWQERVKAANGESTKHVSQGWKHTVNVTPPSYGEDTVNLGAVDKQYAVIENNPFADGEIVLKMVIKGNWHRLIFPFDNNRFPVGKVTLPVIKIQDSQPVFIFTVATDNPVVQFSGDYVIGVDVGINNYATVVVRNTKTGKITHKTTLSRRVHSLWNSVRASERQVKQLRKKAKPIIYDRQGKMATLDEAQLHREAASRKKRELAILAAQEIADLSHQYDNAVVAIEDLSWVKNTMQNGRWNRGTFVQWLTHYVSQNGGWVLAVNAANTSQVCHKCGSKVTHPEHKVSDCPKHGKMDRDVNAAANIASRAVKNVATARNSRAKNRKLQKKTSLKTPIARDTLKHPGGSRNKNYPTPNRKKQRSSKGVKLPLRPARVQAFCVDTRVLADWDAGNISETCKAALNQGNTAYTCRLCSLN

SEQ ID NO: 38938 - protein, 402 aa, Escherichia sp.
VKRLQAFKFQLRPGGQQECEMRRFAGACRFVFNRALARQNENHEAGNKYIPYGKMASWLVEWKKATETQWLKDSPSQPLQQSLKDLERAYKNFFQKRAAFPRFKKRGQNDAFRYPQGVKLDQENSRIFLPKLGWMRYRNSRQVTGVVKNVTVSQSCGKWYISIQTESEVSTPVHPSASMIGLDAGVAKLATLSDGTVFGPVNSFQKNQKTLARLQRQLSRKVKFSNNWQKQKRKIQRLHSRIANIRRDYLHKVTTTVSKNHAMIVIEDLKVSNMSKSAAGTVSQPGRNVRAKSGLNRSILDQGWYEMRRQLEYKQLWSGGQVLAVPPAYTSQRCACCGHTAKENRLSQSKFRCQVCGYTANADVNGARNILAAGHAVLACGEMVQSGRPLKQEPTEMIQATA

SEQ ID NO: 38939 - protein, 388 aa, Methanoculleus sp.
VKGAEREDPGLQGGDDTAQPKGLCLSGRCSASSVKRRRPSSYVSGFTRNKEEYPWLTEVNSQSLQSANKNLDNAFTRFFREKKGFPRFKSKKNPVQSFQVPQHYRVDFDRKQIRLPKIGEIKTVFHRHFDGKMKTVTVSVTSTGKWFISILVDNGEPLSKPASFAADTTLGIDVGLTNFATFSNGEKVANPRHLKNSLQRLKVLQRRVSRKVKGSKNRKKAIQIVARCHEKVANQRNDFLHKLSNRIVSENQAIAVETLNVAGMQKNHCLAQSISDVSWSSFFRMLEYKCECYGKTLLTIGRFDPSSKICNRCGYLNRDLRLADREWTCPDCGTHHDRDINAAINIKKFALQDQNLVGVTGAERAIEPVDSLPLGRGMKQEAPPLRAG

SEQ ID NO: 38940 - protein, 418 aa, unknown
  TnpB Polypeptide
VLRPHKIRLVTTSAQEQYFVRCCGVARFTYNWALAEWKRQYEAGEKPNAFALEKQFNAIKREQFPWATEVTSLAAATGFRNLGKAFKNFFAKRTQYPKFKSKAVTKPAFYAARQLEFRVEGVRIRLPIIGWVDMAEPLRFPGQTYTASVTKEADGWYVVVMVETERVLQRERDLGAVGVDLGIANFAVLSTGEKLPALKPNRAAEARICRLSRSLSRKVKGGKNRAKAKTKLTRLHQRVARVRNDAHHKLSTRLAQNFSTVVVERLNVKGMMRNRYLARSIADAGWAEFRRQLTYKLDMTGGHLIVADRWFPSSKTCSDCGVVAQSMPLDVREWDCPDCGAHHDRDVNAAINLKQLAAGPAVTACGPESSGLAAFAAGETGRDEAGNSTPHQRDSGTNRPAIDIKDETNGNLRNLRPF

SEQ ID NO: 38941 - protein, 349 aa, Methylococcaceae sp.
MITSTLKLRLNKRQESTLDGWLWNLTSVYNWGLRKIELNAQNNIYFSKFAFVNLLADHGKKLDIPSHTIQGVLSQVYTAWQRCFKKIGGKPRLKGVRNKLNSISFPDRIYPPKENHISIPGIGKVRYHKQEIPKGTIKNGRIIKRASGWYLCLFIDSQREPIVCTGNGQVGIDPGFKSLLTLSTGEKIEHPRELEKAAKRLAQAQRGHDLVLASRIQERIANQKKDRNHKLSLRLVKENKLIAFSKDNIKGIAKKFGKSVSSSGHNQLRQFIAYKSSSCDRRFVEIDSKNSTRTCSSCGALSGPQGWAGLSVREWVCSACGAVLDRDVNSAINTLIGAGVAHEVHHAAA

SEQ ID NO: 38942 - protein, 266 aa, Campylobacter sp.
LDFLNSNLRKILYKAIQPKLKELVKIKVHRKIESIIKSATISRNGSDKYFISLLCETDIQELPKTNSSVGIDLGIKDMAILSTGEKIENLKFRKQLEDKLKREQRKLSKRLLIAKKENRKLSEAKNYQKQRIKIAKIHEKVMNMRTDFLNKLSTDIIKNHDIICIEDLNTKGLLHNHKLAKSISDVSWASFVNKLEYKAKWYGKEIIKIDKFYPSSQICSVCGYKDGEKTLDVREWTCSVCHTHHDRDINAAKNILTEGLRIKQAV

SEQ ID NO: 38943 - protein, 406 aa, unknown
  TnpB Polypeptide
MMSIKAYKYRLDAKTATTDKLQWVLDRTRELYNAALAERKEAWRMCGTSIDYYDQQRDLVEIKEIIRPEYQDIASHVLQDVIKRVKRTYDDFFRRVKNGEKPGYPRFKGRNQYDSFTYPDHAGWKFTVEEQDVQGKHKLTGRLSLSKLGTLKVILHRKLEGMIKTLTIKREGEHWYCVFTCEVETEKLPVSYDDVGIDLGVTHFAALSNGAFIDHPRYFRRAKKKLAKAQQALSRKQRGSHRRAKVVKRVAKQHRTIRNQRRDFQHKESRKLVNQYQVIVFEDLQVKNLTRAPAPKQDEQGNYLPNGAAAKAGLNKSILDAGWSTFTEMVSVKAASAGRTVLFVNPFMSSQLCSGCGTVIKKDLSERWHSCPCGTALDRDTNAAINILHAGYKQLSGGTRPTSATA

SEQ ID NO: 38944 - protein, 225 aa, Okeania sp.
LDIILNYIRITSKKHCWLNTRFVARHAYNWGLWLTRNILNHNSNNPGSKLKFPTSIDLHKLLVAMVKPKNCWYYEVSKTAPSYALRYLSVAWKRRFSKVSGQPRFKKKGRDDSFTLDGSISVGVFHIKLPRIGWVKTFEILPGLVIPKSVTISNASGRWFVSFKIEKEPSVTEKSVDVVGVDLGVKTLATLSTGEIFEGAKSKKKLESKLSRLQYLNRHKTKFSL

SEQ ID NO: 38945 - protein, 268 aa, Okeania sp.
LRTVAESFRSYYGLIKAYSEGKISDRPRIPNYRKKGGMATVSYPAQALKLKDNQIRVPLGNTCKRWFGLDSFLIPMPSIREFSSLKELRILPRNRCFYLEFVYEKEIVVKPQLNQENVLGIDHGVNNLLTCVSNVGTSLIVDGKHLKSMNRWYNKQVSTIKENKPLGFWSNKLAAITEKRNRQMRDGINKAARIVINHCLKNSIGTIVFGWNKGQKNQIKLGKKSNSEFVPIPTARLKERIAHLCSEYGILFIETERLLYKYCFIFRW

SEQ ID NO: 38946 - protein, 403 aa, Aneurinibacillus sp.
MGFGQGVSSGTSIVRLFFSLLFRFCKIYAIEGGEKRMKRHKAFKFRLYPTVEQATLINKTIGCCRFVFNHFLASWKDAFKQTGKGLTYGTCSAQLPALKKEYEWLKEVDSIAIQTSVRHLADAFTRFFKKQNDRPRFKSKKNPVQSYTTKQTNGNLAVEGNQIKVPKLGFVRFAKSREIEGRLLSATIRRHPSGKYFVSLLCEVGIQPLPRVHQHVGVDLGIKHFAVLSNGEPPVENPKYLHRYESQLARWQRIFSRRKKDGKNREKARIKVARLHEKIRNTRQDFLHKLSTKLIRENQTICLEDLQVGNMQKNHNLAKAIADASWSEFRSMLEYKAEWYGRTISIVSKGFPSSQLCSGCGYRNKDVKDLNLREWDCPACGSHHDRDTNAAINILREGMRLLA

SEQ ID NO: 38947 - protein, 394 aa, Aneurinibacillus sp.
MKDVQFEKTVKKYRNIKHFIHQKKRKLRNLEHKLANYIKRKERNVPSLCFGSRKLFHKQFHLEDNGWKSHAEWKRDWDHARSSQFTVVGSKDETYGNQSCTYDKENNLRLRVAYQFEKEYGEYLTLENVMFPYGQKELDEAREIYIGETSGGNPKKYVKSSISYRFVRKDKGWYILATTEKEIPSTATSKLGGVIAVDLNAGFLSVVDIDRFGNPLKEWFIPVRMYNVSQEQAKASLGDAIKQVVEYARDKGKHIVYEKLSFAKKKASLGEQSKKYGRMLSGFAYTAFKDILLAKAKKEGIGTWHVNPAYTSQIGHMKFMKRYGFSSHGSAALVIGRRGLGLKIEKPKGFTVLPLPKTWNKNKKRYSQWASITKSIKKQLSFNEKIQLLQADFI

SEQ ID NO: 38948 - protein, 237 aa, unknown
  TnpB Polypeptide
MYYAYKYRLRPSDAHREELDRHRDICRQLYNHTLYRLNEYQDEHGELPSMTTLRSELPDLKKWWGDLSDVYSKVLQTVVERLFDNLKGLSKLKENGYGVGQLKWKPPREFRSFTYNQSGFKLDKKGGQTVLSLSKLGDIPIRLHRTIPDDAQLKQVTLKKEPTGEWFATFGVEMDREPPETPENPKKCIGIEGILKYAHDTDGTAVESLDLSDERKRLEREQRKLSRKQHGSNNYRR

SEQ ID NO: 38949 - protein, 290 aa, unknown
  TnpB Polypeptide
LKRAYKTEIKPTKKQIQKINQSIGICRWLYNSYIAKNKELYELYKQDLIPKEKAFMSANDFDKYINNEVKVYVSVVIDGHMPIVSKNTNEGIGIDLGLKDFAICSNGEKYKNINKTKKIRKIEKKLKRKQKKLSRKYENLKKKGGTATKSNIKKQIVKVQKLHHKLDNIRTDYVNKTISNIINQKPKFITIEDLNVKGMMKNKHLSKAVANEKFYEFRSKLAVKCNVLGIELRIVDRFYPSSKLCHLCGSMKKDLKLKDRIYKCNCGYIEDRDYNASLNLRDCLTYKIAQ

SEQ ID NO: 38950 - protein, 324 aa, unknown
  TnpB Polypeptide
MKLIVMFLNKPLKMPVMLIRNSSKGFLNFLDLRVVKKSTPSFYQDNIKIQFSNTHVRLMLIAGKGKAKNKRSQKLCKVRLAEQNRIPTDSKYYNPRIKFDGLNWWITVGIEFPDSIDIQKKDGIGIDLGIKDLAVCSDGNIYKNINKSNKVKKIERKKRRLQRLISRSYEKNKRGKEYCKTNNVIKKEKLLLKITHRLTNIRQNYLHQATSEIIKREPSFICIEDLNVKGMMKNRHLSKVVQDQKFYEFRRQIEYKAVWNNIPVVIADRFFPSSKLCSCCGTIKKDLKLSDRIYKCECGNVIDRDYQAALNLKRYGENVLKSVA

SEQ ID NO: 38951 - protein, 488 aa, Streptomyces sp.
VVEPTGKGEAVRVTGAEAGRVKREALGVPDRAKHRRKAAVPVRRRAPEADTRQRVYRYRCYPTPAQTAQLTQTFGACRWAYNEALALRDRAWREHRVSLGFAESCRALTGWRNAEGTRWLQEVSSVVLQQALRHLDAAFGRFFQGTARHPRRRKKGRSRDAATYVRTGFRWTEDPERPGTGLIALAKQAGPLRVRWSRPLPAGTRPVKLTVSRDRAGRFFVSVLVEERIEPLPPVFLPTGGAPKAVGLDLGLAALVTLDDGEKVEHPRLLKKYGAKLAARQRSMHRKKKGSNNRSKARQEIARLYALIGDARRDALDRLTTRLVRENQVLVVEDLSVASLVRSPRGEGRRRKPPEPRDPGRLVGRTAPAVAVQVRVVRADAGRRGPVLPVDPAVLRLWDVRPENGPGRTRLVLRRVRCGARPGRERRTESARRGATAVRAGGVGTAYRAGGAVDDQGVRDTRLCADVSTRGRACRTDGPSAVMPVESV

SEQ ID NO: 38952 - protein, 591 aa, unknown
  TnpB Polypeptide
LAKKAPASKNKKRPKKPFRALAVPRKVASPAGVAIEARAYLDADDLGVVLPLGDLLTKLRNQDLVRTISGVPWAARKALITQETSARWAGSITQSNNDQLRLSRDNLVRAIEGWSKAIKTIAKRLAAPIPEKKVKGETPLAPAPATVLAQIPGFDDQTTQGKRHRRIVGYASQAERAAKQLRLAHLQAKVVSAQADLASGEISICKGGKDLLNKRHHLDEAGLDLAQWQEQYAAARRFLTADGEAGKKWGNETIRVSPEGVVTIKLPPALVKAGLGNVGRGKDKTHYQLSTPVTFRYRQDEWLSQIRDNKPVSYTLKEDPVKHKWYLCAAWTQEPVKVRRSTNKPNILAVDTNANHFSARVIDPSGNPVGPALYVPLLLGLASKSSRASDGIIRAGLSALIRFAKLPCWKVGLVVFEDLGFADSKGREKFGHHKRFHKTISGFPTTITINRAASMFARAGLELWVIDPAYTSKWGAKYWLTRLSSPTHKATTHEGATAVIGRRFLGHGARTRSGVGVGEQSISNPSLPIAPGVHPKPQAAGKATAPQLSVKRSLSKTDPGKQTQSTPPGDDRCRPAAFFTPDNSDVRFVRF

SEQ ID NO: 38953 - protein, 591 aa, unknown; identical to SEQ ID NO: 38952
  TnpB Polypeptide

SEQ ID NO: 38954 - protein, 393 aa, unknown
  TnpB Polypeptide
MIINKAYRFRIYPSDNQIEPLAQHFGSCRFVYNYFLRKRIDFYAENKGEEKQGLTYHDTAIMLTQLKRSPEYVWLNGVNSQSLQQSLRRLDVAYNNFFNKRTNFPNFKKKHNKQSFQVPQRFDIDVEKELLHIPNFEPIKIILHRKIEGVIKNINLSKTLSGKYFASVLCEIEKIVKSKKRGSQIGIDLGIKSFLVTSDNETVDAPQYLCKSEDKLAKYQRHLFHKVKGSNRRDKARIKVARIHERISNQRNDFLHKLSHRLVSENQAIYAEDLHVKGIMANHHLAKSVADSGWSEFIRQLKYKSEWNGVYFRQIDRFFPSSKRHFSCGWINEFLTLKDREWTCQCGQVVQRDFNAAQNILQFGQKMVGQELSKPFKRSGRGGASRPLAELRS

SEQ ID NO: 38955 - protein, 370 aa, unknown
  TnpB Polypeptide
MRKSFKYRLFTNKTQESKLDKLLDSARFLYNCALEQRIVCYKQWRKSINYYDQANTLKEIRSFDEGIAQLNFSASQNLLRRLDKAFQAFFRRIKYGDTPGFPRFKGKDYFHSIIFPAYGDGIKLKDGKLYIQNVGHIRIHLHRNLEGKIKTVTIKRQNGRFYASFSCDSVPQNVLPTSAKEIGIDVGIKSFAVMSDGQVVDNPKYLKQSEDKLVDLQRQHSIKKSKRTRKPITKLHEKIANQRKDFQHKLSREIVNNYSHIFVEKLQPKDMVKNNFRTLNKYINDAAWTQFFNILRYKAEDAGRAFVEVNPRGTTQTCSQCGQFVEKKLSDRVHKCPFCGLVLDRDLNAAKNILRRGQRLGFMPEAVCFS

SEQ ID NO: 38956 - protein, 395 aa, unknown
  TnpB Polypeptide
MYDEMNHGSNSWSRICIFKIRKESEVKSVEKAYKYRIYPNKKQKEIISKTFGCCRFVYNKYLAKRIEMYEQNKESFSYIQCANDMKNLKSELVWLKEVDSTALQSSLRDLDSAYQKFFKEHSGYPKFKSKKTHRYSYKSKCTNGNIQYCDKHIKLPKLGMVKTKNKLIPQGRILNATVSQEPSGKYFVSLCCTGVDIKPLEKTGNSIGIDLGIKEFCITSDGEMIENPKYLKKSLNKLAKLQRELSRKSKGGSNRNKARIKVARLQEHIANQRKDFLQKLSTEIIRNNDAVCIENLQVKNMIKNHKLARSIADVSWSEFVRQLEYKANWYNKQVIKVDRFFASSQTCNVCGYINKETKNLGVREWDCPCCNTHHERDINAAINILNEGLRLLEVA

SEQ ID NO: 38957 - protein, 250 aa, unknown
  TnpB Polypeptide
MKLSQYANKVGVTYKTASRWYRAGTLDAYQTATGIIIVREKADEKPVTGRIALKHAHKRLRRLEWQKSKREKGGKNRKKTCCKLAKQHARIANIRKDAAHKLTSYLSKNHALVAIEDLHVAGMLKNHKMAQAVSDSNFGEIRRQLEYKASWQSVHLVLIDRWYASSKTCSGCGWVDEDQDLSDRTFICQECGLVMDRDLNAAINILKEALRTTGSFSESYAYGESSSGLVSGSGETALVEIGTNLHLGMS

SEQ ID NO: 38958 - protein, 325 aa, Cyanobacteria sp.
TYRAQSVKAYRKTSPDLKRVQSQVLQQTLRRLEQAFVSMWELHHGFPRFKKVGTMRSFVFPQLGKDAIGCNSIKLPMIGWVKFHQSREIPSDAAVKQARIVRRSSGWYVMLTLQWDVDVPDVMPHGEGMGIDVGITHFAACSNGRLFPNPRPFRKLERKLKLLQRIVSRKVKGSNNRKKAQFHVSRLHEWIANVRKNYYWLLAHNLCDWAGMIFVEDLNLKGLARGILGKHCLDAGWGQFFQVLEQCCKKRGVFFLKVDSKKTSQICPNCFVETGKKELSERVHSCQHCGYTTDRDVAAAQVVLIRGLAAVGHTVKMLSVSEAAR

SEQ ID NO: 38959 - protein, 502 aa, Chlamydiae sp.
MSRNFICELLLSLTPSQYRILNIRFDGGRNLYNACLGEALKRLAAAKRSSDWKKAAGLPRCKERTGLFRNALKEHHFSEYELHFYVKKLVKECWIGDHIDSQVAQKIATRAFQAVDEYAKAKRGNPRFKGIGQFSSIEGKSNITGIRFKNGKIHWNGLVLTPIYDTKDIHGVQAHALSQRTKYVRLVRRTVRGKFCFYAQLVQEGEPLIKKKNSLGKGKSVGLDIGPSTIAVVSEENAVLQELTDCEENHKKTKKLQKALDRSRRTTNPDNYNEKGMPLKNKQWKRSGRYRKKQAQLAEEKRVTAASRKTQHGTLANQIFSMGTTIKTEKLSYKQFQKNFGRSIARHAPGMLIEILRRKAENAGGQIIEFSPYQTKLSQTCHACGNTKKKSLKERWHVCPCGLESVQRDLYSAFLALNVEQGVLNRSQAQKAWTSAGPLLQQALLRCKETAKGKRKLASFGFSPSQSCSPDEDESTVSEDKETMRANVYSFEELDRLVIRTP

SEQ ID NO: 38960 - protein, 406 aa, unknown
  TnpB Polypeptide
MMLTETHQINKESSLYDIFDDLCFKAKNLYNAALYQFRQSYFDNTIKTLGWMEINTLFSQSKQEDYVSLQSKVANNVIKALGANISSFWGLLKLKKEGKYDKKVKLPKYLHKTEGRFVLDFRSGTISRKRGEKGEIILCPKSYNIKIPTKIKEKIKCVRVVPCRNYYKVEVIYEIKDAISKNEGCIAGIDPGSKNLLAIAFSDKEKKPLIISGKKIKSINCYFNKMIGEAQSKLRPETYRSARLDRLWTKRENKLSYEMHVISKFVANLLDESGCCKVVIGDNKGQKQEIKIGRQNNRKFVQIPHQKLFQMIEYKCKKRGIEVILREESYTSKASFIDNDFIPVYETKDKKYEFSGKRIKRGVYKTSAGKKINADVNGAYNIMAKQFPEELSDRNGRKYSPTIFKL

SEQ ID NO: 38961 - protein, 551 aa, unknown
  TnpB Polypeptide
MPSFTTQTNLPAADTQFIEFLEAMAVKFGVVERTSFAAINQGQKVDTAFENELQQSSGFSSQDVRNAITKADANYKSQKELVGNYIKETSNAITAIKAAIKKLEKKVSILQKQGRKNQDLLKGIPSLEFKLHQKKRNLHNKVARLKELKATERSGHFSVTFGSKKLFRAQYNLDENGYRNHEEWLEDWRYHRSNHIFYVGANRFASGNLLCRLTSEGQLTITVPPCLQSQFGTHVTCTSVLFRYGQEYINAALTTKRFENTNKKTGKVSCRIGTVAPLTHLLIKKDDQWYIHTTVELPEVPYQSHRKNGVLGVDLNPASADWAVCDTEGNLKASGTLRLNIQDKSREATKDALGKLCAELVRLAESFEVPISIEKLDFTKKKASLGECSAKYSRMLSNFAYSSFTQMLEARCQKFGIQLIKVDPAYSSVQGLTKFVAMYGLNSGTAAALVLARRALRKSERLPRVLHVTLKKPVDSFRHVWGAWSVVARVLDSCGGETALQEGFPPQATANPKGRARHRFYTQRGEANSLLEVTLASLRAGKQGSATSKSG

SEQ ID NO: 38962 - protein, 397 aa, unknown
  TnpB Polypeptide
MSRYRLLPTPAQEAVLRDHCGHARYIWNLAVEQHAHWHPGRKGAPGYREQCRQLTQARAEHPWLAAGSQTVQQQALRDFAQAMTAFFDPGNPAGRPSWRKAGRDEGFRIVGRGRQWDVRRVSRKVGQVWVPKAGWVRFRWSRAVPAGAKSYRVRLDRAGRWHIAFAVIPEPVPAPGNGQAVGIDRGVVVSAALSTGELLRCPALTGRERKRLRRLQRRLARAKRGSNRRGRVRHAIARLRARESDRRKDWAEKASTGIVRRFDVIRVEDLQIGNMTRSARGTRGDPGRNVRQKAGLNRGILGSGWGLLVRRLEDKAPGRVEKIHPALTSQRCSACGQVDRDSRESQAVFRCTACGFAGNADVNAAINIAAGHAVTARGGDGAARPVNREPHLLLQPA

SEQ ID NO: 38963 - protein, 399 aa, unknown
  TnpB Polypeptide
VLAVKSVWQNYAPSREVLALLESFRRMVNDSIRIGLLNDASSLRRLSLLSYNQLASYDIPSYYKLCAISRAAGILAARKKTIRRGFPTREPYTDRPQLVSCYGFKVKNGGLEIPISRGKRLSLPLTNHTIAVISQLGVQVRSFTLTRSRLSLSIAWNAAMIECASTVGVDRNLRNLVVGNDKHIHQYDLSDTVRIAKTTVRIVASFRRDDARIKRIIASKYGRRRKARIGSLLHAATKTIVAMAAQRREAVVMENIQGIRCLYRKGNGQGRKYRGRMNEWSFGETQRQIEYKARWIGLPVVHLSRRETRGSSVTCPRCGERLQSDKRLKRKLWCESCRLVMDRDQVAAINLARRGRVRFARSRPPIIEAQGGAVEAVKGNPTPTAIPGVDAPKITRLTS

SEQ ID NO: 38964 - protein, 383 aa, Nocardia sp.
VVVQLRYNFRVYPTPGQRISLARAFGCARVVYNDNLRAREQAHATGVKLSDTDVQRLVVTEAKRTPERTWLAEVSSVVLVQACQDARAAYRNWWDSLSGKRKGAKLGKPRFRSRKDNRQAIRFTRNGFSLRPNGRVYVAKVGELKVSWSRELPSDPSSVTVIKDAGGRYFVSFVVVADDRPLPELEAEVGIDLGPATFAVCSDGKTIVSPRFLRQAERRLKKAQQALSRKEEGSKNRAGARIRVARSYARVADTRRHWAHKHSTTIIRDNQAVYVEDLCVKGLARTRLAKSVHDAGWSMFTRMLEEKAHRYGRTFGKVDRWFPSSQLCSVCGAIDGPKPLHVREWICRCGAVHDRDLNAAKNILAAGLAENSNACGGAVSPAA

SEQ ID NO: 38965 - protein, 390 aa, unknown
  TnpB Polypeptide
VKLKANNEQLMHWKNLLAQARQAYNLCSTIVDAEKLSYSRVVIHNTCYDKLRQQFPLLSSQQVIRVQCEVCSAYKSRKNNKHHGDIPKKSGLSMTLDKRLYNKLTTSSICLTDGEKGKRGVYEFVTYERLSELFSTYIPKDPTLFLRNGELYLSIPFEVMDKPCINDTSVGVDLGMKRLFVTSEGKSFKDKEYLRERRKIRYLKRCLQSRGTKSSKRHLVKVNTRERNMSKDMIERSTNALIKSSDAGVFVLEDLSKIKTNTSKTNEGFKRKRHNNALSQVPFYKFKERLSQKAARIGKSVQTVSPTWTSQTDSRSGKRDGERHGCRYYCSDGVVLDADWNAALNIALRANHPTSNCLPIDGGLLFLVGRVTSTTQSSQPHSVSGKPTNL

SEQ ID NO: 38966 - protein, 535 aa, unknown
  TnpB Polypeptide
MKVQGQYSMSFYSDRLSDSKLKEITDFAVLCRHIKNELSEVVNKDPLRYIQMSKFDFQKEFRELVKSNIPSSFYIQLMDDVYLSYSNKFDQIKNKFVFKKVSDIKCMSNGEIKNKTNTKIDTVLSRTLTYLAREGDENILVWLPLIIEKKRRKEDKKFYTEIFDCINKFGIKRLSMTSESKRNRLLKKYFGTPLVFKSLTFRGMSRLTRPTITYNKDFRSTIKAFINISWVKFAKELSIPIKYSKNFHGKMKQYQNKTETSYKICVSKKGVRVILSCEKERDYPENKTNFVGVDVNTKHNLLQCSDNSYVDYDRRLFCVLANELKKTDEIKSQNKEYVVGTRRTNKISHLRRELVSNTRTRISEFCKELKTSGYDHVVFENLDKSFGRKKGKTEYDINQNRLMSELHICSIKDEFEHIARKYDIATSFVHPEYTSQTCSKCGCVESENRENQEEFKCVECGYKCNADLNASMNIRNRVASTVLRSELLQKTSIGNGTYEPKSLSRDKVKEVLLSFRKRPYLNGRLDKEFNFNLFR

SEQ ID NO: 38967 - protein, 302 aa, Cohnella sp.
VLANLPSAVRNQAIRDARSIHKKTKKKGKRPILRRRAYYVNNQNYSIRDDAVSFPVMVDGKIQRLTVSARITEREQVLLSSGKLGLLKVVEKSGKWYVQISALLPTEQATGDVKMGIDLGLKVPAVVVTSTGKTKFIGNGRYIKYIRRKYKARRRKMGKLKKLCAIRKQERKEHSYIKDQNHKISRKIVNMAIEEHVSVIKIEKLTNIRQTTRTSRKNAKNLHNWSFYQLQMFIAYKAALAGIKVVEVNPAYTSQTCPTCGERNTAADRTYQCACGFRGHRDRVGAINIMRQPEADGKSLSA

SEQ ID NO: 38968 - protein, 391 aa, Halolactibacillus sp.
MLVNKAYKFRIYPNKKQVELVNKTIGSTRFVFNFFLGKQKEKDAYWYMAEEMVQNGQLLVNNWKGKCLNRYETVKAVKELKKQYIFLKEVDSVALQKSVENLADSYDRYYKKQNKYPRFKSKKNPVQSYTTKHTNGNIAIDGNYIKLPKLGLVRFAKSREVEGKILNATIRRNPSGKYFVSIGAEVEVAELPKTKSAIGIDVGLKDFAILSDGTTYTNPKFFRTLEEKLAKAQRIMSRRTLGSANWYKAKIKVARIHEKIVNTREDYLDKISTEIVKNHDIIGMEDLSVSNMLKNHNLAKAISEVSWSQFKTMIEYKAEWYGKQLVTVAKNFPSSQLCSCCGYQNKDVKNLGLRDWDCPKCHTHHNRDINAGQNLKNEAVRLLTVGTTEIA

SEQ ID NO: 38969 - protein, 381 aa, Moraxella sp.
MKLRVCRCFFNAIAPVMSPPIIANNQTVLSRWTTNVSKKTAKSSKALVRQPKTVQAKTYPLKKNSPKTYSKQMNAIKRTQFPFMLEVTKCSPQLAIMQLGDAFKRFFKGEAKYPKFRKKGVDDRFSLSNDQFRIDGKRIKIPNLGWVRMSEPLRYHGKILSAKIFKKGGDWFVSVAIELADVITPLPKTGKAVGIDLGITDLAVLSDGTKIQAPKPLKQQLQKLKRLSKQLSRKQKGSNNRAKAKTKLSRLHAKISNIRQDFSHKLTTQLVKGYDVICIENLNVKGMVQNRKLSRAISDLGFYEFKRQLIYKANQWGKVVKEVDRFYPSSKTCSNCGFIMAKADLTLNVRNWQCPSCHTQHDRDVNASINILNNATKVLTV

SEQ ID NO: 38970 - protein, 433 aa, unknown
  TnpB Polypeptide
MVSDTMKTAKAERIKKTLKETKKRRETQVCRVYQLKLQNLSKEDIEKLDRLFLEAKWLRNFVIADIENRIKDYKYKEVEIKTPNGFEKREIKILSSQMKQEIIDQIKDDLKSLKKSKENGNKVGKLKFKSEVRTIPLKQYGVTYKISGDRNRVKIQGIKKKFRVLGLHQIPENAEVTKGYLIKRASGYYLHVVCYLPKEEVEREIKEKQTQQLIGIDLGIKHQITISTGEKFNWYIPETKRLKRLQKTLSRKQKGSRKYQKIKHLIRKEWEYINNRRQDTLNKVISYLKRFLFIAIQDDSIESWKKGLFGKQIQNTGIGGITARLRSLATLIPVFFVDRYEPTTQTCSFCGHRQEISLSKRTFKCENCGREIDRDVNSSRNILKTALEQLFWIAKLIEIIGEGKLLKTLPVGSGEVTPVERTVVLAEAGSPSL

SEQ ID NO: 38971 - protein, 372 aa, unknown
  TnpB Polypeptide
MRVTYKFRLYPTKEQEEKLLWTLEKCRLTYNQMLADLNGQEKPNKYELKRKLPLLKKKYPDLKGVYSQVLQNEVYRLFWNLKSLSQLKKNGKKVGKLRFKGKGWFKTVTYPQSGFKIIEMGKMLDILRLSKIGDVPIRIHRQIGGRVKTLTIKRHPSGKWFACFNVDEEMQVEKGDVKEAVGIDMGIRHFLTNSDGRQIENPKFYGRSLKRVRIEHRKLSRKKKGSNNREKQRIRLAKAYEKLTCRRDDFLHKISRFYTENYGLIAVEDLNIKGMVRNHNLAGKILDASWGKFLQLLEFKAERARALVVKVNPRGTSKEYKFGNLNRDYNASLNILMRGWDSPETPAEIKPLQVIPASLIVEAGSPQPFRGG

SEQ ID NO: 38972 - protein, 211 aa, unknown
  TnpB Polypeptide
MCTFKNMKIRKGYKYRLKATKHLQRQCTQFAGACRFVWNKILAINDRRYLAGVPRLSYTDAAGLLTLWKQSEEYGWLKAVHSQVLQQCLIDLERAYTNLFAGRAAPPTYRKKFRADRFRYPQGFQVNGNQVYLPKIGWLRFWKSRDIDGTIKNVTVSRRGRHWFVAFQVELDVPAPVHPSATWVGIDLGIATFAACSDGTLIPPVNALRTL

SEQ ID NO: 38973 - protein, 392 aa, Haladaptatus sp.
VTRLAVEDEDHERLLSMVREWKRGCQIAVNAAWGVCHTRNEVQKLAYEKLRERTSLGSQHAVLATHRAAEAIKRALERDDDAAKPEFTSPTVVYDSRTLTLFDHRNISLTTTGDRVRCRLVFPDHGYQSRYLDDDRWEPAKSTLHYRDGEFHFHLGFRRPRPDVDLPTEDATVLGVSLGVENLAVTSTARFFSGAELTHRHAEFADLREDLRETNTRSARRTLRQAGERIENFTRNTLHEVAGGIVSEAERHGCSVIAFGELEGVQEMLTEAAPFHGQAFKRLFEFVAYRAAERDITVVQVNPEYTSQRCTSCGFTHPQNRDVENNRFECLKCGSEANDDYNAAKNVGFRCIRRGPLSSRGVGAKYCALGSGRVTPDGEFVPNEELEAVGKP

SEQ ID NO: 38974 - protein, 398 aa, Crenarchaeote sp.
MTRRNNAIRATVSMNIAISESLLVFSKNYLEALRYVLYWLKEKRINPNKGNVISIVHKKLYNILKSFNLSSKIAQDCYRNAISIYKGWYNNPNKGRFPIVFKPTVWLTPKLSYTVDFDRMIVKISKLGEFKILGYPRNIKEYLSWKMKEARQVIRNGKVFLKITFEKFFQKIEPKDSIAVDINMQNITVGKDENNFVRINTRINEIHRYKSLAERLQIKYPKRWKENRNIKRRILSFHSKAKRIAENFARKVSKRIIDEAIRMNSNVIKLENLKYMIKKVKKLHKKDRNKLYLMQYRRIQYWIDWQAKKHCLLINYVYAAYSSVKCPKCNNKMKEVSYRWFKCSCGYENDRDIIAIINLNGRGSLSLSTAPHMRYVAPNQLRGTLAIHSGEKSEEVLL

SEQ ID NO: 38975 - protein, 439 aa, Halorubrum sp.
MLEVHRTHQAKILNRSQVEDSLDRHGWSASKLWNVANYHSRNVWEETGEIPDHGDLKDELKTHPTYKGLHSQSSQRVLEELAEAFNSWCEKSKSDSRANPPGYRKQNYYDDQGRRVHEEHPRSTVTWKQNGIRHDTKNNRVRLSKGANHKDHPKAWEYILVEYETRPGVDVENLQQVRAIYDKATERWELHLVCKDEIETPDAPGTESAGVDLGICNFAAVAYSTEEADLYPGNRLKQDGYYFPKELAKCDDSGGERATRLHKKWSERRTHFFHALAKHIVERCIENDVGRINVGKLAGVREDENGESKNWGSHGNLDLHGWAFDRFSNILEYKAKVEGIEVVEVDERDTSKTCCVCGREDESQRVERGLYVCEDHDDAFNADVNGAENIRVDINQSNSESSASLDDDRSTGWLAQPGVYLYDLSTGFQPQAQVVDSKP

SEQ ID NO: 38976 - protein, 365 aa, Halorubrum sp.
MTTLRSELPDLKKWWDDLSDVYSKVLQTVVERLFDNLKGLSKLKENGYGVGQLTWKPPREFRSFTYSQSGFKLDKKGGQTVLSLSKLADIPIRLHRPIPDDAKLKQVTLKKEPTGEWSATFGVEMDREPPEQPENPETCVGIDVGILKYAHDTDGHAVESLDLSAERERLEREQQKLSRKEHGSNNYEKQRRRVAECHADLRRKRRDFLHKLSAYYAREYDLVAVEDLNVKGMLESLSNSRNTASAAWRTFFRMLEYKCKREGTQFVAVNPRGTTRECAACGVSTEKPLWVREHSCPACGFETDRDANAAWNILSRGIEQVGAGRSELTPVETALPTGTTTVSAKRVVEAGSPTLKERAASAASE

SEQ ID NO: 38977 - protein, 297 aa, unknown
  TnpB Polypeptide
LTYGALIFKGMPRRLQLDLHQLLPDHASIRSRTLTKEGRISRVALQIEVADVHTVRQKAGNLVGIDWGVERLVTLSTGETVANPGFGAAAARRIGKAQRKLARAARGSRRRLKAVAHLARRRRGLANRRKSYLHQLTAAIAARFGATAVEDLKVKRLTTSAKGTVERPGKNVRQKAGLNREILEVSPGMMISMLRDKAERAGGWFAMIEASNTSQERSQCDRTVQKDLSVRIQKMRALPDGGPPRRQRGPERPETGRSGSVERLCARKQRPGCRPSLRKPQARSSPPNSGKDFELRH

SEQ ID NO: 38978 - protein, 402 aa, Escherichia sp.
VKRLQAFKFQLRPGGQQEREMRRFAGACRFVFNRALARQNENHEAGNKYIPYGKMASWLVEWKNATETQWLKDAPSQPLQQSLKDLERAYKNFFRKRAAFPRFKKRGQNDAFRYPQGVKLDQENSRIFLPKLGWMRYRNSRQVTGVVKNVTVSQSCGKWYISIQTENEVSTPVHPSALMVGLDAGVAKLATLSDGTVFGPVNSFQKNQKTLARLQRQLSRKVKFSNNWQKQKRKIQRLHSCIANIRRDYLHKVTTTVSKNHAMIVIEDLKVSNMSKSAAGTVSQPGRNVRAKSGLNRSILDQSWYEMRRQLEYKQLWRGGQVLAVPPAYTSQRCACCGHTAKENRLSQSKFRCQACGYTANADVNGARNILAAGHAVLACGEMVQSGRPLKQEPTEMIQATA

SEQ ID NO: 38979 - protein, 396 aa, unknown
  TnpB Polypeptide
MKSLKVRLELNNKQQTLAKKHAGVARYAYNWGKSICDKAIKNKEKRPSAIDLHKKFVAEEKATKEWLYEVSKCSPQQALRNLHEAYVRMFKVKGSRYPSFKKRGTKDRFYLEGAITTNGDTIKIPKFGWVKCSEVLPNCNIKNVVISKTADQWFVAFKIPFKPEYTNNSKAIVGVDLGIKTLATLSDGKIFNAVKPYRKNKRKLKILQRKISKKVKGSNNRKKAVKKVAKLHYKIACIRKDATHKLTTYLAKNHSEVVIEDLNVSGMSKNHKLASAILDNGFYEFRRQLEYKTQWYGSTLTIVDRFYPSSKTCSRCGWKNVNLKLSHRTFRCNVCGNVIDRDLNAAINLEKKAGSYPVSACGVPNQLNALAFGGTMKQEKNDIPKHLKVQECVSFL

SEQ ID NO: 38980 - protein, 382 aa, Caldanaerobacter sp.
MVREVGKNMIVIQAKLIFLNQEDKQRALDLMRRWSSCMRFAYKRLLEGYDRKTLKRDLQGMFDLNSRYIDDAIMKARSTLESARELGNNPKKVIFGGRDLFKKLQKHHINGKAYEKLKIRWQEKRKGNLYSRGDKSKKGNLNTRIEIKENGTFLRINVGERKYVYAKIEGGYKKNKRREELLQEITKSDIPYSVELKLKNGSIYVYFAVEEEYPEIKITKEKGVIGIDINAYPDNISWVEVDEEGNLTSYGSIPMPELASGSKEKREYYRWQYAHEIIKIAKEKGKVIVIEKLDIKDKGKRGDFSGRKSRRIRHSFSYKSLLSKIKTLAKREGIEVIEVDRSYTSIIGMLKYAPQYMITKDTTAAYVIARRGLGKEEKIPDN

SEQ ID NO: 38981 - protein, 140 aa, unknown
  TnpB Polypeptide
MNKATFRLAKQHAKAKHLRSDVLHKESSRLTNQYDLIAIEDLDMSAIQQALRFGKSVCDNGWGMFVQMLTYKCERKGKELVKVDRWFPSSKTCCKCGHIHKELVLTDRTYICPKCGNIMDRDEQAAKNILKEARRLIQTA

SEQ ID NO: 38982 - protein, 438 aa, unknown
  TnpB Polypeptide
MIIFLVKTGYNIYKYISQSEVKMMYLTIKQQLKHLSKEDYLNLRELSHIAKNLYNVATYNVRQYYFQEKEYLKYEQNNVLCKENENYKLLNSNMSQQILKEVDGGFKSFFGLIKLAKKGKYDFRSVKLPKYLDKDSFTTLVIGFVRLKENVLILPYSNTYKKEHKLIEIKIPPILLNKKIKEIRIIPKFKARFFEVQYTYEVEEFQNNSDKTKALAIDIGLNNLATCVTNEGKSFIIDGKRLKSINQWYNKQNSKLQSIKDKQNILILTRKQVNLINNRNNKVNDYINKTCRYIINYCLDNNIGNLVIGYNETLQKDINLGKINNQNFVNLPVGNIKEKLEYLCKLYSIKFIKQEESYTSKASFFDNDEIPKYSVNVPKEYTFSGTRVKRGLYKTSQGYKLNADVNGALNILKKSSVVCLNALYSSGEVDTPVRIRIA

SEQ ID NO: 38983 - protein, 405 aa, unknown
  TnpB Polypeptide
VVKKDDLRFAIIDAAAFASKNLYNQANYQIRQAYIHQGNYLPYTEVFHVVKSMDCYKALPAKVANSILILLHKNWIAFFEALEAYKADPSRFTGRPKLPKYKDKAKGRNILIYDTQALGKRAFKKTGKLLPSGISIEIETCVTEWRQFAQVRIVPRPDGYLIEVVYEQQEEQAEVDKNLVAALDPGVNVLAAITSNKPGFVPRLLSGKPIKSANQLYNKQRAAHQSRLSHEKRFTSRQLDRITTKRNRCVDGYLHTASRRIIDLLVEEGIGVLVIGKNPLWKQKVNLGSKNNQQFVQLPHARFIDQLVYKAKLVGITVILQEESYTSKASSLDGDPIPTYRADQTEQTVFSGKRIARSWYRARDGRIIHADINGSYNILRKSSSDPSQLGRGVVGTAVCPRRLAV

SEQ ID NO: 38984 - protein, 353 aa, Sinimarinibacterium sp.
MIRTYRYRIKDANVIARLSAMAGAVNAVWNFCNQTQKFALRWRKQWPGYATLCALTAGSSKALGLHSQTVQAVCEQYVTARQQHGKPSLRWRASRGKRRSLGWIPFKAAGIKTEGAGIYRYWGLTLKCWHSRDLPDGAKIKTGSICEDATGRWYINLTCEVPDQTVFPSKNAIGIDLGLKALATMSNGDQLPQSRFYRDLQPKLGVAQRARKRARVAAIHRKIRNRRRYALHKATTQLVKDNGLIVVGNINASAIAKTKMAKASLDSSWTSFRDMLRYKAMAHGAIVMEVHEAYTTVTCSVCKNRTGPKGLEGLRIREWTCSECGVTHDRDVNAARNILALGHERLAEGIPAL

SEQ ID NO: 38985 - protein, 397 aa, Sinosporangium sp.
VVAVRRSFKFLMRPTARQAAALAACLEDHRELYNAALEHRRTAYGKAGVTVRYGDQSGELKHIRAGDPGGQGRWSFSSQQATLRRLDRAFKAFFARVEAGRAPGFPRFKGRGRFDTVEWPKDGDGCRWDSQPDHPTATYVRLQGVGHVRVHRHRRVSGTVKTIGVKREGSRWYVVLSCDGVPARPLPATGAAVGLDMGVASLVTTSGGEHLDNPRHLAASAGRLTAAQQALARKKRGSTRRRKQVARIAALHARVRRQRLDGAHKAANALVRGYDVIVHEDLKIANMTRSASGTVEAPGRNVAAKSGLNRSILDAGWGVFLQVLAHKAESAGRELIAVDPAGTSRTCARCGHRAKENRTTQAGFACTACGHEAHADVNAAVNILRAGLALRRAAEAA

SEQ ID NO: 38986 - protein, 472 aa, unknown
  TnpB Polypeptide
LPQRNGAEGGSRTHTESPPTVFETVASAIPPLRRCAEKYSAIYHTCQPKLVLAKVEQMCYTVHRCEEGRGGGAGMLIAHKIALDPNNVQATHFKKACGVARFAYNWALAEWKRQYETHKADPSLPKPSEAALRRQLNALKREQFPWMLEVTKCAPQMAIIQLGEAFKNFFAGCARHPQFRKKGVHDRFTLTNDQFIVEGCRIRIPKLGWVRMRESLRFAGKIISATISRVADRWFVSITVDTNDPPKRPAENQGVVGVDLGVSALATLSTGEKIAGPKPHTALLNRLRQLSRSLSRKQKGSANRKKAAMKLARLHARIAAIRLDALHKLTSELTRRFHTIAIENLNVRGMMKNRHLARSIADMGFHEFRRQLEYKAAMRGGVVVVADRWFASSKTCSACGAVQESLSLSVRTWTCPDCGATHDRDMNAAINLIKHLAVSSTVSACGEEGSGRRRKTAVKPASAKQEVSFVPV

SEQ ID NO: 38987 - protein, 379 aa, unknown
  TnpB Polypeptide
VWFVRAVKAVWQRYTPTPEALWLMEQFRQMLNVCIRIGLAENVTSLKTLSLKAYKQLRGYEVPSVYKLCAISRATGILRNYRRAKRRGKLVREPYARRLQLTTCYGFKINKDVLSIPFKSKWRIQIPLNQHTVQSLSVMDARSITLTVDRLSIAYAKVISEIQLEGLVGIDSNLDNLTLADSSDQVERFNLAKATEIKSKYRAVKARFTRNDVRVRRRIFQKYGEKEQSKVGHILHNVSRHVVEDAKARSLGIVMEDLRGIRKLYRKGNWQGRYFRGRMNSWSYYELQRQIAYKAQWEGLPCLYVKPYGTSSKCSMCGHRLSEENRTVKCLSCGLMMDRDVNAAKNILALGLRFRPIAQPVEAMVAEPQLERNPQSRWL

SEQ ID NO: 38988 - protein, 379 aa, unknown
  TnpB Polypeptide
VESVKVVKAVRFQYTPTQDIHDLLVTFRDLVNEALRIGFEKKPRTRFQLQAMIYYDLKEKYGLHSHYILSACECAFAMLRNRKWRKCPYARKLFLKLDNQTYSLDYMLLRIPTTPRHFISILLKAGDYQLSFLRDPSLKRGSITVTDSTIVLAVSKTASVVEPLRKPIAYDINEKNITGSDGEQIDLSHIAQIKHQYSRIRASIAHKTCRDRRIKKRLLAKYGRRERQRTNQALHMVSKRIVEKAKQAHSPIVLERLTHIRRSMLRGNGQGRKMRGRLNRWSFYELQRQIEYKAQWEGIPVKYVGASMTSKTCSHCGYKNKALKWEKCWTCPNCGIQHNRDINAAINILSRFKEPNVVRSADEGLAKETMVPLATVSRG

SEQ ID NO: 38989 - protein, 210 aa, unknown
  TnpB Polypeptide
LHVNVTNTKQTVRDKQDSRTVVGVDVNEDNVALTALSEDGVEDTLVIDFPEIKFERHRHSTMRKRVQNAGKDSMHDTVEGREERFVRDRLHKVSRHIVEWSQRFEKPCIVFEDLKQMRDSIDYGTLMNRRLHHLPFRALQFCTSYKASFEEIPTAWINPEYTSQRCPLCGHAERANRNKKRFTCRGCGNQDHSDCGASVTTAVKGVRKLD

SEQ ID NO: 38990 - protein, 406 aa, unknown
  TnpB Polypeptide
MFIFKGHRFRLDLSEEQAALCARTAGTCRWIWNLALEQRTMAWRHGQHSIGFAAQCAELPGLKEAVPWVCEAPSHCLQQTLRDLDQAFQNFFAGRAAYPVFHKKYQNDAFRFPDPKQFQVLDVQARLKLPKLGWVRILNGKGRHALKLSGKPKSITVSREGKYWFASVLCELEIPKPEPVQGPPVGVDLGVVQTVTLSTGEVLHVLGLRKGEDRKLARLQRSLARKKKGSRNRKRARARLAHFHLRISHRRRDSIHKATTKLAKNHSLIVVEDLRVKAMTTSARGNIEAPGRNVKAKGGLNRAILNVAFGEIRRQLEYKCQWYGSTFVAVNPARTSQRCWNCGHTDARNRPSQAVFRCRSCGYGENADVNAAKNILERGTAEGTPVAVCGAMPSGGRRSRNPRAQA

SEQ ID NO: 38991 - protein, 406 aa, unknown; identical to SEQ ID NO: 38990
  TnpB Polypeptide

SEQ ID NO: 38992 - protein, 360 aa, unknown
  TnpB Polypeptide
MVEKIHSDGLHTRNDLCYFLMELKEAEPWLYEHHSKMLQMVAVQVDGAQKSLIQLRKNGNKTGSLKFARLSEYSTFTYNQSGFELKDGFLHLSKIGKIKLNQHRQIPENSDIKQITISKSRSGKWYACVVVDIDVALPKISLKRSVGIDVGIKNFAYDSDGFATPNPLNLQKMLKPLVRAQRKISRRQPDSNNHKKAVRFYQIIHERIKNRRKDFLHKISTIYAKKYDVIFVERLAKLNMVKNHRLARNILDSGWGIFTNMLDYKTMRVEVPARNTTMQCSRCGNMVPKSLAVRTHKCDACGLILDRDHNAAINILIKGLEIFGLSPQAIISVPQELRELTPVEISKRSRKQEATIFSEW

SEQ ID NO: 38993 - protein, 397 aa, unknown
  TnpB Polypeptide
MHRVHKIKLDPTAAQEEYFRRACGVARFAFNWALAEWKAEYEAGGKPNEAALRKRLNAIKGEQFPWMSEVTKVAPQNAIKNVGVAFQNFFRRVKQGGKPGYPRFKKKGLHDSFRADNGPQNSESHAVECVGRTIKLPRCGVVRMREELRFDGRTLAATVSRMADGWYVAILVDTTDCLSGPLDRGTVGVDLGVKEFATLSTGEVIPALKPHRAAHQRLVRLSRSLSRKQKGSSNRAKAKTKLAKLHQRIGNIRTDALHKLTTKLATEFDTIAIEDLNVSGMMRNRHLARSLADAGFFEFRRQLEYKAVMTGANVHVVDRFFPSSKTCHSCGTIHPMKLSDRVMVCDCGNIMDRDLNAAMNLKNNAASSAVSACGEGGSGLDRKIKAKPASAKQEVEV

SEQ ID NO: 38994 - protein, 440 aa, Streptomyces sp.
MNSELDLVKRQFGHRARLALSPAQIRAMDDQAHAARTMWNCLHAWWQMMPKEKRSVAAADAAIRQARKDIDFLAVLPAQGAQAVLKTYFQSWKNCWDGRAEEPNFKGRSRSVMSVDIPQGRDLQIKRVHRRWGMVNIPKIGRVRFRWTKDLPLGKQADSDNRITGARLVKDGLGWHIAFRITTLDHAPEPHSGPEVGIDMGVNIPMALSDGNHHDHGRLPRLPDGTCDRDKWLNPDEKAKLLRLEQRAAHRKTFRKPKEKTSRRLHRTYDQIRALRAKATRRSIDWQHKTTTTLAEQYSVIVVEDLHITNMTKSAKGTVENPGKNVKQKSGLNRSSLQEAWGRTLTMLTYKTARQGGALVKVPAPHTSQRCSACGFLAPGSRETQALFVCKNPDCGWTGNADHNGARNVLHLYRIGHVAIPAAGRAVVRRTRGVNPATAR

SEQ ID NO: 38995 - protein, 407 aa, unknown
  TnpB Polypeptide
MLRSITIQLKATPLLADLTIRAKNLYNVATYQMRQRFFQRKRLYTYTALWKELKEHKAYLALKELAGAQSPQQILRLVRSTWTGYLAAKRAYRLHPANFHAPPKPPKYVKKHRKFVVLWSHQEVRIRNGKLLLPRKVMTKGFPAIPLDRLPCTAQTYRTALLVPFYDRYQFIITYEAAATAPAIEKDAPEKVLGVDLGVNNLVATSDGLLIKGKIIKSINHYYNKQRAKLCSVLARHKLPTSRRLQRLLRLRQTKIHDYLHKASRQLIQHCREQQITTIVIGRNKHWKQKVRLGKKTNQHFVGIPFHKFIRMLTYKAAAAGINVQLVSEAYTSQTCSRCGHRSRSNRVFRGLFLCNHCALVCNADVNAAINIAQKVRSRAAATTGSTPRRGARGTVPVPVPSDTNLS

SEQ ID NO: 38996 - protein, 379 aa, unknown
  TnpB Polypeptide
MYKCYKFRLYPNKEQIILLNKSFGCSRFIYNHYLSKIKEFGYSNSYSNITDYTSNLKYQYPFLQEVDSIIIRKSLFHLEDNLNKYYNNGFGYPKYKSKFDKHSYTTSAVYRRYKDRCYCNIELDLINRKIKLPKLKWIDIRGYRNINNICGKIVNATISKDINGKYYVSVLYDIVDIKHKKLIPNSIVGIDLGIKKLLTLSDGITYDNNKYIDKYEKSIKRIQRELSRKKLRSNNYYKCKKKLGILYSKLRNARKYYIHNITKEITDKYDIITCEGLKTKNMIMKKEMSKNISDATLSEIIRQLDYKCRYKQKRFYRIDTYYPSSQECSVCGNINKLYKDLNKREYKCNKCYHIQDRDLNASINIMFEGLKLYMKEIRI

SEQ ID NO: 38997 - protein, 386 aa, Fusobacterium sp.
MYKALKIELKLTVAQKIKVCQTIGTERFIYNEYIKYNQEQYKLGNKFVSANDFSKYINNIYLPNNPDKKWIKDISSKSVKQAMIYGEQAFKRFFKGLTAFPVFKKKGRNELGAYFVKNNKKDFEFYRHKIKIPTLKFVKVKEYGYIPKNANIKSGTITKIADRYFLSLIIEVDDIVKTKNKNIKGLGIDLGIKDTAICSDGRVFKNINKTIRIKKLKKKLKREQRKMSRSVEYSKSKKIKLKKCKNFNKKKLKVQRIFYRLNCIRDDYNNKIVDEITRAKLKYITIEDLKVSNMMKNRHLSRAIQEQNFYSIRTKLINKCKERNIELRLVDTFYPSSKTCSCCGSIKKDLKLSNRIYKCCNCGLEMDRDYNASINLEKAKIYKVIA

SEQ ID NO: 38998 - protein, 353 aa, Methanosarcina sp.
MTKQVESAFTRFFREKTGFPKFKSKKNPIQSFPVPQHYTVNFETNTIKLPKIEPIKAVLHRKFEGEPKTATVSRTCKGHYYISILVEDGKELPVKEAFTESTTVGIDVGIKDFAVLSTGEKVENPKYLKNSLKRLKVLQKRVSRKQKGSKNRAKAKRRLAVLHDKITNQRNDFQNKLSFRLVSENQAVALVTLNVKDMVKNHHLAQAISDSAWSSFVTKLEYKAQWFGKTVLRIGQFESSSKLCSVCGYHNKELQLKDREWICPDCKTKHDRDINAAINIKKFALIDQNLIHASSVKEFFCLYAIDFRAKINLKFRTPKLKSISCSNFRFIYVFEIYHRNRAIYHDSLLTEDA

SEQ ID NO: 38999 - protein, 373 aa, Methanosarcina sp.
VKYIEQQNHLPALKEKYPQYNIVYSKVLQSVLKKLDANYKSFFSFWKNGAKSARPPKFRSGKYFMTLVYNQSGFKINSEKLSFFHKANEIPLSFEVGNACDLLTIKQIEIYNDDPYKGRGNFFVSITYDENPISPITEYVDNDLYQAIDLGITKIVTAVNTQGKFFEVKTPRSDQYWNTKIDTIKSRKDHCKKGSNRWNRLHKTYRKMEAKKSNQIKDFQHKFSKTMIENTRANKIIVGDLNVKSMAQSKKVTGKRKRSQSRSTRNQGYLSRIIEFLTYKAELTGKRVIRIDEAYTSKECCVCGKRHNIPLWERTMKCDCGNVIDRDRNSAINIMKQFLSQNALWTGYQKFSDNLRQTGLQMDTCITANIQVT

SEQ ID NO: 39000 - protein, 260 aa, Methanosarcina sp.
MTKQLNPAFTRFFREKTRFPSSNQKRIPIQSFPVPQHYTVNFETNTIKLPKIEPIKAVLHRKLKESLKRLRYQGHLKDITTSVSLVEDGKELPVKEAFTESTTVGIDVGIKDFAVLSTGEKVENPKYLKNSLKRLKVLQKRVSRKQKGSKNRAKAKRRLAVLHDKITNQRNDFQNKLSFRLVSENQAVALETLNVKGMVKNHHLAQAISDSAWSSFVIKLEYKAQWFGKTVLRIGQFGPSSKLCSVCGYHNKELQLKDRE

SEQ ID NO: 39001 - protein, 300 aa, unknown
  TnpB Polypeptide
VAVGKINRRWAGLAVPKLGKVRFRLSRPLPSSYGMARITLDRAGRWHVSFSAVQAATDRRPTGSVIGIDRGVATTIATSDGEMFRAPTSPNLVSKVDRLQRRLARQKRGSAKRAKTKVRLAGAHAQIVDRRRDWVEKTTTRLVYDHDVIVLEDLRVKNMIRRPKSKPDPDHVGAYLPNGSTAKAGLNRAIARSSWSTLARRLEDKAAASGVTVVYVDPRYTSQQCRRCEHTAPENRESQAVFECVSCGHVNHADINAAENIVARGLAPAPTPGHGASPGNRAARVSPPPAAAGTTREVAA

SEQ ID NO: 39002 - protein, 196 aa, unknown
  TnpB Polypeptide
MVPAYSHHPTGSRPNPKPQNIVGVDLGIRMLATSYDGETTVFQHGGEVKSKRGKYKRLRQQLQKRGTRSARRRLKTIGDRENRWMTDVNHQASKALVNHYDRDTMFVLEDLTGIRNATEQVRVKDRYVQVSWSFHQFRQMVEYKAKRNGQKVVFVDPAYTSQTCPKCGKIRESQPVTRNATCMSAATADTGPTTTG

SEQ ID NO: 39003 - protein, 478 aa, Streptomyces sp.
VPSEYRTGGGAVVETARKDERIRVTGAETKRVKREALGVPDRAKHQQRVAVPMQRRTPEADTRQRVFRYRCYPTPTQAEQLIKTFGACRWTYNEGLALREKAWREHRVSLGFTESCRALTGWRNAEETRWLQDVSSTVLQQALRHLDAAFGRFFKGTAKHPRRKKKSRSRDSATYVRTGFRWLEDPEQSGTGLIALAKQSGPLRIRWSRPLPSGVRPVKLTVSRDRAGRFFVSVLVEERIAPLPPVFLRDGGAPKAVGLDLGLTALVTLDDGEKVDHPRLLRKYGAKIAKLQRSLHRKKRGSKNREKARQEIARLYALISDVRRDALDQLTTRLVRENQVLVVEDLSIDSLVRSPRGRGRRRDEAVRAGGVGAAPGAGHALDDQGLRDAGRGGGRVVGSEIRRKCVPDRRAVGRDACGVRVRPTGCRPQGGVRSAVGAEAGSAPSGAGSKVSCSCSSSRSPGELFVTQEVLTGHMNAR

SEQ ID NO: 39004 - protein, 677 aa, Streptomyces sp.
LRTAAGGARTCRNRPPPGISTSPIGGEGRQVSSWLPPPRGGGHSGGTAPGSHRLPGSCRPWVPASVSLGPGRVADGGHEVAGDEAGDVVVQDVGLDVAEGGVRLGGDAFGEGLQDPALEVGSGVGGDDRGPVLGGDDGGVVVADAEHVVLDARRHERDLRFHELRDAGGGVEGDRGPDAADGVLVGALRAKERGGLLRAVDLEAAPAAPVLLAEAEVVEHRADVEEFGVEGETSGPALEGAEEVDAAGVVVDEVARGVADEFGDGGGELAVGDERRRVHGDKPRRRNPTPAMSVRTCMPQNRTLDCPLLEEGIPGCRCGTQAPSRSHSFPARASAGRSRFPALLRWEGRADAPNFKNRFRTAMSVDIPQGRDLNIVRVHRRWGMVSVPKVGRVRFRWTKDLPVGKRASAENRITGARLVKDALGWHIAFRAQTLQSKPDPHQGPDVGIDVGITVPIALSNGETYEHGEWLTGKEKAKLLHLEQRAARRKRHRKPGARTSRRPHHTYDRIAGLRAKAKRRALDWQHKTTTHIARTYGTVVVEALTITNMVKSAKGTAEEPGRRVTQKAGLNRSISQEAWGRTVTMPAYKTAQRGGVLAKVPAPGTSRRCSACGFTTPGSRESQAVFVCKNPDCGWSGNADHNGARNVLHLYRMGLALIPAAGRAVVRRAERVKPATAR

SEQ ID NO: 39005 - protein, 407 aa, unknown
  TnpB Polypeptide
VYAEIWEELSEIKNLQKRFNEAEHLVHETKKNHARFPFDRHFPKMPSYLRRAAIQHALGAVSSYQSRLSLWEKGELRGKPKLVCENHAMPVFYRDVMYKEAEYGEDVAHLKLFDGRDWKWFQVKLLHTDMEYLRKKWSGKKATAPTLEKKHHTYFLRFSYTEEVSLSKTAVKEQVICSVDLGINTDAVCSIMRADGTILGRKFINFTSDKDHLYHVLGRIRRFQREHFSRQVQSRWNYAKRLNMELSRKIAVEITNYARENQANVIVFEYLEMQGKISGKKKQKLHLWRKRDIQKLCEHQAHRNRIRVSRVSARNTSRLACDGSGAVVRNPENHSLCIFQTGKQYNCDLSATYNIGARYFIRELLKPLPETERSSLEAKVPVVKRRTSCVYADLRKLYVEVNNLKAA

SEQ ID NO: 39006 - protein, 400 aa, unknown
  TnpB Polypeptide
MQTVHIYPLKELDSRTRARLKAAQMEAARVWMYCVGRHQQARSERTRWPSRDELQRATKGAQYALHSQSIQMVCQQFLANVETIKQLRPSNPRHRYPYHPKKYMTVQWPAQAVCHQGKRLILPMGRGRKSFSFHLSDLPEQIGAVSLVWNGGYELHIVVPISPPAPAVVPSAQPVQASVDLGEIHQAAVTTSTGKALIVTGRGMRSIKRQHNKTLGQLSRLQARCKKGSKRWRRLQYTRERERGKKERRVRDLRHKGTRQVVDFCQQAGVQTLYVGDPHGVRKENKGRHHNQRMAQWEYGKDKDYLQHKCEQVGIACFSGSERGTSSHCPRCDWKKKPKGRNWTCRRCGFVGHRDIVGSMNMHPIAFGSRISYPTSLTYRRPGPLRDRRLDKERSPGGSS

SEQ ID NO: 39007 - protein, 372 aa, unknown
  TnpB Polypeptide
MAVGFILYRTYKYRIYPDDIQEKQINKIYGCQRFVYNYYLSKIKDNGYISSRDNIKDFNINLKKNYPFLSEVDGLFIRKTLFILDDDIKKSNDHPKYRGKNSKDKFILSNSYSNIIFDLEKNRLELPFLGEIKFRGYKNIVKIDDNIINVTITRENTGKYYANFLYKIPDKKRVNATSIVGIDIGIKNLITLSDGTIYENNRYLEKYEKKISQMQKVLSKKIKGSNNYKKYKKKINIIYNKIARSRKFYIDKIVREIVEKYDIIVCEKLTTKNMISNGNLSKQILDASFTEILKRIESKAEEKGKYFYQIDTYYPSSQICSVCGNRQRKYKDLKEREYLCPKCGNNLDRDYNASVNIMFEGLKLHMKRINSR

SEQ ID NO: 39008 - protein, 582 aa, Proteobacteria sp.
MRKAEDSGQRTIETRLSCLELFPLLDELLGYFSSLRHRLYRDLIVNNLPLNDLKSSYLSSYGLTARHFNSLSKDVSARSKANEELLKLNLKKYESHILIVKNQCVDLRKKIKKNESLIKSIETYRSKVASWKLKKSCGNRILKRPAMPSSIFKLHKQNLLDEISRLYGQIHQKKRRLNNLTIKRDRLKARTISKLCFGSGKLFRAQFNLTANSFEDHQEWLNVFRLARSSSMTFVGSSDETCGNQTIQYSMADKALKMRLPNAKGFESKTLHMRDIVFPDFLKAEFAKALSHPGEHGKQNQKTALPITYRLIRRYNSSNKEKSYYLQASFKVAAAEIITHMNSGVVGVDINYDHLAITETDRFGNYLKSFVLPFNLKGLDREQAQAIIGDVVAVVVESCARLQKPLAIEDLDFAAKKSELRAQPKFRRHFLSQFAHASFISHFQSKARALGVNILSINPAYTSLIGAYKYQGLNISSHEKAALAIARRAQCYNEGLKVFQGTLPSQVMMTEKTKFRECLRHVWGFYADNRKTIRRLFIDADRRPLLPIRRASSLAGRHSSLKQSYLVIREKREFKEPSRSLG

SEQ ID NO: 39009 - protein, 430 aa, unknown
  TnpB Polypeptide
MKVSQAYRFALDPAPAQERALWSHAGAARFAWNWGLARCKERYAAEGKWYSGVDLHKMWNAAKKADPALGWWGENSKCAYQEAFRDLDRALRDFVRSRKGERAGTRLGFPRFKKRGKCRDSFRFSTGALRCAGTTVTLPKLGMIATHENTRKLARRLENGTARILSATVTRTAQRWFVSFTCEVDRAVPQRHARPGSAVGVDLGVRALLTGADSDGRVFTVGGPKPLRTSLRKLRRACRAHSRKAKGSANRRKSAARLARVYARVANVRTDALHKATSQLASRYATVVLEDLNVAGMLRNQRLSRAIADQGFGAAARMLAYKTRWNGGQVIAAGRFYPSSKTCSGCGAAKAKLLLSERTYVCAACGLVLDRDVNAAVNLLGLAVSGMERINACGPQVRPGLAGRSGLKQEPGAADAGQAGTAFRQRKAVA

SEQ ID NO: 39010 - protein, 231 aa, Planktothrix sp.
IDFGLDNLCAVVSTTGESFLIDGKRLKSINQWFNKRLDHLKHHKDKQEINCLTKQEAWLSYRRSNQVKDYLNKTARDIINFCVQRQIGTVVVGYNSTLKQAVNMGTRNNQNFTQIPIFTLKDKLKSLCERMGINYVEQEESYTSKASFLDGDRLPAYNADNPVSAKFSGKRVKRGLYKTRDGHPIDADCNGAANILRKSKHKTDFSRVSRVCLTQPVRVKILPDSPVTASA

SEQ ID NO: 39011 - protein, 543 aa, unknown
  TnpB Polypeptide
MGKSENEKWIATIPTQSLANIGKIDLVSDLLVPYSELSAYFLKDIDLRFVRDNELSKYTKTKVYQTEKEFDALLVKCDKRYQKQIADNVTPTRSLKEQLEDIHEYAVQTPLSARFAQTCYSQTIEIYKSWQTKLEDVVRSYLTNSSVSEKDEFFLVSCYRINKNHFWYQKELCLEWYQTKDGDLLVPTKQNKANVKLPVSEDILFFMRRLIKQARKRIRFPQLKLLKTLKLDEKVATFEVSRNATHFNYFLKLSTLEKGKPIYLPLNRNPYLDECLTKGNRKPFVQLRLDGKKCVISVIVEYDKAPLRPSDSSLGLDFGMVSMFTTSDGEQHGLTSFAKLKIWDEELIALTKEFQEKGVKFKSNARYVQLQNRIKSYFKNEICRILNKLAKKNVGVFVVEQLDFRASGLSKSMNRLIGRTYRSIVKAKLARLEEQFGIQIVSVNPAYTSQECSRCHYVSKNNRKSQKQFICEHCHLHCNADVNAGRVIDQRRSLISEFPVYNKKGTSSTIRCQVREASEECHRRYCLNNELSTTNASLAESSL

SEQ ID NO: 39012 - protein, 262 aa, Clostridiales sp.
VLCETEKPQPLAPGIGDVGIEDLAVMDSGIKYSSPPALEKMLSQLKEEQRILTQKTKGSRHWEKQRLKVTRLHEQVMNIRKNHAHEISTELVRRYDRIMTENLSIQEMLKTSEADCARGIIASGWSELISMLEYKCVWYGRKFVRMGMYFPSSQLCSACGFQNAEVKNLNIREWVCPVCGERHDRDINAAKNIKWKEPVCWQESFHKQSPESGGKHPKCGEKIQGAKPYTAAELLQRAQRRIPRFNGDAVSGGASNRTKYRV

SEQ ID NO: 39013 - protein, 284 aa, Oscillatoriales sp.
MRFYNSRSIPSGFTIKACTVRKRQNGWYVSIRIEDKSVPEYSPKALGNNPKVIGCDLGLTKLVHLSDGYQIENPRFSTNKKAKRTLKIRQRRVNRKTKGSKNRKKAVIRVSRFHQKIGDKRQAHQWKTANLIVFRNIDVIALEDLNISGMMRRCKVKTDEETGRFLKNGQSRKKGLNRAISDAGWGDLGLKIEYLAAKQGKIVIKVNPKHSSQECRSCGHIDKSNRDGEKFICVECGYHEHADIGAAKTIRDRASKMVRGDSAKPGVEHLNAQKISARTCVQTC

SEQ ID NO: 39014 - protein, 419 aa, unknown
  TnpB Polypeptide
VYLTQSNQIRGLSKKQYQQLRELCHYAKNLYNVGLYNIRQHYFSEKSFLKYESNYHVAKTNENYKLLQAGVSQQILKVVDRSFKSFFNLIQKAKKGDYRYQDIQLPRYLKKDGLFPLIFSTNAMNIKDGFFRVAVSNTYKKLFPEHQDILIPFPKRLEGKKIKEVRILPRNNGQFFFIQYVYEQPSEIVELDMSKALSIDIGLNNLVTCVDTDGASFIVDGKKLKSMNRLYNKEKARLQSVAMKQGLKYTKRMNALTLKRNHQVGNYIKKCARIIMNHCLEHKIGNLVVGYNDDFKRSINMGKKNNQAFVQIPFGRLRKQLANLCERNGIFYKEQEESYTSKASFFDGDEIPTWNPNKEVAYRFSGKRVKRGLYRTKTGIEINADVNGALNILRKSNLVDCKILQARGCLAHPQRIRVS

SEQ ID NO: 39015 - protein, 378 aa, unknown
  TnpB Polypeptide
MSLWCDSRDTDSVWNAILAENEARYEMGDPLKLGHSAFCERLQTLKARHEFLRSVHSQPLQQTLRDLAVAYDRALNPKLSAKMPTFKKKGFAQGIRFPQGFKVERNGVFLPKIGWVAFRVSKRTMKRRVLGEVKNVTVRLEAGKWYVSFQAEREIVEPMHPNADSAVGIDVGVARFAALSDGSFHEGANAFKKNERRLAVLQRRLARKVKFSANWRKAKTKITAIHSRIANIRKDQIHKASATISKNHAVVVMEDLKITNMTASAAGTIDEPGRNVAAKSGLNRRISDQGWGEFRRQLGLGGTLQLVDPRNTSRTCNACGHVSADNRVSQSLFKCVACGHASNADTNAAKNILGRAGCARIACGDLKKSAKQETLCLA

SEQ ID NO: 39016 - protein, 348 aa, unknown
  TnpB Polypeptide
MDAYKNACNYVSEYIWVIRNLNFYIINDALYYDLRTRFNLRANMAQSVIKTVIAKYKTIQTNENEWIQPYFKKPQYELVFGEDYSIVKGLFNINTVNGRIKKIPFEVKSMRQYFDGTWKFGTAKLIYKHGKWFLHISCSKEIDLPEKCYINNIVGIDLGVNFTAVSYDSNSNTIFYSGKPIKHRRAKCKAVRQEIQNRQTPSARRRLKKIGSRENRWIQDVNHQVSKALVENQPKGTLFMLEDLTGIRGATEKVKLEHRYVIVSWAFYDLRKKIEYKAIKYNSKSIAVDPKYTSQECPMCGYTKSSNRNKKLHKFQCTKCGYKSNDDRVGAMNLYNKGIEYLANPQTA

SEQ ID NO: 39017 - protein, 395 aa, Oscillatoriales sp.
MLVLEAKLRAKDWQYKLLEEAIRAANFVRNKALKHWMDNRGVSKNDLQKLCATLAKEYDWAGKLNSQARQSSADRAWNGISRFYANCKQGKPGKKGYPKFKKRGRSVEYKQTGWKLSEDRKRITFTDGFKAGTLKLLGTRDLNFYQPEQIKRVRVVKRADGFYCQFLIDVERSEAQSPTGKTVGIDLGLEFFYTDSEGNHVENPRFLRKSEKSLKRLQRRVSKREKGSKNRKKAINKMARKHLKVSRQRREFAVRTARALVTSSDVIVYEDLKVPNMVKNHKIAKSISDAAWSMFTNWVDYFAKIHGVHVVAVSPHFTSQDCSECGTRVKKSLSTRTHKCPACGLVEHRDFNAAKNILAKGLGLKSTVGHIGTQTLEEIEPLVFSEQSEQVKFGH

SEQ ID NO: 39018 - protein, 422 aa, Haloglycomyces sp.
MTAMSGPNDKVVCMLTGRRFRLKLTPEQAQACTEYGNVCRAVWNAALDQRREARRKGAWANYVPQARQLAEAKREPGLEWLKVAPSHLLQQTLRDLDRACREHGTFTVRWRVKHRWSPSFRFPDPKPMAVERINRKWGRVKLPKLGWATYRSTRPLGGVIKSATVSFKAGWWWISFLVDDDQATPEQHANPGAAVGIDRGVAYAAVTSDGRFHDRAFVTPGEVKRYKRLQQQLARQRRGSASWGRTLIRLRRLSCRVTDRRGDFTAQVAHRIASDNAVVVLEDLKTKNMTARASERNVKAKAGLNRAILDKGWHRLELALASKARYTGTKLVTIHPAYTSQTCHACGYCAADNRDSQASFCCTACGHRANADVNAARNILKAAGLAVSACGDGNMSQSVKQEPAHPRGLVRQPVSPVGIPRP

SEQ ID NO: 39019 - protein, 418 aa, Haloglycomyces sp.
MSDVPVTLSLVHLRYRFRLYPTAPQRRQLARTFGCVRTVHNDAIAARRAAYAAGRKYPSSVLLAKTLITEAKKTPEREWLAEVSAVVLQQALRDCDRAYKNFFDSLTGRRQGPGVGPPRWKRRSNTQTARFTKAARFRVLGNGRLRLPKIGDVTVAWSRELPSDPSSVTVIKTPTGKYFASFVVTADDGVDLHDPLPDDAETGIDLGLKDFAVLRGGKTIDNPKFFTRLERKLRKAQRSLSRKQKGSNNRAKARLRVAKVHEKIKNSRSDWINKQVHRIVSENQAVYAEDLNVQGLQRSRMSKSVHDAAFGMFLSRLESKSQRTGRTFVTVDRFFPSTRLCSDCGALTGPTGLEGLAVRRWECGCGASHDRDANAEINIRREGRRLVAAGPADTQNDSWSAGKTGTVPAQRVEAVTHP

SEQ ID NO: 39020 - protein, 376 aa, Thioclava sp.
MTLKATKVRIYPSIEQQEFLTAQFGAVRFAWNRALAIKTHYYRRKGISLHPTHDLKKLLSAAKSSRKYAWLKDYDAMALQQACVNLTKAFTAFFEKRARYPRFKSRHGDQSSYHCTGAMGFGDDWIKIPKLGSKIRAKIHRKVEGKVKSITLSRSRSGKYFASILVEDGEIAPDLPKVLDAGRIRGIDAGVTDIMVDDLGRKTANPKHLKRAKNALRRAQKALSRKKKGSKNRSKARLRVARLHERVANSRADYHHKASRALVDESQAIIAETLNIKGMLKTHRLAGSIADAAWGGLLQKIAYKAARAGVIFHKIDRWEATSKTCSGCSHKLETMALSVRHWCCPLCGAEHDRDINAAINVRNTGILDLKASGLRV

SEQ ID NO: 39021 - protein, 331 aa, unknown
  TnpB Polypeptide
MYRIYPNDKQKELIAKTFGCTRLVYNTILSLRTPLYNVCKMSFSFYEWQNFMVNCLKKKHDFLNEVDSHALINSLIDQERAMKNFFKDPNQYGYPKYKRKNETHLSYRTDLMNNNIKVNFQQNKVKLPKLGWLDAKLHREFTGKIKHATITKLSSDEYYVSICVLEDISFLPTVDKKIGLDLGIKTLCTTSDGKKDNYNFDFSFYEDKIKKLQKYLSKKKQDSKRYRALQLKITKIYQKVTNKKEDTLHKIVSTLVNENQVICVEDLNVKRMMAKNKNKRKNKSKENTSSKNYLSKSISRMSWYTFTKFIEDKCKQTGRTFQKIGKFYPSS

SEQ ID NO: 39022 - protein, 433 aa, unknown
  TnpB Polypeptide
MIVKRIVKFNIKKNHVDYNYIKQQLIESKEIYNYANYIIRQIFFKKSKNHQFSLDFVDEYPELKDLFTKYIEEDKQFTSLFGKIIRKFAKLKEFSVNTKIVHSILNKLKFDWNCYWALLNLVKNKQYERPINIPRYKKQYNLVEYGNQVLSKKKLKLGFVGSDKMKQGFKLSEKHKDLNCKCFRIFYKNNNFVCELIYEKEINDQTSSTGKAASIDLGLENLFTVAFNYNKKGISFKGTKLKSINQYFNKEKSKLQSLLPKNEYCSKRILHLFYKREEQLRNIIGYYSNRLMELLVNEGISILVIGHNKNWKDKINIGKVNNQNFVSIPFSKIIDIIKYKAEDFGIKCIEQEESYTSKASFLDNDNIPTINEVNEKPTFSGKRISRNLYQTKNNQIIDADLNGALNIMKKANIEMLTPLDYLKFDNIFTSKLM

SEQ ID NO: 39023 - protein, 543 aa, unknown
  TnpB Polypeptide
MYKEVLKMLTEKKSNSNFVTVECLLAFDKDEDKGRVLTLMRKFSSMVRFAYKRLMEGAERKELKKLLSRKYGINTRYSDDAILLAQQTLESCIEREQNPKKLIFGSRKLFEQLKKKHLTGKSREKLRQKWEERRYGVLYSRGEKSKEGNLNIRLVNLNNQWYLRINLGNGEYVWARVIRSVKRKTDKWASFISSLEHAEKTGDWFPYTVRLKLRNGKIYAQFSREEKLPEVTITKDNGVIGIDINAYPFHLALVHTTKDGNLEKYERISLDNLLDGNSYKRAYLSWQTAHQVVEIAKRERKAIVMENLEKLPKGKRGDGLPKLRQKLQKWIYKALLQKIEIVAKRNGIQVIKVNPAYTSIIGKLKYAPLYNIDKDTAGAYVIARRGLGFKERLPKNYKEILKDADFLSYAIAKIEDKIAKIKQEIRKEKNEYKRNRLKSTLGKTRKELDTLLGYLRESGESESAAQQTVNRKMERLRGFTLVEQKSWQVLAVALAFSCLESLRDFSPLKRVILTMNWVGAAKQNGLVPLPHQEATVLNLYSFV

SEQ ID NO: 39024 - protein, 433 aa, unknown
  TnpB Polypeptide
VVLEAVRVTLDPSPAQERLLLSHAGAARFAFNAGLAHVKEAIEAGEKPEWSFYSLRRWWNASKDTLAVGEDGVIWWAENSKEAYSSGLEALAKGLSNWVKSRKGARKGRRVGFPKFKTKDHATPRFAYTTGAFGLIEGDPKALRLPKVGRVHCLENVTARVGDARVLRMTVSRRAGRWYAALTVERDIPTAARAPKGGAVGIDLGVKTLATLSDGTVIANPRALAASERRLKKAQKALSRKVKGSKRCAKARAKVARIHAHVANQRGDAIHKATSWLAGTYSEISVEDLNAAGMVKNHRLAKAIMDAAFGEFRRQLEYKTARSGAALHVVDRWYPSSKTCSNCGRVKAKLSLAERVYRCDGCGLVMDRDLNAAVNILVAGSAPETINAHRGTGRRNDLSGRATLDPVKCEPSKRRPGAVRLGADSRKAILQTN

SEQ ID NO: 39025 - protein, 259 aa, Bacillus sp.
VPLKTNDYTIFWVGFLLTGKMDKTSRFYQSSYETISQPKKGNAQFFYKKGQWYFSFSLSFEIESQKTGSKSIGVDRGLKYITVAGEKETGKYLAFNGKQLGHIRLRFSNLRRALQQTKNIKALKRLENKEQRILQYWNHVISKKIIQFAKECGASIIKLEDLSFIRSMKKHWKRSDRNIHSWAFFDLETKLTYKAQLAKLEVQKVNPYKTSQECSSCGNTQKKNRRGSLYTCSCGHKQNADVNASFVISTRPSIQTTAA

SEQ ID NO: 39026 - protein, 404 aa, unknown
  TnpB Polypeptide
MIASRKSSFEREIQSKKRRLRAIEQRLRRAPSRGGYEPPVAHQKRRVLGRLKEWIQRSQNRTPSLTFGGRKLWSAQHALLENGYASQEDWKKAWREARSGEFFLIGSKDESFGNQSCQWDPRDHTLTVRLPDELGGYRTIRDVSFRYQEGHLEHAVMNGMAVSYRFVRKPKGWTLYATTQAVKAELCTTRERGVLGVDLGPDRLAVVETDRAGNPVARKTVRLPLYRKTTAQARALIEATAAKIGAWAVRCGKAVVMEELDFEEKKAELRERGKGPARMLSSFAYGAMRDAIRSRCRKMGVELIPVHPAHSSTIGVIKYAATYGLSGDEAAALVLARRAMTLEESLPAGTALGRPEDRPRHVWKDWQRLGKTLRSKGRHVFIAAKRGPGGGREYPVLPARASPG

SEQ ID NO: 39027 - protein, 366 aa, unknown
  TnpB Polypeptide
LKSNKSYTCKISGNQNKIEYLEQTLSTIQELSDFVFVLGKTYGQQFWSNQKSLYKTCRKLFPDLNSKIHQNFISLYQPKGKRKLPKYQPIQAGIFVDSQSAHLKIDSSTKMTNFWIRFSRRNFPLLGKRILKKIKDPEKVKLIQIFKRKHQLYCKISYVDEISDIESEKTSKVVGLDVNTKRIVLSNNKFYHMKKLFHRKIEHHKNNLKKKNTSNYTKDFLHKLTTQISKDLSNQGVEVLVLENLKSLRKSASRKLGTSKGPKLNYIINSMSYGMFQNFLEYKCLDLEIQVEKINPAYTSKTCSSCKSRNTSRPRQVEFICNDCNLKLDADLNGSRNIETFYTTSQWANSDSSPRLDPKLVGSPCL

SEQ ID NO: 39028 - protein, 358 aa, unknown
  TnpB Polypeptide
MIQYQVKLKLDRAQQAKLDDWLWRLQAVWNWAIRKIELDGRDGVRYSSMQFRNQLAGHGKKIEIPSHTIQGVLRTAHDAWMRRFKGVGGKPHLKGRRNRLNSIPFPDPIRRPQGTCLRLQGVGLVRFHKQWLPEGAIKCGRLVKRASGWHLCLFIDAEPKAIPITGDGQIGIDPGYRKESLLTLSTGEKIPHPKELERLETRLAQAQRGKRAKVAARIQERIANQRRDRNHKLSRRLVSENAVIVFSKDKIKDIAQRGRGPVHFGKHVASAAHYQLRQMLAYKCRTGGRSYIEVDGRDSTMTCSNCGGLTGPPPGLSGLAVRQWRCKGCGSLHDRDINAAINTLLVGVGATLQRGIIR

SEQ ID NO: 39029 - protein, 352 aa, Lactobacillus sp.
MMYDESLILDDNSFRPNERKVRDELVDNKQDWQFLQSARVLQLAVNDLAKGWKNYFNPKMPNHAKPRFKSKKRSKRVFKTDRAKVVNGRLRLDKPRGSGAWYDIKLAEKLRWQGDIKLVTVVEEVDGYYACLSIDVADIAVEKHGVQVTGVDANIARFDYKDAYGYQQVNSLPQSLPCLYQRITVYQRLLARKRVANPKSFQSNNYRTTRTKLKRDYQKVKRIQEDLLKKFTAKLVDENDVVAIEDLDVLHMKMNKRLGKNLHRSMFGKFKQMMAYKSKWNGVKLVLVDQFYPSTQRCSQCGYIKTGDEKIGLSGNQKHYTGHDEYVCYHCGAKMLRDENAVENLIQYTQVK

SEQ ID NO: 39030 - protein, 475 aa, unknown
  TnpB Polypeptide
MVEKVTRILHSQGLNRAKHDRLADMAARVGRVRADAWHRCSGVSTAARSPYDIRDAWMAEGCDWHGLPARLGKATLADALGDIAAAREAAKVSVRKAVRHRTRNDAAERQRLYSLLKQNRWTEDPFLHRQMRNQWRGGRSHVTNQIVADSGSYTTKLWHGRAWVHLQSLEQGQRIAIPLKGDRLPSGTLRIILQDNGEVAVHHAIDETQACSTKPGGSGTVGVDKGYTEAYTDSDGERHGEGLGDLLSQESDARKVKGQRRHQLRDLEDKHRAKGHTRKADHIRRHNLGHQKWNRRRTRHHQQVRDHLCQAAHAVVDKAGTIACEDLSASMKSTKVRHRDTNRRLNGWVKGVMADTLTSISRRRGSALALVNPAYTSQIDSRTGLLQGTRRWDRFYCLDGVVLDADAHAACNILARLYDEEITLYMPYREVKALLAERTRTTVGTAPPGLELRGLATGPPSTESEVPATVPNRAV

SEQ ID NO: 39031 - protein, 444 aa, unknown
  TnpB Polypeptide
MKIISSYSVEIRTKSIDFKPTIQIYRSALAFLIPVVYENWSAVSQIEGNQRQMLFVEHLIHTTKTYTAKYDFDVRFHKFPSYLRRAAINDTIGCVSSYVSNYENWVEGGKNGKEPKLQTARFAMPTFYKTVMYESNEENGSASLKLYINNDWVWVTVKLLQTDLKYIQKYWQHCKPSAPVLEKRHGKYYLRFAFEEKVPLSKTQLKDQRICAVDLGLNSDAVCSIMTSDGTVLARKFVNFPSEKDHLGHVLNRIKKYQREHGSKNVMSFWQYAQRINDELTKKIASAITEFAVLYSVGYIVFEHLDFRGKKAKGSKKQRLQMWRKNGIQDMVEHKAHRCGIRISRICAWGTSKLAYDGSGIVERDKDNYALCTFAHADGKQGKQYNCDLSASYNIGARYFIRELLKPLPAMVRSDIEAKVPGCQRRTSNTLSTLRALTTALKAA

SEQ ID NO: 39032 - protein, 417 aa, unknown
  TnpB Polypeptide
VVEETFKYAATPDCDETAAAAWSDIQTCREVYNHALTQEYRPRPDYDKPSYREMQNKITAWKDRWPEWSTAYSKCLQMAVRRIKQSESVLESLQARGYGVGRLKWKPPHEFRSIVYNQSGFDVANNTDRTNHAIVNFSKIGDFHLNYHRSLPDDGDITQVILKKEKTGDWTVSILVDYDPEYPENPAVEDIAPEDTVGIDLGITKFIYDSDGRSFESLDDQCDRDRIERRHRNLSRKEHGSNNWEKQRRGVAKIKRRIKRRVEDFQHKLTTWLVTTYDAVFVEDLNVSGMLQQRGNARNKQDAAWRGFIEMLEYKGDLYGTHVVQVGPAGTTKECAECGVETDKPLWVREHSCPSCGFEADRDANASYNVLFRGLQELGLGQAESTPVETATAVETDGEQPSSVPVSRVVETGSLGA

SEQ ID NO: 39033 - protein, 406 aa, unknown
  TnpB Polypeptide
MIRTTKHNINNITNKGKQSSLDKLFIDYKHDLVIYLNYIIDGTLPLKNQLSSKLLPTENILHSRYKQIIYKQASEIIRSQLDKAKKKRYNKYKKCYSYFKKNSRQISFTDKKFSELSLNDILKSKYFTIPNLNNLSINLDERFFDIQSGNHFDSFINIKLPYFNEKGTRALKINIPLKHHKHSNKLKSEGFKLRNNIQIKNVNGNYLIHLIYEKTVDLRTSGSSLGIDMGYKKLVVTSNSEYLGKEMELLYDKISTKKQGSKAFKRLLTHRDNEINRYCNLIDIEDVKQVVIEDLKSVKSNSKGKIYKKFNNKLQRWSYIKTIDKITRICEVNGIILVKVSPAYTSQTCSNCGETHKESRLGETYKCVSCLYEIDADYNASININNRGVTYSLSNHDNFIIIPNND

SEQ ID NO: 39034 - protein, 379 aa, Deinococcus sp.
MLKAFRYRLCPTKAQETELFNQLRLCRNLYNAGLEERIGAYKKKKETLNYYDQANKLGEVKEALPEYKGVYSQVLQDVLKRLDKAYQAFFRRVKAGQKAGFPRFQGRDRYDSFTYPQSGFTVAQDGRTAYFSKIGNVRIRLSRPLEGKLKTATLIHDCGEWYVSYICQVESRLTPSTGQSVGIDVGTTHFLITSDGEFVDNPRHFQNAMKKLRVAQRAVARKPSNRSNTRRKAVKRVAKLHRKVARQRLDFHHKAARKLVNENDLIAHENLNVGGMGRGNLARSIHDVGWSQFFQILAFKAECAGKRVIAVDPRYTSQACSKCGHTEKANRVSQSRFVCRSCGHTMNADHNAAVNILGRAGPLSVNVGISSPCVAQESH

SEQ ID NO: 39035 - protein, 402 aa, Oscillatoriales sp.
MSQVLTVSCKLTVAPQQVEKLDAVLAAFARCCEFVNTKTPEKLTNQIAVQSLIYKEARTHSGLSAQMTIHAIRRVCANRKTAKQKNQKVKGFAPTSATYDARTFTFRESDWSVTLTMLKGREKFRLHIGNYQRHLLAGQNPKSATLVKRKDGSFYLQIQLESEPPAIPDTDDVLGVDLGRTDIACTSEGEKYSGKEVTQTRERYSRVRASLQRKASKGTRSTRRRARQVLQRLSGRERRFQTWLNHTISYRLIQQAKQSNQAIALENLTGIRERTNELPRSKTERRRSNSWAFYQLRQFLSYKGIKFGVDIRLVDPRYTSKTCHCCKVIGNRRGKKFECLNLTCGWVGDADVNGAKNIATWGVLVNNPGGSGMMSCSLRDVVFRATESPRCIAEQSASGRLR

SEQ ID NO: 39036 - protein, 486 aa, unknown
  TnpB Polypeptide
MCYLRPLSYESLSDQKQKDSPRPPSEQSLYFNLWDCEGRSGKSPSFGAVSRTASPGKLRRSRNRMKAESFAMITFTPPSADISIGIHNCIRLMISYKYPIFPNKITQWKLAENLDACRWLYNRLLQNLNEAKEKGIKLKTYDTQNMIPSLKLENPKLNQVYSKVLQMVNYTLWSNIKGLFASKKNGRKIGHIRFKGYGWYDTLNYNQSGFKIDQDHGILHLSKIGDMRIKIYRKIEGCIKAVIVKREGERWFAIVQANQEPQPLPETEEAVGLDVGLTSFVVDSVGNEIENPRCAKQSADKLARLQRRLARAVRGSNNYKSLKGKIAKLHKRINCQRDDFLHKLSRTYVNNFDIICVEDLDIKGLKEKGHNNGMHRSIHDASWSKFVFMLSYKAQSAGRKLIKVDPRNTTQRCSACGSIAEKDLSVRVHECPYCGFSCDRDYNASRNILITGMEQPVAPIEPKPLHHISVMQVLAMTWEAAPFRTR

SEQ ID NO: 39037 - protein, 377 aa, Planococcaceae sp.
MGITITAKIKILPDEQGKEELLHTIRAVKKGLNYASVTAFTKKCFVNTKLHPLTYQHLREEFGLRSQMACSVNKTVCAKYKSMKSNGVTDTLAVFKKPEYDLVWNRDYSLKPGHFSVNTLSGRIKVPYVTTGMEQFFDGTWTFGTAKLVVKKRKYFLYIPMTKEIDERNLFHEQSVKNIVGVDVGINFVATAYGSDGKTLFFNGKHMKQKRAHYKLLRKQLQQKHTASARRRLQAIGNRENRWMTDINHTVSKALVRHYGPGTLFVLEDLQNIRAATEKVCRKHRYVSVSWAFAQLRDFLTYKSLLNESKVLLEDPKYTSQTCPKCHHTDQTNRDKKTRSFCCKKCRYRSNDDRIGAMNLYHKGKEYLVRVSAQQAG

SEQ ID NO: 39038 - protein, 318 aa, Escherichia sp.
MKRAYKYRFYPTTEQAELLAQTFGCVRFVYNSILRWRTDAYYERKEKIGYLQANARLTALKKEPEYIWLNDVSCVPLQQSLRHQQAAFANFFAGRAAYPAFKSKRHKQVAEFTASAFKHRDGELYIAKSKSPLDVRWSRELPSAPSTVTISRDSAGRYFVSCLCEFEPVSMPVTAKTVGIDVGLKDLFVTDTGFKTDNPRHTAKYAKRLTLLQRRLSRKQKGSRNRIKARLKVARLHAKIADCRMDNLHKLSRKLINENQVVCVESLKVKNMIRNPKLSKAIADAGWSELVRQLQYKGKWAGRSVVAIDQYLPSSKML

SEQ ID NO: 39039 - protein, 467 aa, unknown
  TnpB Polypeptide
LVHWYGKTELEKLVADWAKQDERLKAIHSHLRQNVVNRVLEGTERWLEALKEGRKNVRPPKHKLAKHYRSFTFKQFGNGCRINNHRVFLSGFGWCKLHDHRRIVGRPTTATVKFMQGRWWCIVTAQSFEVDWYAERSQSAEGLPDCGGDPGLLSLLTLSDGRVFDPPRAFREAKRRLKRASRTMARKFRVRKAGHAASVAAGTETRSLKELPYSKRLTAAIRRVAKIHTKVDRIREYHHAKTAAVIDDTVGRLAVEEHGVTFMLRNRRLAASAADRAIAAFKQRVAATLGSKRYVPTANCRPDIGGNSQTCVCGHAVPKELSERVHACPSCGLTGPRDMVSANIVQMIAFGTVSEELAALNGGSVKLPGMCEVSAGGQSVDMRGGSEGSRGASLAAEPFARATSELSERRKSQSSFVRETLRVGNLPRKVRLVGNERRGTAALCPPEPKSLGPFGQALPDTGGSLGL

SEQ ID NO: 39040 - protein, 382 aa, unknown
  TnpB Polypeptide
MRAYKFRIYPSKKQEELLNKHLWLAKELWNELLEHCKQIYEDFGYFPTKNTLQLMVKDYGLYSQTQQEIAHRVHNAVMRVFKFRKKGIKCGFPRFKSFDRMKSLHYPQYEFGFSVDKKLKVTPFGEIVIKKHRKVKGKIKTLILKKESSGKWFAIFTSKTPEEIPKENKVGAVGIDLGLKTFATLSNGMRISNPKHFKKHEDRLAFIQRKFSFRKKRTQNYKKAKIRVAKLHEKISDCRRDFLHKISTGLVNDYSFIALEKLASQEMSEREYGKYIRDAGWNMFANMLAYKAEGAGCRVVFVNPENTTKECSNCGTIIEKMLWERAHNCPYCGLIIDRDLNAARNILIKATPGQGGSNACNSVMERDVVLATSMKQEAHAYL

SEQ ID NO: 39041 - protein, 349 aa, unknown
  TnpB Polypeptide
MLVSKTLKCKVFNPTKKKLELLSQEYMNFQIYIQTGRDFGVYSLTKATFNFKYKKKARKEKQPMPLANQKAKFKITDSKLTPYWFKVPVKGKRGGIWLPIKPHEDIDSSWEIREAKVFKRKKDFWIYITIRKEIELKTSYSSVLALDVGEKVIAAAVLSSVRKPIFLGREVRGIRRHHAWLRKRLQERELFKKLKEMKGKERRRVELVLHEVSKYIVELAEKNNSIIVLGDLKGIRKGGKGKRFNRILNSFPFNKLSFFIEYKAHLKGIAVIKIKEYYTSKTCSRCGEEGKRVKQGLFKCPHCKYQANADYNGAMNILKRSWEHVFQDGAAAFSPEPPMTEQTRAEAHI

SEQ ID NO: 39042 - protein, 427 aa, Glycomyces sp.
VGDGVHITRSGCGRLFVPYPVFIVEHVGKQVIQVKLVPTPEQAQALAATLRAVNEAANWTAAVSFKHGLLREYALRQHTYAELKDRGIGSQMAQLVIKKTCHAYATIAALIKAGRLQGKRAAKVTGKPVAFRAEAAQAFDDRCLSWQHDARTVSIWTVAGRMRGIGFTGHVDQLKVLERHRKGESDLVCRDGAWYLLATVELVDAEANTDPVDFVGVDMGIVNIATSSDGDNFEGAGLRRYRRRMAKVRAELQAKATKSAKKKLKARARREARAVKDQNHRIAKQLVASAERTGRGIGIEDLAGIRDRVRLTAAQRGELNAWSFHQLQTFIAYKAARAGVPVVVVDARNTSRRCPLCGHTAKANRPTRDVFACVGCGLAGPADQVAAVNVRDRARKTWAFVNTPNVADTPHPAADTSDKPPASIGGS

SEQ ID NO: 39043 - protein, 376 aa, unknown
  TnpB Polypeptide
MARRALVFQLYRTKRVRYLHARIDLAAAIHNHLIAVQKRYYRRFKGYIGYYRLKRHVTRLKGWTRFAHWCQLDAQAIQHIVWRIDQGYQKFFRKENQRPPTFRKRAKYHSITLAQTGWKYEGGNRLWLFGRLYRFHQSREIEGTIKTLTIKRLPTGRLEVIFSCLREDESVIRVKTGHTAGFDFGLTTFLTGHSTHDIHAPQPLRQSLRAVRKANRALARKQKGSGHRRQARLALAHVHRQIADQRQAWHWETARDLCIRYDTIYLEDLELRGMSAMWGRKVADLGFGRFVQILHQAAEKLGTHVHHINRFFPSTKRCHVCGFINHAITLRDRLWTCPCCGTTHKRDRNAATNIYQEGASSCEQGGCKTRLRAATV

SEQ ID NO: 39044 - protein, 377 aa, unknown
  TnpB Polypeptide
MEKGYKFRIYPTKSQEVLLRKTFGCVRYVYNSYLAKRQELYRTSGQTMGYKECSKDLTQLKQELVWLKEPDSIALQSALEHLQHAYDCYFDARERGDKNWRLPSFKSKKDRQSYKTKSVNGNIKLLGNKIRLPKLGEVDCRISKEVKGRLLSATLSQAPSGKYYISLCCTGVAAQPLPKTGSAIALDLGLKEFAICSNGERYPNHRFYKNHEKKLAKLQRRHSRKQSGSRNKDKARRKVALLHEYIANCRMDYLHKLSTSLIREHDVIGIEGLRVKSMVKDRRLAKSIHDAGWGEFARMLQYKGDRYGKSVVRTDPFFASTQLCSTPGCSYKNAETKDLGVRTWTCPECGAQHDRDENAAVNTLYEGLRLLSLASSE

SEQ ID NO: 39045 - protein, 377 aa, unknown
  TnpB Polypeptide
MQRTISINLEPNQSLIDTLKIYSKLYKEYCDFGFKNKIRNKVDLHNLLYKEIRKQEPNFPSALIQTVRDVALETLKRTKMRKQIKFKEFTSMRMDKRNLRVNLIHNFVSVSSIDGRQKLIFKPNDMIDKYLGWSPVAGTLSYKNKILKLHIVVEKENPKIELKQNPNILGLDRGINNILVSSNNQFFNSKKLKNTKGKYQYLRKQLQSKGTPSARRKLKIISGRERRFVSDINHILSKNLANSNYDAFVLEDLKKIKQNKGRRFNHKLGNWSFKQFETYLTYKTQELGKLIIKVNPKYTSQECSKCNNVSRTNRTGAKFKCKKCDYELNADLNASRNIAVRGTSLYGRLLFNQLNVTLNENTVFESSYKPINSLIGS

SEQ ID NO: 39046 - protein, 387 aa, unknown
  TnpB Polypeptide
MARRAHAIRATVSMNIAIFESLLVFSKNYLEGIRYVLYWLKEKRINPNKRNILSIVHKELYKELKEFNLPSKVAENCYRNAISIYKGWYNNPNKGRFPRVYKPTVWLTPKQSYTVNFNEMFVKISKVGEFKIIGYPRNLKEYLSWKMKESRLVFRNGKAFLKITFEKFMQKIEPKGSIAVDINMKSIVVGKDDKNYVNIPTRINEMHHYKLLAENLQRKYPKRWKENRNIKRRIIVFHIKAKNIAEDFARKVSKRIVEEAIKMNANVIILENLKNLIKHVKNLSKELRDKLYFMQYRKIQYWIDWQAKKHNLLIKYVSAFYSSTKCPKCNRKMKEIYHRWFKCSCGYENDRDIIAIINLNGRGSLSLSTAPHMRDVAPNQLRGTLAF

SEQ ID NO: 39047 - protein, 249 aa, unknown
  TnpB Polypeptide
MDALMSFMIGPRSFLRYFVQFVCYVPKENIKTQKKIEKTIGIDFGCSTSFTTSEGKKISVSVPESGRLKKLQKHQAKKVKGSKNWLRTMKQVKKEYQKITNRKNDLANKIVHEFNQYQTIVIQDEQLKNWHKNGHGKAVQHSVLGRVKSKLLLNPNTVVLGKTVPTTKLCIKCGQWHDEIKVWNRTFKCDCGVEMDRDIHAAQNMVWFYENNVGVERAKVKRLEMKALVDQALAMENQLLSVKDEDSSL

SEQ ID NO: 39048 - protein, 158 aa, Okeania sp.
PSSVTVIKDSANRYFLSFVVETIPEILLQTENSVGIDLGISTFATLSDGTKVDAPKPLKKRIKKLRKLSKSLSNKTRGSNRYEKARLRIAKFHAKLKDTRTDFLHKLSTKIICENQTIVLEDLNISGMVKKRCDPATTPARLRNAHQETVNYPEQYQI

SEQ ID NO: 39049 - protein, 186 aa, Okeania sp.
MDAPNKVSRLQLFLSLPIDCLAALMGAAPSSVTVIKDSANRYFLSFVVETIPEILLQTENSVGIDLGISTFATLSDGTKVDAPKPLKKRIKKLRKLSKSLSNKTRGSNRYEKARLRIAKFHAKLKDTRTDFLHKLSTKIICENQTIVLEDLNISGMVKKRCDPATTPARLRNAHQETVNYPEQYQI

SEQ ID NO: 39050 - protein, 304 aa, Parageobacillus sp.
LTFPVQVPEKYEWEIIDVVMGEQVDVNAKGRPIIEYQPYTAEIKRKNGEYYVHLIYEKEVYGRELAYDEPIQAERIAGMDINMDRIAVSIVSKQGNFIQSKVLYCHELEYVKANKRNNIVGETIRDVYDWLMQENVREVVIENIQLRQQHDTDKRFHRLTHQFKKKKLTETVLRRGMRLGFRVKKVNPTYTSVIGRFKYRKKYGLSVHESAALVIGWRGLGYQERLPKKLVYTIKTKVKRHLVAALGSMEESYKQSKSGKKQRQYIVMMLRKIENFKQEHEWSLWNILHKFCWLNQYQIQLREV

SEQ ID NO: 39051 - protein, 248 aa, Staphylococcus sp.
MIKEHIRKIVYVLKESSEEELREIGLSQPEISRIKEDYHNSLDINMSPATMLSLYHKFFEKHAIIVGIDIGTYHFLNASDLNMDTVYTDDSNDVYKLINKYERRLSQPNIDNEEAEIKFERSVRKHVRKIAKDLKKLYPSPCIFVVGQGNGVNRTDTLYGKIFTYTHRALLKSIGLYDDLIFIDEGYTSLKCPECMFIHKRNRKQSNRFKCGSCGYQNDNDDIVAACNIAHKWVDEFMPREITLGKDE

SEQ ID NO: 39052 - protein, 372 aa, unknown
  TnpB Polypeptide
MKIHKSFKFELMPNREQIRKMKQFCGCSRFVFNRTLAEHRQKREQDTKHSFNRIRANAELPKWKRELSWLKECHSQVLQSAIVDLERAFKNFFAKRAGFPKFKRKGEKDSFRFPQGCKLEQHNGRIYLPKIGWVRYRNSREVIGKIKNVTVSQKCGKWFVSVQTEFEIEIPTPNGGEIGIDMGIMRFATLSNGEYFEPLNALKTNKGKLAKLQRQLKHKTKGSNNWKKLKAKIAKLHHRIANCRKDYLHKISNGISKNHAIVYVEDLQVSNMTKSANGTNVKQKSGLNRAILDQSWYEFRRQLTYKLAWNGGFLFAVPPQNTSRTCPCCGHTAKDNRQTQADFECVECGYQNNADVVGAINILKRGQALQAV

SEQ ID NO: 39053 - protein, 376 aa, unknown
  TnpB Polypeptide
LLKRLKIQIYPNKAQEELLERHINAYRYLYNLCLEYKNHLYQYHKISISGISMQNELFELIKDIPWMRGLKVECLRQAALDVESTFKMFYSGQGFPKFKSKKNNFSFSVHQHLRIKNNKFCFFKQRLKFKTSPEYNDILVNNHIKQCVFVKDKTHKWFISCLVDNNDNFKSLPKLANIIGIDLGINKFIVTSNGEYINNPNLRNKLKKKLIRIERKHSKSKKGGKNREKLRVKLATVHKKITNQKKHFFHKISNKLIFENQEIHVETLPIRNMLKNKKLARVISDISWSSFITILEYKCNWYGRKLVKVSTWFPSSKLCSSCGYKKKKLELLERIYKCENCGLEMDRDLNAAKNLASYSPTVKNTGSNVSGNLIRP

SEQ ID NO: 39054 - protein, 417 aa, Limnothrix sp.
MLNVTWEFKLEPTAEQVAEIERTLTVCRKVWNFALRERKDWLSSRKSPINACSIRQEFILPASTPCPGYHNQAKSLTIAKKGNEELRSVNAQVLQQVLRKLEQAWEGWLLKRSGLPRFKNQARMRSLVFPQMLKNPVSTEGIKLPQLGLIKARWSRQIPDLFVVKQARVVRKASGYFVMLSMQADVDIPAVHPHGHPVGIDVGLKYFLSTSDGEQVKRPHFFKKLHRKLKLLQRRLKKKQKGSANWLKLQKKMARVHQRIADTRRDWHFKLAHHLCDNAGMVFVEDLDFRMVAKGMLGQHTLDAGLGQFTHQILPWVCFKRDVYYGKVDARGTSQECPDCGAAVGKDFSMRIHHCYNCGSVKPRDVAAAQVISTRGQREIENACGVEVAGASVTVSSQLAVKQEIFGATQGISLHTR

SEQ ID NO: 39055 - protein, 521 aa, unknown
  TnpB Polypeptide
MFVSLQFKLELKREDKQKLIKLMRKQSSAIRVAYNMLKELEKEKTKNPHAQIYHRLRQLFPELPTKYIDSAIYKAKQYPTDKSVVFGGKRLFEKLCKNHLTGKLRERLKKQWRELRQGTLISIGSKEDKGNRLMRFEDLNGQLHLRITTGNREFIYAKVLREPSNSKDKWITFMAMLLEGWQTQSYFPYTVELKLREGEIYGSVSFEIPTPKVRYTKENGVIAIDTNASPIYLAIAEVSKTGELLSYQTISLHNLLGLSQNTKAHQEWILAHQLLDLAIEKGKAIAIENLKKLKKGMRGDGKATLRKRLHQWNAKKFLQKLKRVAMIKGVEVVEVNPAYTSVIGMLKYAPQLSIDKDIAGAYVIGRKALGFKEDTPENYERLLKDKAYLEFALKRYEEREKELKELLEKETNEYKRNALKSELKNVENGKNLLVNLIQSLQSEPSSCEGADGRNPEQGETKKVSQVAWQVLKVALLFPILGRVLPRDLSPLKPVLVEGVWDRMRKRLVPLEAGGTVPIRDF

SEQ ID NO: 39056 - protein, 399 aa, Deinococcus sp.
MSNAPALLIQPGAWQTPLEEVPHIQTTTHLKTFRYRLRPKLRQEAALNEQLRLCRNLYNGALQERRDAYRKAGKTVTGYDQMKYLTEIKAALPEYKGVYSQVLQDVLKRLDKAFQGFFRRVKAGQTPGYPRFKGAGWYDSICYPQSGFSLSGDVAYFSKIGNIRLRLSRPLEGKLKTATIRRECGEWYVSYVCEVETQPLPATGSAVGLDVGTTWFCITSDGEFVENPRHFQTAMKKLRVKQRSLSRKKRGSQRRKKAKQAVAKLHRKVARQRLDFHHKTATKLIRENDLVAHEDLNVSGMGHGNLARSIHDVGWGQFFSLLSLKAASAGRTVIRVDPQYTSQTCHKCGHICRENRVSQAEFRCVACGHRENADLNAARNILGRACPSAVNVAQSASVR

SEQ ID NO: 39057 - protein, 410 aa, unknown
  TnpB Polypeptide
MEVRRTVPVKLDVDSNDAALLEETVDTFLWCAQYVTDHAFKGEYVTTSKTTLDDKTYDDVREATDGFNGGLVQAARNKAAEACKSVVAKWKQGKKASKPHFTSPHVVYDHRTATFHDDYVSLATTDGRIEADYVLPDENSDTPHAEYFFSDEYETTGAELHYSNGNWMLHIHCKMEVESDTSEQATPEKSTVLGVDLGVNNLAVTSTGTFWTGNEFDHWRREYENRRGDLQEHGTRWAHENMQAVGRKEEGRFKLMMHRISNELVAEARNHGCSVIVFEDLTDIRERTGASWGHKWAFNRLYEYVEYKAEKCGIDVAQVDPTNTSRRCSQCGFTHPDNREGEAFECLKCGYENHADYNASKNVGLRYLRRNQTGDDGGAPLGVRLNSGIVNVNGEYESPATASGQNGSPR

SEQ ID NO: 39058 - protein, 202 aa, Komagataeibacter sp.
IAPGDFGRKALRTLRKAQRAVSRKKKGSANRRKAMRRVRTLHAKVANARKDFLHKLSTTIAKNHGTVVVEALQVRSMSASAKGSVEEPGRNVRQKAGLNRSILDQGWRMFRTLLGYKLADRGGRLIEVPAAYTSQTCSVCGSVDPANRASQARFICTACGHTENADINAAKNILRRAVCPLKPVEGYRVRRPVEAGSTRRAA

SEQ ID NO: 39059 - protein, 423 aa, unknown
  TnpB Polypeptide
MIKAYRYKMKPTKAQEAFLKKCFGCCRFVYNNALRERMEAYNSDKKSLSFFDQCASLRELKKQKEYSWLNDVPAMMLNYSLLNLSNAYGHFFKMKSGFPKFKSKKNHKDSVKFEPNSTRYDFIKNKVRIPKLGWIRICRDRPFDASAAKVNSTTVSRDACGTFWCTVSVDDAAPSEPKAKVTKEAAVGIDVGISDFAVLSNGAKLPNMRFSESEDRRIALMQRCLARKRKGSKDRPASNRHERYRVKLARLHRRVENRRNDFLHKTSTSFVRRYGTVCVEDLNVKGMMRNHSLAGSIASASWSTFVRMLEYKSEWFGVNLLRAGRFDPTSQTCSACGYRDTRLKDLSFREWDCPQCGTHHDRDINAAVNIMNAAINKYFNTKSPAVTGITDADGADSENNAGTGSRACDYASDETSMKLNFQP

SEQ ID NO: 39060 - protein, 399 aa, unknown
  TnpB Polypeptide
VALTRKGCRFRLDPTRRQLDGFIRIAGARRWVWNWALERRIRHFREHRSLLSYIALSNELTSLKRQPDTRWLQKADAQALQQAIRDLDRSFRAFFARRARFPRFKSKKRDKLTFRIPQSIRVTNNRVYVPKVGWVRMRQSRPIEGRITSATFTRDVLGRWDVSLAVEVDFPDAPLPPVDASATIGIDQGLSDFIVLPDGNRVGAPRYYRKAERRLRRAQRHLSRCRPGSRHRELARRRVARIHQRIANQRRDFVHKITTHLVRSHHGVCIQKLSVSGLARTKLAKSVLDAALGELHRQLAYKSNWYRRHFVVIDLWFPSTRLCGQCGALNDTLLLSDREWLCVCGATHDRDINAARNIRAEGLRLLGVAAGHAETENARRKAVRLPMGAGLDEARIPAC

SEQ ID NO: 39061 - protein, 343 aa, Sulfobacillus sp.
MQLTLTVHLQPNTTQAQSLLGTMERFNAACNAIANIAFREHTASQVKLHHLMYREVRERFGLSAQMAVRAIGKVVESYKRDKSIQPTFRPFGAIVYDDRLLSWKGLDRVSILTLAGRIMVPVVMGSYHVQRLRRVRGQADLIYCDGQFYLAVVVDVPESPPLPPDDWLGVDLGIVNIAADSDGHTYSRSPLNGLRKRHANLRQRLQKKGTKSVKRLLKKRRRKEQRLATNENHRIAKRLVTKAKDTSRGIALEDLTGISDRITVKKAQRPRQHSWAFHQLRTLITYKAKLAGVPVVLVDPRNTSRTCPACGLIDQRNRPNQASFRCIGCGFAGPADTIAAGNI

SEQ ID NO: 39062 - protein, 390 aa, Sulfobacillus sp.
MERFNAACNAIANIAFREHTASQVKLHHLMYREVRERFGLSAQMAVRAIGKVVESYKRDKSIQPTFRPFGAIVYDDRLLSWKGLDRVSILTLAGRIMVPVVMGSYHVQRLRRVRGQADLIYCDGQFYLAVVVDVPESPPLPPDDWLGVDLGIVNIAADSDGHTYSRSPLNGLRKRHANLRQRLQKKGTKSVKRLLKKRRRKEQRLATNENHRIAKRLVTKAKDTSRGIALEDLTGISDRITVKKAQRPRQHSWAFHQLRTLITYKAKLAGVPVVLVDPRNTSRTCPACGLIDQRNRPNQASFRCIGCGFAGPADTIAAGNIVVGLLSTSRTQDLSRRYLQDPSFRTGSLTHAHLIPINQESAAQAKRDALERLRRAREVESGLATMGRRS

SEQ ID NO: 39063 - protein, 309 aa, Ruminococcus sp.
  misc_feature (281)..(284): Xaa can be any naturally occurring amino acid
MLADKIRHYQEEKKMLKNTPAGYKKEYPWLKEVDSLALANVQLNLEGAFRKFFREPGVGFPHYKSKKHSRKSYTTNMVNGNICLQDRFLKLPKMQPVKIKLHRMIPEGWKLKSVTVSREPSGKYFASLLFDCENQTAEKRQAEKFLGMDFAMHGMCVFSTGERAGYPMFYRNAEKKLAREQRKLSRCEKGSRNYQKQKKKVALYHEKIKNQRKDFQHKLSHSLAEDYDAVCVEDLNLKGIAGGLHFGKGIQDNGYGQFLSMLGYKLEERGKYLIKVDRYFXXXXGRTRKISDKSRQIFCIQQDMQCMRA

SEQ ID NO: 39064 - protein, 423 aa, unknown
  TnpB Polypeptide
MQLTERHLIKPNHELYATLDDLTFKAKNLYNHGLYLYRQSYFEHKKNSDVPILTWADIDKNLRKQGHDDIRALPSKVANAVLKNLGENIASFWKLVRLKRDGRLAQKPKLPHYLHKTDGRYAVSFNYQTFGTKRGANMELFLCPRGINLPIPTRVADPKQVRIIPSHNNFIIEVIYNVEESAPKSTSKYAGIDLGVDNFATVTFSTENNPLIIKGLELKSINQGYNRLISKAQELLPGTCKTSKSIHRLWSRRTWILRTKIHQMTAFLATLFDEMQIEKVFIGKNNNWKQNLPFGKKVKQRFAYLPYETFIEQLQYKCKLRGITIIVQEESYTSKASFLDDDDIPVYGEVENPKFSGRRIKRGLYKSGNGRLINADVNGSCNIMRKGLKDNLLPFNVDNPIIHPLVVKGIGKEPNDKLVQLYM

SEQ ID NO: 39065 - protein, 495 aa, unknown
  TnpB Polypeptide
MPVMAQLVSEIQGISSYATYVTRNDTQLEAGLAMAGSVQPATAGRRAGVTMPDFLASGRTGKSRKEWLVRYNVVTAYRSWQERTKAVNGESDKYVSQGWKRTMNAAPPSYGEGDFINLGAVDKQYALIENTPFTDGEIVLKMVIRGAWYQLIFNFDNTRFTEGKVTLPLIKVEDNHPVFIFSVVTDNPIVQFSSDYTVGVDVGINDYATVVVRNTVTGKVTYQTTLSQRVHSLWNSVRASERQVKQLRKKADSLSLYDRQAIMAARDEADLHRKAASRKKRELAILAAQEITYLSHQFNNAVVAVEDLSWISNTMQNGRWNRGAFMQWLTHYVSQNGGWVVAVNSANTSQLCHKCGSEVERPEHKVSRCPVHGDMDRDVNAAVNIAARAVPKVEKARAKRSGNSKLQPQAPLKTPIARGSLKYPGRDRTKNVPTPKRKNHPRNVKEVTLPISPARVIPTTVLADCNTCSINVTETSEAAIKQDNITYECRLYNPI

SEQ ID NO: 39066 - protein, 617 aa, Streptomyces sp.
VVQEHWNGADLAHLASGVDRSGTSLPSQGWMALRRLGWSVTVAEGVYVPDRVVRIVQEQAGRVLRSAWWRAEITAALLATWPADPARRTEAEWEALRAALPDGPVVATSVLLARTRQIAAFQDRHRRLLADVTECESAPRAGGQVVLAAVDKQLATLERCPEDPVRYGVLTVRLPVKPAPACRADWRAVRIRFRLPPHVPATAVLCAPTLRVRQGRLLLDVPYAFVVAKPERAGHRTAVAFDWGLNTMLTGGALHLTGEAQPRVLTDGHPVYFRAGGVLAKADRLRVHAEHISARIDQLRTLIASRQERGMRPNPWLVAKLTVLEAERERVARRRTRLNAALTRAAARFMTDHAVAAGARVIYLEDLRDIQARGKGRTLNTRLSQTVRGAIVTHLRHRAAAHGIAVVIVPPRGTSKYCPYCLTAFHHHKAPNNRAAGWAWATCPGDACGYSTGRDHAAWQRIGARGLTHQHKTSLDRASKTFVIRSVVEALDRTSTVQQQTRDRTKSGPTAKRPVPGKRRMVPAPPGNRTPTRARPGGKRPAGRTPTHPTHRSRRCPRQQGPTTIGTPARPHRPDGARLGAGFHRHAHTTPTRGQPWPSHPPERSRTPGTTQETQAD

SEQ ID NO: 39067 - protein, 317 aa, Brevibacillus sp.
MHRAYKFRLYPNKEQATLINKTIGCTRFVFNHFLAKRKDAYEQEKRTLNYNDCSAMLTQLKKEMEWLKEVDSTALQSTLKDLDSSYKKFFKEKKGYPKFKSKKNPKQSYACKMNIKVEGDRIKLPKLGWVTFAKSREVEGRILSATVRKNPSGKYFVSVLCETEIQPLLHTEKTVGVDLGIKDFAILSTGEKIANPKALRYYEKKLATWQQKLSRRKKGGQNREKSRKQVARLHERISNTRNDFLHKLSTQLIRENQTICLEDLRVENMIKNHKLAKWGVSKVSLLLSVVVNLDFNVLYRISYNSIIGVDCQLDFFL

SEQ ID NO: 39068 - protein, 380 aa, Oscillatoriales sp.
VAQPEILGKILSLTNRSAGDIQITALPELKMARPWYSGIDSTVLQQNVKRLDIAYKNFFEGRGFPKFKNRSNFTSFTFVMGVKIKGNKIYLPKLGWMRFYNSRSIPDGFTIKACAVRKRQNGWYVSIRIEDKSVPEYSATPVGDNPKVIGCDLGITKLVHLSDGYQIKNPKFSTNKKAKRTLKIRQRRVSRKIKGSKNRKKAAIKVGNFHQKISDKRQAYQWKTANLIVSRNVDVIATEDLNISGMMRRCKVKSDEKTGRFLKNGQSRKKGLNRAMSDAGWGDLGLKIEYLAAKQGKIVIKVNPKHSSQECRNCSQIDKSNRDGEKFICVECGYHEHADIGAAKTIRDRALRMVRGPGRETRCSTPKRPKNITTLAEQTW

SEQ ID NO: 39069 - protein, 177 aa, unknown
  TnpB Polypeptide
VKLAESYRSRRSVLFRDRKPEAVAALHRKIAKQRKDFHHRQANVLVARYDLSVVEDLQIANMLRGAKPVPDPNNPRQFLTNGAAGKRGLSRSISDAGWGQFVSILRAKAEEAGRIWIEVDPRHTCDRCESYGHAAPENRVTQAEFVCQACGHGPTQADEHAARNLLRAGLALHAQAT

SEQ ID NO: 39070 - protein, 412 aa, unknown
  TnpB Polypeptide
MKLSLKYYPRWTKAQKEIVKELSFHTTKLYNIANHQCREVEYKSYKILEKEMKANWHKDFLHSHTYQQCLKMLEQNWKSYFQSLKDYKEKPSKYKAMPKPPRYKHISKRKNEVIFTNLAIRRKESHILLSLSKRIQEIFQVDSLKVVEAKTLPLPENVTLQQIRLQFDPQVKDWYMLIIYKVAEKRKSTYPNVMAIDLGLDNLAAITFSHSEDNYLISGKALKSINGYINKEIAQLQSIRMKQVGAKSFKSTKRIQKLRKKRKDYITNYLHQASRYIIELAKRYQVGKVIIGDIKNIKQNNQIKTFVQIPIQRLAQMISYKGQLEGIGVEYQKENYTSGVSAFDLEPITKEYYNKTRRITRGLFVTNKGLLINADINGSLNILRQVFKGIPKLIELARDNGCVNHPKQIRVA

SEQ ID NO: 39071 - protein, 420 aa, unknown
  TnpB Polypeptide
MYLTQKNHIRCDKKTYKILRILTRLSKNLYNYTLYTLRQYYFNNGKYLPYEQAYHLVKHNENYRLLPSQVAQQTMKVADRNMRSFFHVLNERRKGNYNRPVSMPKYLPKDEYFVCIFQKDMFKVVGDKIRLSLGRNFAKEFGVRFLEFKLPPTVVGKKIKEVRILPRCKGLWFEIEYVYEVEPEKADLDYSQYLAIDLGLDNFATCVSTSGTPFIIEGRGLKSFNRWWNKEKAKLQSIYDKQGIKMGKKMAWLLRKRKNVINNFMNQAVNYIVKYCLANRIGNIVIGELKEIKNGMNMGKINNQNFQYIPYGLFKQKLKSKCEYYGINYIEVDEAYTSQTCSICGDVNRNNRKHRGLFVCKKCGNVMNADVNGALNILKKVAPESVRIGGSGGVTPPRRIRVVPLRNSQTPPEAPPFRAG

SEQ ID NO: 39072 - protein, 386 aa, unknown
  TnpB Polypeptide
VKKIIKSYKYRIYPIKHQEILFAKHFGSNRFVYNYFLNERKKRYLKDKTNFGYNDNSKELTLLKKENNYDWLKEINSQSLQSTLRHLDFAYKNFFMKRSKFPKFKSKSNKQSFKIPQHTTIKNKMLYFPKFNEGIKINLPQEIEGRIITTTISKSPTGKYYASITCEVDYKPYKKTGSKVGIDTGIKNLAILSDGDIYENIRVLKNKIKKLKYKSKQLSKKKKGSNSRDKYIKELSILYEKITNIRKDYLHKVTTEIVKNHDTISVEDLAVKNIMKNHKLAQAMSDVSLGIFYTFLEYKCEWNEKEYVKIDRWFPSSKTCSKCGWIKQDLTLKDRKWKCDSCGEEHDRDINAAKNILTQGINILSGCGLQSDKKQKEVEALSLDKS

SEQ ID NO: 39073 - protein, 605 aa, unknown
  TnpB Polypeptide
MGLFDQLRDNQPKVDATLYSQLLADLSISMATMASNHLWMNIESRIERFLVWKYPELKKFHKTIVRAVVTLPKESIDKIFDVDSAYKAEHAKARRLLAAKTVPKLVSKRKVKMTPEKEAKLKEAAVKVAKEAVQRQAASDVAGEMRQLMPLPGRKKFASKCHLTLRMYYWLLKQIEAGKADHDVKNAEAVLAGQAKSKPFKGRLFSILPLKNGFTTSYIPISSSFLLVLLRSLKLSDHEGDGRGLDFHKVWSKFFAVSLVETKKSRSFGCRILTDGYAVSALVSCKVSLDTSKGKSDVGIDSMQAVLAASAAKGTTVRMAGVDPGFTDIVTASFNDGSKTVSYSSSKYYERAKVKHSTRRTCAMNLEEKVTTDTLFGGKTADPEQMREYIKAYLTHLKRLLVHRMTTKYRKLRFLRHIYKQVTVREIVDLIVGPETSEKVTLVGFGNWSGGSRSPISRQHAGPIQLIKDKIGKRMNAEIKPVDEYKTSQLDSNTYCPLVNMIATSKVRKKDGSMVVRLNNKVHKVLHCKPSDNCKLTCKETTWNRDVNASRNILNLFLNELTGKERPSAFCRPVKKDRSVGMSVAVDPEVMNPEHVITFAPTGPL

SEQ ID NO: 39074 - protein, 311 aa, unknown
  TnpB Polypeptide
MVEKPFDKLTANELEVYNEIAFALPKMGNRYKMPVKGKQFLNYNFLDALLKVTKNPDYFAVGLPKHTAQQVLKEVVKNMKGFYVGIRKHKKDHAAFTGKVKLPRYGEKGGKHTAVFSNQECLIYDIKNKPGFHEIKFPGIKKRLYIADMPIRGRLMQITVKPNHGNYIVSLVFDNGKENPVTRPPHRMVGIDLGVDNTAAITNNLGLPCLLFKGGVLKSINQLYNKKMAAIQSEQTKGTDKKFVMTKEAHGLCIWRNNRIEDTINKIGSSIVAWCYDNNVDTIVIGHNTRWKQNANIGQKEQSDLCPASVV

SEQ ID NO: 39075 - protein, 415 aa, Streptomyces sp.
MQLRYVFRMYPEPGQQGALARAFGCARVVFNDAVRARRDAHAAGERYPTSAVLSKTLITQAKARPERAWLAEVSQVVLQQALREADAAYANFFASLKGERAGARVGEPRFRSRRDARQAVRFTANARWKITEGGRLLLPKIGAIKVKWSRELPVRPSSVTVIKDAAGRYFASFVIDTDPETDRERWDEPEPDAVIGIDLGLTHFAALSDGTKIDSPRFLRRAEKKLKKAQKDLARKRKGSKNREKARVKVAQAHAKVADARREFHHQLSTKLIRENQAVAVEDLAVKGLARTKMAKSVHDAGWSQFVTMLAYKAERYGRMFVKIDRFEPTSQVCSACGHRDGPKPLDVREWTCSACGTFHDRDVNAAQNVKQAAGLAVTACGARVRPGLVPAQREETGSHGIPTGTCAAQQHSTP

SEQ ID NO: 39076 - protein, 302 aa, Unicellular sp.
LIGHGNQLINRFYQNCRAKIPGKKGFPRFKKHSRSVEYKLTGYKLSDDRRKIKFTDGFKAGEFDLRCSQRTLVYYSEQQIRRVRVVRRCDGYYCQFLINVERQEHYEPTGQVTGIDLGLKEFYTDAQGNTVTNLRYLRKSEKRLKKAQRRLSKRFRKEKKQSNNYHKQRVKVAKLHLKVSRQRKDKAIKDALALVQSNDLVVYEALKVRNLVKNRKLAKSISDASWYQFTQWLNYFAKIYRIVCVAVPPHFTTQDCSVCTTRVQKLLSTRTHQCPNCKTVLDRDHNAAVNILKKGLNLLIVY

SEQ ID NO: 39077 - protein, 351 aa, unknown
  TnpB Polypeptide
MPIQSKTLKVRVKDKHASQLSQMAKSINFVWNFINELSYRSIKERDTFLSNYDMHPYTKGAGKELGLHSQTLQCVSKEYVTRRRQFKKARLSWRKSGGVRRSLGWIPVNTKHAQWKNGQVFHNGKYYGVWDSYGLSGYTFRSSSFNEDARGRWYFNVVVEVKAEQSTGTKAVGVDLGCKETATDSNGEGVVGREYRALEKKLGIAQRAKNKYRIKNIHAKIKNRRADTLHKYSRKLVNENAAIFVGNVNSLGLIKTKLAKSVLDAGWGILKTQLKYKSAHAGCVFEVVNEAYTTVTCSCCKKRTGPSGQEGLRIREWTCSGCGTTHDRDTNSAKLILAVGLDRLSGEKVPT

SEQ ID NO: 39078 - protein, 504 aa, unknown
  TnpB Polypeptide
MAAKSTTTIRQVLHYRPHQAAWFAATQALFNQVVAFYFEVIQAHVKLLDLNNKDALTALEMLTHTTRKNPTPVMPLEEIREDLPALFRRAAINAALGSARSFFSHLQQWRKRKEKAVAKGKTFTERPPVPPRAWNKSLPFYKGQWKERTPSSILLKVWTGTCWSWLKVRITGRELPTDAERCSPSLIRRGKQWWLHTPIEKHFALPAKVEQQITTNPQTTLCAVDLNLDDHLAVCTIQTVEGTCLSTTFIGGGQEINGFRKRLLGRIARNRGKAGILAGGEQDNVALWRKIKHIDESLAHLVSARIVQFAHHHGATLLVFEHLGTLKPEKGTYSRRGNSKRAYWMKGRIFTYAKYKAWNQGIITSRVNPRNTSRECARCHSLVARYQEGQPVEGYTEGAPLVLCQQCGMRGHADRNASLVIGQRLVARAHKPRKEKPSTPLPRVERVEKSTGVLLSQDAKRTEEPSALRARHGGQNEHGTAQGRRRRMGTPLLSIPRPLRLSLE

SEQ ID NO: 39079 - protein, 400 aa, unknown
  TnpB Polypeptide
MKARYQYRIYPTDQQKQSLAQLFGCVRVVYNDALRACKDSEKLPKNGDLQKIFITQAKLTEERLWLGEVSNIPLQQSIADLGVAYKNYFSSLKGKRKGKKVGSPKFKKKENKQSARFARHGFSIKGDQVYLAKIGNVSPVWSRKLPAIPSSVTVIKDCANRYFLSFVVEVIPEIIPAKNQSIGIDLGIKTFAFMSNGESAKAPNYTKLDRKIRRFQRRLAKRVKGSKQREVMRLKIATLKAKEQDTRKDFLHKLSTKVVRENQSIVLEDLNVSGMVKNRKLSRAISLQGWRAFRELCEAKSEKFGRDFHVISRWEPTSQGCSDCGFKWGKLDLKVRTLTCISCGSEHDRDENAAKNIEKVGVGHIYDSKRTGRTCKTTTVAVSCEPSTQVEVVQLNLFAC

SEQ ID NO: 39080 - protein, 660 aa, unknown
  TnpB Polypeptide
MEKPKEKPPEFFKSVKTSLKNILKHPEINTEIINNSVIKSNKIVIHTLQFLKLYLLDYYENNHGSLPIVSKELINNTMKIVCGEKEEKRGKPPKQETVLMKDKLAAFYKEHYLPTTQNDPIDYAGLNTVLDYLKEDVITMYENNIQLHYVDYVERYVNVVWKKKLITEKIRKLGKTKAERETRIRELCSELRKIKNDLLNVETTVLTSKPYYHKWINEHKRNVLPNKIKYEKKSIYYDLKCSPMDYFPSMIFMMKRVENDGESVNNVFPLRSSIIPSYIRLDTTTLVNLLLRKEQGNKVFFKTEGNLKKNEDKIWKFFFRTENKLFYKTDYSFHHMISTDGVGVSVLLLRKDLVGKKLPMMKKTGTKEIYIDELVDTTQLQNKKIIGIDAGKCDLIYCVDSSIKDATTFRYSQDQRRKETKLKKYNNIILAMKTNKIHDKTVIDYETELSHYNRKTLDITKFKEYLQVKNRINHILFGFYRKDLFRKLKFGRHINTNRNEQKMINQFKKTFGNPDEVVICIGDWEQRKQMKYKEPTLGKGIRTLFRKNNFNVFLVDEFRTSCKCSNCDGGVCEKFRVRKHPNKKKDELRLIHGLLRCKSGCGLWNRDRNGSSNIYKIAKNAINKLERPSYLCRETSNQALLPSCYNQTLHGNEKSQLCFF

SEQ ID NO: 39081 - protein, 191 aa, Moorea sp.
VAIGQGRAKYPRFKSYHHRQSIQYPQNVKQVGNCLKFPGKLGTVKARIHRPLDGDIKTVTVSRDPSGKYYASVLMEYESTDVKLSKEGKVIGIDLGIKDFAITYDGEKTSKFGNPKHLAKYEKKLTRKQRIAARKKKGSSGRRKARKIVAKVYERIGNVRQDYLHKLSRKIVDQNQVVVVENLKVRFPLAN

SEQ ID NO: 39082 - protein, 386 aa, unknown
  TnpB Polypeptide
MREFRLIVNKSIRIAHRGDLRSRFRLTHAAYSLLSRDHHIYKQYIPSAFEVAMGCLKTYRRKVRKGRRAGVPYLRRLMLKAENQSYRLDRATGRIRIPIRAREHVIIDLPISDWHRSFLSDPTWGLGSVTLTPDLVIVAVRKVAPRPYEPETAIALDTNEDSLDGVVAGDGETTLVTLGFPEVRILRATHFRRRRYLARKKAHDRRVQRFLVSREGRRERNRVRQKLHRISKNLVRVAKTRRAALILENLTLCGAGGLSRRMNRRLASWPRRQIHRQIEYKAALAGVPVIKVNPAWTSKTCPVCGARRRDRVGKEFVCLKCDWEMDRQINAGLNILKTALASNEALARAVRFQPGALRDDVVSPLYDLSALPTGAREEPSGVESLA

SEQ ID NO: 39083 - protein, 378 aa, Gallibacterium sp.
MLLRKAFKFEIMPNGEQSRKIKQFCGCCRFVFNWALAWQNEQYQQDNNQKFSYSKIANLLPQWKKELIWLKECHSQVLQQSLKDLENAFKNFFQQRSDFPKFKKKGVKESFRFPQGCKLEQQNSRIWLPKIGWVRYRNSREVIGEIKNVTVSQKCGRFFVSIQTEFESQIPIHNGGEIGIDMGVARFATLSNGEFFEPVNAFKTFKGKLAKLQRQLKNKVKFSQNWRKLKAKIGKLHHKIANCRKDFLHQTSSKISKNHAMIYIEDLQVANMSKSAKGTVEQHGKNVAAKSGLNRAILDQSWFEFRRQLDYKTQWQGGFLVAVPAQNTSRTCPCCGHVAKENRQTQANFECVECGYTENADVVGALNVLGRGRAIVHA

SEQ ID NO: 39084 - protein, 347 aa, unknown
  TnpB Polypeptide
MVNKAYKYRLIPNSEQEELIKKTFGCVRFVYNQMLAERKEQYEKYQEDKEALKQLKLPTPAKYKKEYIWLNEVDSLALANAQLNLNTAYKNFFRDKSKGFPKFKSKYRDKKSYTTNNQGGTIRLIDLTHIRLPKLRDVRIKLHRPLPEDGIIKSATISQTATGKYYISILVEFEAKIKPVTPRLQTTLGLDYSAKSLYVDSQANSADYPKFHRKAEAKLHERVANQRKDFLHKLSRQLADKYEAVVIENLNMRSMAQGLKLAKSTNDNGFGMLKTFLEYKLKEQGKKLVIIDKWYPSSKLCDFCGTVNDGLTLADRVWTCSCGAILDRDINAAINIKNEGCRILGIA

SEQ ID NO: 39085 - protein, 456 aa, unknown
  TnpB Polypeptide
MWRDKKRGKKKVGNFMQIVSSYGVEIKQKNIPLCSTLDIFRKAVSYLIPVYAETWKELSEIRNLQKRFNEAEHLVHETKKNHARFAFDRHFPKMPSYLRRAAIQHALGAVSSYQTRLGLWEKGDLKGKPKLVCENHAMPVFYRDVMYKEAEQGEDAACLKLFDGRDWKWFQVKLLHTDMEYLRKKWSGKKASAPTLEKRHHKYFLRFSYTEEVSLSKTLVKEQVICSVDLGINTDAVCSIMRADGTILGRKFINFPSDKDHLYQVLGRIRRFQREHSSRQVQSRWDYAKRLNMELSRRIAAEITKYAAEYQADVIVFEYLEVQGKISGKKKQKLHLWRKRDIQKLCEHQAHRNGIRVSRVSARNTSRLACDGSGAVVRNPENHSLCTFRTGKQYNCDLSAAYNIGARYLIRELLKPLPETERSSLEAKVPAVKRRTSCVYADLRKLYVEVNDLKTA

SEQ ID NO: 39086 - protein, 402 aa, unknown
  TnpB Polypeptide
MIRSSRLSTKLINVNKKHNLSSFIDDYKQVTQDYVDSLWNDLDEEYNCPKFISTKGYDHPRLSQRAIKCAATQACGIVKASTEKARKLIWVINKLKKEDNDVSYLEEKLSETKVTKPKIDEKFNCELNSICCDLMQRKGIWFLQLKSIGKQFGKIRTPIKPHRQTIKWLKEGKVLNSFLISNSYVNLRFEIKNEFKDKGNTVGLDQGITTCITLSDGQISTDDNHGWNLSKILTKLCNKKKGSNGFRRIQELRKNYINWSINQLNLKNIKQVNVEKLHDVRRFKKVDRFRSHWTYTLIVDKLKRYCEEQKVSVKEQCCVYRSQRCNVCGLVRKNQRQGKVYKCQCGYIGDSDLNASLNHEIELPDVSFMRQLGHNILGFYWKPNGIYDLAGNEFTVRCTNKV

SEQ ID NO: 39087 - protein, 390 aa, Glycomyces sp.
VEWVRIVLLRYTYRVYPTAPQRSALARVFGCVRTVYNDAVAARRAAHAAGLPFPSTAALDKQLITAAKRTPERAWLAEVSTVPLQQALRDCHAAYRNFFDSMKSGRAGARIGPPRFRRRTNRQTARYTRNGFRLRADGRLYIAKVGDLKIAWSRELASEPSSVTIVKTPAGRYFASFVVAVGDDLERLEPITDPDAETGVDLGLKSFAVLRGGKTIDNPRFFKRMERRLKKAQRALARKQPGSSSRAQARIRLARVHEQIKNRRDDWLHKQVKDLVSENQALYVEDLCIEGLSRGRGAKSVRDAALGKFLLLLESKAARTHRVFVKVDRFFPSTRLCSACGILSGPRGLEGLAVREWACPCGARHDRDANAETNIRREGKRLLAAGLADK

SEQ ID NO: 39088 - protein, 373 aa, Chloroflexi sp.
MRTFEYHLFVNKHQAHLLMECLKETRLIYNEMLESVKAQYEGKGTFPSKYDLETAFKGQGAHVPATTVQMLADRLNKSLKRFLAAKQNTIPGVGFPRFKKPNRWHSIQLRQYGKDCYLHEDKKHLIVPKKLGHFLKIKLHRPIEGTPKAVHLVLRADGHWYALIVCETEPRTQHLPSTCEHPDIGIDVGLKSFLSDSDGHTVENPRFYRTSQKTLRRKQRQLCRREKGSHRRRKAAHNAAKTHLKINRQRRDHHFKTAKPYAEGYHRIVVEDLAIRNMVKNHHLAKSIMDASWGAFLDILEDKAARAGHQVIRVSPRFTSQKCHQCGEIVQKSLSVRTHVCPFCGYVADRDVNAAKNILFKAGAPPSDANVHQ

SEQ ID NO: 39089 - protein, 246 aa, Haloterrigena sp.
LYPGNTLKEDKHYFTREEYQTEGENGPSKRALKARRKLSRRKDHFLHTLSKHIVQRCVEEGVEKIAVGDLSDIREDENGDSRNWGASGNKKLHGWEFDRFARLLEYKAEEHGILVDRVDEENTSKTCSCCGQIRDSNRVERGLYVCSSCETTMNADVNGAVNIRRKITQSPRRGIWVTAGWHSLESSCSTARAGRFRRENRESANRNIPTLSEPVVRDVRESSIRLTRESSPFRAGGCQRRERIRA

SEQ ID NO: 39090 - protein, 240 aa, Haloterrigena sp.
  misc_feature (240)..(240): Xaa can be any naturally occurring amino acid
EIPVKDVPGDNTAGIDLGISNYLAIDYEDDPSELYPGNTLKEDKHYFTREEYQTEGENGPSKRALKARRKLSRRKDHFLHTLSKHIVQRCVEEGVEKIAVGDLSDIREDENGDSRNWGASGNKKLHGWEFDRFARLLEYKAEEHGILVDRVDEENTSKTCSCCGQIRDSNRVERGLYVCSSCETTMNADVNGAVNIRRKITQSPRRGIWVTAGWHSLESSCSTARAGRFRRENRESANRX

SEQ ID NO: 39091 - protein, 408 aa, Haloterrigena sp.
VAGEGYLRRTAITRPILSDEQQEMLEQTLSEWKTACNIASYIGWNVGETRKTRLQSLAYDDVRDRTRLGSQHAILAIHQAAAALAGVEEIEGLDEDYDTSRPMFTSDTLTYDARTMTLFDDDSVSLATAGTGARIRCDLALPDDETGYQRQYLDDERWELTESTLSKRNGDWYLHLGFRKPKPESRDETKPGDEDRTVLGVDLGIVNIATTSTAYFASGRELRHRHREFDRIRSGLQRTGTRSAHQTIQRLSGREHRCVRQTLHEIVNNILREAIDYDCTVIAVENLTHIRERAPPAKEFHQWAHRKLVDLLEYKAESEGIQVAFVSPEYTSQRCPECGHTSAENRVRQATFECENCGATANADYVGAKNIGWRYVRRGQQSSRRTGDSRLALKSGTVQPNRGFIPAD

SEQ ID NO: 39092 - protein, 387 aa, Haloterrigena sp.
MEVQRTVRVKLDVPDERRDHLHQTIEQFNTAVNYSIENGRNDDGYLITAKTNIHDKVYHDLRDVTDLPANLCVRAYSKAIEMMKSTVADWKKGNSRPVPTFDQPTVVYDKRTLTINERSATLSTVESRVEVGFDIGDYQADYLDDDDYEKRMGTLHYDEQEDDFHLHIVIQKEVEEREGDRVLGVDLNLKNVAVTSTGSFYDGGKLLWGQNHYFRVRRSLQDKGTRSAKQALARLSGRENRFVLDRLHTISRRIVEEARHYDCSYIAVEDLTHIRERMDATDDQLKRQMHQWAFRELQEMIHWKATEYGIRVESVNPAFSSQTCRSADINRARIAILMVGSSATNVGTRLTATTTLPRTSGSDCSLYPRANVPRGWATVISPLRAGR

SEQ ID NO: 39093 - protein, 385 aa, Haloterrigena sp.
MCENIVEYRRTAVIKLDTPEGADASLRETVEQFKHCANTASERCWHGRRQIPEESGCQPETRCVSGDDDGYHVTSKAKAERALYDQLRDETDLTANLVQKGIRRAVEAIKSGVERLKCGENTSQPHFSADSAVYDKRSATFHRDHVSLSTVDGRVECDYILPDDSETPPTKYVSEDFEFRMAHLQYRNGDWYLHASMRNVEADEESPESESKHRTVLGVDLGVNNLAVASTGRFWSADEFNHWRREYEKRRASLQQCGSRHAHENIESVGRKEYGRFEIHLHTVANELIEEAVENDCSHIVFEDLTHIREKIPEANDDNRSGESFECQQCGYENHADYNASKNIGLQYLRRRQNAGDGGAPVDVRLNRGTLNVSGEYVPPASVEA

SEQ ID NO: 39094 - protein, 211 aa, Haloterrigena sp.
MKMTVKEERTGERFVTFSLETDDEHIPEKFALDTLSASDSVGNDLGIRNYIPTSDGKTVERLDLKGEYERLRREQRNLPRKEHGSRNYEKQRKKVSKAKRHIRRKVLDYQHKLTTWLLKEYDAVFVEDRNVAEMLQGDGNARNKQDTAWRQFSTPLEYKAELYGRHVVQVELRGTTKECAQSGMEVAKPIWVREHSARGNIQDTAFPTTRA

SEQ ID NO: 39095 - protein, 414 aa, Moorea sp.
MKSAYQYRLRLTKSQISKAEKWLDMLRYQYNYLLADRFNWFDQNRCSIKSCPLVCHLPDLRNNPDYFSQKRTLPQLKKDRPWYSDIHAHVLQDCVKRVDLTFKRFLKGDTNGRKSGKPRFKSKNRYKSFTFPSLSKNPINGNILTLPKFGQVKMIYHRPIPEGFKIKTATITRKADGYYVTLSIQDDTVPKIIPVDSVTNPIGIDMGLKSFLVKSDGSEVPIPQYYRKAQKRLKKIQKAVSRSKKGSNNRKKAVSNLGKAHKKVADTRKDFHFKTAKRLLDEHDLVAHEKLNIKGLTRTKLAKSVLDAGWGQFLSILSVKAVRVAWPTAINAGLITKAVNPRNTSQNCSNCGAKVPKELKDRIHSCTHCGFTADRDVNAAINILDLAVGRPVRSKACRVTEGIPGVGKKPALSR

SEQ ID NO: 39096 - protein, 443 aa, Moorea sp.
MYGCQQHLIATTPENQAIIELICSEANKLTNCGLYYCRQMLFKAGKYLNNAELDKIMKSNVHFRALRSACAQQTLHRVVESFKSYKALKKLYTKGQLTDKPRVPKYRKKGGLAVVSYPARWVKLVKGQLKFTLGKQVKVWFGIDHFLLPMPSNIDFKSIKEYRFVPRNGCFYLEFVYERPNPKPVTPTENVLGIDPGLNNWLTCVSNTGRSFIVDGRKVKSQNQWYNKRVAAIKKGKSQDYWDEQLASVTEKRNRQMRDNINKAARFIINWCLRNQISTVVFGWNKRNKDGINIGKKNNQQFVQTPTAKLKNRIEKLCVEYGIKFVEIEESYTSKASFLDRDFLPTLGAKPVRVACPSGLGWKASGTRVRRGLYRSGKGELINADCNGACNILRKVVTQLGFSLAEVSRADLNLPQRYKLDSLSKWYREASWSAVSTRVTTSA

SEQ ID NO: 39097 - protein, 416 aa, Moorea sp.
MIIAYQYRLKPTKHQQAKIDHWLSMLCAQYNYLLAERFSWYEQNRCSINACPLVCHIPELRNNPDYYSQKKTLPNLKKSHSWYKEIHSQVLQDVVKRVKLAFDRFIKGDSNGKRSGRPRFKKRHRYRTFTYPQIKEGCLEGNLINLPKIGKVKIILHRPIPVREASATPNGFKIKTASITKKCDGYYLVLSLEDKTVPKVKPDINPESIIGIDVGLKEFLTTSEGETVSIPQYYRRSQKRLRVIQKRVSRRKKGGKNRLKAIKQLGKQHKKVSDKRKDFHFKTAKYLLSKYDVIAHEKLNVKGLVLSRLAKSVLDAGWSSFLTILASKALNAGLLAIPVSARNTSQNCSSCSKKVPKKLHVRWHDCPHCGCSLDRDHNAAINIKNRAEGQSVLKAQRLLSDSRTGWEAYTEPVRSV

SEQ ID NO: 39098 - protein, 435 aa, Moorea sp.
MILTYCYRIKPNPEQIAIMEKWLELLRRHWNYALGQRLDWLHRTRCPIDRCSLVSEPIGEIPETVNYYTQQAALKETKRLFPEYKKIYAETQQVNLQRLNKAWDRWRKPDASGKRGGRPRFKKAGELRSRSVTKGQSFVFPRINSPKAGAHLIDGVLKLSRIGSIPVVMHRPLPDGFTLKQCSIVKKADGWYCCISMKDDTVPEILPINLVKSAVGIDVGLEKFLTTSDGEAVPIPQFYRKAQDRLALAQKVMSRRVKGSSNWKKAKNKGALLHLHLARCRKEFHYQVAHWLCNKYDLIAYENLNIKGLARTNLAKSIHDAAWGAFLEILQAVAVKRGLLVQEVNPRGTSIECFNCGSRVEKSLGDRVHCCSSCHVKIDRDWNSGINILNRGLLAVGLPLDGCSKSTQDVVRVASASAEEQQVSYVSLRSPHHNL

SEQ ID NO: 39099 - protein, 503 aa, Moorea sp.
MQTMARSDVNEPQVVIDCLTRRVSSAKGDDKQDNQQLSVTAESVATNNLTTSSDKLHTCIPSSRKRRSSKISVQDSTTKEKGYEPYWNDLCAVISSRLLLPVETDLPDLGLNSLSTWLVSTVEKSWFSTDLKVVEDQNSPQIFSPLFTSSVAVSTDSENTAKKSKKIRVFLNPEQRAMVRKWFGVSRYVFNKTVKILWDSEVKANWKAIKTNILNDLPEWCKTVPYQIKSIAIKDACTAVREAKKKYKKIGKVNRVRFRSRKNPIQSCYIPKSAVSVKGIYHTKLGELTFTETLPDNICDCRLTSTNGDYYLVVPYKTAHIKTENQGRVVSLDPGVRTFLTFFSQTSVGKIGHGDFSRIQRLCQHLDNLISKISKSKGKQKRRIRKSARRMVIKIQNLVNELHHKAARFLVDNFDVILLPTFETSQMSKKQNRKLRSKTVRNLLSFAHYRFKEFLKHKAIENGKIVVDVCEAYTSKTVSWTGELLNIGGSKIIKSKIDARVMD

SEQ ID NO: 39100 - protein, 265 aa, Moorea sp.
MIILEFKAKGKKHQYSAIDEAIRTVKFIRNSCLRYWMDNKGVNKFDLNKYSAVLANNFPFANELNSTARQSSAERAWSSIIRFFDNCKKKVPGKKGFPKFQKNCRSVEYKQSGWKLSSDKKSITFSDKKGIGKLKLKGTWDLWRFDKKQIKRVRIVRRADGYYVQFCVSVDIKEELEPTGSAVGLDVGLKEFYTDSTGKTEPNPRFYRTGEKRLKFYQRRVYRKKKGKAVGHASRTSNRRKAVNRLGRQHLKISRQREEHASAIR

SEQ ID NO: 39101 - protein, 438 aa, Moorea sp.
MQLGYSYKLKPNRQQEATMKKWLDMLRSEDNYLLRDRNDSYDQVKAPRLGNYCDLRSGGEVCPLTCSVSRNHSVGYPWKNSKKNPRRSAYEAHSSNLPILKKERPWYKIIHSTVLQQTLRQLDVAFSKFFKGETGYPKPKRRSRFRSFKYAPGQVKLDGNKIYLPGIGWMGFYNSRPIPEGFTLKSVTVRRKARGWFVSLQIEDKSVPAILTKDKYEIDPLKVKGCDLGIKKLISISNGKTIANPAKQKSFRRRERRLKLRQKAASRKRKGSKNRGKSYSKVASLHERITNKRTAYQWNVANQLVNGTDALVFEDMNIKAMKSRCKPKPNENGGYDRNGQSTKRGLNRSISNAAWGELVKKVEVVAAKSGIPVVKINPRHTSQKCPKCHHISKANRKKEKFVCTNCGHYDDADINGAINIRMRGLKKLGIDPLDARLR

SEQ ID NO: 39102 - protein, 417 aa, Moorea sp.
VIVLEFKAKGKRHQYSAIDEAIRTVKFIRNSCLRYWMDNKGANKFDLNKYSAVLAKNFPFANDLNSTARQSSAERAWSSIVRFFDNCKKKVPGKKGFPKFQKNCRSVEYKQSGWQFSPDKKSITFSDKKGIGKLKLKGTWELWRFDKKQIKRVRIVRRADGYYVQFCVSADIKEELDPTGTAIGLDVGLKDFYTDSTGKTEPNPRFYRTVEKRLKFHQRRVSRKKKGSANRKKAINRLGRTHLKISRQREEHAKRLARCVIRSNDLVAYEDLRVKNLVKNPCLAKSINDAGWYQFRKWMEHFGTKFGKVTVAVNPAYTSQNCSGCGEIVKKSLSTRTHICKCGCQLDRDVPSEPLREHNAAINILKRALSTVGHTGTWVTDLNALGDLASTVLGSGQVQQVESLIKESPRLMTGECQ

SEQ ID NO: 39103 - protein, 488 aa, Moorea sp.
MQTAYRFKIQPDREQKSMLLDWQQKIGSLYNLCLRDRIDSYHHTKILGNYCDLTTTAVACPLTCSVNKSASLGYPWKTDHPSRRPREKKFNPRRTAYEMHSSLATEWRQTKPWYSTVCSDVLQQSLRHLDKAFTGFFKQGRGFPKFKSHHNVGIEFKPKTVRLSGNRITFPVLGQMKFFISRYIPESWEIRTVTLSREVDGWYASILLRDETVPDTPIKTEQEIKTCIGVDVGIKKLASLSNGQLIANPRFDKQSSRRLRIRQRRLSRNKRGSKNRKKAAKRVASVHQKIRRQRQDYQWKIAKKIAESADMIVFEDLNVRGMKARCKPKWDEEQKRYIRNNQSAKSQLNKAIYDASWYRLKQKTKHQARKLGNWVKDINPIRTSQECSKCGYVSPKNRDGEKLICESCGHHEDADIDAAIVIGNRGIKQLNLSSTKLLVVSQKVTPKPESTGSKMRNKSLPLGGESGNPKQVEFVQLELFDLLEWSSG

SEQ ID NO: 39104 - protein, 252 aa, Moorea sp.
VIIIEFKAYGKKHQYQAIDEAIRTVRFIRNSCIRLWMDNKGTGKYDLSKYCKVLAKQFPFADELNSTARQAAAERAWSSIARFYDNCKKKVPGKKGFPRFQKHCRITFSDKKGIGKLKLKGTWDLWRFEKKQIKRVRIVRRADGYYVQFCVSVDVNEEVKPTGSTVGLDVGLKDFYTDSQGNTEPNPRFYRTGEKRLKFYQRRVSRKNKGKAVGHASRTANRKKAINKLGRTHLRISRQREEHAKRLGTKLP

SEQ ID NO: 39105 - protein, 398 aa, Moorea sp.
MVEKAYRYRFYPTPEQETLLRRTLGCVRLVYNKALDARTKGWYERQERISYKETSLMLTGWKKQDDLFFLGDVSSVPLQQGLRHLQTAFTNFFAGRAKYPNFKKKRNGGSAEFTKSAFKWKDDQIYLAKCKEPLAIRWSRHLPESCNPSTVTISLDPSDRWHISIRFNDHRDLSLPSTDQQVGFDLGISSLMTTSNGDKIPNPKHFKKLKKILAKYQKALSRKQKGSNNRYKARLKVARIHAKIKDARRDFTHKLTTQLVRENQLIAFEDLAVKNMVKNHKLAQVISDANWAEIIRQIKYKSDWYNRKAVSIDRWFPSSKLCSVCLNRVASLPLKIREWDCPSCNTHHDRDINASINILAAGLAVSVCGATVRPEESKSRKAGAKNSPKGRKKQKPKS

SEQ ID NO: 39106 - protein, 338 aa, Moorea sp.
QKRTLPQLKKDRPWYSDIHAHVLQDCVKRVDLTFKRFLKGDTNGRKSGKPRFKSKNRYKSFTFPSLSKNPINGNILTLPKFGQVKMIYHRPIPEGFKIKTATITRKADGYYVTLSIQDDTVPKIIPVDSVTNPIGIDMGLKSFLVKSDGSEVPIPQYYRKAQKRLKKIQKAVSRSKKGSNNRKKAVSNLGKAHKKVADTRKDFHFKTAKRLLDEHDLVAHEKLNIKGLTRTKLAKSVLDAGWGQFLSILSVKAANAGLITKAVNPRNTSQNCSNCGAKVPKELKDRIHSCTHCGFTADRDVNAAINILDLAVGRPVRSKACRVTEGIPGVGKKPALSR

SEQ ID NO: 39107 - protein, 489 aa, Moorea sp.
  misc_feature (446)..(479): Xaa can be any naturally occurring amino acid
MSKKVGVTKKLSTQIVPVVGMTESIETELLSTMKKLGIVRAESYNKLGSIKHWGLDWKKAIPEVKSFRTPDTLRLPAKIMDWTINDVAKAITAQQAACIDAVIKKIYRRFPGKENQKTRKELCKQLKTLAFLENPLLHRLVRKEFQRGHSWVKNQIVYQQVGYKCKRLSRNTYQLELAGLRRGKRNRIIVRSNRKIKGQIRLIHNQVLQRFEIHFLVDHGNVEIPGERRPVGVDKGYTEAFYDSEGQAHGKGLGKVATKKSDRICAKNRNRGKLWALHRKLEKIDPAKSARILKNNLSRKTENKRYRQNQSELTAIIGAASKSLFNGKSLKIFAEDLTQPIKGKRQSKAMSRKLNSWMKGQMRDSLQKWADWTGSIVTEVQPSYTSQVDSVTGTLLGKRSGDNFTRFNGVVLQADHNAAKNILARGTDKGAIRWLETKTSYGILGXXXXXXXXXXXXXXXXXXXXXXXXXXXXXXXXXXHRSFPTHSIQ

SEQ ID NO: 39108 - protein, 420 aa, Moorea sp.
MALTMNYTYRIYPDAAQQELMLSWLETCRRLYNRCLRDLKDWMNSRKCSIDRCSLIREYIMSPDIPFPGYRSQKRQLTQWKKTETDLKEVHSQVTQDVVKRLHNSWESFRQRGRGFPRFKKYGRYQSFLFPQFPANPLKGNKIKLPKMGLVDINLHREIPDGFKIKGVRVVSRCRGTKWFVVITIQADVSVPDPPSFGRAIGIDVGLIDFLATSDGLKIPRQKFFVDLQRELKLLQRRESRKQKRSKNWEKVQIKIARLHHKINNTRQDWQLKVAHTLCDQADSIFVEDIDYRVMAKGFLGKHSLDASFGQFRELLKWVCWKRGKFFATVDHRGTSKQCPNCGAEWDNNLSIRWHTCKECSYSNNRDVASAEVIRNRGIQKYPRTIGERKPPAESVLSGILNLDKCYAGTLNCEVKKPAL

SEQ ID NO: 39109 - protein, 433 aa, Moorea sp.
MQVTLRDCKWYNSTVILTYCYKIKPSPEQIAIMERWLELLRRHWNYALGQRLDWLNRTRSPIDRCNLISEPIGVIPEAVNYYTQQAALKETKQLFPEYKQIYAETQQVNLQRLKKAWDRWRKPVKHGLRGGRPRFKKQGQLRSFVFPRVNNPRAGAHLKDGFLLLSRIGEIPVVMHRPIPDGFTLKQCTVVKKADGWYCCISMKDDTVPELLPVDSVRSAVGIDVGLEKFLTTSDGEAIPIPQFYRKAQNKLALAQQVMSRRVKGSKNWEKAKKKVALLHLHLTRCRKEFHYQVAHWLCSKYDLIAHENLNIKGLARTKLAKSIHDAAWGAFLEILQAVAVRRGLLVQFVNPRGTSIECSNCGSRVEKSLSNRVHHCSSCNVKIDRDWNSGINILNRGLLAVGLPLNGCGKSAQDAVEQQVSFVNLRSPHHNL

SEQ ID NO: 39110 - protein, 493 aa, Moorea sp.
MAKKVGVTKKISTQIVPVVGTTEAVESELLSTMKKLGIVRAESYNKLGSISHWGLDWKKSYPEVRSFRTPESLGLPSKLMEWTVSDVAKAITAQQAACTEAVIKKIYKRFPGKDNQKIKKELCKQLKTLAFLDNSLLHRLVRKEYQRGHSWVRNQIVYQQGGYKCKRLSRNTCQLELTGLVRRKRNKIIVKSNRKISGQIRLIYNQLLQRFEVHFLVDYGTVEVSAERRSIGVDKGYTEAFYDSDGQAHGEGLGKVATKKSDRICAKNRNRGKLWALHRKLEKLDPDKSARILENNLTRKTENRRYRQNQSELAAIIGAASKSLFNGESLKVFSVREAWPTASDLTQPIKNKRQSKTMSRRLNSWIKGQMRDSLQKWADWTGSVVTEVQPSYTSQIDSRNGTLLGKRTGDNFTGFDGVVLQADCNAALNILARGTDFEITRYMNKTEVQAVLLRRTARFLKGLGLSLLDAVELGWLDCKHTLAKAFKQLLNGI

SEQ ID NO: 39111 - protein, 493 aa, Moorea sp.
MPRKVGATKRISTQIVPVVGMTKSVELELLSTMRKLGVVRAESYNKLGSINHWGLDWKKAIPEVKSFRTPDTLGLPAKLMDWTINDVAKAITAQQAACIDAVTKKIYRRFTGIENQKTRKELCKQIKTLAFLDNPLLHRLVRKEFQRGHSWVKNQIVYQQVGYSCKRLSRNTYQLEVAGRIRGKRNKIIVRSNRKIKGQIRLIYNQLSPRFEIHFLVDHGTVEIPAERRSVGVDKGYTEAFYDSEGQAHGKGLGKIATRKSVRVAWPFGHRICAKNRHRGKLWALHRKLEKIDPAKSARILRNNLTRKTENKRYRQNQSEITAVIGAASKSLFKGESLKVFAVREAWPTASDLTRPIKNKRQSKTMSRKLNSWMKGQMRDSLQKWADWTGSVVTEVQPSYTSQIDSRNGTLLGERTGDSFTGFDGVVLQADYNAAKNILDRGTDREITRYMSKTEVQAVLLRRTARFLVRSYRQNKAAFMVCRLWVKGLKLYD

SEQ ID NO: 39112 - protein, 338 aa, Moorea sp.
YSQVLQDVVKRVKLAFDRFIKGDSNGKRSGKPRFKKQHRYRTFTYPQMKEWCLEGNVINLPKIGKVKVVLHRPIPDGFKIKTASVTKKCDGYYLILSLEDKTIPEIKPDINLDLIVGIDVGLKEFLTTSDGESVEIPQYYRKAQKRLRVIQKRVSRRKKGGSNRLKAIKQLGLQHKKVADKRKDFHFKTANYLLSKYDVVAHEKLNVKGLSRSRLAKSVLDAGWSSFLTILTSKAVRVAWPTALNAGLLAVPVSPKNTSQNCSNCGKKVPKKLHVRWHDCPHCGCSLVRVAWPTANRDHNAAINIKNRAAGQSVLKAQRLLRDARIGWEAYTELKESV

SEQ ID NO: 39113 - protein, 397 aa, Moorea sp.
MLTLTYEYKIKPSQGQIDYIESTLEVCRRVWNFALRERKDWINSRKSPINACSLVSEYIIPADAPYPGFKEQSKALTTAKKDNPLLKAANAQVLQQVIRTLDRAFKDMKGRGFGFPRFKRVGRMRSFVFPQLGKDPLGEGRVKLPGLGWVVIRQSRPYPEGFEVKQARIVRRASGYYVMLSFQCDVSVPELPLLGKVVGVDVGLAYFASTSTGMQIERPKFFVDMQRQLKLLQRRLKRKVKGSANWKKLQHRIARLHEQIANTRKDFHFKVAHQICAMGDVIVVEELNLIALSRGMLGKHMLDAGHGQFLNSILPWVGFKTGTLIILEDAAGTSQECPACGSVVKKSISQRWHECTCGCSMPRDVASGQVLVNRLLGRGAHGLENACGDGLSGARFA

SEQ ID NO: 39114 - protein, 282 aa, unknown
  TnpB Polypeptide
MEMVSVNNDTDRHRYLHISVTKAFPDTRRSRITEIYGHDRGLVNLVTSCGENGEAVFQDGQNVRRIKERYARTRASLQAKGTKGARRVLRRISGRENRVMSDMGHRISKTLVFGCRAGALHVFEDLSGVSFQNLEDRNASRRYELRSWTFYSLEMKTAYKATMRRGAILKVNPQYTSQKCPGCGTIDKTVSTADASRKKWVFPILERPIWVLVIFRLFLHPGIFLTQNFCVCLMRFTACFRESHPPGLHSGLLRSSTALFQTVRFLPKPHRLRIQLRRFLTP

SEQ ID NO: 39115 - protein, 314 aa, unknown
  TnpB Polypeptide
LELKLNNEERSLMTQCTGYARFVYNYGLNMVNGTKAITKVNKHGKEVSLSYNQRINEAKKVFTNYVKKQPEYAWTNNYSSRIYQNAFINLGKAFKRYKEGNSKHPRFKCKKDKQSFTVDSSNGKIAVKAGNKIKIPTLGTFRLFEQVPYRMASQTFTISRTGEKWFVSFSIEAEKLPIHPLLDGRPQEFRGIDVGIKQFATIASSEENSTIALPESIKFEQLKLAKFQWRNRNKQLGGKGKKPSKNALEYYKKLAKYHARIANIRKDFIEKTTTNLAGNIKQVCLEELNVKGMMQNRKLAASIARQGFYEFRQR

SEQ ID NO: 39116 - protein, 400 aa, unknown
  TnpB Polypeptide
LIPNISIIKTAVLRIENTNNYYTVLEETSKEYNKILNLFSELNKDRLSNSVKLHHLLYYTIRNQSPLPSCFINTAKRKVASVYKSIVKRQINLKRLIKKFPDNYQLLKQYNKICLVVPKFTSSSIELGNQTYKINKNNKIIQLSTINGRLTFQYKICSHYESILNSAIKFGGLHICKHKNNKWYAHIAILLQNKQVSIKDPISPLGIDLGIRHLAVLSNKEIINENTIKQKRLKYQKLISSLQSNDSRNAKRKLRKISGKMRRYTKQINHVISKHIVQIAIDNHYSSIVMEQLTHIKNTIRYKKSQNDIYHKWSFAEIQKFIKYKCEYADKLFFLVDPKYTSQNCHVCGTKGKRNRDKFICTTCGKTFHADINAAINIADLGIQCEMSYRTFYGLPVQLA

SEQ ID NO: 39117 - protein, 428 aa, unknown
  TnpB Polypeptide
MAQVIRLDKPRLFLRRSSPPSTDGGTTERNIYKNEDIVVEMGYQLTYRYRLYPNREQRAELAKTFGCARWVHNWALRLRTDAYHGEGRSMGYAETARLLTQKKKEAETAWLAECSAVVLQQSLRNLERAFTNFFEGRSGYPSFKRKRDRQSARYVGTAFDVRDGRLKLAKIPGTIKVRWSRTLPSKPSSCTVTLDTAGRYHVSFVVEVDAKPLPKLNRSIGVDLGLNDLVVTSSSDGEVWHSGNPRHLRKSLRRLKRAQRSLSRKQKGSRNWEKARRKVARIHAKIADQRRDFLHKLTRKLVDENQVLCFESLAVKNMVRNRNIALSISDAGWGELLRLVQYKAEMAGRTVVLIDRFFPSSKRCSACGHVIDNLPLNVRCWTCPECKAEHQRDANAAENIRRVGHTRSQACGDHGKSSSAFMLAGSDR

SEQ ID NO: 39118 - protein, 452 aa, unknown
  TnpB Polypeptide
VKVAKTLRHKITNHSRIFDATLDIYNQALGFIINVIQHEFNSVEDISTKSIVPAVEKLIHTTKSNPLPKYIEFNQRFYKFPSYFRRSAIATAFGKVKSYRSNYQNWLNEKEITLSEGKIFKRNPPTLQLYHKEFPVFYKNNMFDRTSDTTAQIKVFHNNDWVWIDIEFKKQNLYKRDVWDWKEHNPKLVKVGKKYFLNFAYTHKVKLSETKVEKQKVCAVDLGITNSAVCSIMDAKGTVLARKFINQAKEKDRLYRMTNKLRKTQRISGWVSAPNHWRQINGLQKYIINHTSHEIVKFAKEHNCDVIVFEYLDKMKVPKGFWGAKKLRFKLRYWRKTSIQNKVEEMTHYLGMRISRVNARNTSALAYDGSGNVERNYKKDLATFKTGKVYHADLSASYNIAARYFIRAYQKSISEKKWLSLQAKVPVLAKRTSQTLSSFISLTKALEAPKVT

SEQ ID NO: 39119 - protein, 327 aa, Halobacteriales sp.
VRNYTTETTDGSFTFAQRRRWSSTRWDRQQPSTDLGVNQLAVTSTGVFWSGHEFDHWRREYEKRRGSLQQCGSRHAHENIQAIGRKETGRFTMMLHRIANGIIEEATENGCTVIAFEELTGIRDKLSGASWGHEWAFERLYEYVEYKAELHGIDTEQVNPENTSRRCSTCGFTHPDNREGEDFECLKCGYENHADYNAAKNIGLRYLRRNQTGDDGGAPVGVRLNRGTLNANGEYDPPAGESGQSGSPRESPSGGSQPPRRQTQSPGRVRWRRRRPGGPRSPVFRPPCPPRGSCRSRRTRRSPRASVRGCPRGPRRGRSGGPRSAPR

SEQ ID NO: 39120 - protein, 321 aa, Hydrocoleum sp.
MPLAPNKYAMVLLNLLADARELLKLLGKGELANKPKSPNYRKPGLFTVSYPKRWLKLMNEGIRVPLGKKVKAWFGLEAFYIPMTSNLDWDSIKEIRILPRHGCFYTEFVYEMKTQSVKLDAGQALSIDHGLDNWLTCVDTQGHSFIIDGKHLKSKNQWYNKQIATIKENKAQEFWSKRLAGITEKRNRQMRDAVNKTARLIINHCLKYEIGTVVFGWNKGQKQSIKLGAKTNQKFVQIPTARLKNRIEQLCNLYGLQFVETEESYTSKASFLDDDFLPIYGEKPDNWEPSGKRIQRGLYQSAVGYLINADANGAKQNRTTL

SEQ ID NO: 39121 - protein, 247 aa, Escherichia sp.
VIDCSNLESPGVFSEKPPRTLAQCGRGGKAEKPALISNVTGLDMGLAHFVIKSDGNKIASPRHLINASRNLRRKQKALSRKKKGSANRRKARIQLAAVHERVASARADFQHKLSRAIVDENQAVIVETLKTANMMKNHHLARAIGDAGWSGFITKLEYKATEKGVHLVKLDQWFASSKTCHCCGHKMSEMPLHKRIWQCPECGVEHDRDINAALNIKRKGILELQAAGLVVSAHGGQRKSVTQTVAA

SEQ ID NO: 39122 - protein, 418 aa, unknown
  TnpB Polypeptide
MNVMRVQRVEKHIIKRNHPDWKICDKLCFNSKNLYNKVNFIIRSAFLGKLENIEDFKDLIKNDRFVGGYELIKRMTELNDHDYRSLKPQSSQQVILQLGTIWKSYFKSLKSYKSNTSRFSGRPKMPSYKHKEKGRYIVTFTNQNISIKNRKIFFSRKDYFKKIRTNKIDFQQIKIVPKLDGSYHLCIIYNKEIENAKGRGYSFGVDLGLNNLMAITSDKVDFRPLLINGRPLKSYNWFWNKNKARLQSELKEKYLSKRITKLTFDRNNKVNDYLHKASRLLINKALENEVTSIVIGYNQGWKNEINIGKKNNQNFVNIPYEKLIDFIHYKAEENGIRVIMVKEEYTSKCSSLDKEEIRKHETYIGNRVKRGLFKTLNRLEINADVNGSLNILRKVIGDDFINLLNIGCVLQPELVKIV

SEQ ID NO: 39123 - protein, 388 aa, unknown
  TnpB Polypeptide
LGYKWQKRKKIERKGKVQKMIKQKAYKFRLYPNQEQRILFEKTFGCSRFIWNQMLADKIAYYKETGQTLKNTPAQYKKEYPWLKEIDSLALCNVQLNLQKAYKNFFQSKFGFPKFKSKRHHQSYKTNNNNGNIAICDGKVKLPKIGWIRLKRHRKMAGLIKSATISKTATGKYYISILCEIEIQPYPKTNSTVGIDLGLSHFAILSTGEKIENPRFLISASKKLRREQKILSRRGLLAKQRGKSLNDCMNYQKQRLKVAKLHEKIQNQRRDFLAKLSTHLIKNHDRICMEDLASKNLMKNHSLARAIGDASWSEFVRMLEYKAEWYGKQIISISRWYPSSQICSNCKMNSGKKLLHVREWTCESCKTHHDRDFNASVNILNEGLRMLA

SEQ ID NO: 39124 - protein, 373 aa, unknown
  TnpB Polypeptide
MTKIKQKSYKFRLYPTEEQKVLLSKTFGCSRFIWNQMLADKIAYYKETGKTLRNTPAQYKKEFPWLKEVDSLALCNVQLNLQQAYKNFFQSKFGFPRFKSKKKAYKESYKTNNNNGNIEVCNNKVKLPKIGWIRLKQHRKMTGLIKGATISKTATGKYFISILCETDIHPYPKTNSNVGIDLGLSHFAILSTGEKIENPRFLVSASKKMAREQKILSRRGLLAKQRGKSLNDCMNYQKQRLKVARLHEKISNQRRDFLAKLSTTLIKNHDRICMEDLASKNLMKNHCLARAIGDASWSEFVRMLEYKADWHEKQVSKISRWYPSSQICSDCGFNSGKKALHIREWACESCGMHHDRDLNASINILNEGLKILA

SEQ ID NO: 39125 - protein, 373 aa, unknown
  TnpB Polypeptide
MIKHKSYKFRLYPTEEQKVIFAKTFGCSRAIWNMMLADKITYYEKTGKSLNNTPAQYKKEYPWLKEVDSLALANVQLNLQKAYKNFFHSKFRFPRFKFKRHHQSYRTNNQNGLIRLSNDNNKIKLPKIGWVKVKAHRKLKGLIKSATISKTTTGKYYISVLCEIEIEENIINKVNSNIGIDLGLEHFAILSTGEKIENPRFLISASKKLRREQKILSRRGLLAKQRGKSLDDCSNYQKQRLKVARLHEKISNQRRDFLAKLSTTLIKNHDRICMEDLASHNLMKNHRLARAIGDVSWYEFVRMLEYKAEWYGKQIVKVSRWFPSSQICSSCKVNSGKKPLHVREWICENCGTHHDRDINASVNILHEGLKLLA

SEQ ID NO: 39126 - protein, 557 aa, unknown
  TnpB Polypeptide
LELPLNYTKHDHDVLDKIFWVANNMKNNLISWYDHQLTEMTRTRAWRDNQKSLSNLYSEYADDVEALEKVKKRIARNKEAAKKKKKASHLSCKNEKQLNYLQTRVKEFEKKRKVLYELRNEMIRRYGFSKFDFEKRINKYRKSYETLVGIDVAQKIAYSVWDMFQAVLYGKGKSVSFSPFSKFLAIEGKKNGANITFDKDKMTVTLGMKSNKIRMHVKKNRKDPYGYEKEALARRVCYCRIIRKAYPEGWRYFLQLVLEGPPPVKVKPETGELLHAMGKGCVGLDIGPQTLAFSAKETVGLEELADGVQLAQDEIRRIKRSMDRSRKNSNPKMFTADWQIVRKSKLPAECLNSRGRRIWVKTNRYKKMEVLLRSLYRKQAALRKHLHRRMANQLLSMGDEFYVEDMRWKALAKRAKETRRNKKGKILSKKRYGKSIANKAPAMFLAILEQKVIASGGSFQRIVTWKAKASQFSHETGKCNKKKLSQRWHYLEDGTKVQRDLYSAFLIQHTNKNLESFNLRTCEKDFPIFLKMHQEEIERLQSLDKRMPSSMGIKKAA

SEQ ID NO: 39127 - protein, 381 aa, unknown
  TnpB Polypeptide
MLKGIKIRIYPDKEQEELLFSYCKDYHNMKNFLVAKFKDNLPNVGKHSIIGYKEKDLLQEYESTYNCKTELPTRCIRGAITDYISGVKRFYQKLSSKPPKFHKYDSNKQSFYIVDISYKISNYYITMPINRNFVKQYKTISKKIPIDKKYTKKENLTYLKAIRFHYQKGKWYVSGCYDVPDVDIDHTKEFLGLDWGIKNFMTTSESTLINYPKEVVREYYRIKKISHYLDKKVNNSNNYKKLKRKFDKAYKRMNGLKKNFIHQETTKLARQYHIVIEDISFQNISKKKKFIRRMSVLAPKYMFEEQLEWKCKKFGSHFIKVNPRNTSRTCSVCGQIHDMKLNDRMMICSCGNKMDRDINAAINIKNAGMNKILAEGICCTR

SEQ ID NO: 39128 - protein, 418 aa, unknown
  TnpB Polypeptide
MSLSVEALALRNKKIKESGKATRKRRKTQVCRAFTCKVDYRKLKSEQRKALSELFRDAKHLYNDCVTSDSVFTYVPSREVTVRMKDGSTEPRTLDRIGAQMTQGVVQQTKDNMRALAALKKKGYEVGALKPVKSFDSIPLKQPGRTYRLRGNYIRINRIPGLMRLTGMKQLDGWEIGPAKLLRKASGYYVAFSCFKDKTAYEKEQPYTPAPVNPIGGVDAGLKDEIVESDGTKTTRRYPDSRKARYWARRMSKRDKSSRGWWKANRAYRMEHERLAARRKHAAIEESQRLTRKYATLVIQNEQIRTWNKNKGYARGGRKIHAGILGRLYANLKQQQNVIILDKWQPTTSWCRNCGRRTPCPVNLRTYTCAYCGVREDRDQHAALNMTVLRLAPLSHTDLRKARDIPIGPYQGNGITFR

SEQ ID NO: 39129 - protein, 450 aa, unknown
  TnpB Polypeptide
MSQKVRIDGVKHTGASVFLGVDHCNNPYWTRNPERIMVWLCDGWRTRFNQRREQRTHNIPVKDEAGEIVDWIKEPLGGPDVADLLSDKEARLQCSWMAGIPAPILSSTDRIESIEWFAGLKRRKTVGGRIPGFKSRHRGLGFVCWRNASKTGNALFHQTGRKSGVVVIAGMNPSQWRKPGEKLHWRVIIHVRVSQPIRPYTSVHVDWTHRNLVFVNMPLPLPRTGSGEVGIDRGCVHTLALSDGTFMDMPKPTKAELKRLKYLQRRMARQDRVNEARGGRTAKLASKRRRKTLNQFNALQGRIVRRRNDWIEKTTTRIAQENILVALEDLDVKAMTKRPKPKSDPDKPGKYLHNGAKAKAGLNRSILSNNWGRLMKRLKDKMDANGGRLVAVPAAYTSQTCHQCSHVASENRDSQAVFKCVECGYEANADVNAAMNILDRALIQTGGGTA

SEQ ID NO: 39130 - protein, 384 aa, unknown
  TnpB Polypeptide
MIRNYKYRLYGNDRSRDLSDLVTTANHVYNHVVALYRRYYSLYKKNPKSGAVKHHIAKLAKNDPRWAKMGSQSLQEICERIEATYKEFFKKQGRGRPSFHKANEGGSFVFKGSVGYTLNGNTLRVNKLGFNYRFKLTREYGLIKTVRIKRDNRGRLWLVVCSEVPDVRLERQGEACIGMDFGMKTFITTSNGEHISATLGYQQSLTELRRLSRSLSRKKYGSNGRKRAKDALAKCHEKVANRRADFQWKLAHELCRQNTYIAVEDLNIKAMQKRWGRKVNDLGWAEFLGRLVCVTEKYDTEIVKIGRYESSSQICSYCGYKNEEVKNLNVRKWVCPVCGERHDRDVNAAINILMIAKGGKGVSLGKSHSKTMLADASIAVATTA

SEQ ID NO: 39131 - protein, 659 aa, Streptomyces sp.
MSRKLPLAEGETARTACARAVLRTAVDEKTGEVLPPSVLAERVGWAAGLVSGMAGALTAEHWNTTDVDLLASGQDAGGRKLPSNAWMALRRLGWTTAPPAGVKVNDRIVRMAQEQAGRTLRAAKWRADLTAGVLATWPADPAKRTGEEWDAVREAVPGGQFLPSSVIKSRTRQALAFQVQHDRLPVDMFELEPVPRTARMLLLSACDGQQATLERGDEPGRALLRLQLPSRPDPRSYRDWTWVACPVTLPPTIPANAVLHLPTLRIHQGTVRADLAYTHAVPKAQRTGHSVALGVDWGLNTLLSAGAVRLHGNGRITALGSGGMLRAAGALAKQHRLRRLSELLHAKTDQHQRLMTGNKQHPLAARHQLLTDEIRHVSARRSNLNDALAWSAARWTVDQAISASATVIYVEDLRSMEARGMGRSINTRLSQQVRGQIVERIRHLAAEVGIAVVTVPARNTSKHCPQCLTPLRHRKAPDRPTTPGWKWALCPNPDCGWQGDRDTGAWKRIAARGLTHQARTLIDRASGTMAIRTVVDRLEATAVVTPTPTETSRKDRSKTGLTRPRSTRPAPRRRRAPSPAGPTGPAGKRPEGHAHTGRMRLPRAAHRHQGVTTIRTPTTGRHRPRGAALGAGFHLHAHATPPRWAKPAPDITSCMGSLN

SEQ ID NO: 39132 - protein, 376 aa, unknown
  TnpB Polypeptide
MRIKRSSKSTVKFATGEKREVLNGILDEYARAANFFIDYFWEHPEIRSENQITSEIYKMPETWFSARMRQCAAREALSMVLGAKETPKRKSGTELEVGELLGEEIFSEPVKPVHNGKKMTLSSQIVKIEAGRNSFDIWLVLSSVGNEIKLYIPVRKHRQFIRWEKLGKMGSSVVIHRKYVQFSFEIETGEKKTEGKIVGIDAGINHLMATSDRQLFGSDVKPLISKIKRKRQGSKAYKRAKRELSYHIHKVVKDFFKNNELRLVVVEKLKNLKQNTKQKNKTKEFRKTLSNWNYRELLNIIQMRCEENRVSFRSVSPYKTSQKCPVKDCAHVQRENRKGDEFECLKCGYSDKADFVGSLNILTRFLTGQYGAGFKT

SEQ ID NO: 39133 - protein, 372 aa, Clostridioides sp.
VIAVEKAYKFRMYPNKKQQELINKTFGCCRFVYNKYLAKRIEVYKNNKETFTYKQCSSDLTNLKKELKWLKEPDKFSLQNALKDLDNAYKKFFKEKAGFPKFKSKKINRFSYKTNFTNGNIMYCGQHIKLPKLGMVKVRDKQVPKGRILNATISKEPSGRYYVSLCCTDVDIEAFENTNNQIGLDLGIKEFCISSCGDFIENPKYLKKSLNKLAKLQRELSRKTIGSLNRNKARLKVARLQEHIANQRKDFLQKLSTKLIKENDIICIEDLQVKNMIRNRKLSRLISDVSWSEFIRQLEYKANWYGRQIVKVGKFFASSQICNKCGYKNEEVKDLNIREWICPSCNETHDRDINASINILKEGLRLITIQNK

SEQ ID NO: 39134 - protein, 411 aa, unknown
  TnpB Polypeptide
MQLVEQHVIDRQDARFKTVDAACFASKNLYNCVLYQMRQDFFAGKKADGYAKLAHALKGTPEFKALPAKVAQWVIRQASGDWWNFWKAHQAYKQNPAKFTGRPKLPHYKDKQKGRNLLVYTVQALSRPALKEGRVEPSQLAVVLPTQHPEVQQVRIVPQASHYAVEVVYTVKPKSRMANKLNPKWAASLDLGIDVLAAVTTNKRGITPFLVNGRPLKSVNAYYNKLRAQQQAALPKGQSTSRRLRELADKRNRKIKHFLHWASRYLIEWMVRERIGILVIGHNVGWKQEVNIGKVNNQNFVAIPHSTFIHMLTYKARLAGIRVIVKEENYTSKCSFLDLEPIRKHAAYCGRRVKRATFVASDGRQIHADVNGSYNILRHALPSAFARGIKGVVVRPVRVQPVRKLENWHCL

SEQ ID NO: 39135 - protein, 365 aa, unknown
  TnpB Polypeptide
MLRAYRYRLYPNNKQIELINKTIGCCRFVYNYYLNKRIELYKTEHKTFGYNSCAKDLANLKKEYVWLKEVDSISLQQTLKDLDTAYSNFFKGSGFPKFKSKKNPKQSYRTQNVNNNIKIENSHIKLPKLGWVKFSNSRAFTGKIVSCTITKTNTNKYFVSVLIDTEIRKLPESNNIYAFDLGLKEFLIDSNGNHIDNPKVFKKYESRLAKLQRQLAKKQKGSKNYEKQRIRIAKLHEKIANARNDFLHKLSSRIINENQVIISEDLNAQGMLKNHNLAKSIVDVSWSEFCRMLEYKANWYDRVYHKINPWYASSQTCSECGYVNKEIKKLSVREWVCENCGAFHQRDENAAKNILNQGLKELGIA

SEQ ID NO: 39136 - protein, 392 aa, Oribacterium sp.
MCYTIFVDIYGGFMEQITVTAKIQISADADSRALLNKTMSVYSDACNYVSAYVFRTHDLKQFSLNKTLYSVLRDKFGLKSQMAQSVFKTVIARYKTILENQKKWIRPSFRKPQYDLVWNRDYSLTQNRFSVNTLNGRVKLPYFTEGMSKYFDHTVYKFGTAKLVNNHGKYFLHIPVTYDVEESSISDICNVVGIDRGINFLVATYDSKHKSGFVNGKTIKQKRAHYSKLRKELQMRQTASARRRLKAIGQRENRWMQDVNHCVSKALVENNPKHTLFVLENLSGVRKATERVKARDRYVSVSWSFFDLEQKLIYKAKQRQSTVIKVDPKYTSQCCPVCGHIEKTNRDKKIHLFSCKNCSYRSNDDRIGAMNLYRMGINYLEDSQVPDTVTAE

SEQ ID NO: 39137 - protein, 409 aa, unknown
  TnpB Polypeptide
LCRSLVFPVEADDPRLVWLLKEFRLLVNKSIRVALREGIRSRSRLARAAYADLSRGHQVYKQYIPSAFEVALGVLKAHRRRLRKGKRSSIPYMKRLMLKAENQSYRLDRETGRLRIPIRGTEGLQVQLPLSKWHRSILSDLSWGLGSLTVVPGKVIVVVRKEPPKAYEPEAAIALDTNEDSLDGVMAAGDSARPVTMPLGGVRQVQMIHFRRRRRLARKKAHDRRVQRILLDREGRRERNRVRQRLHRVSKSLVRAAKDRRAAIVLEDLTLHGAGGRSRRMNRRLSSWPRREIHRQIEYKAALEGVPVLKINPRYTSQTCPACGARRRDRVGKEFVCLMCDWEMDRQINAGLNILKTALASNEALARAVRFQPGALRDDVVIPLYDLLREGAGAREEPSGVESGASQIT

SEQ ID NO: 39138 - protein, 386 aa, Clostridium sp.
LKKAYKIEIRPIEKQIIKINQTIGVSRFIYNFYIAHNKEVYENEKKFVSGMDFSKWLNNEYIPNNEDKQWIKEVSSKATKQAIMNGEKAFNRFFKGESCFPKFKKKKNQDVKAYFPKNNKTDWTIERHRIKVPTLGWIRLKEFGYIQVNSIVKSGTISQKADRYYVSILVEEDVGINHKSYSEGIGVDLGLKDFATCNNGLTKKNINKTKNVKKVEKKLIREQRKLSRKYESLKLRNKNDKGEVTRQNIQKQVVMVQKLHQRLTNIRTDYINKTVNELIKQKPNFITIEDLNVKGMMKNKHLAKAVAKQKFYEFRTKLISKAKQNGIEIRIVDRFFPSSKTCSRCGAYKKDLKLSDRIYNCSCGLSINRDLNASINLANAKKYKMA

SEQ ID NO: 39139 - protein, 376 aa, Nostocaceae sp.
MVESMLLSFKTALVPNNKQETAFRKSSGVARHAYNWANAQFKGILATRKEGEKLKLPSAINLHKQLVSEIKSVNPWYYEVNKNVPQKALSDLRQAWNRYFKKTSKQPRFKKKGDHDSFYLESGTKALPKIKNDGRRIKLPSIGWVRLAELLPVTSIHNCVISRQANRWFISIKYEVEKLTISGDEPSIGVDIGIKQLAVCSNGKIFANPKAYRSVSKRMKRLQRSISRKVKGSKNRGKSVKKLAKLHARVSNIRKDSIHKLTYYLAKNHSVIKIEDLHVKAFLKNHKLAGAIADCGMYEFKRQLEYKTEKFGSKLILVDRFFPSSQICSNCGNHRHKMPLKNRTYVCPECGHTEDRDLNASKNIDRWFEDIFIPVA

SEQ ID NO: 39140 - protein, 302 aa, Pseudomonas sp.
MTSRSTLMGPAALSACIAIQSNRLALSTSHDESNLKSVSLNGGKLLGASRNLGWVPFKSGSVKWKDGVITLNKQAFKLWDSYGLANYSLRSGSFNEDSRGRWYFNVVVEVDRKLSPGSSSIGIDLGLKTTATCSDGDKLSSGRFYRDLERPLGIAQRAGRKARARAIHAKIANRRKDALHKFSSALVARCGFIVVGDVSSMKLAKTNMAKSVLDAGWGQLKTMLEYKCDHAGILFKVVSEKNTTQTCSSCKQLPDSRPRGIAGLGIREWICSGCGVTHDRDVNAARNILALGHERPVVEISL

SEQ ID NO: 39141 - protein, 370 aa, Bacillus sp.
MTKHNKAYKFRLYPTEEQAYLMRKTFGCVRFVYNKMLAERKEAYEKYKDDKEQLKKQKPPTPAKYKAEFEWLKEVDSLALANAQLNLQTAYKNFFSGQNDFPTFKSKKDRKSYTTNVVNGNIMLLNGHIKLPKLKMVRIKQHREIPQDYMIKSCTISMTPTGKYYVSILTEYEKEIVQKEVETVVGLDFAMGGLYVSSEDEKANYPKFYREMLDRLAKAQLVLSRRNKGSERWNKQRIHVAKLHEKVANQRKNFLHHESKKLATNFDVVAIEDLNMKGMSQALHFGKSVADNGWGMFTSFLAYKLNEQGKRLVKIDKWFPSTKTCSSCGNVKNMTLSERVYSCICGVNLDRDYNAAINIKNEAIRLLALA

SEQ ID NO: 39142 - protein, 423 aa, unknown
  TnpB Polypeptide
MKINQGMKVRIYPNQQQRELLNKTFGCCRFLHNKMLEERKTVYEELKDDKEQLYTHKYKTERQYKQEFPFLSEVDSKALQSETRNLLQAFQNFFRGLRKGKKIGHPKFRSKKQKQTYTTYNINNNIRIDPTAKRIKLPKVGWVKYRDGREPIHPIKHVTVSRTRTNKYFVAIIIELEIDVESLTTIPLHKIEAFDMSAPNFLVTETVTLTNPRFYRTQERKLKRLHELLSRKQKSSKNRDKARYRLARFYEKIQNQKRDWTHKVTHQLSNQFDAIILEDLNIQGMQQFNSGLSKSVTLDFSWHQFVSYLRYKLEWQGKHLVIADRFFPSSKRCSVCGQINNDLQLSERTWTCQCGVTHDRDVNASTNIKEEGINLLLDQGITIIKDNNTTVGTTGSHASGDRVSPVSAGGGQGRRNPPAFRQW

SEQ ID NO: 39143 - protein, 181 aa, Synechococcus sp.
MNAASPYIPPYTGGLGGGGIRERSHRPPRSKTERRRSNSWAFYQLRQFVHYKAARAGIQVVVVPPAYSSQTCHQCFWIEQREGKHFRCVNPLCGWEGDADFNGANGIALLGVAVNQPPYIPPHAGGCRGARGWLANCRATKSPLRTPLNSPAPLPPYTGVGGWKGGGRSRVVYMAVNLTQI

SEQ ID NO: 39144 - protein, 405 aa, Synechococcus sp.
MTQVLTVSCKLKVSPSQAAKLDATMDAFVQALNWVNQNTPEKVVNAVKLQSLCYYQIRARFGLSSNLAQQVCRRLAGARKVARQKNRPVKAFKRGFATYDARIFSLREKDWTVSLTTVGGRERFELAIGNYQRGMLAGSNPKSATLVQRKDGSYYIQICVEKNPPKQQDTDRVIGVDLGRTDIAHTSEGDNWNGQQLNRVRDHYSKLRAVLQRKASKGTRSSRRRCRQLLQRLSGKERRFQTWVNHRISKAIVSRAKATNSALALEDLTGIRGRVNQQPRSKAERRRANSWAFYQLRQFLEYKALRAGVALILVPPAYTSQTCHRCLHIHPDPAQSYRSGKQFKCGHCGWEGDADLNGANMIALLGAAVNQPRGSWLACQLQGYRSRQRAGGLKPALYCEAVRVG

SEQ ID NO: 39145 - protein, 426 aa, Synechococcus sp.
MLVREAKLLNGTPKQYQALDEAIRTAQFVRNKCLRHWMDNRGVGKKHLYAFCKDLAKEFPFANKLNSAARQASAERAWLSISNFYRRCKQGEKKKGYPQFKKHCRSVEYKQSGWKLSDDGLSITFTDGFGAGTFALYCNGEARQDILSSKINRVRVIRRADGYYAQFCLDVDRKEQGQYTGNVIGIDLGLKHFYTDQNGNTVNCPKFLRRSEKRLKRHQRKLSRMFAKGRKPQSNNYHKQKNRVGRIDLKVQRQRRDWAIKLARCVVMSNDIVVYEDLPVKNLVKNRHLAKSIQDASWSLFTHWLDYYGKVWGKAIVAVPPQYTTQDCSGCGHRVVKTLSTRTHICPKCLLVLDRDQNAALNILKKGLSLLGLSIFKLSVLGLKWQNGTLGHKGTAAPRPPVSPRIRGDVGGPGGRERLGRDAPLL

SEQ ID NO: 39146 - protein, 367 aa, unknown
  TnpB Polypeptide
MNRRYNHRLVPDEAQSAFLDKCCDADRYIWNQFLGATHRYYAHSKKFHYKNEMSKQLTEIKKIDGCEWLNLVPSTATQQAVIRLDKTLKEFNKKKVGFPQFKSKKAKQSFNLTKNNFSIKKGKLFISNFKEGIKVKWSRKMPVPSSVTIIKDKLGHYYASFVVDVPEPKAKVVTSEIALDLGIESFVTDNNGNKHKLPELKHLLIKVRTQQRALSRKKKGSKNREEARLRLAKTHNKIVNIRKDYVNKLVKKLVDENQVIIVENLDIPKMLKQASYARHIALQGWGILVKKLEVSCASHKRVFHKIDRYFPSSQICSSCNYKWGKLNTSIRQKVCSSCGVSHDRDINAAINILNEYRSTVGHTASLK

SEQ ID NO: 39147 - protein, 360 aa, Deltaproteobacteria sp.
MEIMLSHKIKLDPKKKQIEYFSKACGTARFTYNWGLAEWKRQYEEGLNPSGFGLKKEFNAIKEEKFNWVYEVTKYACQQPFINLQTAFNNFFSGTAKYPQFKKKGIHDSFYIGNDQFSIINKKVKIPKLGAVKMCECLGFSGKIMSAVISKAANQWFVSVSVKMDITPATSESQAVVGVDLGVKNLATLSTSEIIEGSKALSKHQNKLRHLQQSLSRKQKGSKNRYKARHKVAKLHYRISCIRQDELHKLTTKLTRDYAVIVIEDLNVKGMMSNDKLSKAISDMGFFEFKRQLNYKSLTSGSLIIEADRWFPSTKKCSKCGEINHEITLADRVYICPKCNLRIDRDLNAAINLKSLAIAV

SEQ ID NO: 39148 - protein, 280 aa, unknown
  TnpB Polypeptide
LTGFSPEKTISAPPIISIVGKKATLFLPFMSPNEQLLKTSLSSLPTRKKQAGVDRGLRYAMVVSIQNEDDSYQEVMIGRQELFEKRERLRQRTRVLMSQIALKKSNWERKHPNQQFPAIVLKKEQELESVWQKVRRLDKEISHQIASETVWFCEYQGVKTIYFEDLRSFQGRGGMKRHSWNLSTNLWGMMIDGVRYRRESMGHKNGGIWLVNPAWTSQTCHVCGTHGRRVDTEDSIIEVKGGEYFHCLKCNQHYHADVNAARNIMQIKQSKPSVVPGRTS

SEQ ID NO: 39149 - protein, 413 aa, unknown
  TnpB Polypeptide
MEYSHRYQAYLTDEVAERLEHHLDVHRQLYNHVRWEYENSPADDKPSEYDQNNKLPKWKRRWPIFGELHSKAAQATVARFHHNLTALSKLKEKGYNVGRLTRQAPTDYRSVTYNQSGFDLDEKRGHDTDAYVRFSKIGWVKIRYSRPIPDHATIKEVTIKKETTGEWFVSFGLETDDTALPEKPDVDSLDASNSVGIDLGILNYIHTSGGTTVEWLDLEDEYERLRREQQKLSRKENGSNNWENQRRVVAKVKRRIRRKVLDYQHKITTWLVREYDAVFVEDLDVKEMLEQSHNSRNKQDAAWRQFITLLEYKADLYGTHVVQVEPEGTTKECARCGVETAKPIWVRDHSCPACGFETDRDANAAMNVLKRGFAALGLGWPESTPVETVAATDTDDIYEVSASHVVETGSLVS

SEQ ID NO: 39150 - protein, 381 aa, unknown
  TnpB Polypeptide
MKATVTLKIKLETTTKASKSLSETQKAYVVALNHTSDVAFGKKVFNSVALHHVTYREARELTKLPANLVCSARCVVAEAYKRDNQIRHRWKETAAMRYDARTLTVKIDQEYATLTTLGGRVRVNLILSSYHRQYLDGTWEIEPTATLSHRGRTWYLHLILIKDIPDSQSEGAIGVDSGIVRIATLSTGKVFKGGAIKHIRERRFKQRRDLQAARHKSRNQRRLLKRLAGKEKRSVDWLLWNVANEIVDETLKANAGTIVIEDLKGIRARIKVARKQRLIHHGWPFSSLFAKIEHVASKHGVRVESVDARNTSKTCHKCGHCDAANRKSQASFVCVGCGHRSNADFNASLNVRDRRAFHGCESVTTRSGSAPSGRAKKAALL

SEQ ID NO: 39151 - protein, 395 aa, Bacillus sp.
LQSLWTRSFFISPAGNVSNEIIKQCVENQKTRGMKRMSQTLTVKVKLIPTKEQIRLLEQSSHEYIKVINTLVSEMVEAKKSTKKSTKDIEANIPSAVKNQAIKDAKSLFVTKVKKSKYKIIPILKKPVCVWNNQNYSFDSNYISVPLMINGKSTRLKVRALLIDKNNRNLDLLTHKLGTLRITKKSDKWSAQISVTLPRSEKAGTKILGVDLGLKVPAVAITDNDKIRFFGNGRQNKYRKRKFRSARKKLGRDKKVNAIRRFNDKEQRWMQDKDHKISREIIDFAIENHISVIRLEKLTNIRQTARTSRKNEKNLHTWSFYRLSQFIAYKATLAGIKIEYVDPAYTSQSCPKCAEKNKAQDRKYKCSCGFETHRDIVGAMNIRYATVIDGNSQSA

SEQ ID NO: 39152 - protein, 399 aa, unknown
  TnpB Polypeptide
MVAAMPQCRTFRYLLQPTARQRLDLERLLGLQCELYNAALEARNGAWEKERRSVSYILDCATLTQTRAVRPDLFEFGITVCRGTLKRLDRAYCAFYRRCRANQTPGYPRFKSRSRFDSVQWEDTQSWDLDTQAKRLRVQGIGGIKVRLHRPLRGTPKAITIKREGTRWWVSIRCVDVEAVPVAPTGCEIGIDMGIWAVVATSDGELVTEGRFGARAQDRLREAQRSLSTKTRGSGHRRRAAQAVGRAHRKVGNQRQDLAHQLSRRLVNAHDLIAIEDLKVSSMLRRPKPRPDDKGGFQANGASAKAGLNRSISDAGWGLLRSYLAYKVEETGRELIAVDPRNTSVRCSRCGHIAPENRVSQAEFRCQDCRYVAHADINAACNILWAGRAQRASARAGSN

SEQ ID NO: 39153 - protein, 243 aa, Shigella sp.
  misc_feature (183)..(224): Xaa can be any naturally occurring amino acid
MRYRNSRQVTGVVKNVTVSQSCGTWYISIQTESEVSTPVHPSASMIGLDAGVAKLATLSDGTVFEPVNSFQKNQKTLARLQRQLSRKVKFSNNWQKQKRKIQRLHSCIANIRRDYLHKVTTTVSKNHAMIVIEDLKVSNMSKSAAGTVSQPGRNVRAKSGLNRSSIGIKTPKRLKKHHKTDVXXXXXXXXXXXXXXXXXXXXXXXXXXXXXXXXXXXXXXXXXXACHKVNSDARYVDIQRTPM

SEQ ID NO: 39154 - protein, 483 aa, unknown
  TnpB Polypeptide
MVKAIKVMLIPNNVQQTKLFQYAGASRFAYNWALAREKENYEKGGRFIPDTELRKEFTRLRNSDEYAWLLNVSNNVTKQAIKDACSAYKNFFKGLQRYPRFKAKKKSMPKFYQDNIKIQFRDTHVKFEGFSFSRKANKQKLNWVKLAEHGRIPTDAKYRNPRISFDGLNWWISVCVEFPDCKKNLNNDGIGIDLGIKDLAICSDGNTYKNINKSQVVKKLEKCRRRLQRRVSRKYEKNKKGVSYCKTKNVIKSEKLFLKGNHRLTNIRKNYLNQTTSEIVNRKPRFICIEDLNVSGMIKNRHYKCECGNVIDRDFHATKPNQKWLTDITEFSIKAGKIYLSPIIDCLDGMPVSWTIGTSPNAELANTMLRNAIATLKPNEKPIVHSDRGCHYRWPEWIQIMEEANLTRSMSKKGCSPDNSACEGFFGHLKTEMFYGHDWDEYSIEEFIQEINSYMGWYCKDRIKSTLGGLSPLDYRRSIGIAV

SEQ ID NO: 39155 - protein, 392 aa, unknown
  TnpB Polypeptide
MLKAYRYRIYPNKEQEIQLAKTFGCCRFVYNQTLAYRKDAYEKEKKSVSKTDCNNYCNRELKKVYEWLKEVDKFALTNAIYNMDSAYQKFFKEHAGYPKFKSKHSNRKSYTTNFTNGNITVDFDRGRIKLPKLKRVKIKLHRKFSGRIKTATISKVPSGKYYVSVLVETEHSPLVKTNGQIGLDLGIKDLCITSDGKKYENPKTIKKYEKKLTKLQRQLANKTKGSRNYQKKRKQIALCHEKIANTRKDYLHKISSEIINENQVIVSENLQIKNMVKNHNLAKSISDASWYELTRQLEYKSKWNGRTYIKIDRFYASSQLSFTFVFSISLYILLLPLYRNSFFSATDNDTIIYPKTNNTIIDILKASLSINVSDIYFKIYVSIIIILGKIRR

SEQ ID NO: 39156 - protein, 347 aa, unknown
  TnpB Polypeptide
MQLTAKVRLNVTPKQAATLTHTLQQANECCTWLSEKAWETKRFGQFSLHKLAYHPARAAFKNLASSVIVRCEAKVSHAYALDRKTKPTFKPLGAIEYDHNILPWYADKRTVSIWTVDGRLHLGFSCGSRQLELLQGKIGQADLALVGKHFYLCAPCTVENPEPQDVADVLGIDLGIANLATDSDGVTYSGQTVEATRRKFAHRRRNLQRKGSQSAQRKLKKISGRQARYQRDTNHILSKTVVQKAQATGRGIALVDLAGIRDRATTRRRQRAQQANWSFFDLRAKIEYKAQRAGVPVFLVDPRNTSRTCPKCGCIDKANRRSQSNFSCVSCGYADAADHNAAVNTRT

SEQ ID NO: 39157 - protein, 183 aa, Flavonifractor sp.
MGIKSFAVTSDGVEYPNHKHLAKSEKKLVLLQRQLSRKTKGSNRREKARLQVARLHEHIANQRQDMLHKLSTEIIRQNDVICIEDLAPKNMVRNHRLAKSIADASWGEFRRQLEYKAAWYGKQVVTVERFYPSSQLCSACGAQWAGTKDLSVRKWACSACGAVHDRDINAAKNILQEGLRLLA

SEQ ID NO: 39158 - protein, 399 aa, unknown
  TnpB Polypeptide
MSATTTLRRVYRFRLEPTSSQEEGFWRCAGARRFVWNWALRQKQDHYAATGTGLPEKELSARLTALKSEPDTAWLKEIDSQLVQQVLADLKKAFTSFFEKRARFPRFKSRKRDTARFRIPQRVTLTDGHLIVPKIGRVKVRQSREVEGTTKSATFKRDACGHWFISLVADVEMPAVVLPMPTPERTVGVDLGLKDAAVTSDGERVAAPRFYRAAQRTLRRAQRSLSRKVKGSANRAKARQQVARVHQKIANKRNDFCHKLTTTLVKNHDAVCIEDVSIKGLARTKLAKSLLDASMGTIRRQVTYKGQWHRRHVVAVDRFYPSSQLCHECGRKNDALTLSDRVWVCQGCGEMVDRDYNAALNIKDEGLRVLRVAAGHADTENACGECVGRPMGAALGIPA

SEQ ID NO: 39159 - protein, 411 aa, unknown
  TnpB Polypeptide
MERTIVVQLNPTPEQAYTLKATLEQHTACFNAVTQEGFTTACSNGVELHKRTYYPLRAQYPDLPAQLVCAARVKATEAVKSALTWKTRKEQAYPKKVEEARKQGKPIPAFKPVRCPCSKLAAIRYDQRSYWVKWDTMICSLATVDGRVELPFKVPAHLVQYVGHKACSADLCQRKGRYTLHIVVSIPEPAIGASGEVIGVDLGLNRPAVTSARQFLGEKRWKEQERRTFRLKRKLQAKGSRSAKRHLKKLSGKQFRRHRDHDHVLSKRIVQNTPEGATVVLENLKNIRETSNMGRGKKDSQKRDYKRRLHSWSFAQLYSFIEYKSQARGIRVVKIDPRHTSQTCSKCGHQARNNRRSQSVFHCRSCGYQLNADLNASVNIREKYSASLAQDGTPVLSGSAVKGPIVSDLRV

SEQ ID NO: 39160 - protein, 425 aa, Hyellaceae sp.
MKLIHILIVEDELILAKNLARKLKRCGYQIVGIVDSGIKAIAKVAETQPDLILMDIVLKGDLNGIATSQKIQADRQIPIIYLSSYSDRNTLKQARETHPQGYILKPYNIEDVKATIESTLHHHNLFESNLKQISRKAKLATYKVKQIAHQNFYLPSLSDRDRQLKRESYQHRLPQLSSQDDPTVQPLPPTDKKVGIDVGISSLLTTSNGEKIANPKHFNRLYQKLKVAQKELSRKTKGSSNRHKARLAVAKIHAKIKDARTDFLHKLTTKLVQENSVIAIEDLAIRNMVRNHKLARSISDAAWGEMFRQLEYKCEWYGRKLVKIDRFFPSSKRCNHCGFVSSRFGKEDSFPKADGMDKLPLDIRTWDCPSCDTKDIDRDINAGKNILAAGLAVIVCGADVRPNNHSVKGQLRKTSNRRKKQKPKS

SEQ ID NO: 39161 - protein, 483 aa, unknown
  TnpB Polypeptide
MQTLTRTFQTRLRLTSEQDAVLSAFCAAQNKVIYTLLNQLQKPKNSSVTLKRDYLPRFQINARHFNSARVVAAGMLSSVAELNEFYIKELQIKIDAVSRQIKNLQDPKVPKKLTVQRINYLIHQKKRKKHRLELKLLKKKNKNHTSVCLGSKDLFHKQFNLEENGYKNHAEWKKEWQQARNNQFTLIGSSDEVCGNSIAQLKQSASHTFQLRLTLPEAIFAQFPAQHKFFSLDNIAFAYGEQEIIQALQNTYVDPARPKVKKQTAMTYRLMRDEKSWRLMVSFAENKAVESRIDRGAVGIDVNIDHLAYTETDRFGNWIDSVRFNFQQDLPQGKNKAQLQELAAKLVHKIKQTGKPLVIEKLDFSKKKAAMLAEPDPKKNKMLSGFSYALILQSLKTACIKQGVEVIEVNPAFTSVIGAINYAQKKGISVHMAAALAIARRGLRFQSAQCVNRRLCLCATAAMSPLICRSGINQSMYGRIGVS

SEQ ID NO: 39162 - protein, 390 aa, Microcoleus sp.
MTQKAFKYRFYPTQSQETLLRRTMGCTRLVYNRALAVRTEAWYNDKKRVGYSDTSAMLTEWKKEEGLDFLNKVSCVPLQQGLRHLQKAFSNFFEGRAQYPNFKKKRNGGSAEFTKSAFKFKDGQVYLAKCFEPLKIRWSRALPSRAIPSSVTVKLSSAGRWTISLLVDIAIDPLPKSPNQVGIDLGITSLIALSTGEKIANPKGFGAKRAQLKKAQKALSRKQKGSKNRYKAWIKVAKVHGKISDARKDFLHKLTTRLVRENQTIAVEDLAVKNMVKNRKLSLSISDASWRELVRQLEYKCEWYDRTLIKIDRWFPSSKRCGPCGHIVEKLPLNIREWDCPQCGTHHDRDINAAQNILAAGLAVKVCGANVRPDRHKSDGSCFEAESSKK

SEQ ID NO: 39163 - protein, 428 aa, Gemmatimonadaceae sp.
MLVLESKLVGHPTQFALIDQAIRAFQFVRNKALRYWIDTKGATKYDLNKQCALLAAEFAWAKKLNSMARQSAAERAWMAISRFFDNCKKAASGKKGYPRFQKDNRSVEYKTTGWKLSDDRKHLSLRDGFGIGSLKLLGSRNLNFYHLKQIKRVRLVRRADGYYAQFCIDIDRTEDLAPTGRTIGLDMGLESFYTDSNGEKVENPRYLRKSDVALRRAQRRMSRKKKGGANRAKARKVLARKHLKVSRQRKDFAIKTARALVWSNDLIALEDLKVRNMLRTHHLAKSISDASWSMFRGWVEYFGKVFGRVVIAVSPQYTSQACSVCHAMVKKSLSTRTHTCQCGCVLDRDHNAALNILAKALKTTGGHPESNAWGEWTATAMEQSSAASSFAEPRIPCLLRTLRYRQVECQRIKNSWVPEIDAQHAHAN

SEQ ID NO: 39164 - protein, 233 aa, unknown
  TnpB Polypeptide
VSKDNCGKYWICTTLPVVYKPVKVANHPEPIGIDVGIKDIAILSNGIKYENRRYKNGIHGEVQIHRRLLDRRLSRRWGWANIKFRDAHKADKTIVPSKSYFRTQQKISRFEQRIMNQRNWANNNITSDIVRQASMIGIESLSIKNMFRNRHLANALSDASMSTILQQIKYKSDWYGVPCHEIARWTPSSKQCSVCGYIKKDLTLSIRTWICPICKTHHDRDVNAAKNILKYAM

SEQ ID NO: 39165 - protein, 486 aa, unknown
  TnpB Polypeptide
MTRTLKLPYEPTEGLAQVLADQRRRQGRLIRSAYRLLASGLAQRDLYQALRSHPVGKGLHTWLVLSGIKKAQALYARFPSGRIVFGGRRAFLERAQGRMSREEWRSARLMPLYIEGHAKSYGAQGGNHLITLDIASERVIYHGPDSRDFTIKLRLSRKSRDYRRRLAQLQARCEALRDVPFTVSIDGTEIALTWAEPAVPSACGISGRVLGLDLNPARLGWAVVEKGPTGPGSCRCVSWGVFEYPDFSRRLGFASDDPRSVAHTRKRRFELAILAKKVALLARHHRVSAAVTEALRFWPKDHGKGRRFNRLINQVWFRRGLLEPLTRRLASAGVARVEVNPAYSSKMGNHLWADALRVPDPACAAVELARRALWPLRFPAPQRDAAQLPKPNARRQRKDGARARPRKGPALGGWQGVWSQLQPKAADARRRSRADLRPLLPAGNPRLAPLVNPRSRVLRYEPREGASLPFGRDLYALCMGVRSIAD

SEQ ID NO: 39166 - protein, 486 aa, unknown; identical to SEQ ID NO: 39165
  TnpB Polypeptide

SEQ ID NO: 39167 - protein, 394 aa, unknown
  TnpB Polypeptide
MIINKSFKFRVYPTREQKKELVRQFDASRFVYNYFLRQRIDFYVAHRGEKKQSLNYNDTSALLTQLKKQPEYNWLRDTNAQSLQQSLRNLDIAYNNFFNKRTEFPRFKSKRAKQSFHVPQSFSVNVENEHLIIPKITPLKIVLHRHIEGKMKGVTISRSPSGNYFASILCEVEINPSPKSLGHTIGLDLGLKHFAISSDGAKIDSPRYFRVSERRLSRFQRNLSRKKNGSRGQEKARLKVARQHEKIVNQRIDFLHKLSRRLVDESQAIYVEDLNVKGMIKNRALAKSIGDSGWGEFVRWLEYKGRWNGCYIGKIDRFFPSSKRCHKCGYIYQDLRLSEREWTCPECGNTVDRDENAAQNILIFGEERRAGMARTHTRGKIRRRIADPRSRMIL

SEQ ID NO: 39168 - protein, 394 aa, Mycobacterium sp.
MSRFRLLPTTEQEEVLLAHCGHARFVWNLAVEQQQHWQPGRKAPGYVEQAAQLTEARAEYGWLRAGSQTVQQQALRDFNQAMQNFFCGTHRRPTWRKANLHEGFRQVAVKPRHIERLNRHVGRVWVPKVGWVRFRLSRPLGAGVKSYRVARDRSGRWHIAFAHIPDPISGPHDRSVVGIDRGVAVSAALSTGELLHAPSLTRGEAKRLRVLQQRLARAKRGSHRRARTRLAIAKRRAREVDRRKDWVEKTTTDIARRFDTIRLEALDVRAMARTARGTVEEPGAGVAQKRGLNRAIHRSGWGLFAARLQTKAYGRVEQIPAAYTSQRCSVCGHVAPGNRKSQAVFECEACTAGRCNADVNAARNIAAGRAVTARGDLATRRSANREPQLSAPAA

SEQ ID NO: 39169 - protein, 264 aa, Cellulosimicrobium sp.
MDADRARPVDVRHVRIPAVGMVRALEDMSWLTDRIADGRARVLGSRVEARAGRWWISFQVDVDRADIDARRVAPVHGPVVGIDLGITTFATIAADDGTVTKVANPRHLGRRLHRLRRADKALARAQPGSKNRAKAARRVAEVHLGVSNARADFLHQLTTSLTRCNSTIVVEDLSVAGMIRNRSLARHIVDAGWSEFRRQLTYKAAWYGARLVVADRWYPSTRTCTTCGDINHDLRLADRTWTCHCGAVHDRDGTAAINLLRLAV

SEQ ID NO: 39170 - protein, 403 aa, Tolypothrix sp.
MLVFEAKLEGTNEQYQSLDEAIRTARFVRNACLRYWMDNRNIGRYELSAYCAVLAADENFPWAAKLNSMARQASAERAWSAIARFFDNCKKSKPGKKGYPRFKKEQTHGSVEYKTSGWKLSDDRRYITFNDGFKAGTFKLWGTRDLHFYQLKQFKRVRVVRRADGYYAQFCIDQERIEKREPTGKTIGLDVGLSQFLTDSDGQTVENPRHLRKSEKSLKRLQRRLSKTKKGSKNGVKARNRLSRKHLKVSRQRQDFAVKTARCVVQSADLVAYEDLKVRNMVKNRHLAKSISDAAWTQFRQWVEYFGKVFGVVTVAVPPHGTSQNCSDCGEVVKKSLSTRTHICPHCGHIQERDHNAARNILEIGLRTVGHTGTLIASGDIDLCLGEVTPPSKPSRRKRKSKE

SEQ ID NO: 39171 - protein, 398 aa, unknown
  TnpB Polypeptide
MASAKVPQSAGAVGWSKYKGRSGRQSVGFTTGAIGILDRHHIQLPVVGVLRVKEPTDKLRLKLVAGDARILRATLTTEGGKTYASFGVVCKQARAISPSGVCGHDVGISALITSSEGQFTENPHAEAQARKKITRYQRRMDRQHRAASPKCFNSDGTHIKGACYWKDYSKRSHENQAKLQKAHVRAAHIRKDAIHKASFQAATSYQVNVIEDLHVQAMGKKGHGKRGFNRAQHDAALAEFARQMGYKHLWYGSLLWLAAWWYPSSKTCSACRTKKAKLSRSTRVFHCEHCGLVIDRDLNAAKNLAALAELACVCLMAQFLTGQPVNWSKLPVRPYGWEGDQGTRSSRGCARAGGPKANGGPSKTGRPEVATSGPGGSGFDREAAEPPALIGARQSEVA

SEQ ID NO: 39172 - protein, 395 aa, unknown
  TnpB Polypeptide
MRLIRTIKIRLNIPASQLQPTIDAYTNSYNQVCKTGFQKTTNGVDLHKLTYEEARKSLPSQLAISARMKATETLRSVKVLKSKKCPQSKQCSIRLDANSYNVWMDKRIISILTIDGRMKLKFDVPEYFKQYLTWKRTSADLFIRKGKVFLNICFEKEMEDIAPNGKLIGIDRGIKRPAVSSDNCFFDGKRLWHIKRKYQELRSQLQSKGHNAQRHLQKVKQKENRFVRDSNHCISKQIVSRLQSGDTIVLEKLTGIRGGARKLTKEQREQGKKTLRKAQRKQVNQWSFFQLEKFLTYKAAAKGVSVVYVDARYTSQRCSKCGHIKKSNRKNQSIFKCRLCGFNHNADLNAAKNICLKYLDATGYPSTAVVNQPNDNINAPSMKCSKLRPFRVVGY

SEQ ID NO: 39173 - protein, 141 aa, unknown
  TnpB Polypeptide
MVNTYQMIVVGDVSSLKLVKTRMAKAVLDSGWGMLRTQLQYKGESAGRCVRVVSERNTSRTCSACGALTGPAGVNGLRVRHWVCGECGCAHDRDVNAAKNILAAGRCSPSMCGNEPSPRHAPPSRTPRPRKAGKARDGAAA

SEQ ID NO: 39174 - protein, 375 aa, unknown
  TnpB Polypeptide
MSEIIYKAYRYRLYPNREVQSIFNQWFGCCRKVFNVTLDESIKQYEAGNKKFVNCSSLFSMITKLKADGEHDYLKQVPIHTLQNSLANLLEAYKRFFKGLGGYPKFKSKHESKQSFTVPCSPNIVKNCRFDNNRVWIPNLKKLIKFKQHRKIEGVVKSYTITREATGKWYISFLCQTIAPQKIERDGVIGLDFGVIDFFTDSNGNKVPARKFLRSMESKLKKMQRALSKKVRGSNNYKKLKQKIARLYDYISNCRKDVNQKLSTILVNENQVISIEDLAIGKMSRNHKLAKSLLDEGWYQFTNMLDYKMKWYGGSLVKIDRFYPSSKTCSACGCKVSKMPLNIREWVCPDCGCVHDRDINAAQNILTEGLRLLSL

SEQ ID NO: 39175 - protein, 395 aa, unknown
  TnpB Polypeptide
MKQAILLQTLATNSKNNRLKKFINTAINEYNRLLSERRDCNTFVQFHHKTLLGSKKNTNFNVQVRCSLIRDAWKKQTNKVNGLTVKFNIPRNCKTFNTKSNFFVDLGLYPRNRIAIPIKQNRNYQRFQNLIKDGWACKTFGLTKALQIVAFLSREKKIKQRRNIMGIDINAKHFAISIISPKGKVLYQTYLGKHIWIKRKKIIERRVLLQSLNAKKKLKRMKHKERDFVKTNLGQIIREIINLAIKYDADVTIEKLKKFKPKFRRFNKTVMLIPFFKFKQILEQRCFDNDICLNIVDSWHTSKWCSHCGALANGHNANYSLFKCKCGQVVNSDRKASLAIAIKSLLERNSHILEPDISIQISNRRVDVTQLFRPNVVDDLSSVNYNYQPMESSRQ

SEQ ID NO: 39176 - protein, 295 aa, Okeania sp.
MFAAHMKHKSMKSIRIKLKLNNKQKTLMAQHAGYSRFCYNWGLNLWSAAYRDGYKPNVSYGMLRKRKLREVFTNHTKPLYPWMKNLSSKVYQYAFRNLGEAFKRFFKGLGKYPKFKKKARADSFPTECYANTIDNSGKPIELNGWCHKLPFIGVVKTYEPIEATTKKITISRQAGDWYLSCSYEFTPTPTLEKTEIVGVDLGVKTLATLSDGKVFESVKSYQRFEAKLSRMQYLNRHKEVGSANWKKAQLKIVKLHRKIANIRHNALHKLTTYASLEPRHSSHRRFECSRNVSQP

SEQ ID NO: 39177 - protein, 276 aa, unknown
  TnpB Polypeptide
MYRDFSHKEITLKVWTGEQWKWMRCRLYGREFPAEAELMSPSVTFEKKYLMLHVPVKEFTADTATVKQRIQEGRKICAIQFTNGDVFAVGTVCDGTGKETDVKFWGGGKEYTHRCDQIRKKIEKARKSLGGEKQPGENRKYWMHLKHLSEHYAHEISSQIIGFCLEKQVSLIVLPKYKKEYTDYVMIGSGNWSTMHLSSGIRSNLPYKAWKNGILVIETYAKGISETCSVCGAPVKTVNRKTDEYTCENGHRGSRSLNSARNLSHKCILQFGKQVV

SEQ ID NO: 39178 - protein, 482 aa, unknown
  TnpB Polypeptide
LLVDVLPDDARRGTASGCGEVGRGPVVPVRDVPVHLAGELRSQAPARPALEAVHRRGDGVTKTNWTWSAPAAAVLRRDCHRPVGCCGVVQVRYRYRIYPGPGQQQALARVFGCARVVYNDCVRLRDACHAAGEKISDTEVQRRVITLAKLTPERSWLGEVASVALVRACQDARRAYRNWFDSLNGRRKGPTIRHPKPRRKHRRQSIRLTRNGFALHGQRLFVAKVGDIRVEWSRVLPSVPSSVTVIKEADGRYYASFVVGRAATPLPACGREVGIDLGLASLAVTSGGEVIPNPRLLRTAQRRLKKAQRVLSRRQKGSASRARARHRVAVLHRTVRETRLDHAHKTALRLVRDNQAVYAEDLAVSGLMRTKLARSVADAGWSQLVRCIEEKAAQYGRTFARIGRFEPTSQVCSACGVKDGPKPLSVRIWTCAACGTVHDRDVNAARNILAAGRADKSNACEAGARPHHVAAGAEAGTHRSAA

SEQ ID NO: 39179 - protein, 283 aa, Streptomyces sp.
VTGVKLRYQFRVYPSASQQRELAKAFGCARVVWNDAVRIRQDAHRQGQRVPSIAEPAKTVITEAKKTPERAWLGEVSAVVLQSSLRDLQASYSNFFASRKGSRRGTKMGPPRLKRKSGRQAVRFTKAARFSVTADRRLRLPKIGGVEVRWSRELPSDPSSVTVVRDSAGRFFASFVVEAEDKTLPRLDWEGTDTGIDLGLSCYAILRGRKIKTPKFFRRAERRLKRAQRELSRAQKGSNNRRKAKVAVAKVHARVADQRRDFIQQETTRIVRESQAVYSEDLN

SEQ ID NO: 39180 - protein, 397 aa, unknown
  TnpB Polypeptide
MAVKYIFFWSVTNEDIKRYLTAERDAMKTGYSIKTWKMRLFCPEKQMIETTEALYREAVAFYYELLKESEELWAENLLTIQGYLEKLTVPGRDGREPKYIPPGGKLPVYFRRSAMNKAAMAVKTAASAESFPEKIDANITFFKGMYRDLTDTSVVLKLWNGKKWIWVLCGLTGRPFPKEAAILSPTLVHEEKWLMFHVPVKQENSDARTAKERMQEGARVCSVRFTNTDSFAVCTVLDEESRQLAVKNCRGGNAYRHHCKALLKKVEASRAFTDKDNVSQPNRKYYMHLKHLNEHYAHQVSKEIMDFCKENHTWILVLPEYDEDFSRISMYRSGNYSPLHLSIRIRNYLKYKAWAEGILVLELRADGTEKQCSICGATGKNRAAYSSARTAIRSTAS

SEQ ID NO: 39181 - protein, 419 aa, unknown
  TnpB Polypeptide
MKLTRAIKVKCVVSKRNMIVLREILSMYKSMLKYTLNYALENNIKSFTKIKAKMYRKLRSLYPELPSHYAYTVCQDVSTRVKSFLKLKRKGLTYTDKPEIKRVTLWLDDHLWKLNGYTEVKIATHKGWIILAIRPHKLYWKYMNRPEWKLCNEAKLKINSNGVELLLTFRKEKYKPYEPKAVIPVDINENNITFEVDNEVYMVKTNFKKIIVGYHDHRKRIQEKYQQKLPKLFRKLVRVLREKKRKKNIRYQVVNLIVKTAKEIKAVVVLENLPKKTPNNMISRIKNKMLKHRVYQAGFRGLLNTIIDKCMEYDVPYALVNPRKTSSTCPICNSTLMRGIAPRHMVCPKCGYQAGRDIIAVFNLEKRYLQMTAPMPLGGIPYEVGVKLMNPTQRVKPLPTIHSDIKTTQNEWVEVNGYI

SEQ ID NO: 39182 - protein, 376 aa, unknown
  TnpB Polypeptide
MNKAIKYRLYPTTEQCVMFAKTFGCCRKIYNLLLSDKIRSYQESGKFVSVTPAMYKKDYPYLKEVDSLALANVQLNLHKAFKACFDKTRKKQNGFPKFKSAKHSRKAYTTNNQHGTVAVMEHAIKLPKIGRVKAVIHRVPDTDWILKSVTISQEPDGKYYASVLFEYEKPVTKVPVSDSVIGLDYASDGLYVDDQGNTGSHHKYYRESHAKLAKAQRRLSGMQGSKKNEVKSCNYIKQLRKVNKIHRHIRNQRLDHLHKLSTETANRYDIVCAESLNMRAMANKGFGNGKTTMDNGYGLFLNMLEYKLADRGKYLVRVDKWYPSSQICHCCGIRHPEMKDLRIRTMRCSCGLVMSRDQNAAINIRQEGLRMLMKAA

SEQ ID NO: 39183 - protein, 418 aa, unknown
  TnpB Polypeptide
MSVPLVRKVVRQDLEPTIGEIALMECFRHMTNHCIRIGLEFERENGVTPSMRKLSRLSYTHLKSYQCYAQYRLCAISRAAGILSSRKKSIKRGFATRSPFVSKRMIVSCYGFDIQDGHLVIHLGSRTSESIALNSHTLEVISNPLLRVCSFTLTEKSLCLCISKEVPKPNLSEVTGPIGVDRNLRNVTVGNEEAVTYYDVSKVSRIAENTRRIIASFKRDDRRVRQRLISKYGNRRQERIERILHLVSRDVVERAKAKRQVIVFEEIKGIRKLYRKGNLQVKSYRAQMNSWPFYEVKRQIEYKAAWEGVPTITLSRRETEGTTMDCPQCGERLQVPVRRDRRHYRQLWCERCERWRDRDLIAVLNISRRGWLRFDHSSKEGGAREAMRGNPGHEGEPVILRVDASKSRDVFTRDRTLC

SEQ ID NO: 39184 - protein, 394 aa, Chlorogloeopsis sp.
MLVYEFKLKGKQQQFNLIDEAIRTALFIRNSCVRYWLDNKQVGKYDLSSYCKILAKNFEWASKLNSMARQASADRAWSAISRFYSNYKKKVPGKKGFPKFKKRGHSVEYKTTGWKLSEDRKYLTLTDDFEIGKLKLIGTYDLHFYQIKDIKRIRLVKRADGYYAQFCIAVDRKIKEKPTKKAVGLDVGLTHFYTDSDGNKVDNPKFLCKSEKSLKKLQKRVSKKFKKGQPQSNNYKKAKDKLARKHLKVSRQRKDFAVKLARCVIQSADLIAYEDLQVRNMVRNHKLAKSISDAAWYQFRCWLEYFGNIYGKITIAVAPQYTSIHCSSCGRQVKKSLSTRTHKCICGAQLCRDENAALNILAKGLSTVGHIGTNAWGQNDLCLDLETSVNKSAG

SEQ ID NO: 39185 - protein, 381 aa, unknown
  TnpB Polypeptide
MNGIKTYKFKLYRAKRNRFLNQQIDVAGIIWNHSVALHRRYYHLTGKHLNQYALMAHIAKLKQRPSYAFWNLVGSQAIQDIVQRIERSYTLFFRNLKAGVKTAPPGFRKVKKYSSFTLKQAGWKLLDGNRVKIQGRVYKFSRSRDIPAEVKTLTVKRDNLGALWLYFVVEAPENQGNRAMTGNSAGFDFGLKTFLTIDDGSVIESPLYLQQAMSALRLAQQNLARKVKFSHGWQKAKRVVERIHQRIVNKRRDFFFKLAHTLTDQYDYLYFEDLSMKGMQRLWGRKVGDLARSEFMGILRHVANGKGKIVRLIDRFYPSSKTCSVCGNVYQGLQLSERRWACATCGTIHDRDRNAAINIRREGAFSLGLGEVRPECPAFAV

SEQ ID NO: 39186 - protein, 248 aa, Microcystis sp.
  misc_feature (197)..(230): Xaa can be any naturally occurring amino acid
MEKAYSFRFYPTPEQESLLRRTLGCVRLVYNKALHERTQAWYERQERVGYVQTSSMLTDWKKQEELDFLNEVSCVPLQQGLRHLQTAFTNFFTGRTKYPNFKKKHQGGSAEFTKSAFKFKDKQIYLAKCTEPLPIRWSRQIPESCEPSTVTVRLHPSGRWHISIRFDDPTIKPLPVTDKAIRIDLGISSLVITSDGXXXXXXXXXXXXXXXXXXXXXXXXXXXXXXXXXXRMSTARPSASSRSSWTSG

SEQ ID NO: 39187 - protein, 206 aa, Fischerella sp.
MEQVLTLVCKLNPSQKQAEEIELVLAAFASACNYANQKVKPQITSKMTIQNLVYNEIRALFGLSANLAVRACARVGANRKTAKLKNKPVKAFKPTSADYDARIFSFREKDWTVSLTLMNGREHIKIDAGNYQRGKLKGKKPTSAQLCKHRDGNYYIHIQIKDEAPEPIKSNNVIGVDFGRRDIAVTSNGDKWMESKSTMLEINFLG

SEQ ID NO: 39188 - protein, 466 aa, unknown
  TnpB Polypeptide
MYSVSRTVVKSKDHPELFHFFGEMGVLATNLYNAGLFRVRQNFTMHGKESLQPLEEEVRQEILRTVNAKKLGMPKRCMPYLFLEKLMRITWNPDFFAGLPMQSAQHIIRQVCTDFKSWMAACRQYKKVPSLFLGRPKMPHYKKKKTASSFIFTNQDCRVMEKDGQSLLKFPKIKGQYLPIGPVHGRLKQVEVKPYYRDFLVICVFEAEDVSSLHTGSGASCGIDLGIENIAALVSSNGHCVLYKGGALKSANQWYNKQMSYYRSIAMKGHTPQEAAKLGLLDTRTMQGLAKKRAQFFHDTMHKIASDIVAFCLNSGIATVVIGKNKNWKQRANIGHVNNQNFVQIPLETLRRMITSKAEAVGIMVVVQEESYTSKASLVDGDNIPVYGETMEDKPVFSGRRTKRGLYRTQNGRLINADLNGAGNILRKYNADAFEKWEDFQFLDRIIVRKYPELNKRIPVKGIEAA

SEQ ID NO: 39189 - protein, 320 aa, unknown
  TnpB Polypeptide
MVNYTLWSNIRGLSASKKNGRKIGHVRFKGSGWYKTMNYNQSGFKLDQDHGRLHLSKIGDIKIKMHRKVHGCIKAILIKREGRQWFAIVQADQEPEPLPETGKSVGLDVGLKSFVVDTDSNSVENPRFAEKTATKVKNIQRRLSRAEIGSNNRKKLRDKLDKVHERINNQRSDFLHKLSRSYVNNCDIICVEDLDVKGLKENGYNKGTHRNIHDASWSKFIFMLSYKAESAGRRLIKVDPRNTTQRCSSCGSIVKKELSDRIHECPYCGFSCDRDYNASRNILIAGMEQPAEPIESKPLHRVSVMQVLAMKWEALPFRVG

SEQ ID NO: 39190 - protein, 698 aa, unknown
  TnpB Polypeptide
MVSTEIFLVRSIPVSNFSSRLQGVCGCMSPCESINAFSRSAPYSSDNGQKKIKSIMSGHQGELDFTNYPQRSAHKKTACQLRMQEFLHTNSEEILSDKGIFWLNAAPTMRLSQTLDPGSTGNAPVSSPFWKEHSEELSRRLSLQVVTDYAGLPLSSLNTCSRTVDASSQSSTLMTIHQSKSSLTTLCPSFRSSVAGVTVSASTQKSHLRMVKIKLNPTQWQKKVLHLFNSQCRFTYNQALVARRDGDAKLNFITLRNMLVTHKTTERENKEPNASKKSRKPLKIDGEAVKPSVNPFVEDRDWLLYTPVSLRQGAVKQYVAAEKAAHENRRQGNIETFAMQFRKKRLERSWTLAVDKRQISFDGKRLVILSSSLCSENGESGGKNSKRYKPDLEEREKYYRRPKKQPLKELPSETSIRFFEKPPFKGIPPHDCSIHYDQGQFYLQVPVDKTFKARPLAKCNQPVIGLDPGGRDFLVGFDTTGTAKVLGRSQVDKLVAISKRQSVIQSLLATGDKRTRKLLLLQRRKAYHQYYNIKNDFHFQLATFLAKKHSTVFLPKLDHERIKGMLTPKAVDRIQISGHGLFMDRLKQKCFEHGTWLPEVDERYTTKCCSCCGKLHWGIGSSKVFACPFCPNIMDRDTNAAKNILLKNIDYCEIPPVEVALVEGATENACEATGEHAPNSRPPPVVDMMLYDKSRSKS

SEQ ID NO: 39191 - protein, 247 aa, unknown
  TnpB Polypeptide
VSRGASGKWYVVFSCEVEDKPISGRLAAVGVDLGLNNLVTLSDGTVFMAPRKCRGAEERLGWAQRSLSRKMRGSGNREKARLKVARLHERVAYQRRDYAYKTARSIVNSYERIYLEDLKIQSMQGNRCLSKSIADAGWGLLRNALTYMARLSEGVMAFVDPRGTNQVCSGCGAVVGKDLSVRIHCCPWCGLTVDRDVNAARNVLKRGLEIGLGRAEYRPDGEGTATQLCEAGQVASMKQEAHDFSHG

SEQ ID NO: 39192 - protein, 342 aa, unknown
  TnpB Polypeptide
MSKLTYKIKHNRDFSNELSIAKKIAEFAIKTRTLTSKDVKCFGLKSVISNQILRKYSKNKRCKHIKSVKLTIPGQGIKYNNGNIYISSLKLNLKFDKKIEKINQIELDNIYAYVSCEVLDASPIKEIGYIGIDRNATGHIAVCAIDHKILKMGKRASHIRKKCQNIRKGAQKLKKYNFIKKLKNKESRIIKDINHKISRKIINIAKEKNYAIKLEKLNKNNKNQGRNFNNIKSNWPFYQLETFIKYKAKLLGVKVFYVDPHYTSQTCSRCGLIKKENRNKKNFLCGCGHNDHADANAAFNIAKASMCVRSIKDRDLIESNSDIAQGAMVFNATNPRTSIALA

SEQ ID NO: 39193 - protein, 425 aa, Actinoplanes sp.
MVLFVQLRYNFRVYPTPGQQIELAKAFGCARVVFNDGLHLRQTAREAGEKYISDAEPSRRLITEAKATEERAWLGEVSAAVLQQALADLNTAYRNFFASISGKRKGRKVAPPRYRSRKDNRQAIRFTRNSRFKVLDNGRLRLPKIGDVEVCWSRPLPSDPSSITVVKDAAGRYFASFVVTTAEDRRLPPVGSQVGIDLGLTHFAVLSDGTKVAAPKFLRRAARKLKRLQQALSRKQRGSNNRKKAVVKVARAHARVADSRRDWQHKLSTRIIRENQAVYVEDLCVAGLGRTRLAKSVHDAGWAGFIGMLEYKAARYGRTFGRLDRFFPSTRMCSQCGRINEKMAIKVRSWDCPCGASHDRDVNAALNVLAAGQADNSNGCGAQVRPGPVPARRGEAVTHPDVACSTRGVEGISVIQGGEDVNLQP

SEQ ID NO: 39194 - protein, 347 aa, unknown
  TnpB Polypeptide
MDDCLNKYMKPDTDYMKEALASDRRVKYCRIVRRTLNGKKRWFVQLVVEGVPPVRKVYAPKCEVVGIDPGPSRIAYFHEHHAAIVEVAPNVDLQESKIRLLQRRIDRSKRANNPDNFNPDGTVIKGSLKWITSNRGRKLLAKLAEHHRRLAATRKRDHGKLVNDLLQIGGTIKIEKNSYRSYQRNFGRSTNRTGMGEFVAHLKRKAESAGCEVIELDAYKLKMSQYDPATDSYRKKPLKERWHRWGNSDTLVQRDVMSAFLACHATKKGHDRALLLQKWTTAEALLRGSGLCRQQPRSDQGEPQGSSRLTKPNCASKEERERGLPQTLCSIGDVQAALPPEKALRVS

SEQ ID NO: 39195 - protein, 727 aa, unknown
  TnpB Polypeptide
LPQCLLYIIVVVSEIPLARHIDRIAICLVMGHSASVRTHGHEIIPHFQQEIVETDMQSPFVGLGISPFHGTAVFQQYHIVFLLIHVRQCRLVDIEERADLPVMYALVLFLHLLVQFQIGIPADDVLRVVAMDVLVPVVEQERDSLLVLAYRCATCLGIAVKGEQVGLAPVPVRMQCHEQPVERADGDAARIEFRKALACGVEPVSSGIRRFVQSRGKQLYLSLLGILFYLRFLFHTPIFLSVTGLLDASRPHDGLLLSVVVILRSHLAETVALDEHGIGQRVQRQGTGTVGVRHRGIKLHRAGHVVYRGNKGIALQYRIHNTWIERLIGHMCYAASKLWNVCNYERQHYKETGMEQYPDWYYQKKAHKEDLWYKQLPSQTAQEVCKLLDKAWKSFYALKRSGGIETPRPPRFKQESIPITYMQMGIVHERDTDRVRLSLPKALKKYMEETYQIHENFLYLENKIFRGMDQIKQLRIYPPEKGECKVIVVYEISEREELSQNGHYLSVDLGLHNLMTCYDSGNGNTFILGRRYLALERYFHKEIARVQAQWYGQQSVKEIKHPVTSKHIRRLYQKKQNSVTDYLHKITRYFAKYCREQGITCVVAGDIRNIRKGKDLGHRTNQKFHNLPYNRLYSMMEYKLKMYGIRFVRQEESYTSQCSPLSPEVEKRYAQPCNRKQRGLYRDRNRKYNADAVGAYNILRKYLSVSGEKKELSVTGLKTPEIIKVAV

SEQ ID NO: 39196 - protein, 483 aa, unknown
  TnpB Polypeptide
VTGAVSRYLPISKARRKKKRESPEYRDHSGNVVFWRERWKNMRTVSSYGVEIRKQNIPVRQTMEIYRQAVGYLTEIYAQVWEELRKIPETKKRFNIAEHMVHMTKKNTARFDFDLRFPKMPSYLRRSAIQHALGSVSSYETRLGQWKETGVLSGRPKLTCRNHAMPVFYRDVMYREGAEGTDEAYLKLYDGHDWKWFRVYLKCTDMEYLRRNWKGKKASAPALEKRHRRYFLRFSYTEEVTLTKTPVKEQIICSVDLGINTDAVCTIMRSDGTVLGRRFIDHPSEKDRMYRTLGRIRRSQREHGSAQTQGRWAYTKRLNTELGKKIAGAIVRYAEENHADVIVFEYLEMQGKISGKKKQKLHLWRKRDIQKCCEHQAHRKGMRVSRICAWNTSRLAYDGSGAVTRDWENHSLCTFQTGKRYNCDLSASYNIGARYFIRELLKPLPATERSLLEAKVPPVKRRTSCVYADLRELHLQMEILKAA

SEQ ID NO: 39197 - protein, 491 aa, unknown
  TnpB Polypeptide
LSLDGCFRMRTFKYRLYPTRRQQDALRWILARCCELYNAALQERRDAYEMCVRRHPGYYDKETRRKQTRAYAITKYAQSRELTEIKHEIRPEYQEIGDHVLRNVLQRIDLAFQAFFRRVAEREKHGGTGKVGYPRFKSSRRYDSFATDSACKIRDGRLEVKGVGWVKVKLHRPLSGEIKTWTVKREGEHWYVCIVCDQAAQETPLPFNGEAVGIDLGLLHFATLSTGETIENPRYFRQAEKKLALHQQALARKKRKDKRTGCKGHRRERAVKLVVAAHRKIRNQRRDFQHKASRQLVNRYGAIVFEELQPANLSRRPKAKQAEDGHYLPNGASAKSGLNKSILDAGWGTFVQMCAYKAEGAGRALVQVDPRNTSQICSGCGEIAHKKDLSERWHACACGCSLDRDHNAAINIVRRGLASLNHADLNYPAFREAESGAFLKQDASQHTDGGGPPLRTRKGACTREGACARKGALKSSSSSHAASQLALWPGL

SEQ ID NO: 39198 - protein, 284 aa, Piscibacillus sp.
MIYPKKGYHLKPIVKKHICQWQGQTLKVYDDAISVTFLTADGWGRAQVIKANLNSRGDYIREQLRRLQAMLVTIKKINNKWIAMIVLKDNSTLEPLKVENIAGIDLGIKCPIVVKTSNGKIKFIGNGRYLAFRRRWFRSKRKELINQNKSYLVKKIANKEERWMREQDHQLSRELVNYLKENDVRLLKMEKLTGIRDIKTDKKNTLRLHQWSFYRLSQYIQYKCEDAGIQVELVNPKYTSQSCPKCKRKNKTNTRTYRCIQCGYVSHRDIIGATNVLSATTITK

SEQ ID NO: 39199 - protein, 382 aa, Enterococcaceae sp.
MKLKGVKIKLKLNESQKNQIDINISLRRFVKNQLLNMQQTRYRNGGNYTSKFGMIYCLKALKIEFPFLRQAESTCLEYACADLDQSYQRFFKNQNDSPKFESRKRPHNSYKSKCINNNIQVVDNHAIKLPKLGVVKAYGLNRINGRIKSVVVHKEPAGIYTATIQVEHEPVELPKTNKQVGLDLGLADLVIQSDGFKLKNKKFERSLAKKRHVWERKLARRRLQAKKKIEVAQKSGIELEWSSFKNVEKARKMVAKINRKIANQREDYLQKYTTQLVKKFDLIVMEDLKTKNLMKNKRLSRSIADSSWAKIKTMLQYKCDWYGKELILVAPQYTSQNCSSCGKNTGKKPLHIREFTCPHCGVHHDRDINAGINILNKALAQR

SEQ ID NO: 39200 - protein, 468 aa, unknown
  TnpB Polypeptide
MKSVNLGYKYRLYPKKEQERILDHQMFVYNQAYNICLNLWQKEGERNKKLEKESRKFRKSVSYDGVVKRALKLRKISFSTVVTQQARINLQKAVKKAFSKEVVAERQKAIAKAQTPKDKAKAAKLGFPKFHSSKDVKQSFVWNNQAVNINDKNMRFKLFRILKQNIELRCHRELPVGYKLASVTISKDATGYYASFNIEFQKEIGVVVLSNNIDISKSLGVDMNAYNFATSIKTDILFESINNITSVQSGHLVDNGSSNRKSLRDSKIVKMLERKQSRRALKAKNTKTKLGKNHKRTQERLNSLQKKITNKKTDLYHKISSILSNSFDMIAVEDLKLKNQMTKSAKGNEITPGRRVKQKSGLNKTILRASFYQFSSMLEYKQSLNDKLFVRVDPKNTSNTCLECGNIDKKNRLKQDKFKCIACGYETNPDIQAALHIEYRGLQSFGLGTSLVDLKHKAFRSETLVSAS

SEQ ID NO: 39201 - protein, 384 aa, unknown
  TnpB Polypeptide
MLKAYKYRIYPNQDQKELLSRIFGQVRFVYNLGLETKISAYTGNKKHLNVFDLNKQITQLKKNECDWLKKSPSQALQMSMSNLDNAYTNFFRGAGFPKFKSKYRKQSFQLPQGVFLSENKKQVWIPKLKFTDIDLHREFKGEIKTVTVTKSITNKYYISILIDNKKELPKKQPIKLNTTVGVDLGIKDFAITSDGKKFENQDFFKSSMNKLRVQQRSLSRKQKGSTHYNQQKLKVSLIHEHIKNQREDYLHKISKYLVDNYDTICIENLGVSNMMKNHKLSRAIGDMGWFKFKSMIDYKCEWYGKNLSVIGRFDPSSKTCSNCGSINKELTLKDREWTCKSCGTEHDRDINAALNIRNFGLRNQPSVTQSEWLHCACGVETTNL

SEQ ID NO: 39202 - protein, 396 aa, unknown
  TnpB Polypeptide
VGKASHRNNFQKISFIEAKFQCHILYKYVKTIAKIKLLTDDDGKKRLLDTMEAFNSACNEIAETCFEQKSASKFRIQKLVYHDIRKKYGLSAQLTIRAIAKTCDAYKINKKTKPTFKKYGSITYDQRILTFKGLPLQKPQVSLTTLEGRKLFNIEIREYFAGRASRIAGQVDLIYKKGEFYLYATCDMPEDTPISPDDCLGVDLGVKNIAVDSSGETFSNDKVEQARVKTLKLRSNLQSKKTKSSKKKLKKISGKEARFRTDVNHCVSKHLVEKAKDTNCSIALEDLTNINKRTTVRKKQRAERLSWAFYQLRQFIAYKATLKGVPVVLIDPRNTSRTCNACGHCEKANRKNQAEFVCKKCGHQDHADLNAAKNIRDLGLHQSAYCRPLSDCSKVA

SEQ ID NO: 39203 - protein, 397 aa, Firmicutes sp.
MNKLVAYKYRLYPNKIQQTLLNKTMGSVRYFWNNQVATFKTYNKETNPKPEFKSSTELRNEMEWMKEISAAAIQQKEIDFKEYKKQLFNKSRKKKIGFPSFKKKNNRQSFRLPNQKFKVIGNKIQLEKIGKVKMVVDRKLPEGKLMSVTVSKNPSGQYFASILIETKVNHKPKTNKEIGIDLGIKTFSTQSDGVEISNPKFLSKNQVKLRRMQQHLSRKQKGSNRRNKCRLKIAKLHQKITNQRDWFLHNYSTKLINDFDRIFIEDLNVAGMMENHCLAGAISDVSWNKFVSMLFYKAELYGKDIVKIDRFFASSKTCVCGFKNNNLKLSDRRWVCPTCGCVNQRDLLAANNILKEGRRSLDDLTNAEVAVTKPVKRLELNDNVFVIKIHNYLCNSK

SEQ ID NO: 39204 - protein, 316 aa, Clostridioides sp.
  misc_feature (261)..(305): Xaa can be any naturally occurring amino acid
MYPNKKQQELINKTFGCCRFVYNKYLAKRIEVYKNAKETFTYKQCSSDLTNLKKELKWLKEPDKFSLQNALRDLDNAYKKFFKEKAGFPKFKSKKINRFSYKTNFTNGNIMYCGQHIKLPKLGMVKIRDKQVPKGRILNATISKEPSGRYYVSLCCTDVDIEAFENTNNHIGLDLGIKEFCISSCGDFIENPKYLKKSLNKLAKLQRELSRKTIGSLNRNKARLKVARLQEHIANQRNDFLQKLSTKLIKENDIICIEDLXXXXXXXXXXXXXXXXXXXXXXXXXXXXXXXXXXXXXXXXXXXXXNTRLIGMVDKL

SEQ ID NO: 39205 - protein, 410 aa, Crocosphaera sp.
MRERAYRFRFYPSPSQENLLRRTMGCVRLVYNKALAVRTEGWYEKQERIGYSQTSSLLTEWKKLEDLEFLNEVSCVPLQQCLRHLQTAFTNFWAKRSKYPNFKKKRNGGSAEFTKSAFKWRDGRLFLAKCKEPLNIVWSRFLPQDCYPSTVTVKLDPSGRWFVSILVKDPSINPLPKTGKQLGIDVGITSLITTSNEEKVANPKQFNRLYKKLRRKQKALSRKTKGSNNRYKACLEVAQVYAQIKDARTDFLHKLTTKLVRDNDLIAIEDLAIKNMVKNHKLAKSISDASWGEFNRQLEYKCEWYGKKLVKIDRYFPSSKRCGNCGHIVDKLPLDIREWECPKCGTNHDRDINASHNILAAGLAVRQRGLGGFPHSLLPNPFGVSVCGASVRPEESKSRKATALKQKPKS

SEQ ID NO: 39206 - protein, 527 aa, unknown
  TnpB Polypeptide
MAKQVVTRTYTASIRNQSRVQDDLDSLGFAASKLWNVGRWTCSRIWDKIDHIPTHNERTHHVPQNHERYDDLHSQSSQRVLQELAEAFNGWYGNRQNGDTKANPPGYRKHGDEHPRSTVTFKQKGFKLDTQYDRVRLSKGSNLKEYWSDFVLCKYQTRPDVDLSTVENVQQVKIVWTGDEWELHFVCKVEIDVDEAPGEKTVGVDLGINNFAALAYEDGHSELYPLNCLKQDDYYFSKLIARCDNSDSEQATRLNQKKSARRTHYFHTLSKHIVQRCVDEEIGTIVVGDLSGIREDEENGESKNWGKHGNLDLHSWAFDRFTGLLEYKAEMEGITFEQVSERDTSKSCSCCGRKHEANRVERGLYVCDECGTVANADVNGAENIRQKVSPSSPNLSVNRSNGWLAQPSTLLFDKGNWCVRTARTGNVVNHNIPTQRCSAVGILALQRGRMSSVRERLPALPPQQGLGTICVRQQHVPPVREGVVRDFVGNRERPARHVIIAADRDVAAANLHHERGVESLNSLAVSV

SEQ ID NO: 39207 - protein, 348 aa, unknown
  TnpB Polypeptide
MARLTYRFRLKDKHDAELRRQARAVNFVWNFCGETQKSALRWRRKWPSAYDLSNLTAGSSKDLGLHAHTIQKTCETFARSRDAKRKPMLRWRGKKSLGWVPFSTKTVRYDGEAFVFRGVRYFAWVSRHLEPGQTFGAGAFSQDARGRWYINVPVEVESLDNAHGDAIGIDLGLKDLATISTGEKIEAPRWYRRQQEQLAVAQRARKKKLVSALHAKIANKRKDHLHKISTRLVQSHGAIFVGNVNAAGLAKTKMAKSVLDAGWTSFRDMLRYKAIRHGVLFEVVNEAFSTQACSCCGAIPASSPKGRADLGMRRWTCSDCGADHDRDVNAARNIAARGLAGLAEGAEA

SEQ ID NO: 39208 - protein, 379 aa, unknown
  TnpB Polypeptide
MLRAIKVRLYPNKTQEQEFNKTLGCYRFVYNHMLSRKQNAYKTDKTNLSLNELSKYFHHELRKNKQYAWLKEQNTQVMGQSIRQMLTAYDNFFKQHKGFPKFKSKKDKQSALFPLNAISKRNTFETRHITLTKQLKKIKFHCSDLYFKRLRKYNDYIRSATLSKTKSGNYFLSILMDIPQTELVKFKKTNKEVGIDLGVKDFVITSDGKKFENKHFFKKDEQKLKKLQRQLSKKKVGSNNRNKQRIKIAKLFERITNKKENYIHYVVNELLGNYEVIYMEDLNVKGMFRSHHLAKAIGEVGFFKFKEILQSKALVNDKQVVLIDKFYPSSKTCSCCGYKNQGLKLSDRYWQCPNCGENHDRDLNAAKNILREGQRISAA

SEQ ID NO: 39209 - protein, 400 aa, unknown
  TnpB Polypeptide
VKKRKKTKTRKTYKFQLREHPKTVRLGNMLDDLAEVHNHFLALEKRYYRIYGKYAGRYRLQPHLTKLLQRTHRQWAWIPRDTLDAVIIRIHITYERFFAGLGGLPKFKRKDRYRSAKFQSAYLLEEGRVRLSFKAWDAPTESLKFNKRWFTFHQHREWERKVCYIQILRDRVGTYWLYVITDASTPDPCSATGESVGIDFGMETYLTFSTGEKKHSPEFLKHALKELRTLNKSLSRKVKGSGNWWRCVRALARLYRHIANQRKDWHYKVATDLCKRFDTIATETLNLDGMKRLWGRKVSDLAFYQFVEILKYKCLKHKREFLQVGQWTPTTKPCSACGYTNEKLSLSDREWTCPDCGSHHDRDVNAAINILRAALGSLCGDSVSRLLRSRCCLRSTSPTL

SEQ ID NO: 39210 - protein, 414 aa, Coleofasciculus sp.
MKTRRVTYRIYPNKAQFDQLHWARKMHCDLYNAAMANRRTQYKRFGHSVNYLEQQNCLPEFKKVWIEYAELGSHTLQATLKRVDFAYKRFFQGLAKYPKFKAKRRYSGWTYPDQAGWKALSNGKNGYLELRDLGLKIQMRGQARTWGTPTTCTIFFRNGKWYASITVQCNPIRQTGTGSIGIDLGCKDAVTLSTGEKIAKPDFIKEGHKKVKVVSKRLRRKRPPNRNKKVKGSRRWKKEQKRISELQGKISRQREDWLHKTTSEIVSGNSLIAGEQLNVKGMTRKAKKGKRKRQKAGLNRSILDVGFSIVGDLLTYKATEAGGFYVESPTKTLKPSQRCAKCWELTPKTLADRVHVCSNPDCNHVEDRDVNAAQVNEIWARGLERASLDVESPSSTDCGSMKQLGAKKRQKRRL

SEQ ID NO: 39211 - protein, 498 aa, Escherichia sp.
  misc_feature (27)..(27): Xaa can be any naturally occurring amino acid
MRPVINTSLTGKWLPGWLSGKTPLKRXFAGACRFVFNRALARQNENHEAGNKYIPYGKMASWLVEWKNATETQWLKDSPSQPLQQSLKDLERAYKNFFRKRAAFPRFKKRGQNDAFRYPQGVKLDQENSRIFLPKLGWMRYRNSRQVTGVVKNVTVSQSCGKWYISIQTESEVSTPVHPSASMIGLDAGVAKLATLSDGTVFGPVNSFQKNQKTLARLQRQLSRKVKFSNNWQKQKRKIQRLHSRIANIRRDYLHKVTTTVSKNHAMIVIEDLKVSNMSKSAAGTVSQPGRNVRAKSGLNRSILDQGWYEMRRQLRRVKFSNNWQKQKRKIQRLHSRIANIRRDYLHKVTTTVSKNHAMIVIEDLKVSNMSKSAAGTVSQPGRNVRAKSGLNRSILDQGWYEMRRQLEYKQLWSGGQVLAVPPAYTSQRCACCGHTAKENRLSQSQFRCQVCGYTANADVNGARNILAAGHAVLACGEMVQSGRPLKQEPTEMIQATA

SEQ ID NO: 39212 - protein, 433 aa, Trichococcus sp.
MSVETVNRGYVYSGTPTSDEAERYFRQCFGADRLMYNLHVAHLYAYLEKNGHTIGEKLPTFKEMGMPTVKEFKQVRVDDDGNKYLYEVDAFASNEAKQHFKKAMNLFNKDAFKGQFKKSALKRQKTLGIEPTFRDLKGMPKFHSRKNSKLSYTTFNQSDNIFIDENNVLHLPLAQKSKLSGVAIKLNTHRPLPKDGRIQNITITMDSQGRFAVTINVAFEMEIESIGIPTAECILGLDYSQANFFVDSEGKKANYPHYYRAMEERLATEQRKLSRMVQGSKRWERQRLVAVKLHTKVANQRKDWLHKKAYTLANRYDMVVVEDLDLRALGQTLKLAKNQQDNGFGNFRLYLKYKLEQQGKYFVKAPKSFASTQICSDCGVKNTALKGDISTREWTCTNCHEQHDRDHNAGLNLRNYGLRWIDEVLLAPSLVVA

SEQ ID NO: 39213 - protein, 516 aa, unknown
  TnpB Polypeptide
VKFKASQFNWELFRELHPETINIIVDDKTDPIVTLVRVFLTSHYPDITIKRDVNGRREIDKKYAFNAKSKQELDTFLDASGMGRIVNCSGVGSEIMCSRRHKIVTTPDMKCLFRQWFGLHRKIYNICVSLLNNVKDGSGPKQTSSGGIKTYLRSYVGNKKSINEHYPTMMYLAECPEPIRDAAITEIATSYNTNIKLGKKLGDFAMAFKSRRSLYQTTTIKARDWHNGQPYYKCWLNANLKDTNIRFTSKTHQQRLRKTENAPSKEFAIEKLSNSSKLLYCRATKDFYLIIPSVVPAENIQPAKGVGENQTNHPRLLFMDPGVRTFQTGYDPEGNILEFGIGYDKIFNSCCVVDKLVSMCDKKTKHPGVCHRTLHKIRSIVLPRLRYRLRNRRNDFHNKVAKFICENYSDVHVPAFETQRMIDKNKVRGINNKTARMMCTWSHYSFEQKLKYYASRSGTSVHIANESYTSKTCGRCGVIRSSFSGKEFVCPSCGLVLDRDAHAARNILIRQCCIGI

SEQ ID NO: 39214 - protein, 299 aa, Lachnoclostridium sp.
LSVNRSIHVIFLYQLDLSGKSKVGLNFPKNNKTDFKIERHKINIPTLKWVRLKEFGYIKANANVISGTVTEQAGKYYISIVCEIEEVKNSLPKAEPLGLDLGIKAFVIFSNEIVKKNINKTSRVKKLEKKLKREQVRLSRKYECLKKQNKIGKGETTRQNIHKQIVRVQRLHQRLANIRTDYINKCVSEIVGQKPSSITIEDLNVKGMMKNRHLSKAVAGQKFYKFRTKITNKCKQNDIELRIVDRWYPSSKLCSCCGNVKKDLKLSDRIYVCKECGLVIDRDLQASINLREAKTYKIA

SEQ ID NO: 39215 - protein, 397 aa, Lachnoclostridium sp.
MKRLQRAYKVELKPTNQQIQKINQCLGVCRWLYNAYLAKNQSLYQDFKEGKLNKKKAFMSANDFDKYINNDIKVLDDCKWINDCGSKARKKAICNAEFAYKKFFKGEAQFPRFKKKGKSKVGLYFPKNNKTDFKIERHKINIPTLKWVRLKEFGYIKANANVISGTVTEQAGKYYISIVCEVEEVKNSLPKTEPLGLDLGIKDFAIFSNEIVKKNINKTSRVKKLEKKLKREQVRLSRKYECLKKQNKIRKGETTRQNIRKQIVKVQRLQQRLANIRTDYINKCVSEIVGQKPSSITIEDLNVKGMMKNRHLSKAVAGQKFYEFRIKLTNKCKQNDIELRIVDRWYPSSKLCSCCGNVKKDLKLSDRIYVCKECGLVIDRDYQASINLREAKTYMIA

SEQ ID NO: 39216 - protein, 370 aa, Brevibacillus sp.
MILAYKFRLKPTPEQEKQLWKSTGTARWAYNWTLDRQEENYRSGGKFIPDGRLRKELTQLKKTSEYSWLYEVSNNVTKQAVKDACDAYKRFFNKRADRPRFKSRKRSKPSFYNDTEKLKVKGKSVLIEKVGWVKTFEHLPENKNYTNPRVSFDGKYWYLSVGVERGNEESKRSSGVIGVDMGIKKLAVCSNGMMFRNINKTKAIRKTEKRLRRLQCRVSRKYEMNKEGSRYAKTGNIVKVEKRIRLLHRRLTNIRNNHIHQATAAIAKTKPSAVVMEALNLKEMMKNRYLSKAIAQQKLHEFKRQMQYKCQRYGISFIEADKWYPSSKLCSSCGHIKRDLKLSDRTFRCDCGLTIDRDVNAALNLAKLAS

SEQ ID NO: 39217 - protein, 410 aa, unknown
  TnpB Polypeptide
VGDDIYRTAVTRLEVSTKQQVLLEETITEYKRGCQIATNLGWANCSDKSALQALAYDDIREQTGLRSQHAILAIHAAAEAISGCERRLERGQSASKPRFTSPTVQYDSRTMTLFEDGTVSLSTTEDRVRCSLALPEADDGYQWQFLDDDRWNVTESSLTVSDGEYYLHLGFRRPATDPSEPIAEDRTVLGVDLGVENIAVTSTARFVPGGEVKHAVDEFETVRGELQQTGTRSAHRTLQSVSGRQRRYLRDFVHRVANDIVEEARRYGCTTIAFEDLTHIREETTGSWEHQWAFRRLVQYVKYKARDVGIGVRQVPPAETSIRCSECGHTAKDNRPERTRFVCKECKTEANADYNAAKNIGLRCVRRGQQSSRRTGDGRLALKSGTVTPTSGFSPYPDGFEVEFTDKSSG

SEQ ID NO: 39218 - protein, 376 aa, unknown
  TnpB Polypeptide
LFESAGVSRFAYNWTLNRQIENYKNGGKFIPDEELRKEFTKLKQTEEYSWLNNYSNNITKQAIKDACDAFIKFFKGESKYPKFKSRKRSKPSFYVDIDKIKFTGTHVKLEKLTTSRKRNKQQLNWIKLCERERIPYGKDIKYINPRISFDGIHWWISVCIEYPDNVEIPASEGIGIDLGIEKLAVVSDGNIYKNINKTKEIKRLEEKKKRLQRKVSKKYEINKTKMKGGEVRYRKTNNIKKLENQLKSLNQRLTNIRHNHSHQTTTEIIKRKPDFIVVEDLNVMGMMKNKHLSKAIQEQRFYEFYRQLQYKSEWNNIKFIEANRFFPSSKTCSKCGSYNKDLKLSDREYICKCCGFILDRDFNASLNLKTYGQEIA

SEQ ID NO: 39219 - protein, 406 aa, unknown
  TnpB Polypeptide
MLTAHRIALDPNNRQSTWLARAAGTARFAWNWALDEWQRQYAAWKADNRRPRPSEAALRRQLNAIKREQFPWMLEVTKCAPQMAIMQLGRAFGNFFAGRARYPKFRRKGVDDRFTLSNDQVKVSGSHIRIPKLGWVRMREPLRFSGKIMSATVSRTADRWFVSITVDTDDPPRRPAENQGVVGVDVGVAALATLSTGETIPGPKPHTALLKRLRRLSRSLSRKQKGSRNRARARRKLARLHARTANIRQDALHKLTSELTRRFHTIVIEDLNVRGMLANRRLARSIADMGWGEFRRQLEYKAARRGGLVVAADRFFASSRTCSACGHQLEVLPLSVRRWRCRACGILHDRDVNAARNLLAYGLAVLNGSTASSAGCQACGEEGSGGGRKAVVKPASTKQEVSFVPA

SEQ ID NO: 39220 - protein, 204 aa, Peribacillus sp.
VWCRSWFEELCDSFRWYGLSKPKILPGGRKKLAKAQRILSRRQDIALNQNKPLAEAKNYQKQKRKVAILHEKISNARMDYLHKVSTEFIKNHDVIGMEDLQVSEMMKDHKLAKAISEVSWYQFKQMLEYKAKWYGKQIVTVSKTFASSQLCSGCGYQNKDVKHLNLREWDCPFCSTHHDRDINAGLNLMNEAIRLLTVGTTGIA

SEQ ID NO: 39221 - protein, 392 aa, unknown
  TnpB Polypeptide
MKRAYKYRLYPNKTQQAMLRQTFGCCRFVYNATLDIKIKAYKTDKTSLSEFECINLMTGLKSEYAWLYDVPAVCLVQSVRDMYSAYRMFFRTHQGFPRFKSKHRSKLSCRFPSTHCGVDQESSHIKLSKIGLVRYKQDRRFAGQLRNVTVSCDGCGLFWVSCLVETGVPELKPTPITSQSKCVGLDLGLKDFVVTSDGRKIPNPRFADVIDRRISRLQKIEARRQKGSRRRAEIRLKINKLYAKKRNLIHNFIHHAVNGILGENQAIFIEDLNVKGMMGNHRLAKSIQSVCWFEFVRVLEYKARWLGKTVLKIDRFFPSSKTCGCCGYKNDGLTLGNRTWACPQCGTVHDRDLNAASNILREGLAMFLPSVGRFDGRGDGGYEVDETPICAV

SEQ ID NO: 39222 - protein, 472 aa, Campylobacter sp.
MSKTKSIYDEEITNIITIKLDYKSSEQERILECIKNYNSLFRSTYSFYQQVPDLKQAETTRLQSKLNNIFLDKWFFNSAVFDVKSFKNKKKKDEKVIFGGKKNFFDRLEGKISKQEYQLKRLLPLYSVGEASKSGNRKFRIEDENTIIFKVSRKEHITLKLNGTSKRYRDYLNQLITLQINKSIPITYKLDTKYVYISFDLNKLKHNLKVQDKIKDRVFGIDLNPNYIGYSVVDWKNDGSYKIIKTGSISLKALNDYDNSLKGQGYSSQSKERKYISNKRNHEIIQIVHQLSKLANHFGCEIFSLEDLNMKQGDKEKGTKFNKLCNNQWCRNLLVSQIKKMNCLYKIRTLEVVPNYSSFIGNLVYRVHQLPDYVLSSIEIGRRGYEFYHQYILKDKKMEKNIVFGNYEKDLNLYILSMEEIGIRESFSSFMEMYSFIKNSKTRYRVSLDDIDSSRVFRKLFIKSYTEFYNFL

SEQ ID NO: 39223 - protein, 435 aa, unknown
  TnpB Polypeptide
MELVLTAKLKLHTTPEQFRTLRQTQLAYRDALNYASRYAFARGKLSNKVALQQETYADIRAQFGLPAQMACSVPRQVGATYQALWTKVQANTAARAAGHTKKRYRGLDTAPKFISPTLTYQLGHDYSFKTGQQVSLLSLEGRVIVPYTGYLRHLALIQQGARLGAAKLWYDRPRKQFYLLVSLEIDVADPIPEAQQRIVGVDVGQRYLAVATDTQNRTVFFPGQEVRANADHYARLRKRLQRKGTRAATRRLIVIAGRERRLKHDRNHLISRRIVDAYPHSLIGLEELTHLRERRRRKHGTRASVKQRKANRHAAQWAFAEVHSYLAYKALLAGSRAVKVDAYKTSQACPRCGHTAEDNRPEQGLLFICQVCQLVLHADLVGARTVALRTLLARQDWVRTGVLSARPDVSDEEAKAAQRRRYAEVRWSPDTSSCA

SEQ ID NO: 39224 - protein, 295 aa, Streptomyces sp.
VVIVQLRYSFRVYPSAGQRLALGRAFGCVRVVFNDALRVREAARCAGLPFVAFGELSRQLTVAKKTPERAWLAEVSSVVLQQSLRDLDIAYRNFFDGLKGKRPRMGAPGFKSRKDTRQAIRFTANAGWKVTAGGKLRLPKVGDLAVKWSRSLPSSPSTVTVIKDSAGRYFASFVVETEPGTLPDTGSAVGIDRSAGKTGTRHGTARRNRNPPEAPTGDHRQADGKLRPLRRRGCQGVSASLNRVRMSRVSTSSSAGAPVARRRSCCPKTRATAAPARRSGSGTPSWVRIRVASRS

SEQ ID NO: 39225 - protein, 196 aa, Geobacillus sp.
  misc_feature (181)..(181): Xaa can be any naturally occurring amino acid
MYFHGKVKEIELVYDRGLWLCLSYEDGKKPKENPCKNRVAIDPGEIHTIAAICENGESLIITGRKIRSIHRLRNKKLKELQKLMSRCKKGSKQWKKYNRAKQYVLSKSEAQLKDALHKTTRQFVRWCLENQVKEVVIGDIEGIQRNTKKKRNKKTNQKLSNWSFGKLFDYLKYKLNAEGIXLCDAVCGVFQLPAPA

SEQ ID NO: 39226 - protein, 489 aa, Synechococcales sp.
VIWETENLGGYSIKECTWSASPLNSSTRKSIFSATDLKASSISFKPASEKTFLRYFVTQIKWILRSETLCLSFLNSIVIFHRPTYDGTMKQRYRYRFYPTTEQQTNLAKAFGCSRVVWNDALALCNQSDKLPKNSELQKICITEAKKIDERSWLSEVSVTPLQQSVADLGVAFSNFFSSMKGKRKGPKVKAPRFKKKSGKQSIRFTRNSFSFKGEKIYLAKVGNVKVHWSRLLPSEPSSVTVIKDASERYFLSFVVEVSPVLLPESPNSIGIDLGITTFATLSNGEKIEAPKPLKKNLKKLARLQKELSRCQKGSNRRKVAKLRVAKLHSRIADIRNDFLHKLSTRLIFENQEINLEDLNVSGMVKNRKLSKAISDLGWRAFRVMLEAKALMYGRDVNVISRWEPTSQTCSECGFRGGRKELNIREWECLNCGALHDRDINAAINIKVAGGHSETKNGRKRERKTLSDKAVLVESVNPGNPVQLSFQFC

SEQ ID NO: 39227 - protein, 440 aa, unknown
  TnpB Polypeptide
MEFTMTDLYRGIVCKIEIVKGSKVLKTAQYHARHLWNFTRYCAVGYNYRLRKQRGDWYGLGKMPKYPGSSGMWKAMHDTEEYKSINDRVASYVLRQFDGNMRSWFSNLKSNPKARPPSYAKISPPLTFEVGRNAKLLGMNIWRLSALSGSVDERYVFARIYLPPMTNPDRVASINLRDGRCAVSYMRRQKERFGSQTAGIDLGINRIATVAFENGESIMYAGGLLLSKQRYYQKKLANCKPPGWQKGRDLRGLSDNGKRYYQDWLRQKRLILDNLTTSIINECVARDVGTIVLGNIKGIREGKDYGKEMNQKLHAWPYWQIDQMLRNKAELFGIKITTVSEKYTSRTCMLCEHVNTNGARKQRGMLTCKNCGQKIHADVNGAFNILKKYLPADKQLGVVVRLRSLPSTGIPGNRRTSSQIDPTFSAIFDLRNYAVVLNRC

SEQ ID NO: 39228 - protein, 416 aa, Snowella sp.
MYGCQQVLIHASPDIQAIIEYLCSESNKVYNCSLYYARQIYIKTSRLVGRAEICEEMAKTKNRHFKSMYVSSAQQSCNSVAEALRSFRELMKLWYRGELEEKPSLPKYRKQGLFTVSYPKKWLKLTDEGIRIPLGNQVKTWFGIAEIFLPMPSNLDWQKIKEVRILPRNGCLYTEFVYSVEEIKAQLSEGHVLGIDHGINNWLTCVSNVGTSFIVDGKHLKSLNQWYNKRTSILKENQPQGFCSKQLASITEKRNRQVRDAINKAARLVINHCLDNQIGTIVFGWNKHQKDSANMGSKTNQKFVQIPTSRLKDRIVQLCEQYGIKFIETEESYTSKASFVDSDPLPPYGEKPEGWKESGRRVKRGLYRTANNWYINADCNGAANIIRKVAVTLGLDLNGASRGVLTSPLRVRLWTT

SEQ ID NO: 39229 - protein, 380 aa, Erysipelotrichaceae sp.
MQVVSSYGVHIRDSYDALKRTADLFSYAVACLVQTALANWSSLSDTDSSFARLRMMECMVHSANGFSSSDSFDQKFPKFPSYYRRAAVMQALGIVSAYQSAMKSWKASGCKGEAPKLDSCRHRMPALYRGNTYKPVIDKETGEVLLYLAQIKVFRNNDWVWDTVRLSKTDADYLEKRSRNAEISAPVLEKKHGCWKLRFAVTETVKLSKKTISEQKICAVDLGVNTDAVCSVMDSRGTILARKFIMRGREKDPLSNALHRVSVFQSLHGSHDSGRLWNIAKRRNTNLAHQAAREIMNFAIANECDVIVMEYLDTRGKKRGSKKQKLTMWKHTDIQNTAESLAHHYGIRVSHVNARGTSRLASLRNPCFTCQCAGNQPPCV

SEQ ID NO: 39230 - protein, 323 aa, Streptomyces sp.
LANAPHGRYVLTGRIRFAHRGQEWADRVTANRAVAYRIHHDATSGRWYVTASWQKPVARTVPLQAALAEGVIGVDMNADHLAAWRLDAHGNPIGDPRRFSYDLSGGTAEHRDAQVRHALTRLLHWATSSGVKAVAVEDLDFTAEKTREKHGGRKRFRQLISGMPTGRLRARLTSMADAAGIAVIAVDPAYTSKWGAQHWQKPLTSSTRQTTRHDAASIAVGRRAQGYPVRRRTAPPRTHQSDGCGHRTVQASPGTSGREGPRPRIPGPRTRSVPPDTERTRATRTPNTVRDVRSVPEWSRTHSCSLIRNGPWGSRATRSSTSI

SEQ ID NO: 39231 - protein, 380 aa, Alkalibacterium sp.
MFRCKAYKYRLYPNEKQKAHIHKTIGSARFVYNHFLNEWTTAYKETGKGLSYTKCSAALTQLKKQSNTLWLKEPDSIALQAALEHLSDAFDGFFQKKKGYPAFKRKTHGRQSYTTKWTNDNIVVLGNKIKLPKLGWVRFAKSKDVKGTIQRAIISKTPTGKYFVSVVCQVEMIAETKSGAAIGIDLGITDFAVLSTGVKEDNHRFTSKMEATLKSEQRKLSRRYDQAKKDGKELTAAKNYQKQRLKVAGLYEKVANQRQDFLNKLSTTLIKNHDVICIEALDIQGMKKNRKLAKQISDVSWSAFVDKLTYKAEWHNRSLIKVSQWFPSSQLCSACGHIDGKKPLIIREWLCPACGVHHDRDINASINILNEGLKTLIQPV

SEQ ID NO: 39232 - protein, 552 aa, Microvirga sp.
LLAVFPDCSYRLTIEQHAVMEFPTPPETPRKKRTRRPKHRLVARAFRFAMGPTEAQAQGLHAMLDALHGLRDTLTIELSDERRQNRARKAAGERVVYMDRAALYKRTSALAEKDKALAAVHSHLRQNVAVRVLEGTKRWLEALREGRPGVRPPHPIERKRYRSFTFPEYGNGCRINHGKLLISGVGWIKLHGHRRIVGTKKTVTVKFAQGRWWACVIAMVQVPDRWAPVPEGLPEAGGDPGLASLLTDSHGRVFDPPKALQEAQQDLKREQRILSRKFEARKRAHEQLVQAAAATGTKAPALRDLPYSSRLRAQIRVVGKRHAKVENTRNHHHKKIAAICADTLQRLACEDHSLQFMIRNRRLARAASDRAIGALKQTLASKLGPERFVLTPNQRPGIGGNSQTCLCGHSVPKSLKERVHRCEACGLEADRDHVAANIVQLIAFGTVSDTLEKHLPAGGQPVVRRGGREGEAGASRSPGGRRHQPRPAAETPVKRPPQSSSPAARVRKLPREARPAGIAPPVHTGRALPLEPQGRGSARKPARAGTTVAGPR

SEQ ID NO: 39233 - protein, 393 aa, unknown
  TnpB Polypeptide
MEQESAMAVATIRTCRKSFKYRIYPTKAQIKTLEKWLDLGRELYNSALEERRESWKEKISVNYKMQSEQLPELKKTRPEYKEVHSQVLQQNLVRLDRAFKSFFKRVKNGEKPGYPRFKPTDRFNSLVYPQAPGFKLLSKKRLHLSGIGEVKIKLHRDVLGNPKTCSIKRTPSGHWYASFSCDQVPVEEWPEAYGEVGIDPGLESFATISDGKSETKIANPRWFRKSEKRLAEAQRELQIKKRGSKRRSKARQRVASIHEKIANQRDDFQWKLARKIVESNRLIAIEDTDVKEMLETSPRGRNKSIQDAAWSRFKSILSCKASNAGREFALVPAPGTSSTCSRCGFYRKKELSERTHRCGNCGLVLDRDVNAARNILKAGQAFRGSTSREAAGL

SEQ ID NO: 39234 - protein, 149 aa, Acinetobacter sp.
VGIDLGLKDIATCSDGTIISNPKFYHQYEQKLGIAQRARNKKRVRALHAKIANCRKDHLHKASTQLVKDNALIVVGDLSASKLVKTKMAKSVLDTGFSALKTMLKYKCENAGVMFEEVNERFTTQTCSSCGAITASSPKDRFANKSMGM

SEQ ID NO: 39235 - protein, 346 aa, Acinetobacter sp.
MNISQHCKFRLLPNQEQEILLNQAIGSARFVWNQILAKSFEMFAKDEFIRYETIEKNLVPLKKIPEFSFLGDTYSACLQQKIRDLATAWKKFYNAKEQAKLKQKPFKPKKPRFFKLADGSEVQLRPLMPRFKKKSDGEQSFRLPFQDCDVVGDRVSLPKKTGWIKFKKSQEIVGKITSVTIKKICGLWYISFCTNREVEQPIHLSKSAIGIDLGVKKLITTSSGQVFDPINSFKANQVKLARLQRKLRKKTKFSQNWKKLNLKINKLHHHIANIRHDYLHKVTTTLSKNHAMIVVEDLKVANMSKSANGSIEKKGKNVKAKSGLNKSILDQGLSMLVDMLEYKQLW

SEQ ID NO: 39236 - protein, 368 aa, unknown
  TnpB Polypeptide
VPEAEQRMVRNYLRRVIRRKRGQRPVAKTARSIAFDPNMYTLFENGGQQSVSLMGLELGKRIVAPLTGNTAITGNIRVVLDFERQRVEVHYTADVKRHAPLTGEPCGLDAGVTEVFTDEQGNRYGQEFGQVIGDASDMLCDKGRKRNQLHQIVKQAEAKGDHAKARRVREFNLGCGKQHQRTRRVRAEMERQINTAFNQVVAERQPSVMVTEKLDIRGKAKSKKIARRVSLWTRRILKERVEFKASAEGFRREQVNPAYSSQTCPKPECGCVHADNRRGDRFQCLHCGHIDDADRVAAANLKARLFDPEIHLDTPKVRVKETLLARFNARLERGDSAIVAPTVSGRTPGARGAQAHRQPESETPVATG

SEQ ID NO: 39237 - protein, 547 aa, unknown
  TnpB Polypeptide
MAGKVKQLKTFSLHEKNMKFVAMMKKAVLRYKHLENMLNIILNKEAESIFVLPKEKRDLSFFNLLTNSIIMKAVISGNSGGEKTQGSIQKCKAFLTENHNEIYQQLLSEGQQLNDKNISQIVTRLGKDWKNSFKNLNKYYANPSKFTGKPETPKTKKLSKVFNYSVPLEVSKFSLKKKDRLGINIWKKMEYVFFRENDYIKDKRINNVTVALSHGHIYYQISYESKTESEEHKPQAKNEQRFSERKEKIAGLDVGVHHLFSLFVNDNDTASVVYRNAKMIHYNCSFNKHMAKLNNELSKHTTKYREVTKKDDSVSLVAEKYTSYGQYIKKQISHMFNARNLFFDSEMNKLSSALLDYLKNNHVSDLVISKNLSFVKTTGNIKQHKKTKQKFYQIPFGRLLNLLEEKSIKYGIDVVNIDESYTSKTSSLTADVNRVKQMALKKEPITPAELNGVRGVKRGKITRGLFRDDILNAVINADINAAVNHIKVAFPEAVCAKTLLRNRLKLNNPRKIKSANEFSFFVKGNSDSRKKEVDVNSQPALYVHDHV

SEQ ID NO: 39238 - protein, 307 aa, Halobellus sp.
LRTYIRNDAYTIRWSERSRLEVPIGSQLKDEYGFGRSERLQVAIRGDPHWQGDQGRLHLTYDDIDETYRAHQPVTVPESGQATPTGTDAAALDIGANVLVACTTTTGDQYWYSGQEPFRQFRETTERIADAKAKLPDGQQTSNRIQRLYRKRSRRRDHAVNALLRDLVERLHEDGVEILYHGDLTGVLGEYWSVEANLKARTFWAHRQCLDQLANVCEEYGIEVASLSEAWTSQTCPECGEREQTRRHRETLTCPCGFEGHADLVASQTLLEQATNTEVRPTARPVRFQWDDHQWYPVEGATVAPNE

SEQ ID NO: 39239 - protein, 384 aa, unknown
  TnpB Polypeptide
MLKAYRFRIYPTKEQRITLSRFFGCSRFVSNWALETKLLHQTQNRDGISRFNLLNLLPDLKSEHEFLKECHSQVLQNSVDRVHVAFGEFLKGKRGCPNWKSKKNPVCSVSFAQSVKLEGKRIKLPKIGSVKIVLHRECAGQMKTVTVSRVASGKYFASILVEDGLELPETAKVEAQSAVGLDFGIKDLVVASDGRTWNYGENLKAAERAVVKYQKKLSRKVKGSQNFCAAKKKLARRWEKVAGIRNDVLHKISHELLSENKTVVVEDLAVKNMVKNRKLARAISRQGWSTFRSYLTYKAAWRGRNLLAIGRFEPSSKLCSHCGVVNKELKLSEREWLCPCGAKHNRDLNAAANIRNMGLNRNTAGIAGSASGQNVSLALASSSG

SEQ ID NO: 39240 - protein, 385 aa, Chloroflexi sp.
MNKTYQFRMYPTKKQETTLNKWLALCCQVYNAALQERRDAYRIAGKSLGFAHQCSELPGCKEVCPELAEVNAQVLQNVIKRVDLSFQSFFRGIDSGEKIGYPRFKSRFRYHSLTFPQYTAAGHQGCFSIVPKGKRKGKLILSKIGHVKMVMHRPIQGTPKTAIVKRTPTGKWFVSITCEEVEPIRLSSSEEKVGIDVGLKYFAYLSDGSHIDNPRFFREEETALAKAQRRRDRRAKCTKERRKRNKVVARIHERIRNRRQNFIQQHVVLLVKRFGLIAVEALAVRNMVKNPKLAKSIADAAWSMFFAHLLSRAEEADRAVVRVNPAYTSQTCSCCGHRKALRLSVRVYECPVCGLVMDRDHNSSVNILAEACGRAGRVIPEAPGL

SEQ ID NO: 39241 - protein, 256 aa, Geobacillus sp.
MVNDNIKLENGYIKLPKIKKPIRVKQHREIPADYKIKSCTISKTKTGKYYISILTEYEKNISSVKIQKVVGLDFAMDGLYVDSERGEKANYPRYYRQALDKLAKAQRILSRRKKGSTRWEKQRLKVAKLYEKTANQRRNFLHHKSKELAANYDAVIIEDLDMKSMSQALNFGKSVHDNGWGMFTTFLEYKLKEQGKQLVKIGKWFPSTKKCSRCGNEKEMSLSERVYKCICGLVLDRDYNSAINIKKEGLRLLELA

SEQ ID NO: 39242 - protein, 398 aa, Geobacillus sp.
MMVNKAYKFRIYPNKEQEALMTKTFGCSRFVFNYFLAKWEDAYKETGKGLSYNACSSQLTQLKKELTWLNEVDSVALQSSLKNLADAYARFLKKQNDKPRFKSKKNKVQSYTTKYTNGNIAIDGNKIKLPKLGFVRLAKSREVEGRILSATVRRNPSGKYVVSILVETEVQELPKTGSAVGIDVGLKDFAVLSDGTKYENPKWFRQLEKKLAKAQRILSRRKKGGSNWNKQRIKVARLHEKITNARHDYLHKISTEIVKNHDIIGMEDLSVGNMLKNHNLAKAIQEVSWSMFKTMIVYKAKWYGKQVVTVAKTFPSSQLCSCCGYQNKDVKHLALREWECPVCRTHHDRDVNASMNIKKRSRQASNRRNCGDRLLRYSLDKAKFVGISHFEAKVGVVQ

SEQ ID NO: 39243 - protein, 262 aa, unknown
  TnpB Polypeptide
VIHRDFPLGRVSQVCIKLNPSGRIYVIFLVEEPEAKEQSSEGEPKRAVGVDLGIARLATLSDGRFLENPRPLEHALERIRVLQRALSRKRFLTNNWLKAKRRLAKEHEHVRDFRRDLFFKLGALLAQEYDVLVLEDLNVRDLIQKGETKKRKMGLYDSSFSEIRRILEWQFLKRGKQVLPVPSYNTSRECFLCGGINQNLTLEDRVFHCPHCGFTLDRDLNASLVLLKRAGWVPPGVPVELRPIPPLSTLGLAKGRQGGVLR

SEQ ID NO: 39244 - protein, 341 aa, unknown
  TnpB Polypeptide
MQYVERHVITRTHPVFREIDRASFASKGLYNKTLYITREMFETTGKVCGYNKLDKIMQTHDVYHSLPAKVAQKVVKQVSEAWKAFFVAIREYKKCPEKFRGKPEPPKYKRKNGRNLVQYTNQAIHKGTSSRKQIIHPADLQPITTTKQNPDKIQQVRIVPRSSHYIVDVVYEVNDPPAENAELDYSLYAAVDIGIDNLATIVFNRPGMTPFAISGRELKSINQFYNKRKAYFKSMLPAGRHTSRRIEAMGDKRYWRVQDYFHKATRFIVDELVRPKVGNLVIGKNREWKQEVNIGRKNNQNFCSIPHDRFIRMLTYIQGGSGWHQSYLSGRGLHVKDFVFR

SEQ ID NO: 39245 - protein, 341 aa, unknown; identical to SEQ ID NO: 39244
  TnpB Polypeptide

SEQ ID NO: 39246 - protein, 351 aa, unknown
  TnpB Polypeptide
MLHTKTLKVRVRDKHAPLLRQMARSVNFVWNYLNELSQRYIRERGGFLSAYDLQKYTNGCAKELGLHSQTVQCVSKEYVTRRKQFKKVRLNWRKSAGVRRSLGWIPVNTGAASWKNGQVYHNGHYFKVWDSYGLAGHKFRSGSFSEDARGRWYFNVVVDVEESVSMGQGAVGIDLGLKDLATCSDGRTLENGRFYRDLEPKLAIAQRSRNKARTRAIHARIANRRKDALHKFSRQLVNGYGTIIVGNISSSKLVKTKMAKSVYDAGWSTLKTMLEYKCDHAGIVFKEVNEAYTTRACSACGSLTGPKGVNGLRIREWACCECGVAHDRDINAARNILALGHERPSVGIPVL

SEQ ID NO: 39247 - protein, 371 aa, unknown
  TnpB Polypeptide
MKKSFKYYIKANKETIEKVNQVLDLCRILYNLCLEQRQFVWKNYHKSISGYNQVYELPSLKKFFPQFKEVPSQTLQEVVERVNRAFQNFFRRVEQGKKPGYPRFKSFDRYDSFTLKQAGWKLIGKELQINKIGSFKLFLSRPIEGDIKTVTIRKTSTGRWYVTFSCDNVPSKPLPKTGKSIGVDVGCESFLTTSEGEKVDNPRFYQRTKKLLIKRQKSLSHKKRNSNRRKKTRILVAKAHEKIFNQRRDFHFKIARKLLQAYDTICIENMNHFKSHRSLNRSMRDVAWFNFFNILLFKAEEAGKEVIKVSARNTSQACSECGKTVLKSLSVRVHKCPHCGLSIDRDINAARNIKRLGQSLQEAGALVPAMN

SEQ ID NO: 39248 - protein, 504 aa, Bacilli sp.
MPLLAFSCGNQECITSSNPGSTQTHEHTPSTTYSKDEYGHYHACSCDKNVRFDFAPHTFAKNDDGFYTCSTCGYVKDADKNEIYNIIKKAIKNTNEYKGNLSLESSSIIDYGGAKERSITNAASDLASGKFVEKAVSGEYDPSNETWTEKTELRKLEIEEDKYTIYEQDNKGVVTSNIVDKTYAEAELANPWETIGSFFYKGDNSFTKILLRINSFADLNEGFAKIFSLNAAEVGNINIDVESKDNLYTLALEGTAYQQNNNEGMKLGIVKGGYKFVFDKDKLREFTFGSESTVDSIALEDPMKMVDDSTIKFKYEFDNDLYNSVDFETKPAATEAISGRIDLIFEGGYRYANSTTKPIGEKVADAGAALGVNLYYDEALKKKVTEEVFTCATKTYYAEPIKEATRAFVIYQREINYKAPELFKKYMVDYTSKSVYFYQQHSVDTTYTVPSSLLPNDDEATNLNAKVTLNGVAFDLSSPVINITKGNLYTLKTTQDGVAEPFNY

SEQ ID NO: 39249 - protein, 286 aa, unknown
  TnpB Polypeptide
VNPKTGEVLHPMGKGRVGYDIGTQTLAFSSVSRVGLVELVPEAQDIQNELRRINRAMDRSRRVMNPKMFNPDGTVIDTPSLPPECLTKRGKRNWQNSKRYERLASQRRYLYSKQARLRIQQHQELANQLLGLGDDHYIEEMAFRALVKKAKPQEPAPGEKFKRRKRFGKSIANKAPAAFVNILEKKVLQNDGSFQRINTWEAKASQYNHLNHQYNKKKLSQRWNIMPDGRNIQRDLYSAFLIQHTNSTLDGFIQELCDKDYPAFVVLHDTVISVLRGTKQPSSAGI

SEQ ID NO: 39250 - protein, 377 aa, unknown
  TnpB Polypeptide
MILAKKVRIYPTKEQEQKLWQSVGTARFIYNYTLTKQEENYKNGGKFISDGIIRKELTQLKKSELSWLNEVSNNITKQAVKDACNAYKRFFKGLAKKPKFKSRKKSKPSFYNDPIKLKVKEKKVLIEKVGWIKTNEQIPRNVKYNNPRVTYDNKYWYISVGIEVEKEQEKLTDMSLGVDLGLKDLAICSDGTVFKNINKTKKVKKLEKKLKQKQRQISRKYEINKIKKEGGERCQFIKTKNIEKLENTTKLIHRKLTNIRNNYLHQVTTSIVKAKPYRIVIEDLNVSGMMKNKHLSDSVRKQCFNKFRQYLTYKTELNGIELVIADRFYSSSKTCSECGYIKKDLKLKDRIYRCPHCGAVIDRDYNASLNLSMYKLA

SEQ ID NO: 39251 - protein, 395 aa, unknown
  TnpB Polypeptide
VIIILKGFKTEIRVTDIHINKIHQSIGICRFLYNSYLAKNQELYKLYKEGKIDKTQYFMSANDFDKYINNEVKILDEFKWINNCGSKARKKAIVNAEMAYKRFFKGQSKFPRFKKKKNQDVKIYFPKNNTTDWTVERHKIKIPSLGYVELKEKGYIPTNVKVVSGTVSMKAGRYYVSVLCDVVNHNNYSNISNEGIGIDLGIKDLAIISNIDEPFKNINKTEHVRKLKKKLRRLQRKTSKKYEINKDGKKFIKTKNIIKLEAKIRTIYKRISNIRLNYAHQITNALVKTKPEYVTIEDLNVTNMIKNKHLAKYIAEQNFYEFRRQLTYKCSLNNIELRIVDKYFPSSKMCSECGNIKSDLKLSDREYVCKVCGVILDRDKNASINLKNAKEFKIV

SEQ ID NO: 39252 - protein, 169 aa, unknown
  TnpB Polypeptide
MTKHTKTLKVRIRDKHAPLLNSMARSVNFVWNFVNELSQRSIKERAQVQSHAGWGQLKTMLDYKCAHAGIVFKEVNEAYTTQTCSCCGALPDSRPKGIAGLEIREWTYSACGVTHSDRDINAARNILAVRHGRLAVEISASLGREDVKQSNTRETVPGDPLALTLDSLH

SEQ ID NO: 39253 - protein, 215 aa, unknown
  TnpB Polypeptide
MTAEPTATKTLEAMLAPPTAHKRRRLQRTVATYRRALEDAFESGADTQSAVNDVVTPYTLTSYAKDALKSYVPKLRDTYNASELEDDHPVRFTNRGFRLDYSEDRRHEFCWRVPQAGRGNAFWIPLRINPQQRELWDDLFDGKLSAGEFRLQQTRTNWVLHVTVEYEIGGAEIPDDPTPVGFDIGESKLLTGCVLTENGTPKEPFIFDGGRARQL

SEQ ID NO: 39254 - protein, 455 aa, Gemmatimonadetes sp.
MVRRSSRVADGRGSPKCLCPRPNAIPSFFTARVDTATPRRHRDTTSMSMQRFQAFKYELRPTGEQQRAMRRFAGSCRFVYNKALALQKERHERGEPRLGYAGLCKLLSEWRNSAETPWLKDTPTHPLQQALKDLERAYANFFAKRADFPRFKKKGRSDSFRYPDPKQIKLDQGNSRIFLPKLGWMRYRNSREALGTVKNVTVSQSCGKWFVSIQTARNVEQPIPQGGGAVGIDMGVARFATLSDGTSYEPLNSFKRHETALGKAQRAMSRKVKLSNNWKKAKARVQHIHARIGNARRDFLHKATTAISQNHAMVCIEDLQVRTLSRSAAGTVDAPGRNVRAKAGLNKSILDQGWFEFRRQLEYKLAWNGGHLIVVPPHNTSRTCPCCSHVSADNRRTQAHFTCVECGFEEDADLVGAINILRAGHARLACEVSGAVRPPAAGTHRSDSSVAQCRR

SEQ ID NO: 39255 - protein, 424 aa, unknown
  TnpB Polypeptide
MHVTVAEYRAFCRALSIVVLNNWAALNQAPSFAAAVERLIHPTKQNPSPRHAYFHRRFYKFPSYLRRAAIEFVRGQVASYLMRERSWRSGERSRRYARPPRFNPAAGCFPPLYRGQLLTFEDDYRTAWVKLFDGREWCWHTMPVKPRGSRHWRGEIKSPSLIIGHGRCHLSVPVRLRPPRLPDRGRACGVDLGINTLATASVVQSDGTVTARRFIHRAADIDRRDRRATAIRGKARKTGRLQAGFCKSLYRKAANINEDMAQKSAREIVDFALAEGADVIALEDLKHFRPRGGRRRSGLRQRFHGWLHRRLADLIEAKFAEVGGRTVYVYPRGTSIWAFDGSGRVKRDKANAALATFASGKRYNADLNASYNIAARYWAWRLQLTRRKDGQLPAGRSPAGKPRMPVTLSTLWGREGEAPHQCSA

SEQ ID NO: 39256 - protein, 397 aa, unknown
  TnpB Polypeptide
MLYIKLKTLLMLKVVKVRLDPNSQQQEALSQSFGNCRWLWNYCLNLMNQTYKDTGKGLSGYAVKKQIPQLKKEHEWLKSTYSQCLQQVCLNLGVAFNNFFERRTKYPRFKSKHGKQSIQYPQNVKRVDDSLRLPSIGDVKAVFHRPVEGKLKTVTVSKNQAGQYFAAILFDDGQEKPKPVGDGKNIGIDLGLTHFAVTSEGSKFDNTRWLAKHEQNLKIKQQQLSRKQKGSNNRNKSRKKVAKVHLKVTNCRWDFHHKLSRRIVNESKVICVESLAVANMVKNRKLSKAISQVGWKQFCMMLKYKAEQEGKTYVEVDRFLASSKTCHVCLNQVESLPLDIRFWSCSNCGTKHDRDINASICIRNEGLRIISSGTGDQADRQTVRRSNRGRKKSTTAQ

SEQ ID NO: 39257 - protein, 389 aa, unknown
  TnpB Polypeptide
VIRTYKYLLRPSSEQTQALNFLLWQSRLVYNTALEQRITTYQKTGIGIGYTAQWAHFRDLRRVSRETLGKLNASSLQHMLRRLDKTFQAFFRRVKVGETPGFPRFKGHNRFKSMEFTYGDGCKLHQKEQGRMCFYVQNVGEIRICYHRPLPKGAVLKHVVIKLVNSRWYICLMLEIPKQTRAHQGTGQQVGIDVGLSSLLALSNGELIGNPRLLENNLQKFRRLQRHVSRQKKGSHRQKQTYTKISDLHEKITNQRKDSLHKIANQLVSDYDLIAIEDLNLKFMIQNQHMSRSSHDAGLGELRQLLEYKAEEAGVQVLAVNARNTSQVCSMCGEMVHKGLSVRIHQCPTCGLVIDRDVNAARNVLALALQSPPGRGGQAVTWAVAPSVA

SEQ ID NO: 39258 - protein, 374 aa, unknown
  TnpB Polypeptide
MQITITAKIQILPDSKQSSQLRDTLSAVKKSLNYVSDIVFLTKEFSQPKLHKLTYEILRHDYDLKSQMAQSVIKSVIAKYKSAKSNQHEFTTVVFKRPEYDLVWNRDYSLVKGLFSVNTLDGRVKVPFKQDGMDQYFDGSWKFGTAKLVFKHDKFFLHIPATKEIADSLIQDVKNVVGIDLGINFLATSYDSSNHTEFYRGRHIKHKRAKYSKSRKELQQRQTPSSRRRLRLIGQRENRWMSDVNHQVSKALVKAAGQNSLLVLEDLTGLRNATEKVQLKNRYVFVSWGFYQLRQMIEYKATLNHSLTITVDPRYTSQQCPQCGHTERANRDKKNHIFTCRNCTYTSNDDRIGAMNLRNIGIEYVHAELIKQVP

SEQ ID NO: 39259 - protein, 508 aa, unknown
  TnpB Polypeptide
MMHTVKFRIYPDETKECKLNEIFTIFNRVKRIGYKLLFCGEDYITERFNEEKSIQQCLMSVCHNNPYVNAILTGNKATLEAQKTWLEKRRKFMTLQLKIINRKLNKIKDRNTHDRRLNGLYARRASLMAKLQNLRLEPVVFGGKKLFRDRIRGKISKKEFRIRRDSSFSCAGVKQKGVRNWNIKILKDKTVKIRTFSKQNGRKWLILPVSVNNVQEKWFQQILNADKYTVTVKRKLFKGKVRYFVHVSYDISEPAPSIGYENGAIGLDFNYNFVALTNVDQHGKLLSYHKISFGNLHSYRADKRNDYISYKMDKVVNYCINKGKGIVVEDLQFDQEFSYNKKLNLKLNNLKTTALNLLERKSKKRGVSFRKVFPGYTSIIGKYKYSRLHNLSVHHLASYVIARRGLGFKEAIPSIYDWVLSQVGEFIESRLKQGSPYRIWSMIHDLFKQSRITSFKTLEILKKTILMKHVLNSVTSAQPDNLKAGLSTNGMIENYYKMWDIVNNSTVL

SEQ ID NO: 39260 - protein, 412 aa, Nonomuraea sp.
MCVQAGDHTADSPDIGFGFHHGGIGQTLMCSIVRLVVQVKLLSTPEQAAALEATLRAANKAADLVSRIAFQRRCFRNFDLRKHTYEQVKAVFGLGAQAAQHVIKKVCDAYRTLHANLAAGNLGAPVSVRRVKAENKPISFRPGAAQPYDDRCLSWQHTDRTVSIWTTAGRLRGIAFTGSARQLALLVKHRKGESDLVWREGMWFLHATVGVPDVPVTVPDGFVGVDLGIANLATTSEGVRHSGKGLNAVRHRHRELRRRLQAKRTKSAKRLLKRRRRKEARFAANINHSIAKQIVTEAERAGRGIALEDLRGIRDRVRLRKPQRVTLHAWSFHQLGAFVAYKAARAGVAVIHVDAAYTSQQCSRCGHVDRSNRPDQETFTCTSCGFAEHADVNAARNIASRGAAGWAVSHAA

SEQ ID NO: 39261 - protein, 306 aa, Nonomuraea sp.
VAQLVMRAYKYRFYPTPRQAAELARTFGCVRLVYNKALDERTRAYKLEGRRVSYVESSARLTEWKRSGEYDFLSEVSSVPLQQALRHLQAAFANFFAKRAKYPTFKSRKKSRASAEYTRSAFRWRNGRLTLAKMDAPLDIVWSRPLPEGAEPSTVTVSKDAAGRWFVSLLVEESMAPLAQVEQRVGVDAGIASLVTLSTGEKITNPRHERADRRRPSKAQRNLARTAKESNNRAKARAKVARAHARITDRRRDFLHKLTTRLVRENQTVVIEDLTVRNMVKNHSLARAVSDAAWRELRSMLEYKTA

SEQ ID NO: 39262 - protein, 402 aa, Anoxybacillus sp.
VESLLVTRVEQHHIKRTHPLWQMCDDLCLKSKNLYNYANYIVRQEFIHHHEWIRYGSLDKMLKQEEVYQSLPAQTSQQILRLLDNNWKSFFKAIKDWKKNKEKYLGRPKLPKYKKKNGRNIVVFTNQQCKIKNGYIKFPKTNLNLKTKVTDRLQQVRIVPRGSIYVMEVVYKKEVPDVIREGSRIVGIDLGLDNFVTMVNNIGITPIVINGKGIKSINQYYNKQMAHFKSILKKQNGLDWSKRLERLTVKRNNKIRDFMHKASRYVVNWCVGHHIDRIVIGKNDNWKQEVNLGKRLNQSFIQIPYDLFIQQLQYKCEEAGINVVLTEESYTSGTSFLDGEAPIKGNYKKSRRIKRGLFRSNKGIFINADVNGAYQIVKKVSPDAFANGVEGVGLHPVKLNVA

SEQ ID NO: 39263 - protein, 522 aa, Anoxybacillus sp.
MKTVRVMKIVSHDESQLHSLDELMRVFCSAKRYAFNRLLEGRKAKDIIKHLPHQFPLNKRYAEDAVLLAQSLISSQRELLPMRLEDVQAKIEKTAKKMDEYQHGRKTPKNVDLQTCLDGLRQRLEKLKAKEAELKHHLEHGTIPTVIFGGKQNFYKRLKGKITNEEWKDVRSNQLYARGDKSKKGNLNIRLMYDDNTYECCVEIANPLGQPKGKHAPRLTFQVYVPEKYEAEIIDVIMGEQVGVNSKGKPIIEYRPYTVEIKRKNGEYYVHLIYEEEVYGRELTHDEPIQGERIAGIDINIDRIAVSIVSKQGNFLQSKVFYCHELEYVKANKRNNLIGETVRDVYDWLLQENVGAVVIENIQLRQQHDTDKRFNRFTHNFKKKKLTETILRRGLRLGFRIKKVNPAYTSVIGRFKYMKKYGLSVHESAALVIGRRGLGYHERLPKELIDTIKTKVKRHLIAMLGSMEESYKQSDSGKKQRQCVAMMLHKIENFKQEHEWSLWNMLHKCCWLNQYQIQLKEV

SEQ ID NO: 39264 - protein, 331 aa, Anoxybacillus sp.
VYDDHTYECYVEIANPLRQQEGKQAPRLRFSVDVPEKYEQEIIDVIMGEQVGVNPKGKPIIEYRPYTVEIKRKNREYYVHLIYEEEVYGREIAYDEPIQVERIAGIDINIDRIAVSIVSKQGNFIQSKVFYCHELEYVRANKRNNFIGETVRDLYDWLLQENVGAVVIENIQLRQQHDTDKRFNRFTHNFKKKKLTDTIIRRGLRLGFRIKKVNPAYTSVIGRFKYMKKYGLSVHESAALVIGRRGLGYHERLPKELIDTIKTKVKRHLIAMLGSMEESCKQSGSGKKQRQYLGMMLCKIDNFKQEHEWSLWNIFHKFCWLHQYQIQLKEV

SEQ ID NO: 39265 - protein, 181 aa, Proteus sp.
VKFSANWQKQKRKIQRLHSHIANIRKDYLHKATTKISKNHAMIAIEDLKVSNMSKSAKGTAEQHGRNVKAKSGLNRAILDQGWHEMRCQLEYKQLWRGGQVLAVPPAYTSQRCACCGHTAKENRLSQSKFECLECGYTENADINGARNILAAGHAVLACGGMVQSDRPLKQEPTEVSQATV

SEQ ID NO: 39266 - protein, 422 aa, unknown
  TnpB Polypeptide
MTQQFRSYKYRLYPTTQQESLLNQYVGAKRWMYNYLLSEQKRRHAANEKHLSAFDCNNLIPELKKRPDTAWLKTVDSILLQNAAEDLATAYKNFFDSIKGKRKGLKAELPKYKRKGGRESYRTRGVKVDFDNNIVTVPKIKNIKCVLHRTFDGTIKSATISKNPDGKYYISVLVEESIQLKPMTGREVGIDLGLKDLAILSTGVKFDHPEQMLAKAKRALKKEQRILSRKTKGSKNREKQRLKVARCYARVTRIRNEYYHLISRYLVDNFDAIYLENLNVSGMLKNRRLSRKIHESAWSTLKSMIIYKAGYAGKTVHEINRWFPSSKTCSNCDHKLQVLGLDVREWTCPSCCTNHDRDLNAAINILNQGQIDLYDSKQPSRATMEVELKIPMALMKHAVQIERSGLTTGLHGDEASLTIFSR

SEQ ID NO: 39267 - protein, 244 aa, Ktedonobacter sp.
VSQTKRAYKYRFSPTDDQKRLLAQTFGCCRFVYNWGLHIRSTAYKGGVKLFYNDLAALLPDLKNQYPWLADVSSVPLQQSLRHLDKGFKNFFERRAKYPTFKKKHHAQSATYAANALKWNGATLTLAKMEAPLNIHWHRPLPKNAQPSSVTITKDCANRYFVSILVEEDMKPLPVVNNMVGLDLGIKSMVALSTGESVGNPRYFAKDEKRLAKAQRRHAKKKKGSKNDEITSRSSLPALFTKTK

SEQ ID NO: 39268 - protein, 482 aa, Azospirillum sp.
VLIHKGFRYRAYPSPAAQAMLARWFGCARVVHNLGLDQHRMFSRKGRSFGYTKQTADLPTLKAEFPWLAECFSQCLQQALKDLDHAFQCFFTGQGGYPRPWKKFEDDSLRFPQMTRTDAKTGEVVDMVALTRDGIHFPGGLGFIPVCFHRPLEGTPKHITLQRQGLTWWVSVCCEIEVTTPRPLGHDTLLKGFTGVDFGVANAYTRADGHVYAVPGETDGEAKRRLRLERRIARAVEARKAYGRINRSRREMKLRESLRALDQRVRRRRDDALHKITSDLAQNHGLIGIEDLRIATMTASARGSAEAPGRKVAQKAGLNRGLLGNAFGKFRRMLTYKAGWYGAAVVAINPARTSQTCSECHRHPKDSPETAHLSHGRINQAEFACPLCGFACHADVNAARNIERLATREFIRRVDSGESAAKPAPAKRKKTLSGLSAKPKASPDASRTRDQDPAGGRPVAARGARGVGQAKNRDVSVSRKAG

SEQ ID NO: 39269 - protein, 409 aa, Azospirillum sp.
MKMPVRKVTYRLYPSRTQSVALSAALRLHQQLYNAALEQRIDAYRRRGVSLTYADQCHDLTALRQECPEFATLNCSSQQVTLRRLDKAFKAFFERVKTKGAAAGFPRFKSLARFPGFGFKSHGDGWRFTPGVEWRHGKLRLQGVGTIKARGQARQGGLIKASELLHRDGAWHLSLTLECPDITRSSGTEAVAFDWGTETFATLAVGEEDAPTMETVENPRWYRHEQQRITDLQQAVSRKRQGSNRRRKAARRLAKARARTARRRLDWQHKLSSDLVKRFALIAMEQLSVAAMTRSAAGTVDAPGKRVAQKAGLNREILDTAPSQFLSLVRYKVQETGTARLIEAPTRRLKPSQTCPCCGTVRKKALSERVHRCDVCGTTLPRDFASAWVVLRYAHGVLKANGSERPDAE

SEQ ID NO: 39270 - protein, 470 aa, unknown
  TnpB Polypeptide
MKKMRLFMLDPRCNEGKVARLEALHAEYVGYVRACVGQMVASRCYQMPQSAKRQFFSPSPTLSSQIAKNAQDHAIQIVSAWHAATYARSVRKHITNGRREGTYTEQDAKALYTIGRKTICKPWNFITQQHLDTYHALLDEHGGNPPTVRDSLPMRLSEMTAVFAKPKQAFTADSWLAVSTLDKGKRRMTLPLVGNPYAKPSDVSKGITARKTKRGRWRFEAVEKTDWVAPTAGHGWTRLGVDVGLNVLAATSDGTTYGAKFKPNFDRAYAQVREVRANRQRQNLKENSPRLDRLESKLTGLIKTATGSVVNRLLKNHPETIFVVEDLDLRGCRGQKRFAYRALQTNLARKAPTEKVNPAYTSQECPSCHHISRRNRSGTKFHCRSCGREAHADWVGASGVLRRSQDKQITCVDHPSSVKRVLRERYLRKRNSSLRHDKLAPVPSGQWLTTLGFSLDEDLGTATNSIPRFT

SEQ ID NO: 39271 - protein, 215 aa, unknown
  TnpB Polypeptide
MDTTTAKRAYRFRFYPTPEQEQTLRRTLGCCRKVYNMALDARSEAWTVRHESVSYEDTSRMLTDWKKTKEYAYLREVSSVPLQQSLRHLQAAYRNFFVKTGDYPRFKSKKNGGAATYAASAFTWDWDKRELTLAKMREPLPIHWSRTLPRKARPSTVTVSLSFSWVSPFLQTAPFTCTRPLASRAFASLRVHWAVSARYLSKRISGSPLLMMPSV

SEQ ID NO: 39272 - protein, 199 aa, unknown
  TnpB Polypeptide
VEIEPLPSTGAAVGLDMGLKSIAITSDGVEYPNHKYLAKSQKKLARLQRQLSRKSKGSKRREKARCKVARLQEHVANQRQDTLHKLSTSLVRDYDLIAVEDLAPKNMVKNHKLARSIADASWGEFRRQLEYKAAWYGKVVVRVDKFYPSSQLCSACGAQWPGTKDLSVREWVCPVCGAIHDRDINAAKNILNEGLRLLA

SEQ ID NO: 39273 - protein, 533 aa, Chloroflexi sp.
LFLEVGKIWLLLLWLVTWYGFSARKGGAVLVAKATKTIRQSLGYQPAHAAWFAATKDLFNQVAAFYFEVIAAHEKVLDCSNKEALTILETLTHATQKHPTPVMPLEAIGEDIPAMFRRAAIHAALGSARSFYSLLRKWKKRQEQAQAKGKKFTGRPPVPPHSWNKSATLYAGQWKERTRSSIVLKVWTGTCWSWIKVRITGRELPEDVEMGSPSLIWRGDHWWLHTPLEKQFASPGNIEKHITTQAQTKMCAVDLNLHEHLAVCTIQTVEGTILATTFIGGGRRISGFRKKQFGRIARNRRKTGMIAEGEQDNADLWRKINNVDESISHLVSARIVQFAKQHGATILVFEHLGHLKPKKGKYSRRGNSKRAFWMKGRIFKYAKYKAFAVGLLTSRVNPRNTSRECARCHSLVARYTEGQSAEGYTSGAPLVLCPQCGMQGNADRNASLVIGQRLVKRYQNPLQGKPPTPLLVEGAEKSAGVVVCQDAKGEEEPSLPQARHADRNEHGTAQDVLFRMDEHMSDIPHQLRLPFES

SEQ ID NO: 39274 - protein, 391 aa, unknown
  TnpB Polypeptide
MLLRKKIKIEVSEQDAQALEYMQGKCRALYNWWIGKLRNGERWNLAKAKKSLKESKAYDPELRFVYGKLLAEVYFRIEKAMQAFFKRVAEGAKKPGFPRFKPRHQFFTLCYPAMYLEREGNTIILPTGGGGNWGPKRYPNIVAHLTEEPPEQFREVAVSRDARGNYSCSFVYEEREQQVSQDGIVAFDLGIKTLATGYSDQGRFYHIGGFKGYRWYNKQLDKIRSKRDRCKKKSRRYIHLSEVYKHVSERKRNKQRDCLHKASHLIAGKLAERAVVIGDLSQRQMVMQKQENETPKERRKRQIRNRLVYNDWGLYGFVQMLEYKCLLFGKELHIISERDTSKTCHRCGHVQPMPLWKRVYRCGNCRLVMDRDDNSAVNIYQRFLAGLPPHA

SEQ ID NO: 39275 - protein, 418 aa, Moorea sp.
LCFQSKNLYNRVNYNIRQSYFYGCGVPSYTQLCNWFKKTDTYCALPAKVSQLVIKQLSEAWSAYFQAIVSYQENPEKFTGFPSIPGYKEPLKGRNLLKYNYQAISKNALKKGYIQLSKTKIKLPFKVKDHQIIEVRLVPKKARYYILEVVYDDRELPPEFSFKPVRIASLDLGLDNLATIAFNIPSVQPIIINGKPIKSINQRWNKQVAHFRSLLPDGQTSSKRIDNLTRRRNCSIENYLHHASSSIVEQLREREIELLIIGKNEQWKTSLNLGKRNNQNFVFIPSEKFIHLVTYKCQAAGIEVRVVEESYTSKASFLDGDNIPTYSPQQKNKPTFSGIRIRRAWYRAADGRLIHADVNGAYNIGRKVIPSAYLELLNMLARDRGCLVVHPRRITPFPYENRHKRRKRSKPANEWARV

SEQ ID NO: 39276 - protein, 378 aa, unknown
  TnpB Polypeptide
MLKRNSFDWDCTEILEKYKLLLDERIARQIVKKNDKTWKSFFTLKRMKEEGRLPKFFGRISPPGYWINPKTGKKKLMTIVRGRDYRIVGRYLHLFNGLKIRISGELRWQGWQGQLIIKYNEILKKWYCHQTIFVNDDAIPIPSKKQRKAFVDLGVINIITGWIEGERQAIAFSGRPILSSWWYWSKKISELQSKLYKNGLFTSKRLRRMFLKRRLQFRESINVIVHRFVKLCYKKGVDEIIVGDVTHIAERVRSGKKVNALIHNFWCFRYIMNRLRTTAENFGIKVTLVKESGTSSRCIRCGSRNVMRRGRLFRCLDCKLEAHRDVVGVINIASSYLNRKIEGVHPHPIVLRFSSVLQHKEPYISDFERFKKLIEVSS

SEQ ID NO: 39277 - protein, 629 aa, unknown
  TnpB Polypeptide
MKRKKKDKDNIYKTTVVKIGIKKFFRYQEHINYIQKHTQNTTQVLYEFTLFINYYVIRAIEQNKHIINLSELTNLNRIRYLCENRSQKEIVKVLAKLNNPFLKECWTLWKEQRKKTLLFGDKLDSSIGNAYSKNTITMYSNFFMMRYSSFMLKYARYLFRHSDCHGFTGKQLSYVAKRMIQQFMFDKNVLPTFYNERLKNLVQSNIETLNSIHTELLKYLPTEHTNPLNEFIISKHWTDYITPWYKLLKVFENQNNQTEHDYKFTLHNILPMYSLDAKYIPFTKPMLYSIHNKIANGKDGYVKRKKFKPIKGQTSYNANFYNYASMVFRLKHVETTKTKFIGPILTNGDFVSVTMEKSYTTNPLKNKQSKLNLDDKHVIAVDPGIKNIIYSVDKDGTTCKVTNKEYYHLLKNKKRQRKRENIYKHNMIYNSLLQMTSSKTCILNNYKRFLSDVYKHLHKWLNINCSNVVKKINKDSYIAKQRAYTKIMSKFNNIYSSNENKKKVIAFGNGSFQSSMKGYTSSTYKTFKDKLKVGNVLEEVDEYKTSQICYHCHKEELGYIKKKGIDQHHVRVCNNKHCRMTVLDRDLVGAKNILTVYVHSNEHGQVPYCFRRSTKCHLSSVDSNDTILA

SEQ ID NO: 39278 - protein, 404 aa, unknown
  TnpB Polypeptide
MKSSIAVTRMLSAFKYRLYPRPEQEMRLNRSLLLLCNLYNDLKAEEMRKYREEHKSTSRTRFRRLALEARKRDRELETVHSQAVQNVGDRVHRSFRNFFEGRARFPRWKKPHRYNSLTYPQSGFELSFEEGIYLSRIGHVRIFVHRRLLGKVKRLTVKREADGWYAIFITEREPPQRNRLSGIPAARVRGADMGLTEFATFDDSSSVKYPGFLRRSGDEIKHLQRHLSRKLKGSRRRRGLGRRLARLHLHIKRQREDFQNKLVHRVFTESDVLVLERLNITGMLKNRSLAKSISDASWSSFARKAIFKADSLGKHTVFVDPWGTTQCCHRCLRWVPKDIATREHVCPYCGETIPRDINSALLIKRLGIQSRPPTDSGSSPAEQGPLPSLREMVSPSIEARSPRT

SEQ ID NO: 39279 - protein, 407 aa, Pseudoduganella sp.
MLRLQAFRFELLPNGQQRHAMCRFAGACRHVFNKALAIQQENHAAGKSYIGYVAMAKLLTAWRNGLETPWLREAPCHPLQHALKHLDQAFKNFFAQRAAYPRFKRKGRGDAFRFPDAKQIKLDQGNSRIFLPKLGWLRYWNSRMVLGEVRNVTVRCVAGKWFISIQTQRDVESVPTAATSAVGIDVGVVRFATLSDGTPVEPTNCFKRHQQRLARYQRQMSRKVKFSKNWRKAKARVQRLHVRIANMRRDFLHKASTTISAGHAIVCIEDLQIGNMVRSARGTVQQVGKQVAQKRGLNRSILDQGWGEFRRQLAYKMTWGGGTLLAVPPHHTSQTCPCCGHVAAANRRTQAAFECIACGYQNHADVVGAINILERGLRLLACGEPVHPGHSVKQEPADAIGQVCPAQ

SEQ ID NO: 39280 - protein, 413 aa, unknown
  TnpB Polypeptide
MRYIWNRVKDEIAPWWAENSKECYSSAFEALARAFSDHFASRDGTRKGPPIGWPKHKRRSGRQSVGFTTGAIGILDRHHVKLPVIGVLRVKESTDKLRLKLEKGEARILRATLASEGGKCYTSFTVLVRKSVRAVEPSGVCGHDVGISALITSSDGHITRNPRADAQAREKISRYQRRINRQHRVGSPKCFNLDGTHIKGACYWKDRSKRSYENQAKLQKAHARAAHIRKDATHKASHRASTTYQVNVVEGLRAEQMGRKGHGKRGYNRAQHDAALAEFARQMGYKHLWYGTLLWLAAWWYPSSKTCSECRVKKTKLPRLARVFHCEACGLVIDRDLNAAKNLAALTELVCVCLMAQISTGKPVDWSKLPVRPYGWEGDHDTRSSRGCARAKGPKANGGERKTAQARSLGPLL

SEQ ID NO: 39281 - protein, 395 aa, unknown
  TnpB Polypeptide
MIRAYKYRIYPNKNQINFLEKSFGCTRYIYNWALDLRIKAYQENKETLSAVDLCKRLTVLKKDEDKQWLSEPTNECLQQSIRNMDSAFTRFFREKKGFPKFKSKHKNKNSCKFINSVSFDFENKRIKVPKCGLVKFSCDRIFNGKIGTLTISKTPTNKYYASVLVDDKETMPDKPKIKEETTVGIDVGIKSFAVLSNGQVFENMKFLEKNEKRLAVIQKRFSRKQKGSNRRKSYKLKVARQYERITNLRTNYIHQVTSKIIAENQSIVIEDLNIEGMLKNHCLAKSISSVAWGEFFRQLKYKSEFYGKNLIRIGRFEPSSKLCECGTINNELKLSDRIWTCKTCGRINNRDELASRNIKKFGLKRQNLIGLTPAVSGAEDVELSAVVGAKKRQYM

SEQ ID NO: 39282 - protein, 576 aa, unknown
  TnpB Polypeptide
MSSKSSKSSKSSKSCKSSKSSKSSKSSKSSKSSKSSKSDKKKKKEVVNYNDHSLFPPIALHDGTAYEFKTLILFLETNDDDNSSNNNTTTRINSNTTISSDNFVVKKSEKSIEDYYNKPWSLPIPPNSDVNVHDWIPQKSDIPDDNKIDDICYQYINNPDINSIDNLSYNIDVNNSNLQKIERIRIYPNKKQKNILHSWFDQYTEMYNITINYLIKNLFTKTYKKHDYKFFDYEKYYKEYTLYNVKKCLKPKKNNIIANNVHKIYSHILDEAIRQAFSSLLGNITSIRRGKKFKFRMRKLEYDRKRLSIKIEKNLFSYFGGGLIGNGLEKIKFKAPDGRLDLNIESTITLQYDSESEKYIIFHPIAVKNVNMKKYDLACGIDPGLYGFATIYSNAKVTTVGQNLARKIEVKLNRIDVLNKAINERELNGKKLNSKKVYQLKRKVKKISVQITNKVTDVQWKLAKYLTDTFDKIYIGKLSTLRVVSNKVFGLTDMQKRIILRMSHYGFREKLKYMCKRTGTLYKEVNEYLTSKTCSNCGQINEIGRMKKYECPGCTKWLLRDVNAAKNILKRGLLKS

SEQ ID NO: 39283 - protein, 226 aa, Lactobacillus sp.
MQLGSDIAFAQKLPKTQSQIGIDLNLDNFLTDSNGAMVANPCFYRQAQKKLAHAQRVLSRRQRRAKQEGRNLRTAKNYQKQRLAVAKLHDKIRGQREDFLQVLSTALIKNHDLVVTEELRSKNLLKNHALSQAISDVGWRRFLNMLAYKAKLYGKEFQTIDPKYTTQRCHQCGTIMGQNGCHKLKLKDREWTCPMCQTYHIRDWNAAVNILEKGLGNWENPKQQTA

SEQ ID NO: 39284 - protein, 409 aa, unknown
  TnpB Polypeptide
MYAVQKDVWHLKGLDKTIVEQLLRWSNNLFNVGTYESRKQYFTNQIAVKYPDLYKITKTNENYGLLYSQVAQQSLKSVAESFTSFRALEKLANQGEIHQKPRLPRYRTKGGMYPVSYPGQALKVIGNKVRLPLGKKGKEYFGTDALWVPLPERIKNCQIKELRLIPRNGEVWVEYVHESLTEQAPSCSLEVTGVLGIDHGINNWLTCVSSNGKPFIIDGLRLKSWNQWFNKEKARVQSEHTIHKLPKGFSSKRLQQLSEIRTRRMRDAVNKAVRTIVDYCENNQINVLVFGWNKGQKQDVNMGVVTNQNFVQIPTAKVKDRLQQECDLRGWRFFEQDESYTSKSSFLDRDLLPVKVGEKPDNWQPSGKRIKRGLYRSAQGLILNADINGAANIIRKSIICHRLNYRASG

SEQ ID NO: 39285 - protein, 432 aa, unknown
  TnpB Polypeptide
MMGKKRQATSYGCQQNLLANIEIDSNTSLFDVLGFICSEANKLTNCAIYYARQLYFKTGKLIGKFDLDAQYKKNLHYVAMFSQSAQQTLLSVYESFRSYSGLKALFRTGELDQRPKLPNYRTKGGYSVVSYPRQHLKLIDGKIRIPLGNTVKRWFGLDSFYVQMPINLSFDALKELRIVPKNQHFYIEFVYHVVCENKQLDKTQALSIDPGLNNWLTCVSTQGKGFIVDGLHLKSMNQWYNKVISRLQELGLSGSERFYSVVEKRNRQVRDAINKAARIIINHCLENDIGIVVFGWNKGQKQECNMGRLNNQKFVQVPTARLKQRIQQLAERYGIQFVETEESYTSKSSFLDGDELPIFGEKPEGYFPSGKRVKRGLYRTAKNWLVNADANGAANILKKASRNLDLDLSRLSRGTLTTLARIKLWVSNPSLA

SEQ ID NO: 39286 - protein, 427 aa, unknown
  TnpB Polypeptide
MCAMTTYRFRLLPSRKQEETFVKWLGTTRYLYNLFLEYRMTVYKASGKTISKFDIQKELTELKSDYSWIAEIHSQTLQDVTDRFDRAYQNFFKRVKADASKGFPKFKNRRTWDSFLFKQGVKKLEKENKISLPKIGHVRFKASQEIVGQIKTCSIVREGKSWFACVTCEREFLPLPVSQNMIGIDLGLKSLIATSDGNFIAHPKFGAASAKKTKKLNQSLSRKKNGSKNKEKVRFQLGVESTRIKNARKDFLHKLSSKLIDENQVIVCEELQVKNLMKKCKPKTDEAGSFIPNGQAAKRGMNRSFADAGLGMLVSMLEYKAERSGRTLLKVPAHFTSKTCNCCGSINSELKLSDREWICSDCGTEHERDHNAAKNVLAKGMKILEKQIGGGTRLLHLENKSESFGDIPESLGAEEPISSRGRKVARA

SEQ ID NO: 39287 - protein, 412 aa, unknown
  TnpB Polypeptide
MRSQKLRLKLTKEQEDKAWWFSKVSRNYWNLLVDIDKRNNQGEFDGILSRNGNRTYHSNFYDREVYHLNQSDYLNLAKIVVAKNLEEDYEAWAWYYQPNQSFIYAFLVRELVKLKRQNKGRLNFRGVDKIQPSFNVRCDASANKKRLSRIYLKDNGKLQIPTLGDVNFGSTRNGFDLSGKKQVATISFDGKYWYLSYVEDIEVQVTDLPEYTDGVGIDLGIKTLATVSDGTTVPNIKTFRRVRILEKRLKRLQRKVSRKYLINKCNKHNKTKNIIQLEREIKLIHRSLRNIRINHIRKFVSDLVKTQPQYIAIEDLNVNGMMKNKYLAKDIANCSFYTIREHLIRKAKERHIAVRLVDRFYPSSKTCSYCGHYKKDLKLNQRVYRCDNCQEKIDRDLNAAINLANTDKYVLA

SEQ ID NO: 39288 - protein, 415 aa, unknown
  TnpB Polypeptide
MHLTAKVKIYPTEDQLKVLWELSDKCCSLYNLALAERKDAWKNENKSIKYVEQQNKLPEFKKNNPEYKIVYSKVLQGILKKLDANYKSFFALIKNGDTKARPPNFKSHKFFQTIPYNQSGFYQARNYMCFTHKVNDTELVFDVKKKFENIKQIEIYNDDPLYGKGDFYISVVYEVATPDYFDNGLYQANDAGITKIVTAVNSNGKFFEVKTPRSDKHWQPKIDSIKSKRDHCKKKSKQWVRLHGVYRKMEKKKSNQLSDFQHKLSKKMVNNTKANTIIVGDLKVKNMAQSKKLKGKRKRAMNRSTQNQGYLSRFIEFLTYKAELIGKKVIKIDESYTSKECYVCGKKHEMPLWERTMSCDCGNCIDRDRNSAINIMSKFLSQNALWTSYQQFVDNLRQTGLPMSVRFPESYPQMT

SEQ ID NO: 39289 - protein, 302 aa, Scytonema sp.
MRQEVMQVFNLTYEFKLKPTQNQIALFEQWLETHRRVYNHALAERKNWYKSRFCQVNACSLRNCYIIPADAPRPTFASQCKSLTAARKENEYLKRVNAQSLQQTLRRLEKAFVSMWEQNHGFPRFRKLGRMRSFSFPQLGVNPLANGFVKLPVIGAVKMRQSRDIPNGGTVKQARVVKRISGWYVMLTVQWNVSTPQPMPHGEAVGIDVGLTSFIATFNSLVVKRPRFFVDAVREACPLGTYASLNCCNSAFPENVLARIIGTKHKRKLLYCMSTLPTVVKTFIESCLIKSVTMREWYLLKI

SEQ ID NO: 39290 - protein, 365 aa, unknown
  TnpB Polypeptide
MQITVKFKIVMTKEQVHLVDSISKEYINTVNNIVSSMLQSEERVKLSSKDVLANMPSAVKNQAIRDAESIFAKYKKAIKTKFKLPADKQKAINVPTLRKPVCIWNNQNYSLKDGILSFPVIINGRSKRIQTRAIMTDYQLKQLEGHLGTLRISKKGTKYMAQISVEKTPPASKGDVVMGVDLGLKVPAVVVTESAKTKFIGNGRENKYVKRKHRSERKKLGKAKQPKVIKNLNDKEQRWMKDKDHKISREIINFAIRNNVSVIRLEKLTNIRNTARTSRKNEKNLHTWSFYRLAQFIEYKANLAGIAVEYVDPKYTSQICPNCGTQNKAKDRKYKCSCGYRTHRDRVGAINIINAPVVDGNSLSA

SEQ ID NO: 39291 - protein, 399 aa, unknown
  TnpB Polypeptide
METTTVRRVYRFRLCPNSQQEEGFRRYAGARRFIWNLALQQKRDHYHTTGKGLSEHELSARLTALKGAPDTAWLKEMDSQLLQQVLTDLKKAFTSFFEKRARFPRFKSRKRDTARFRIPQRVTLAAGCLYVPKIGRVKIRQSQVVEGTTKSATFKRDACGHWFVSLVAEREMPAVALMAPAKDRMVGVDLGLKDAVVTSDGERVAAPRFYRAAQRKLRRAQRGQSRTVKGSNNRAKARRRVARVHQKIAAKRNDFCHKLTTGLVKNHDAVCIEDLNVQGLARTKLAKSILDASIGTIRRQLAYKGVWYRTHVMAVGRFYPSSKLCHECGSLLDRDLNAACNIKREGLRLLAVGHTDNANACGEIVRRPMGASLAIVHGDVELTHLRQLGLTHLFQVARS

SEQ ID NO: 39292 - protein, 361 aa, unknown
  TnpB Polypeptide
VETTKTIKCKLIGLTKRKLELLNREYDNFQHYLKTGEDRGVYSATKQQGKRTYRKIDPEKEYPLVIRKDLMDIRKTDNKLAKYWARIPVHGVRGGIKVVLAHQPIEFEEWEICGSKLVRKNGEFYLHVTVKKKVELRKEYSSIIAVDIGAKWVAVSVARHHSKPKFYGKRIREVRGKYFWLRRKLGREKKLKAIKKIGNKERRVVNDELHKIAKDIVDEAEKHNAIIAIGDLRGVRNNNRGRKVNRKVNSMPFYRLKEYIKYKAFERGIVVIEIPEFNTSKQCSRCGSMNTKRPSQGVFICKDCGYQINADVNGAKNILKRVHAYMVWVGAAVTQPEGECRYILHTPQPPLMGLHGGSPVR

SEQ ID NO: 39293 - protein, 403 aa, unknown
  TnpB Polypeptide
MRNTTHKLFRDQTLRHLHDDLNIIGVVRNHFIALSMRYYRRYGKGLSYAKMSAHLTKLKKLEKYDFWKIPYSWALQNMLKRLAQSFREMRTLRRGHPQFKACKKHKGMTFDGGQAPLEEVLEKQKHERNHPTYKIRLNGRWYRFALHRPIEGEITRIQVTRDALGDMYITLTEDFTEIRYEPKTGKAEGFDFGIKDFLTGSDGERRASPMFYKRNAKKLTAAQKVHSRKVKGSHNRERARKQVARLHKKTENQRTDHHWKLAIQLCREFDILFFEDLNLEGMKRLWGKQVSDLAFGEFYQKLKHQSHKRIRAVLKIGRWTPTTKCCCVCGDKNETLTLADRHWTCPSCHTHLDRDPNAAMNILKEGVASFALGVVRPIVLFNRIVGISVEATSPLLKTTNASA

SEQ ID NO: 39294 - protein, 328 aa, unknown
  TnpB Polypeptide
MLKAYKYRIYPNMEQRVQIAKTFGCCRFVYNRTLAYRKEMYEKEKKSVSKTDCNNYCNRELKKENEWLKEVDKFALMNAIYNMDSAYQKFFKEHAGYPKFKSKHDSHRSYTTNFTNGNIAADFERNKVKLPKLKEVKAKLHRNFSGQIKSAAVSQVPSGKYYVSLLVETEHEELQHTSHSIGLDLGIKDLCITSAGKKYINPQIIRKHEKKLIKLQRQLAHKEKRSQNYYKIRKKIALCHEKITNTRKDYLHKISHELISENQVIVSEDLQIKNMVKNHHLAKSISDVSWYELTRQLEYKAKWNGYVLFAGRSMTEILMLQRIYWQRD

SEQ ID NO: 39295 - protein, 371 aa, unknown
  TnpB Polypeptide
VKLTVQTKLLPTVEQAAALLRTLEAANAAANAISTRAWSERTFQQFSLHRLVYAAIRAETGLSAQMVVRLIGKVADAYKLDRARPRRFHRLGSIAYDERILRWKDAAVSIWTVDGRQAIPFVCGDRQRELLASQQGERDLVYRDGAWYLFATVEYTKPPESEITGWVGVDLGIVNIAVTSDGAIHAGRQVTALRHRHRKLRQRLQKKGTKAATRLLKRRRVKEARFGTWVNHTISKRIVADCEGTKRGIVLEDLKHIRSRVTARRSQRATLHSWSFGQLQSFLAYKATMRGVPIRFVDPRNTSRRCPSCGHTELGNRPNQATFLCKSCGLAGLADLIAAQNLVALGRGSVNSPYAGECVETQHASPESRLL

SEQ ID NO: 39296 - protein, 367 aa, Rhodococcus sp.
MASKVVKRACKYRFYPTAEQAAELNRTFGCVRLVWNKALDERQRRYTTEQKPTTYVQASAALTAWKKTDELAFLNEVSSVPLQQTLRHQQTAFSHFFARRARYPRFKSRKKSRASAEYTRSAFTWREGHLTLAKMKQPLDIRWSRELPGDPSTVTVSRDGAGRWFVSILTECVVDELPPTEATVGVDVGLTSLAALSTGEKITNPRHERRDRRRLAKAQRHLSRTQKGSNNRDKARRKVARIHARITDRRTDFLHKLSTRLICENQAIAIEDLTVRNMVANRTLARSISDAAWRQLRTMLEYKADWYGRELMVVDRWYPSTRVCSECGALHDRLPLTVREWTCRCGTTHDRDVNAARHILAAGLAER

SEQ ID NO: 39297 - protein, 221 aa, Clostridium sp.
VIYSYKYHVVFCPKYRRPVLVDGVVDAFSNDNVMGVDLGIKCPAVSYCPDGSVKFYGNGRKNKYIRRHYNNLRKRFQKAKKPKAVVKINNKEQRIMKDIDHKLSREIVNTAKAHDVSVIKLERLQNIRSATRTSRKNNHSLHTWSFYRLATFIEYKAKLAGIEVEYVDPAYTSQICPICGSVHHANDRNYTCRCGFHTHRDLLGAINICNSTEYIGNRYTA

SEQ ID NO: 39298 - protein, 477 aa, Nonomuraea sp.
VGDPLRRPGDSLPDSSAVLRPASGEADCMICSMRSRCAPVNARCQNLVMNTTWACMMRIRCLPVPMSPHWAMNHGYGHGVQLRYDFRLYPTPGQRHALARAFGCARVVFNDGLRARQDAREQGMPYISDGELSKRVITEAKKTPGRSWLGEVSAVVLQQALADLNVAYRNFFASLTGKRKGAKVAPPRFRSRKDNRQAIRFTKNARFCITAGGKLRLPKIGDVPVRWSRDLPAEPSSVTVVKDAAGRYFASFVVETSDVPLPESAAEVGIDLGLSHFAITSDGRKVENPRFLRRAERRLRKAQQELSRKDRGSANRRKARVKVAKAHARVADARRDWAHKLSTQIIRDNQAVYVENLAVSGLGRTRLAKSLHDAGWSQFIGMLVYKAARYGRHFAKIDRWFPSSKLCSGCGAVAEAMPLAVRSWTCPCGTVHDRDINAAKNILAAGRADRLNACGARVRSGPAPAQREEAGSLRGAA

SEQ ID NO: 39299 - protein, 387 aa, unknown
  TnpB Polypeptide
MSIRTIALTLAPTEAQRTAFLRLRRSFADACNHISGMAWDTGTFNRVRLQQATYGEVRAMYGLMAQHTCQAVSVVAQAYRTDKNTKRVFKPTMAVPLDTPRLYRLDGNHVDITTLDGRLRVKLNIGGIQREWLKGAAALKEADLVCDRKGRWRLMVSAVYPDPPPIDTDGVIGVDLGRTAIAVASDGDTFSGQQVTTVRDRYSRTRRMIQRNVSKGTRSSRRRGRQTLARLSGREHRFQAQVNHTISKRIVNGAVASGRAIALEDLTGIRARTTRQARTKTERRRSNSWAFHQLRLFLAYKCIGAGVPLMLVNPAYTSQMCHCCLHIGERSGKRFTCLNAACRWWGDADFNGARNIALLGCSLNAPHGPWLCCSYQPGRRALEIPCL

SEQ ID NO: 39300 - protein, 420 aa, unknown
  TnpB Polypeptide
VKGGENMIKKNKGYKFRLKPNKEQRIYLSKAFGCSRKMYNIYTDLLYSKLEEQGYENGKITYSKLNLPTPAAIKKDYEYMKEIDSLVFANVQLDFKDAIKKFNKEYDKKSYKKSAKKKVETIGRELTFRDLKGIPSFKSKKKNQNSFTTNNQNGTISIVDGKYVKLPKLKSLVKFINHRQIPQDCIIKSATISRDCKGSYYISFTVEYYIKDNTITRPNIDKVLALDYAQQDFYVSSDGEKANYPKYYRKLEEKLKIEQRKLSRKKLFSSNWCKQKTKVSKIQIKISNQRKDWLHKKSREIANNYDVVFVEDLDLRNLAQCLSLGKNLHDNSFGMFRTFLKYKLEDKGGHLIRIDKWFASTKICSSCGTKQEMMLSDRIYNCKNCGLEIERDYNSALNLKTVGTTGLAWLPIPLAENTTA

SEQ ID NO: 39301 - protein, 429 aa, unknown
  TnpB Polypeptide
MEYGEEHKDAYQGPVLTVLTRTVVVPSVTLTQRKFAVLEELEEIYREIVVNLVNLGFRNNVKSFTRLRKWKYRELRNQYPELPSHYIYTACQDASVRIKSFLKLKKKGIARTDRPEINRVSIWLDDHLWKLIDKTTIRIATHKGYLYIPLKPHKLYWKYINSGWRLRTQPRVRLDRKNRRILIDLIFEKEVQTNQCANVPVPVDINESNVTVKVGGEVFILLSDIKEVTLGYAQYRETIQSIRGDRHVRRTLGNNERHKKEDRRLKIANIIANTAKQLGGIVILEKLPNECPRNMIRNIRDKKLRHRIYQAGFRMLLKAIIEKCEENGVPYTLINPKGTSSICPFCGSKLMRGDAPRQLYCKKCGKGLGRDVVAVLNLERKATSQGRVPFAPMPNDSGLEVAVLPMRDWMRRKSLPLIPNETILTKMMR

SEQ ID NO: 39302 - protein, 354 aa, unknown
  TnpB Polypeptide
MWQLVKLVFKYRVKGSASIRLLDRLARRVSMVWNFCNDTQRHAMRWNKRWPTGFDLNALTAGSSKELGIGDETIQAVGQQYAQSRQQFRKRWLRYRGRKTLGWIPFKARGIRQQGDDAFRFMGHDFRVWMSRPLRGTIRCGSFSQDALGNWYINLCCEVPLQPSAPTGAVGVDLGIKTAATMSDGSVYDGGQPYREIEPALAIAQRARKKQRTKALHAKAKNRRKDALHKLSTRLVQQNAVVAVGNVSSQSMVKTRMAKGALDAGWGMFKIMLSYKASARSVRFEVVDEHNSTQTCSACGSLPESRPRGIAGLGIRAWECSNCGASHDRDVNAARNILLSALGGQRPAEGILCL

SEQ ID NO: 39303 - protein, 372 aa, Desulfosporosinus sp.
LILGKKVRLKPTEAQEQQLWKSAGAARWAYNWALERQEKNYASGGSFLSDNDLRKELTKLKQTEEFSWLGDVSNNIPKQAVKDACDAYKKFFKHLAEKPTFKSRRKSKPSFYNDNLKLKVKEAIVLIEKIGWIKTSEQLPLGQKYTNPRISFDGKYWYVAVGIEQEQDTEQLTSEVIGIDFGIKVLASCSNGMVFKNINKSQSVMKLEKRLRRLQRKVSRKYLKNKKGVRCVKTCNIIKVEKQIRVLHRTITGIRSNHIHQATNAIVKTKPCKVVVETLNIKGMMKNRHLSKAIAQQKLYDFKLKLQYKCEKPGIELVEADKWFPSSKMCSSCGAIKKDMKLSDRVYSCACGLVIDRDFNASINLSRYQLVV

SEQ ID NO: 39304 - protein, 442 aa, unknown
  TnpB Polypeptide
MGTAYRTLVLKYDLQRLPPEAAEKIPTLLKLQEEFRRWTAEWVKSGGALPPPPHNPLKHFGTRLLHGLKMLRWFKGLKKNGIKVEKAEMPLVFDVQLRLNSERDIGKGIFVDMPKKEVRVRKLGGGTLQLPLGRKAEEWILARAKEGGRPVLAAVWIGASRRSRAVKLYVALTFKREATPMKPKRLLAVDVNALHNGLAWAAVEGERIVARGVLRPDASKILHLQKVASRLERICAERDEICDSAVAARKRIWRILRSWEDEAVRRLVQLAIQHRAAIVADVPVDGSVRELKEGNYSPEKKALLNFGRLRRRLKGLAEWHGIPYCEERLYSTVCPRCRRKMEELPNRRVKCICGFEAHRDEVPAMWAAKLYPKLTSFSSSPSSAAPAVRARQPARRAARRLDLRHTARKRAGEQKAEKRLCGMCPLQAASEARRGLACAAQL

SEQ ID NO: 39305 - protein, 498 aa, Acidimicrobiaceae sp.
MAKSTITSFVTRLKSSRRSAPVSAANLRPRPEWPRPWRRRRSQSMPRRYAAPDGQIIQAFNFALDPTPEQSAQIARFFGARRKAFNWALDQIKGDLEHYRETGQPTTQPSFYALRKRWNTEKDTVCVNAETGQVWWTEVSKEVFADGVRGASDAYWRWQKSRSGTISGPRVGFPHFKKRGHDRDRFSFTTGTMKLVVDRRHLTLPVLGTLRTHENTRRIERLIALNRAKILGVTVSRQGERIIAAVRVSVARPQQANIAQPDSVVGVDVGVRRLATVATTTEVIGELANPRALEHRLSELRQLQRQRARRTRGSRQYRESAAKITRLHSEVAHIRHHTIHVFTTDLAKTHGVLVVEGLDAASLLQPKGLAGARSRRRGLSDAALGEIRRQLGYKCPWYGSRLIEAGRFFPSSKTCHRCGRVQDIGWSEHWTCDECSSSHQRDDNAAIDLARWASLGSVGAPVKRGAEHQTESHSAAGDDTRKGSPALVGPNNSVRSAA

SEQ ID NO: 39306 - protein, 331 aa, Escherichia sp.
  misc_feature (259)..(315): Xaa can be any naturally occurring amino acid
VKRLQAFKFQLRPGGQQEREMRRFAGACRFVFNRALARQNENHEAGNKHIPYGKMASWLVEWKNATETQWLKDSPSQPLQQSLKDLERAYKNFFQKRAAFPRFKKRGQNDAFRYQQGVKLDQENSRIFLPKLGWMRYRNSRQVTGVVKNVTVSQSCGKWYISIQTESEVSTPVHPSASMVGLDAGVAKLATLSDGTVFEPVNSFQKNQKTLARLQRQLSRKVKFSNNWQKQKRKIQRLHSCTANIRRDYLHKVTTTVSXXXXXXXXXXXXXXXXXXXXXXXXXXXXXXXXXXXXXXXXXXXXXXXXXXXXXXXXXKVNSDARYVDIQRAPM

SEQ ID NO: 39307 - protein, 375 aa, unknown
  TnpB Polypeptide
MNKAYKYRIYPTDAQQSLLLRTFGCCRKIYNLMLEVQKKSLDETGKLTSVTPAMFKQQYPFLREVDSLALANKQMDLQQAFKNFFDKKRKKRCRFPKFKSRKRCRRSYTTNNKNGTIEVLDKGIKLPKVGIIKAKIHRRAPEDWLLKSATVSQERDGSFYVSVLYEYEADIQPVPVSDNAIGLDYASDGLYVDEFNRKGTNHKFFCESQRKLAKAQRRLSRKKGSKKNEKKSQNYWRQLKKVNRIQRHIANQRADNLHKISTEIANQYDVVCVETLNMQAMANKGVGNGKATLDNGYGKFLVMLQYKLAERGKHFVKIDKWFPSSQLCHQCGTIHPEMKDLKVTNIVCDCGLTMNRNQNAAINIKREGLRTLMCA

SEQ ID NO: 39308 - protein, 387 aa, unknown
  TnpB Polypeptide
MIKAHKIRLHPTVEQLAYFSKAAGISRFVWNWALAEWKRQYEAGLKPTALKLKKQFNEIRREQFPWTWDVTKNACDQPFLDLGKAFTAFFKNKAHYPKFKSKKKSKASFYLANDQFEVKDHHVWIPKLGWVNLAENLRFKGKITGARVTRQADWWFISITVEVPDEVPQKRPTAVGVDVGLNRIATLSTGEEFENQAFLKTNLKKLRQANKRLHRRKSGSKNREKARQQVARLHYRITCLRDDVLQKLTTLLADCYGIIGIENLHLKGLLKNRSLARSFSDAALGKLLDLLTSKVEQRGGQVVKIGQFFPSTKLCHGCQWKWDEITLADRVFVCQNPDCAYHLFSQDRDHNASLNILAEALRLIGLIDQAVNGSGSDEDGNLPADLG

SEQ ID NO: 39309 - protein, 397 aa, Nonomuraea sp.
VRRSFTFLLRPTSRQAAVLAQCLEDHRQLYNAALEHRRTAYAKAGVTIRYGDQSAELKEIRKADPGGQGRWSAGSQQQTLRRLDRAFAAFFRRVKAGQKPGYPRFRGRGRFDTVEWPAIKNGATWDSQPHEPATRVYLLGIGHVRVHQHRAVKGRVKTISVKREGSRWYVVLSCEDVPAQTLPATGAVAGIDMGVASLVTTSDGEHVANPRHLAATADRLAAAQQDLACKKRGSKRRRKAVARVAALHAKVRRQRLDGAHKATLHLVREYDVIVHEALNVAGMTRRATPKPDGDDGYLPNRGSAKSGLNRSIHDAGWGVFLTILSHKAESAGRELIAVNPASTSRTCARCGHCAKDNRLTQAEFRCMACAHAAHADVNAAKNILRAGLALRQAAEAA

SEQ ID NO: 39310 - protein, 377 aa, unknown
  TnpB Polypeptide
MKLVATVKLLVDLEQKTRLLATMERINEACSWLAERAFELQSADKIRLQKLHYRDLREMFGLSSQHAVRALSKVCEAYKRDRSKCPVFRKYGAVVYDQRLYTFKHGLDRVSLLALDGRIVVPCAVGDYHRGRLEGVRGQADLVYRKGKLYLFVSVDVPDGSPVETKDWLGVDLGIRNLAFDSDGKPYTGAAIEKVRQRHQRLRSVLQSVGTKSSKRHLKRLSGREARFRSNTNHIVSKCIVAKAKDTARGIALEDLTYIRERATVRKSQRSMHSGWSFFQLRAFLAYKGLLAGVPVVVVDPRGTSRICTQCGHNDKANRRSQSEFVCKSCGFSDHADHIGAVNIARRAAVSRPFVAAIGRETHSRDTSSRLVTSSSL

SEQ ID NO: 39311 - protein, 377 aa, unknown; identical to SEQ ID NO: 39310
  TnpB Polypeptide

SEQ ID NO: 39312 - protein, 386 aa, Halomonas sp.
MRQATKVRIYPTAEQVDFLHRQFGAVRFVYNKALHILSHRYRVHGQSLNAKHDMKKLLPVAKKSRKYGWLREVDSMALQQACINLDRAFQNFFNPTLKVRYPRFKRKHGKQSSYHCVGIQVGEDAIKVPKIGWIKARLHRPIDGTLKSITLTRTTTGKYFAAILVETGEEAPTPIRDLDANSITGLDAGLTHLVIDSSGRKLPNPRLLLQVAANLRHKQKALSRCQKGSRRRAKARLRVAKAHERLANARADFQHQLSRRLIDDNQAVIVETLRIANLLKNKRLAKHVADAAWGGLMQKLAYKAERAGKHLVKLDAWYPSSKTCFHCGHKLESMSLSVRTWGCPACGTQGIDRDINAARNIRHQGIIALKAAGLSVSAHGGCVSPA

SEQ ID NO: 39313 - protein, 283 aa, Xylella sp.
MHDRFTLTNDQFDLEASRIRIPRLGWVRMRETLRFAGKIMLATVSRVAGRRWFVSITVDVPDPSHLPQAENQGTVGVDLGVLVLATLSTGETVCGPRPHRALLGRVRRLSRSVLRKVKGSANRHKAKATLANLHARIAAIRLDALHTLTSDLTRRFHTIGIENLNVKGMLRNRHLARSIADIGFFEFRRQLEYKAMMRGGQVVVANRFFASSKRCSTCGHTLNELPLSVRQWACPACGARHDRDVNAAVNLKNMAVSSTVSACGEEGAGPRHKTAVGEAGSQL

SEQ ID NO: 39314 - protein, 438 aa, Myxococcales sp.
VAAHKAFVYRLYPTEAQQQTLLRWEGVLRFVWNLAHEQRLRGLARPHGDPKHYPSWYDQKKELTELRKLHDWLREVPCNAQQQMLKNLDVAWQRFFDRQGGRPHFKARGIDAMGVAEPDAKRSWELTTTSGQHMLQFTKLGAIAAVVHRPLEGKPGTATITRDGDAWFVSITCELTARLPEEQRTSQAGKPVVGIDRGVTNVLADSTGHLEPRPGFLVKGARKIVQAQKKLSRTQKGSKNRQKARQKLVRAHRQVRRQREAFVHTQAYRYAKNHSVVVVEDLKVARMTASARGSAEEPGTRVGQKAGLNRSILSSGWGLFVTLLEQKATRFGMHVVQVAAAYSSQECAECRHVDPASRRSQAEFHCTKCGHRDHADVNAARVLVKRYEESTRRTGGGEVCGGDGVSRPTKQKPKTARSRTPLKSGAQSSDLPVGDGLR

SEQ ID NO: 39315 - protein, 384 aa, unknown
  TnpB Polypeptide
LSPNNKQLTKLFQYAGCSRFAYNWAVAREQENHKQGNKFLSDCDLRKEFTQLKKQENYKWLNKISNNVAKQAIKDACNSYKRFFKGLSKYPKFKSKKNSKQSFYQDNVIIKFTETHVKIEGFAISRKKNKQKLNWIKLCEKGRIPTNCKYRNPRITYDGLHWWVSVSVELDDNTDIPINEGIGIDLGIKDLAICSDGNKYPNINKTTKVKRLEKKKRMLQRSISRKYNMNKEGERYKKTRNIIKGEHKLLKVIKRLTNIRHNYLHQTTSEIIKRKPSFICIEDLNVSGMMKNKHLSKAIQQQGFYEFRRQIEYKAKWNNIPVILADRFFPSSKLCSCCGEIKKDLRLSDRIYKCDCGNIIDRDYQASLNLKQYGENVLKQKSVK

SEQ ID NO: 39316 - protein, 377 aa, unknown
  TnpB Polypeptide
MTVVKQGIKVRLYPTEEQEILINKTLGCVRFVYNQTLEKCKQSYEQTRHFPSQNERIKNLVPLKEVYEFLKEVDSIALQQGVRDFNFALGNFFKNKDCFSFPRFKTKHRDKQSYRTSGEIVLGNKHLKLPKLGKVRTKRFDIPEVYKILNITVEKTNTNKYYASIYIETEVQSLPKTGKQVGFDLGLIDLLICSDGTRYERPKFAYAFKDKLAKEQRKLSKMRTKLERAKLNLDECKNYQKQKHKVAKLHEHIANCAKDFNHKLSRKLVEEYDLLAFENLNIEGMRKNHRLAYSISDVRWSQLLNFIQYKCEWYGKEFRQVDRFYASSKICSECGAYHKDIVNSLSVREWICPDCGAHHDRDVNAAKNILNQALSEA

SEQ ID NO: 39317 - protein, 408 aa, unknown
  TnpB Polypeptide
MHCDKSCVSFVGNTVNILLTLERSDNMTVVQKGVRVRLYPTEEQEILINKTLGCCRFVYNKTLENCKQSYEQIQHFPSGKERSANLVPLKEEYEFLKEVSAVALQQSLRDLDSALNNFFKNKSHFGFPRFKSKHNLKQSYRTPYNNGVADVLDNRHIKLPKLGRVKTKRFDMPEVYKIFNFTIERTNTGKYYASICIETEVQQLPKTGKQAGFYLGLIDLLIGSGGTRVERPKYGYAFKNKLAKEQRKLSKMRTKLERVNANLGECKNYQKQKHKVAKLHEHITNCAKDFNHKLSRKLVEEYDFVAMEDLNVEGMKKNHYLAYAVSDVRWSQLLNFIQYKCLWYGKEFRQVDRFYASSKICSCCGTIHKDIVNSLSVREWICPDCGVHHDRDVNAAKNILIKALSVGV

SEQ ID NO: 39318 - protein, 447 aa, Mycobacterium sp.
  misc_feature (447)..(447): Xaa can be any naturally occurring amino acid
MARLKVPEGWCVQAFRFTLNPTQTQAASLARHFGARRKAFNWTVTALKADIKAWRADGTESAKPSLRVLRKRWNTVKDQVCVNAQTGQVWWPECSKEAYADGIAGAVDAYWNWQSCRAGKRAGKTVGVPRFKKKGRDADRVCFTTGAMRVEPDRRHLTLPVIGTIRTYENTRRVERLIAKGRARVLAITVRRNGTRLDASVRVLVQRPQQRRVALPDSRVGVDVGVRRLATVADAEGTVLEQVPNPRPLDAALRGLRRVSRARSRCTKGSRRYCERTTELSRLHRRVNDVRTHHLHVLTTRLAKTHGRIVVEGLDAAGMLRQKGLPGARARRRALSDAALATPRRHLSYKTGWYGSSLVVADRWFPSSKTCHACRHVQDIGWDEKWQCDGCSITHQRDDNAAINLARYEEPPSVVGPVGAAVKRGADRKTGPGPAGGREARKATGHX

SEQ ID NO: 39319 - protein, 358 aa, Desulfotomaculum sp.
MLKAYKYRLYPTKEQSRKMHETCFLCSLVYNQFLEERREAWEIFGVSLSCYEQIKALPIKKEDDPRLKQVFSQVLQDVARQVDKTYQAFFRRVKAGETPGYPRFKAARRYDSFTYPQSGFSLKDNRLVLSKIGPVKIKLHRPMDGKVKTLTIRRQNGKWYACFSVEIDAVPLPPTGESCGIDVGLEKFVTTSDGEMFDNPRQLRQAEKKLKQHQRRVSRRKKGSNRRKKAVRELARCHEKVANQRRDLHHKVARSLVNRYDVIAIEDLQVKNMTQNHHLAKSIADAGWGNFRLILTSKAESAGRKVVEVDPKQTSQLCSRCGAEVKKKLSQRWHHCPVCGLSIDRDINAAINILKRAV

SEQ ID NO: 39320 - protein, 328 aa, Massilia sp.
MFVAHRIRLTRIMQLGRAFENFFAGRSRYPRFRRKGRDDRFTLTNDQFRVEGRRIRIPKPGWVRMREVLRFAGKVVSASIACIADHWYASITVDTTDSPVPPADNQGAVGVDLGITVLATLSTGETIQGPMALRTLLPRLRRLSRALYRKVKGSHNRAEAKLKPAKLHARIANIRRDSLHQLSSSITRRFHTIGIENLNGKGMLGNRHLARAISDMGFYEFRRQLEYKSTWRGGQVVLVDRWFPSSKLCSGCGHRLESLGLGARNWTCPGCGALNDRDVNAAINLRNMAASSTASARGGEGSGPARAGRNRPQGSGNPTAKLTMANFA

SEQ ID NO: 39321 - protein, 390 aa, unknown
  TnpB Polypeptide
MKKVHKIRLEPTVKQLILFHKSAGVARFSYNWALAKWQELYEAGEKTSEISLRKQLNSIKRVEFPWMYEVSKTCPQQAIKNLGNAFSRFFKKTSKYPKFKKKGIHDSFRADDGPGTFTITENRIKLSKIGSVKLSENLRFTGKLISATVTRRAKHWYVSVCIETEINPITHENQGVVGVDLGIESLAVLSNSVVFENPNALRRNLHKLKRIQRSASRKVKGSYNRKKAMQAVASLHAKIYFLRQDSLHKLTTHLAKGFKTIVIEDLNVKGMVKNHHLAQAIFDCGFGEFRRQLTYKCQWYGSELVVADRFFASSKICSSCSFYYKGLTLNIREWTCPCCGTIHDRDYNASKNLEQIGRVPPELTPVETEALACNSVSETTVVEAGISPMA

SEQ ID NO: 39322 - protein, 367 aa, Parageobacillus sp.
  misc_feature (181)..(215): Xaa can be any naturally occurring amino acid
LFKQQFTKEEFIKDHEAWRKRFLAARNKEMIISGRKDAGSGNFVFHYNPETNELHMTSVTGKIVTFSGVVFPYGQEIVNKAVTDHIQCKNKKEYGKPIAWSVEDHGEYYIIKCLVDVESNPSIHFSTSDGVIGVDCNYNHIAWTNVSEDGNFLESGKLSFSIEGKTSGQITKIIEAEAIAXXXXXXXXXXXXXXXXXXXXXXXXXXXXXXXXXXXDTTLSKTGDRYGNKKANRMKSMFAYRKMIQAIESRANKMGVAVTEVNPAFTSVSGKLKYMRKFGISIHQAAAFTIGRRGLGYKEKAPKVLKRYIPKDASHHWKHWSVLNKKFSVRTHMLYHLFNVNQPHQGIDVFHPSLLEEEKHQLIKALA

SEQ ID NO: 39323 - protein, 313 aa, unknown
  TnpB Polypeptide
MLCRAVAVELEVTRELNRLLCSVESAYLGIVREVVEYAVANNITSATQLQGLFYRRYRSEYPGLHAHLIIQAIRQASGVAKSFVERKKRGLVSKPYPEVKSVSIRFTEKAWSYEQFIHSIAPVRLSLSLLGGRREVWLRPHKRFWQYWWRVLNGEAGLGRTLIIKRKTNKWYAIFIFEIKPKEGTPQSVISFDINENTVAISRIDIETTVDKVVDWNRQYIMPQLYMIRTDFGRLARRYEKVRNTIIERLKPHFTLPNGNYVNVTNTREYRKFVRRLREGNRKVGRVRQIANELTKTPAIIVTEELGSNPQNQ

SEQ ID NO: 39324 - protein, 386 aa, Lactobacillus sp.
MTTVLKGIKLRLYPNKQQQAQLWQMFGNDRFVWNQMLDMAKQRYQNNPSSQFVDQYSMDALLKPLKQEYPFLKRSDSTSLQVVNHNLYQAFQRLFKHLSGYPRFKSRRSAKQSYTGKSKIQIVANRYLKLPKIGYIKTSKTRQLTHCKIKRYTVSYDPSGRYYLSLQVETTVQPLPKTSQQVGIDVGVTNLAVTSDGHKYAKFDTTWLTQQAQHWQSKYSRRCHQATVSVRQWNHNHQDVKEELNDYQNWQRARIQKARYQRRVADQRRDYLHKLTMALVTQYDMIVIEDLKVKNLQKNHHLAAAIVNASWHQFRTMLEYKCDWYGKQLITVKPNYTSQICSHCDYYSGSKPLAIREWTCPKCGVHHDRDINAAINILHKGLKAVG

SEQ ID NO: 39325 - protein, 454 aa, unknown
  TnpB Polypeptide
MSQSVRIIPLPLKGPKHARTRRLLREGQIEAGRLWTDAVAWHRERRAAGGRWPDRNEIHAWSKGRYALHSQTVQRTVYRLLENVEATMTRRRNEPGTRRWLRLPWREKRFQPLVWPAQAPSYDPDRERLVLPMGRGRPSIVLTGIHLETVGAMSVVWNDGYELHVAVPDPAPAARPEATGRVTIDLGEIHLGTAVSDTGRGLVVSGRGIRAKKRYRNKELGRLARAQRRATTGSRRWRRLQAAKNALKARIRRQVRDLRHKATRQLIDFCVEVGAAELFIGDPRGVRRNRCGRKHNQRISQWEMGTDLRYLEEKARKAGIRSFSGDERGTSSTCPGCGHRQKVRGRDWRCRSCGFTGHRDVVGAVNMFPLAFGTKVTFPRPQDVTYLQPGPVRRARRAVVAQDTGPATGNRRRRFTNLPDGPPSAETAKAVSSRGGRKPRVPDTVRHWEETPHL

SEQ ID NO: 39326 - protein, 378 aa, unknown
  TnpB Polypeptide
MKQTLMVKLAPDEDQHKILLETMERFTEACNSIAETAFQNRVANKYALQKLIYRQIREKYGLSAQLTIRAISKVVEAYKRDKRVKPSFEPHGAIVYDQRILSWKGLDRVSILSLKGRLIIPTTIGPYQEARLDRKVRQADLLLRKGIFYLAVVIDAPEPAPFETTDYIGVDLGVRNIAVDSDGETWSSGQVNGLRSRHNKLRAKLQAKDTKPAKRLLRKRTGKEARFARNVNHVISKSLVAKAKDTCRGIALEDLKGIRGRTTVNGSRQRRVHNSWSFYQLRAFVEYKARLAGVPIALVDPRNTSRTCPSCNHVSKGNRHGELFRCELCGYAGAADYVAALNIQGRVAVSRPYISEDFSLSQLDSPPGTSPCPSGMGS

SEQ ID NO: 39327 - protein, 369 aa, unknown
  TnpB Polypeptide
MVRLETNDDEKATLLETMERFNLACNYAASKGVCTSKYELQKLVYRELREKYGLGAQMAIRVISKVVETYKRDKAVKPKFRPYGAIQYDQRNLSWKGLDRVSVSTIRGRMTLKTRIGEYQKQHFYSKVVRGQADLVYRNSAFYLAVVVDAPEETPYEAKNVLGVDLGIENIATDSTGEHFSGKKADEVREHYTSLKARLQARGTKSAKRHLKKLSGREKRFKRNVNHIISKTLVGKAERTESLMALEELKGIRERIRVRHNQRERCSKWVFRQLRNFIQYKAKIAGVPIRIVSAQYTSKTCPKCGTIDSRNRPERSLFKCVLCGFSGEADYVAALNIAKRATFNWPIVAPSLNEAYEVATISLPLGGRS

SEQ ID NO: 39328 - protein, 405 aa, unknown
  TnpB Polypeptide
VKLNQQVRLYPNKTMQRVLDSLCDYRRYCWNTAIACWNNQYEERLIGLPQTLLDKLRSKTEPLTTEEMDLVKRYPPPSHYSVRNELVSQKEDWQHTFSSRVLQQTVKDVAKAWNMFFKHQDTIGRPTFKTRKSSKQGFKTDRARIRNGQLLLDKPQGYKGKWQTIRFKGLSLPDGKITLCSVTRKNGRYMATFTIEVEPMMLPHTGQKTAVDANVDHFDTTDGRTTLKPEVLNTLYARVCYYQRILARKRRKKPRAIHSKGYQATRTKLQRTYERIAHIQKDLLHKFTTDLYQRFDTVVIEDLDVKKMQMSKRAKNLHRSLFGQFRQMMEYKAQKFGKTLIIADRFYPSTQRCSSCGFVKTGDDKITLNGNQKHGTRHNEYICYHCGYEDDRDHNAVLNLLALAE

SEQ ID NO: 39329 - protein, 405 aa, Microvirga sp.
MFYVSGMLCATKVRIYPTPEQAEFLGRQFGAVRFVYNKALAVKRHCYKVHSQKLSTMHDLKKLLPVAKKLRRYAWLADYDAMALQQACINLDKAFRNFFEGRARFPRFKRKHGEQKSYHCSGKIAVLEDSIMLPKMAGPIKGVIHRPVSGTLKSITVTRSATGKSFAALLFEDGKTKPEPAQVVPEEAIVGVDVGVINRATESNGRETPNPRFLKRALHNLRRKQKAVSRRKKGSRNRAEARLKVAAAHERLVHARHDFQHKLSRRLTDENQAVCVETLAVKNLLKNPNLAQAIADAASYSLIAKLTYKAERIGNHLVKIDWWTASSLTCSCCLQVKEELDLKERRWTCEGCGTEHDRDENAALNIRRAGIVELRAGGWHVPVCRGLRKTVHATAAASEAEILPA

SEQ ID NO: 39330 - protein, 405 aa, Streptomyces sp.
VIRVQLRYSFRLYPGDGQRTALARAFGCARVVYNDALRARQTARGEGMPFPKAGDLSKTLITEAKDTPERAWLAEVSAVILQQSLRDLDTAYKNFFDGLKGKRPRVGAPRYKSRKDTRQSVRFTANARWSITPGRKLRLPKIGDVRVKWSRDLPSVPSTVTVVKDSAGRYFASFVVETGPQEALPETTPELGIDLGLGHFAVLSDGTKVASPRFLRRARKRLKKAQRALSRKEKGSKNRDKARVRVARAHAGVADARREFHHQLSTKLIRENQAVAVEDLAVKGLARTRLAKSVHDAGWSAFVAMLEYKAARYGRTLVKIGRFEPTSQVCSQCGVQDGPKPLHVRVWTCGTCGAVLDRDINAAVNVAKAAGLAVTACRAQVRPGRVPAPRDEAGTHPTPQPSTAR

SEQ ID NO: 39331 - protein, 439 aa, unknown
  TnpB Polypeptide
MEITSTYSVRLHNFNRVFDDTVDVYRNAVDFFIELTMTHWESHFANLSQANDCIRAAESLSVRTIKRPMTTYNFCQDFEKFPCYLRRAAIKTAYGQVSSYQTRLAQWKAKQGQKGRQPGLPGAGRIFPVMYRDNTFVRTGRNCVQLKVRIRNTWDWVDVALDKHDVNYIALHCATRKELCPALRKRGKKWYLDFSFSEKVTLDKVSLDTQLVLGIDLGINNACVCSVMDSKGTIIGRRFLKLSKEQDSLERALQHIKKAQSNGAIHMPGLWARANGVNEDISVKTANFIVEVANEFKVDVIVMEHLDLSSRKRGSRRQRLHHWRAKYVQQMVAYKAHRCGIRVRRVCAWNTSKLAFDGTGVVTRDQDNYSMCTFKTGKRYSCDLSASYNIGARYFIREYEKSISVTKWRHITAKVPECAKRITRTLDTLTRVCAELRSL

SEQ ID NO: 39332 - protein, 222 aa, unknown
  TnpB Polypeptide
VLRTAEANKYEALSPQVEETGDGVGVGSGGNQLATCASGEMFDNPKPYRKAQKRLVRLHRRLSRKQKGSANRKKAVVQLARAHKRVADIRLDNLHKLASYLAKKYRVVVIEDLQVKNLLKNHRLAGSLADCGFYELRTPSRYRERRQLEYKAQLYGCQLVVVNRFYPSSQLCSRCGHRQKMPLCQRVFRCERCGLEIDRDLNAARKLHAAAPKPLQRSSQES

SEQ ID NO: 39333 - protein, 297 aa, Psychrobacter sp.
MLGYISIQDDFQTMLKAYKYRIYPNREQQVLIEKHFGCSRFVFNWALALQKRYYAIFGKSLSRTKIQSHLVKKKKKKKAKFSWLSEVNSQSLLNALRGVHTAFTNFFKGQAKFPRFKSKKIPQRSYQCPQHCTANFAQGMINLPKIKGIKTVFSREFEGKIKTVTISKTATGKYYASMLVENNEVVPTPTTIEPSLTVGIDLGISHLLVLSDSSKVDNPKHLSKASQRLSAQQKIFARKQKQSKNYQKQKLAVARIHEKVRNQRLDLHHKVTYKLICENQATSYAIEDLGVKHGKEP

SEQ ID NO: 39334 - protein, 407 aa, Streptomyces sp.
MQLRYAFRLYPDTGQRHALAKAFGCARVVFNDAVRAREDARRAGQPFPKAGELSTRLIAEAKRTVERSWLGEVSSVVLQQSLRDAEAAYRNFFASLKGTRKGPRLGAPRFKSRKDARQSVRFTANARWSITGAGRLNLPKIGAVKVKWSRTLPTTPTSVTVIKDSAGRYFASFVVDTDPAADAARMPDTDQTVGIDLGLTSFAVLSDGTKIDSPRFLRRAEKKLKKAQRELSRKQKGSKNRAKARGKVARVHAKVADARREFHHQLSTRLISENQGIAVEDLSVKELARTRLAKSVHDAGWAQFVNMLAYKAARYGRTLVKVGRFEPTSQVCSVCGVKDGPKPLTVREWTCTACGTRHDRDHNAALNIRQAAGLAASACGAPVRPGAIPAQREETGSHGLPTGNRAA

SEQ ID NO: 39335 - protein, 405 aa, unknown
  TnpB Polypeptide
MSKYIVRTYKVPVPAELYPLCSELNKTAARIYNKTLSLVKKIKYRKGFWLTPTSAQKYILRWACSINVHAHSKQAMIQQYFQALDSYFNAVKTKPDLKPPYKKKRFMPFIWKNTAIKLLPDGKLRLSMGNNQNPIVIQTTLPADTKIRQAKLVYEDGKYYLHLGIEVKNGAQKRQGKKVMAVDLGILRPITCFDGIEVISYHGGILNSLIRYRNKELAKFQQMLSRCKKGSKRYRKLVKAKKKMLRRIRHQMKDILHKVTSNFLKMCLQKGIKTITVGDITNIRERVQGNDNANQKLHQWCFRKMIDMLTYKAHLLGIDVKLVPEEYTSQTCPACGSRNHQNNRNYECQNCGFKYHRDGVGAINIWRRYLGRESQVVAVLAPVRGVRFKPHLCGHGVQNAPWKAA

SEQ ID NO: 39336 - protein, 493 aa, Ruminiclostridium sp.
MGLRTIHLKLHKPGSTKKNIIKAAFVNYNNAYNYLLDRAFADIENIENNYKSTKGAYSSLGLSKWIDRDMSAELNRFEVQPFKDSLKLDFGMTLASYFVQKKNNPDIAFPAFRQGPVTGEDRLRPIYFCRYDTKRSFCLIYDAANGKFFAKLFLMNVKNGKARQSFDFERDFKYISRKAEQVKAQKNETYLIVPLSFGKWQLNMLMQAVEKPEILRAARLLVKNNEYYLSLSIDLPEDEKIAAGTYLGVSRGIEHAVSYSVVNKKGQLLRNGTLDCGRTGNPSEQRRNLFELANTIVEIAVKDKSMVVLQNLTGKGDKLSWNDAGTTVKPIFGCKQYNDFARILDYKLPQKGLPPPAKVSSVDIFHRCSICGCNTKKNRFSKGMFICTTCGMSSSLDSLGSLNLAVKLIKYQNTSIKLKARRTIEGMYLQNDLIGLELFVPRNENPFERLKEKINEISENMEDSQAGHRLNARDVRSIIEKLKSHDFTNIEIV

SEQ ID NO: 39337 - protein, 402 aa, Streptomyces sp.
LIRVYKFRLRPTTRQARALGEMLRDHCSLYNAALQERRDAYRHASKTNIKYAGQSAQLKEIRAFDPDRQGRWSFSSQQATLRRLDKAFDAFFRRVRSGLTPGYPRFKGVGHFDTVLFPKDGDGCRWDSTPGDRQTRVRLQGVGHVRTHQHRPVRGRVKTISVKREGKHWYVVLACDEVPTEPLPASGSIIGIDMGVKHFLTTSNGEHVENPRYLAAAADALAVAQQHLSTFPKRTRLRSKRHRAAVRKIAKLHGRIRRQRRDHHHKTAKGLICGHDVIAHERLNIAGMTRAPKAKPDPDQPGAFLPNGAAAKAGLNRSILDAGWGQFLSILAQKAESAARRVIAVDARNTSRTCPRCGHVARENRVTQATFECTACGFLANADHVGALNVLSRAGLVLCAEV

SEQ ID NO: 39338 - protein, 437 aa, unknown
  TnpB Polypeptide
MQIQKTIKFKVGELSNSKRERLDLVLNKSLLCLKDIIQIAIIENTSSNKKLHHLCYDIMRKKYKLPACVIHQCRNKAVEMLKSWNRLQRRNLKKQILPPNPKASRIRYDNVVFNILKTESKKFEYFVSFLISSGYKKDKSRIYLPLIVNSDYQKEYIKDLVNKKYKLCASDLVKKNKDYFIHITFSKEINIPKVNSSFQPIGIDIGINNLAVVSVAQQKNPVKFFSGKRLIWKLKQTQKKNAEFQKNCNLRLQRKLNQELVDYRDFLNHQISSYVIKRALELERPVIVLENLRYIQQTTKHRKKYKNIFFNWSFKKLQEQILYKANWEGIPVLFIEPNYISQICPKCFSTNKRKKHNYKCSHCGYSANSDFVGAVNIRKKFFEFIQFEEQASINYALNITCSEPKALKIRSVQNSIKLEDVSPSKPKGMGIRNIEIL

SEQ ID NO: 39339 - protein, 281 aa, unknown
  TnpB Polypeptide
LLVKYEGERLRISVKPRRFIYVKLKYGGYQKRFIEEWKAGRLRVGEVLINKTKVLVPFRKDVDLTNPKGWIAIDVNESNVTCVSTNPHIIRFEHDLREIRSSYFEKRRKIQKLSKLKPTASKRLMKKYSKRKRNRTESLCHKIAKMIVSRARKHGFGIVMENLKGMRKQIRYGKRMNRRLHTLPYRRLQSYIEYKAKLAGLPVVYVNPRGTSSLCPICGGKLASNGHRLLKCRKCGCEKDRDVVACLNLLERNPRCGEFPFPPKATHEALSAEVERIVIKC

SEQ ID NO: 39340 - protein, 411 aa, unknown
  TnpB Polypeptide
VKAHRALVFPIVWHDPRLDWLLAEFRLLVNESIRVAFEGDIRSRARLASAAYADMSERHPVHKKYIPSAFGVALAVLKAYRRRLRKGKRSAVPFARRPILVAENQSYWLDRQTGRIRIPIQGTEGVQLHLPLSEWHRSFLRDPAWGLGSLTVVPGRIILVVRRESPDAYEPEGAIALDTNEDSLDGVVASDAGIVPTVLPFGGVRRIQQTHFRRRRRLATKKAQDRRVMRRLVNREGRRERNRVRQRLHRISKRLVQFAKNGRAAVVLEDLTLHGAGGRSRRMNRRLSSWPRGELHRQIEYKAALAGVPIIKVNPAWTSKTCPVCGARRRDRVGKVFVCLLCDWEMDRQINAGMNILKTALASNEALARAVRFQPGALRHDVVIPLYDLLREGGGAREEPSGVELGISRIA

SEQ ID NO: 39341 - protein, 220 aa, unknown
  TnpB Polypeptide
VIGVDFGRRDIAKTSTGKGWEGKNLQDKRDKFARTRTSLQKKASKGTRSSRRRCREILKRLSGREKRFQKWVNHNVSNAIIQDAKATNSLIAIEDLTGIRTRTNSQPRNQIERRRSNSWAFYQLRTFLEYKGIKEGVKVVAVPPAFTSKTCHCCLQIGVRTEKRFKCSNLRCGWIGDADLNGAKNIELWGCCVNQPGGSCLLSCDIDGGLLKASSSDEVG

SEQ ID NO: 39342 - protein, 396 aa, Ignavibacteria sp.
MLRSHKITLNPNNKQRTYFAKACGVSRFAYNWALAEWKRRYEAGETVSEGALRKELNSIKREQFPWMLEVTKCAPQLAIMDLGEAFKRFFKKQTRHGNHGFPRFKKKGIRDSFELSNDQFHVSGNRIKIPNLGWVRMRESVRFVGKMMKATVSRRADKWFVSITVETDDIPKADENQAVVGVDVGINALATLSDGRSIAGAKAHKHLLPRLRRESRAMSHKVIGSQNHRKAARRLARTHYRISCLREDCLHKLTTDLVRNYGVIAIEDLNVAGMVKNRRLARSLMDSSFGEFRRQVEYKAAMCGRRVVIAPQFFASSKLCSACGAKNDTLRLADRQWQCVSCHTEHNRDLNAAYNLRDYAVQFLKEQSIAKMDTAGSSPVEACGESPSGALCEAGR

SEQ ID NO: 39343 - protein, 336 aa, unknown
  TnpB Polypeptide
MRPKVYFWSHFLNLNDKIFRSKRYCFHFNIQTDGIDCSLLFVLHELANEKRGSSLVKSKEEGDFPSVENLPDNHRQYYLDETKVNLVGCDPGKRSLVYLVDSTGKKLQYTAPQRKFESTAKRSQLILEEEKEKCGILSEEALLSKENSKTTDYFKFKKYIYEKNKLNYITQSFYNRPTWRKMKMRRFIYGKKSVDKFISKIGKTFGLNGRQVVIGYGNWSQTKQMKHYMPTLGKGLRKLIHRKYCTFTVNEAYTSRRCTDCLRDLNKYVGKVKNFKTKKVEVTKIHRLLVCSGCVSSENKKITFKSRDINAAINILKLTRYYLLYNCRPVEFCKRN

SEQ ID NO: 39344 - protein, 482 aa, Arcobacter sp.
MILSMKNEKTVNLGYKYRLYPTKDQINILNHQMYIYNQAYNICLNLWQKENDKNKDLPKEDRVFRNAVSYDTVVKRALKLRRLSFLTVVTQQARINFLKAVKKAFSKDTVSKRLKAIDFAVTPKEKAKAFKLGMPTFKSSRGIFQSFNWNNQGYQILDDTNSNSRFKTLRLLKQNLRFRYHREFPNNYKLSSITISKDSIGYYVSFGIEFKKQIDLSVSTDNIDTFKSIGIDLNAYNIAVSSDVNFIEDSNISKVIMNHLIDNGATNRKGLKYAKYVKLLERKQSKRVLKELKNSKVNKTKIKLGSNHKKTQKKLNKLTKRIANQKKDLYHKITTQLTNKFDLIVVEDLKTKNMSKSSKGNEINHGKMVKQKSGLNRTILNASFYQFVSMIQYKTTMLNDKLFVKVNPQYTSQECSNCGNIDKANRSKQDKFKCTACGFETNPDIQASKTILKRGLESFGLGTSLVDLKHKAFRSTSSEVAS

SEQ ID NO: 39345 - protein, 787 aa, unknown
  TnpB Polypeptide
LLKNAGKRKEIDAHMPANDAGARLDVLHVATETITLTRTFGMVPASREDIVAPAVLERVVVAANAFVKVGASLDPALLEGTTLVAVKRFYAAARAVPGLDPVLKATRLRERAWRCASHVAYYALQEHQRRCMVIPAIVSAMQGISLSTIREKQFPNKDFIDAARGALKDAGLPGGCLSSVYLSNMARHAKHLLEDALRSSSREAIARCIAAIARDPARIVDPVIASLGAGMDGVPAGIARAVSVRLTRRVKDRVRGRGVPAGRHRLDVLVDAILGGEAMTTWQQARCAWRDVAMEWMASRVRSLDVAALASEAVKDVLAGMTVDEALAAMFSSHRLPRVNVTGQIAPDPARFLRESALVFVRNQVGAALWAMLATDVDAVLASIGKEPGSHVTLPRCKKHSIPVAIDDGQVYQLDLRKDAGDGRVVAATVRFSLEPGVRSTFRLRGLDRIDTMLSRGFVPARGTITRKPGGGLLLHLPFEKPCTVEAFPGSIGTETTSQASSIVVAGVDLGLKHLAWLSFGECRRSARNDGSLEPVDTARPEITRHCIDQPQLAGKKNAWLAGTSRSAIPNVKRQLIATIGRARALQRQKDLLRHRFGKRYKHAWRYFVARREWQRCWRRVRHLHEELSRQVATRIVAACVHDGVGLLRFEDLSWSSHSSKRESGSWLASWQVHWFFSQVQERATRLARLAGIAVELVDARGTSRRCSACGAAGVRQGKTFTCTTGGCNKKVDSDLNGSRNVRIAPTSPRLHAKGEGARYRPLACRASTSLSLDKPGLDACPSLSKL

SEQ ID NO: 39346 - protein, 374 aa, Mariprofundus sp.
MRKAFKYRIYPNVNQKRELEIMLETHRRLYNECLGQRKDAYETSQKSIKYTEQSAWFKAERSSNGYYAQLNFSSAQATMRRLQRSFENFFRRVKSGEKPGYPRFKGYGRFTSWTYPAVGDGCRLFDSGKLRLQNIGMVKVKLHRPWQGEIKTLSIKQEADHWYVIASCDVGDAPEPRAEQTTVAIDVGIEHFLSTDDGQHVSNPTYLKQSLKKLRVTGRSVSRKKKGGSNRRKAVHQLQKVHRKVANQRRDFHHKEASKLVQRYAYIAAESLNIKSMVRNSRLSRSISDAGWNQFLGILRSKAEEAGSVFVDVDPKHTSQDCSECGARVHKKLSVRWHKCPNCGLKLQRDVNAARNILAKARYEPLKHNVRHQA

SEQ ID NO: 39347 - protein, 527 aa, unknown
  TnpB Polypeptide
VPPADEAVLRAAGAHLGSLAGRDLAARCAEGRLDAAGRARSRAARKRALTAESSSRWAGAITRTSEDQVRLAEQNLHAERVSLQARIRRIGARLAVPAGGRSGRTRGYATAAERHAKTIRLQALKARLAAADRRLAAGTVPVVRGGRSLLRKRGNLAAAGLTEERWRAEWESARLFLTADGEKDKAWGNETIRWHPDEGWLEIKLPAPLAGLANRPHGRYRLSAAVEFAYRGDEVAAQGATGAVRYDISHDPASGRWYIDASWKTAPAPVPCLQELRRHPVVAVDVNHGHLAMAAVAPDGNVLGTPATIPLDLAGLPATTRDGRLRAAISVLIAAARQHGARAIVIENLDFAAARAEGRERAGTRPSRGRRGRAFRRIVAGIPTGKFRDRLGQMASNAGLHVIVVDPAYTSRWGAEHWLGPLREHHPKATGHHAAALVTGRRGLGHRARRRTAGNRTAPEEAARPALARPRKTRQPRPHKGSPPPPRGPWQPPGVKTGRPHRSTAGNQAAHDRSGPPASQDYVLLVQ

SEQ ID NO: 39348 - protein, 402 aa, Scytonema sp.
MLYTITKEVIHLATQTITVRNKLIVKENYQHESIDSTLRQFAWACNQMLTVAKAENCWSANKLQKLTYYDIRAVTDLKANHICNAVRRVVNAKSSTGKVKEFKATSVALDIRTFIYKDGSVGITLVDKRHWFEWKLSYEQKKLLEGKHNRFATLSRTRSGQYFLNVAVEIDCDKRHVSNTKAIGVDLGRRSIAATSTGKSWDGEQLNKTRDRYAKVRANVQSKRSRSGRRLLRRLSGRERRFQQWVNHNISKSIVSTAKKDCAIISMENLTNIRQSLNAKPRNKQERRRTNNWSFYQLRLFVQYKANIAGIPIVFVPPAYTSQICSHCNHIHPDPTKSFRNNKRFVCGYCGADCDADYNAARNIAAYGVTINSPEAPKLSCGLAPQFVLGAKLHPQPSGGVG

SEQ ID NO: 39349 - protein, 316 aa, Acinetobacter sp.
LPDGGEVQLRPLMPRFKKKSDGEQSFRLPFNDCEVIGDRVSLPKKTGWIKFKKSQEIVGKITSITIKKICGLWYVSFCINREIEQPLHPSKSAIGVDLGIKKLITTSDGQVFDPINSFKANQVKIARLQRKLKKKTKFSENWKKLNLKINKLHHHIANIRHDYLHKVTTTLSKNHAMIVVEDLKVANMSKSAKGSIEKKGKNVKAKSGLNKSILDQGWSMLVGMLEYKQQWRGGLLVKVDPKYTSQTCSSCGHVAKENRLTQAKFSCVECSFSENADINASRNILAVGHTVLSVEGGCGKGRPTKQKASEIRKEVA

SEQ ID NO: 39350 - protein, 432 aa, Acinetobacter sp.
MKINKAYKFRLEPNAEQELVLNKLLGSARFVWNQILATSFEMLANNERINKVNLVNKIPELRKKPECAFLENSSNGVSLQQKVRDLGDAWGKFFDKKEQAKLKQKPFKAKKPKFFKLPDGSEIQLRPLMPRFKKKSDGEQSFRLPFNDCEVIGDRVSLPKKTGWIKFKKSQEIVGKITSITIKKICGLWYVSFCINREIEQPLHPSKSAIGVDLGIKKLITTSDGQVFDPINSFKANQVKIARLQRKLKKKTKFSENWKKLNLKINKLHHHIANIRHDYLHKVTTTLSKNHAMIVVEDLKVANMSKSAKGSIEKKGKNVKAKSGLNKSILDQGWSMLVGMLEYKQQWRGGLLVKVDPKYTSQTCSSCGHVAKENRLTQAKFSCVECSFSENADINASRNILAVGHTVLSVEGGCGKGRPTKQKASEIRKEVA

SEQ ID NO: 39351 - protein, 385 aa, unknown
  TnpB Polypeptide
MILTFRYRLLPTKRQHRALESILESQRQLYNAGLEERIDAYRKAGISRSRLDQFKALTEWRQGDPEGSSLPVTLQRWTLNQLDLAYRAFFRRLQAGKKPGYPRFRGKRRFDTFGFLQFQGIRFDGDFIRFKGMPGALRVHLHRPLPMGSCIRCCVFRRDVKGWSTGFVVDVPEKPIRRGGRSVGVDLGVATFAALSDGGFIPSLNAARRAQKRLRRAQRALTRKNKGSGSRRKARVQVARCHAAIARARANYLHQASARLVRDYDVIAIEKLNVIAMAKGVLAKEVHDASWKMFISMLRYKAECAGCRLIEVNPHDTSQDCSDCGRRVTKKLGDRLHECHHCGLTLDRDLNAARNILNRAGVGPGLHNVASDGKRAGGNLCEIAL

SEQ ID NO: 39352 - protein, 385 aa, unknown
  TnpB Polypeptide
MTAETTATKTLEATLAPPTAHKERRLHRTVATYRHPLEDAFESGADTQSAVNDIVTPYSLTSYAKDALKSYVPKLRDTYNASELRDDHPVRFTNRGFCLDQSDDRRHEFCWRVPQPGRGNAFWIPLRINPQQCDLWVDLFDGELSPGEFRLQQNRTNWVLHVTVEYEIEAAEMPDDPTPVGFDIGESKLLTGCALTENGTPKEPFLFDGSRARQLRKEMHTTLKRLQERDCAEWRRDNRFDHYQNALTDIVEQASRQAVEYTQQFDDPVIVLEDLSYIRERLDYGAYMNRRLHGWAFARLTDRIEDKAAEAGIPVQFVNHAYTSQTCHACEHIGRRGSQAEFRCTNDECWVSEYQADINAVARRRLAGSKIASRSCDGGQYSWSP

SEQ ID NO: 39353 - protein, 389 aa, Microcystis sp.
MYKAYKFRLKPNTEQEIALAKSFGCCRWFWNYSLNLCQETYKTTGKGLTRNYIQGLLPSLKKEYEWLTDAYSQCLQVVALNLSQAYQNFFEKRAKYPRYKSKHGRQSISYPANVKLEGDYLKLPKIGLVHCVCHREFEGTIKTVTISKNPDGKYFASVLVDDGQETPQPSTEGKAIGIDVGLTHFAITSNGSKYDNPRHFAKHQRNLKRKQQKLSRKKKGGNSRQKARRLVAKIHSKIARCREDFLHKLSRKIVNENQVIAVENLNVKGMVRNHNLAKAISDCGWGMFCTMLKYKAENEGKTYIEVDRWFPSSKTCNVCLNQVGSLPLDVRNWTCEYCQTTHDRDINAATNIRNEALRILALGTSDTAYGGDVRPKAGRKSVLRQSPVK

SEQ ID NO: 39354 - protein, 346 aa, Helicobacter sp.
MALRQLTTAFDKFFSKLADYPRFKSKKHSKQSFCVPQHLEIKLETNQVKLPKFKEAIKAKFHRHLPIGSVIKQGFISCVADKYYLSVSYEDNKPEPKPVTIKKAVGLDMGLESLVIASNGVLYPYKKFFQNLQTKLTKAQRRLSKKLKGSSNRKKQAKKVAQIHASISNSREDYLHKISNEITNQYDLIAVETLKVRNLVKNHKLAKSIANASWSRLISLLEYKAGWKGKTLIKIDQYFPSSQICSTCGSNTGKKPLHVRNFICPCCQTHHHRDLNASINIRNYALGMLDERHAIKVDKTRVGNPRSYACGDSANGAVTKYGYILDIASYGSLKQEAHPANASHLF

SEQ ID NO: 39355 - protein, 497 aa, unknown
  TnpB Polypeptide
MQNCQVRTIKAQGRVNSRAALSRLEQVLDQLRELHDACLYQHRLAEKNHEPKRFDVNRQQKELTLLQADSPEQNNLLRRLQGNVIRHTAARWNKYLKESATGRPRYKTSRFRTIALDSPQGKVMRFTASGKPVLHISSLPAIRLLTSQEILDDRQPRAVRITLKGGRIQVRLSYQFEVRERQDPTLATSPIGVDLGIALSVATSTGQTFQSPKQLYLQAQERKYRRKLNRIVASAMATGTAGFRAVLDADGSQMLTRKGRPMRELVWTSGKPAKAYLKARRRLSEITERLALLRREFRHRVTTSLIEKAAAEGRDLLAMEDLQVRNMTASARGTVEKPGRNVRAKSGLNRAILHEAWGETLTMLEYKAERAGIPSVRVNAQATSITCSCCGHKDPKSRNSQSSFKCTACHYQANADSNASLNIADRGMLYFQKRKGLSIESLRQARRDAGLSGGTEGPDTGPAGQPASQNNLESPTNASKSALTGPDRGKTESLAIF

SEQ ID NO: 39356 - protein, 252 aa, unknown
  TnpB Polypeptide
MRPTGLTVDLLYERAAAENPPTVRPPAGPAVGIDLGVNHRLTLSDGTIVQPREIDRTREENLRRRISTARKGSNRRHKRVKGLAKECRRNQVRNRNQCHRITSKLVREYSLIAIENLKLRNLTASANGTVEEPGSNVKQKAGLNRSILEQSLGLITQQLRYKAEWAGVQLIAVNPANTSRTCSTCGAINGEKLAEYRVFRCPGCGLETDRDLNAAINILNKGLKAQQGGNPPAAPPGAMTTGGLVPQGSSCM

SEQ ID NO: 39357 - protein, 388 aa, Pyrinomonadaceae sp.
LPSLTKTFEWLLKRLAMSEQRITYRYRLFPTRTQVEALTVQLSEACRLYNACLQERRDAWRINRESVNYYTQASQLKEIRAHGDLSLANFSACQDVLRRVDKTFKAFFSRVQKKQKAGFPRFKSHTRFDSLTFPSYGDGCKLIQSKLRLQGIGLIKVKLHRGVEGKIKTVTVKRECGKWYACFSVECEAWPLPDSLERVGVDVGLSAFATLSDGTEIENPRWYRAAQAKLRRAQRKVTRRQKGSHRRRKAIQLLQRAHAHVKQQRADFHHKISRWLVNGYGLIAVEDLNIKGLASGMLAKSVNDAGWGTFLDKIAYKAENAGRQFFRVNPNGTSQTCTCGASTPKTLRQRWHHCLSCGLSANRDHVSAQVILQRTVGLTVQASSSIAG

SEQ ID NO: 39358 - protein, 522 aa, unknown
  TnpB Polypeptide
MRTTTPSFILELPIKTLSSDESVLNKMFDAGRQTYNACLGESDRRYYLMKQSKEYQAACKMPKGVPRSTNAVERAAAFREVNKRFEFDEYSISDYVKDIRNSWIGEHLNSHMSQTLSKRAFKAVQKKAFGIASRVRFKGYNQFSSIECKNNETGLIFRNGFLNCCGLKLQAIIDPYNKYQEYGLKQRIKYCRIIKRKLNNRIRYYVQLIIEGKPYQNPKHPVGTDISVGLDLGPSTISYVGDNVAELKQFCEEIVPDWKATRRIQRKMDRSRRATNPDNYNPNGTILKRKKGEKRIWRKSKRYNKLQTKYAETARKMAAHRKSLHGKMANEIISLSPRIKTERISYRAWQKMFGKSITVRAPSMIVSLLQRKAENAHGYLHEIPTLNTKLSQTCHKCGAQVKKSLSKRWHNCCDIEIQRDLYSAFLAKCVDITTDSLDIVKANKLWPGVEPLLFDAISRVELRYSQSAIFGNTVPDSFGLKRNTSRSYLKPEKVIIEAVDVVTHSMGESYGKIIATAGISRL

SEQ ID NO: 39359 - protein, 417 aa, Oscillatoriales sp.
VIVLEFKAKGKTTQYSAIDEAIRTAQFVRNKCIGFWMDNPGVGQKELYRHNTKLRAEFPFVNALNSHACQVAVERAYSAIARFYENCKKAIPGKKGYPQFKKNCRSVEYKTSGWKLSEDRRTISFIDKKGIGRLKLKGTWDLHFYQLDQIKRVRLVRRADGYYVQFLIRNEHQAVAAQPTGKTVGLDVGLKEFYTDSNGQSEPNPKFYRTNEKRLKFRQRRVSRKKKGSANRQKAINRLGRVHLKISRQREEHAKRVARCVIQSNDLVAYENLRIKNLVKNHCLAKSINDAGWYQFRKWLEYFGKKLGKITVAVNPAYRSQECSCCHTVVKKSLSTRTHVCRCGLVLDRDWNAALNILSLALSTTGHVGTWVKDPNASGDSTSTLIGVIQSEPTFLFWSIPAPAGESNPPMGVRKTP

SEQ ID NO: 39360 - protein, 371 aa, Herpetosiphonaceae sp.
MTTLTRCFKYRLYPTTNQQATLIQWAGCRRYVWNWALRRKQEHYRATGRGLSSGALSAALTQLKRDPDHGWLQVCVAQVLQQTLADLERAFTNFFEQRAKYPKCKSRKRTPHSLRFPQCVTVVDERTISVPKIGLMRAVIHRPLAGIAKSATIKQDASGAWYVVFVCHIDRPNRAPLCDNPVGIDVGLESFTTLHTGDKIAPPKFYRRGERTLRRLQRRLSRAQKGSTNHRKAKRRLAKTHQRIRNQRSDWLHKHALGLIQQFDTVCIEDLNIKGLARTKLAKSFMDAAVSTFMQLIDEKAEWHGRQVVKVGRYYASSKMCHQCHEKTTLTLADRIWTCHTCGTTHDRDVNAALNILNEGLRIVAAGMTET

SEQ ID NO: 39361 - protein, 411 aa, unknown
  TnpB Polypeptide
MQVLTVRAKVVNLSDRDALLLSLLGFAATKLWNVANHHRRVTWSETGKIPSYAEQCRELKTNRWYKLLPSQSSQEILGELDDSYRSWFSHRKNGDTKARPPGFRKKGIISTITYKQNAFEMLPGNRVRLKLPKTYTQREIVLRYRLPQETALDKVQQVKLLHETRTGDWYLHIVHKVQVKYRDAGNIMAIDLGIVNIATGLASDGSSFIIPGGELLALDRYFQKEKAKCTKSSSKRCIRLNTKWGRQRKHYLHILTRWLVNQAVARDVSTILVGELKGIRQNKDWGDVGNQKLHAWPFNKIVDLLTYKAALAGIRVVNVPERGTSTTCPVCGKRVKKARVHRGLFVHCGLALNTDLVGAYNILQRYLRETGLVLPTQSGVVGALARPAVNLFVWQRTTPKGRGQGTFSQAV

SEQ ID NO: 39362 - protein, 419 aa, unknown
  TnpB Polypeptide
MIRAYRYKMKPTRSQEVFLVKCFGCARFVYNHALSEKIDAYRNDRKSLSFFDLCASIRALKNREEYSFLKEVPALSLNYSLLNLSNAYSHFFKTKSGFPKYKSKKHSRDSVKFEPNSTKYDFKNFKVRIPKAGWVAICRNRTFDTAAVKLNSTTVSRDACGDYWCTVSFEDGTLPEPKAKVRKVTAVGIDVGISEFAVLSSGEKIPNPRFLEREEQRVAKAQRRLARKHRGAKDEAPSKRYIRYRTKLARIHRSIENRRTDFLQKLSTDLTRRFETICVEDLNVKGMMQNPSLAGAIGSASWSEFVRMLGYKADWYGVNLLRAGRFDPTSQLCSACGHRNPGTKDLSVREWTCPVCGARHDRDVNAAVNIMNTAIKKYFNKQSPAVTGITDADGADSENNAETRSPECDYASVETSMQK

SEQ ID NO: 39363 - protein, 382 aa, Bacilli sp.
MEIYKAYKLRLYPTEEQRILIHKTFGCSRFVYNYYLNYQKENKVCKSSILCKDLKELENSHEYLKEVDSCSLRCAIFDLEDGFNNFFAKRNGYPKFKSKFARQSYRTNCIRGTYKEKEYSNIEVDLLSRNIKLPKLGKVKIRGYRNKDKIEGKILNATISRESTNKYYVSVLVEENILIEKVIPTTIVGIDLGIKDLVITSDGIKYNNPKVLMKYEKRLKRLQKELSRREKGSKNYLKTKEKIARIYAKIKNYRKHYLNNIANEIVNEHDIIVTESLLVKDMFKDKRKAFNKSLSDAAVSTLRSLLEWKCKIKGKFYYKINTYYPSSQICSHCGYKNSKLKDLSIREYNCPECGSHNDRDINASLNILLEGLKLHYNLVSIV

SEQ ID NO: 39364 - protein, 352 aa, unknown
  TnpB Polypeptide
MVKAIKVMLIPNNVQKTKLFQYAGASRFAYNWALAREIENYEKGGKFISDAELRKEFTKLRHSDEYAWLLNISNNVTKQAIKDACTAYKNFFRGLQKVPRFKSKKRSMPKFYQDNVKIRFSNTHVKFEGFSSSRKANKQKMNWVRLAEHGRIPTNAKYMNPRISFDGLNWWISVCVEFPDCREILNDDGVGIDLGIKELAVCSDGTKYKNINKSQKIKKSEKQKRRLQRSISRSYEKNKKGESYCKTNNVIKKEKLLLKRDHRLTNIRKNYLNQTISEIINRKPRFICIEDLNVSGMIKNRHLSKAVQEQGFFGFRKQLEYKCSDKGIQLIVADRFYPSSSFAAVVGISKKI

SEQ ID NO: 39365 - protein, 280 aa, Blautia sp.
MYREFTDTGITLKVWDGSSWHWMDCRLKGIPFPANAVILSPSVVLDSKICWLHVPVKQETSDARNAKERMKSGDTICSVQFTNTDIFAMCCVLDGDGKQLAVRTCRGGDSYRHQCRRLLDKIEFSKQYTDKDNVELPNKKYYIHLKNLSEYCAHKVSREIVDFCVEKEVKVIVLPLYNTDFSRMVQYRSGNFTPLHLSNRIRAYLKYKAWEAGIIVLEHSADHTNSRCAICGGSVKKQGSQYLCENGHQGSRFLNSARNLGRKCQEDFKKKRGCLNKINI

SEQ ID NO: 39366 - protein, 421 aa, Haloferacaceae sp.
MKRTNTFVVRPRSEQDRELLHKLLDASASLWNELTYERRQQYFDGESIWDTTDYRKRYVGVLGSATAQQLIRKSKSAWKSFFSLKETGEHCSPPGYWGNEEDGRTLRTYIRNDQYTLEMGDRSRLEIPAGKELKAKYGFGYTERLRLEVAGVPKWDGKQGRLELHYDESSNQFRAFQPVTVDDSRLDAPLASEEAALDIGANNLVACTTTTGQQYLYHGRDLFDQFRETTREIARLQSKLREGRYTSKRIRRLYRRRTRRRDHAQNALARDLLERLHSEGVATVYVGDLTDILEAHWSVRANEKTHTFWAFRAFISRLVCTAEEYGISVEVRSEAWTSKTCPNCGSTTDTIRHQNTLTCSCGFEGHADLVASESFLRRHTDVPRPMARPVRFEWDDHEWSGTPYPHESPKEARTHQSTLPA

SEQ ID NO: 39367 - protein, 193 aa, Haloferacaceae sp.
MRKAETDDPEFNTEHRTVLGVDLGVNNIAVSSTGTFWSADEFNHWRREYEKRRGSLQQRGTRAAHEAIEGVGRKEYGHFEIYLHGVANELIEEAVEYGCSHIAFEDLTHTRENIPQATWRHVWAFRRLFQYVEYKAAEHGVEAVQVPPDHTSQRCSTCGCTHEDNRDGEHFECLKCGYQNHADYNAVVRSRAI

SEQ ID NO: 39368 - protein, 345 aa, Haloferacaceae sp.
VCERDAQRLVNAHSSQTCPVAGPQAHVHDTLLSIHGLYTRNGSVRNRRPRSPRWHRETPNDATVKQVTVKREPTSEWFAVLGLETENDAPPKPENPEQCVGIDVAILSHTHYSDGFSVGSLDLSDERERLEREQRKLSRKEHGSANYEKQRRIVAHRHADLKWKRRDFLHRLSAYYAREHDLVAVEDLDAKELMGLPSNSRNRASASRGTFLRMLEYECDRKGTHYVPVDPRGTTKECSQCGVSTDKPLWVREHSCPSCGFEADRDANAALNILSRGLDQVGVVHSESTSSESRCDPDELRKSLRDFRTPVETTLPTGTTTVPAKRVVGAGSPALRERTASAVSE

SEQ ID NO: 39369 - protein, 251 aa, Haloferacaceae sp.
VKQEPTGEWFAVLGIETKNDAPPKPETPEKCVGIAVGILKYAHDSDGTAVDGPDLTDERERLERAQRDLSRKEHGSANYRIQQQVVACRHTDLRRKRRDFLHKLSNYYAREYDLVAVEDLDAKGLMELPSNSRNRAGAAWGTFLRMLEYKCNREGTHFIAVDPRAGRRRSVRTAAFRPTNRSGFGNTRVRRADSRQTATSTRRTTSFHADSPTWGWFTPIHCLRRLRSLREPSRCLHSASWKQEAPSSARP

SEQ ID NO: 39370 - protein, 479 aa, unknown
  TnpB Polypeptide
MRSCDRLYQLVNEIGEKKGFTVVECKVGEGDHIHCFISAPPKISVTQIVKYLKGISGNTLLKEFPEIRKSLWKGQLWNGSYFCETIGSTSKENILRYIERQKKLSVMNKAIKYRLYPTTEQEVMFVKTFGCCRKVYNLMLADNIACYKETKSFGKHTPAMYKTEYPFLKEVDSLALANVQLNLQRAFTNCFEKTRKKRNGFPKFKSAKHSRKSYTTNNQKGTVAIIDNKYIKLPKIGKVKAAIHRKPATDWVIKSATISQDSDGKFYVSVLFEYECETDVVPTFVTDATTIGLDYKSDGLYTDSNGNTCGMPHYYRQSAKRLAKAQHKLKHKIIGSNNYNKQQKRIAKIHRHITNQRKDFLHKQSTAITKQYNCVCVETLNMRAMSNKGFGNGKATLDNGYGMFLNMLEYKLADRGKHFVKVDKWFPSSQLCSCCGKRHPEMKDKSIRTMHCDCGLILDRDYNAAINIKNEGLRILKSA

SEQ ID NO: 39371 - protein, 423 aa, unknown
  TnpB Polypeptide
VKVASSYAVEIKNINKKAVKETLEYYRKALAFLIPVADDNWDYIISFPSMLYQSRALRDLVHTTKNNRAHYAEFDKMFYKMPCYFLRACTIDAVGSVSSYRSNLEKNKTSKLGVNRLAVPAFYYDNMYKESNDGTASIKLRFNGDWKWFKLNLKKTDLKYIRKYWSHVAKSAPTLEKRHNKCFLRFSFEENVKLSENKNIVCAVDLGINNDAVCSILNKDGTILNRKFINFSSDKDHLYHVLNRIKGFQQKHGSHNSGSYWRYVTAINDELAKRTANSIVEFAYTNKADVIVFEHLEPHFKGWRSQKLHHWKKNTIQTVVEHKAHRLGMRISRVCAKYSSQLAFDGSGKVKRDSENYSLCTFTTGKRYNCDLNASYNIGARYFIRELSKSVPAKEWSRLLAKVPEAERRTSCTLNTLKQLVTA

SEQ ID NO: 39372 - protein, 507 aa, Trichococcus sp.
  misc_feature (176)..(179): Xaa can be any naturally occurring amino acid
VLPHSRGFSHELGGMVFFLLYLLRTHVRGVYNEAKEVSIMLKAYQFRLYPNREQKIYFANCFGSARFIFNQMLADRKEIYETYKDDKELLKSIKPRTYTSFKEEFPFLKEVDNLALANASQNLNKAFKNLFRDKAVGFPKFKTKHKSKASYTTNNQGGNIRIEDGKIKLPKIGFVXXXXEIYETYKDDKELLKSIKPRTYTSFKEEFPFLKEVDNLALANASQNLNKAFKNLFRDKAVGFPKFKTKHKSKASYTTNNQGGNIRIEDGKIKLPKIGFVTINQHRDFDGLIKSCTIFMNKAGNYFISILVEQETPEWLPAEHKIGIDLGLSDFAITTNDAGESVKYANPKCLSRSEKKVKKAQRALSRKKKGSKNREKARIALARKHEKIANQRKDFLHKLSNHITDENQVIVIETLRSSNMMKNHKLAKAIGDVSWFEFSRQLTYKAEWKGRTLIKADRFYPSTQLCSACGRRDGKKAPHIRDWTCPDCGTFHDRDINASLNLLALAK

SEQ ID NO: 39373 - protein, 158 aa, Trichococcus sp.
MIIHKAHKFRLYPSEEQRILIGKTIGCSCFVFNHFLSESKNYQKQRVKVAGIHEQISNARTDYLQKISTEIVKNHDIIGIEDLQVSNLVKNHKLAKAISDSSWSKFRAMLEYKACWYGKQIIAAARNFPSNQLCSGCGYQSKDVNGIARNATPTMTGI

SEQ ID NO: 39374 - protein, 400 aa, Streptomyces sp.
VVDHVKRAFKYRFYPTDTQAAELLRTFGCVRKVYNMALAARTEAWVLRAERVNYNATSTMLTAWKKTEELAYLNEVSSVPLQQALRHLQAAFTGFFARRAGYPRFKSRKKSRRSAEYTTSAFRFRDGRLTLAKMAEPLAIMWSRPLPGGVKPSTVTVSQDTAGRWFVSLLCEDPAVRPLPETGTVVGIDAGLEHLLTLSTGEKIANPRHERRDRARLARAQRALARKARGNGANRAKARRRVARIHARIADRRRDVLHKVTTRLVRENQTLVIEDLSVRNMLKNNTLARAISDAAWREFRSMLEYKAQWYGREVIAIDRWFPSSRLCSACGTLNGRMPLNIRTWTCGSCAMTHDRDVNAARNLKAAGLAVSACGAGVRPQRETSRTGQSAAKQEAPRREP

SEQ ID NO: 39375 - protein, 376 aa, Butyrivibrio sp.
MEFVKTAKIQIHPNNDDIQLLLNSMRAYSDACTFVSEYIFTTKDLNQVSVQKHTYNKLRDEYKLPSQMACNVVRTVIGSYKTNKTNGMNWIFCKYNAPQMTLSWNRDYSINKDKFSVGTLNGRIKCNYDIKGMEQYFDKSTYSFGTAKVVYKHDKFFLHISVKMNISELSDANVTNVVGHDRGIRFLVSSYGSNGKTAFYSGNIVKQKRGHYKALRKQLQQVGTPSSRKRIKAIGQRENRWIQDINHCISKALVESNPKGTLHVLEDLSGIRTATEAVKVHDRYVMVSWSYYDLEQKLMYKALEHGQKVIKVDPRYTSQTCPKCGHVEACNRDKVNHIFYCKNCGYKSNDDRIGAMNLYRKGIEYLVESQSSISEL

SEQ ID NO: 39376 - protein, 296 aa, Methanomassiliicoccus sp.
  misc_feature (225)..(295): Xaa can be any naturally occurring amino acid
MHIGLKSVIANQVLRKYSNNSNIRTVSRVQLTVPGQAVKVDEDRKELYISCLKLHLDTGHLPDFVKVNQVELDKEYAHITVTINEPPVQEVEQWVGIDLNSTGHIAVVANPTTGKVDKYGKEAPHIHRKYSKMRRRLHIQGHYNVAKKKIKRKENLKVKDINHKISRAIVDKAAQQACGIKLERLSDIRTTARTFKPTRPSLHSWSFYQLQFMIEYKAKLLGAPXXXXXXXXXXXXXXXXXXXXXXXXXXXXXXXXXXXXXXXXXXXXXXXXXXXXXXXXXXXXXXXXXXXXXXXR

SEQ ID NO: 39377 - protein, 382 aa, unknown
  TnpB Polypeptide
MTIIYKGIRVRLYPTEEQEVFFNKTFGCCRFVYNKTLENCKQLYELTQHFPSGKERSANLVPLKEEYDFLKDVSATALQQSVRDLDYALNNFFKNKNHFSFPRFKSKHNLKQSYRTTCDKRYVYIIDNKHIKLPKLGRVRTKRFDMPDVYKIFNITVERTNTGKYYASICIETEVQPLPKTRKQAGFDLGLKDLLIGSDGTRYKRPKFAYANKNKLAEEQHKLSKMRTKLERANANLDECRNYQKQKRKVAKLHEHVANCAKDFNHKLSRKLVEEYDFIAMEDLNVSGLLKNHKLAYSISDVRWSQLLSFIQYKCLWYGKEFKQVDRFYASSKICSECGTYHKDIVNSLSVREWTCPDCGTHHDRDANAARNILIQALSAGV

SEQ ID NO: 39378 - protein, 555 aa, unknown
  TnpB Polypeptide
MAVRAGLRRIGDPVVAAPPAGVRIRARIHPSGTEGEALTAIGVFLGSVYREELAGLIRCGVLDHKGRTLWRAERKRAVTGVASSRWAGAITRAVEDQYQLGMRGLAAHVAGMCAAVDVLESRCALRPGQPAPKAGGEGAGRPRRSRAYGSTAERFAKTRRLAVLRARLAVAERALAAGRPSITRGGKRLWHTRNHLDAADMSERQWRERWDAARMFLTADGEAGKAGGNETIRVDAEGRLRIKTPAALVERFGSHVVIVEPVRFSHRGSEWAARISDHCAVRYDISYDPARGRWYLHASWTTIPEPAPDIEDLRTGRVLGVDLNDGHLAACVLDASGNPIGEPLSIDVLTAGLAASRRDGRVRAAITALLDHAQARNCDAVVVENLDFADARAVGRETLGRGRRGRRLRYSIAGIPTAKFRHRLVGMACRRGIAVIAVDAAYTSRWGNQHWRTPLQQQTSDPATVTSHHGAAAAIGRRGLGLAIRRRPAGPRNRQRTVEGTPPARPDHQPSTTQRRRGSSGPPTRPPMRHAGPPENTHHSGQDRSGRTGITPAHS

SEQ ID NO: 39379 - protein, 676 aa, unknown
  TnpB Polypeptide
LRAPRRDRGLRHRWARRRASRRRDDDGRFGRPRRAGAHACCGRLRRRQGAARPAEDAGSARDARRAGDRLSHRRVPGVLEPQQWVAPDAAARFRRRRRRADPDRALARWTDGDADREPDPGRGRDPGRRDRRAHRRGARRCSRCGDQRCRGHALRARSHLRLDRRAQLDGERRPGGEQRSPGDRDRHCRRRELPMTVQTKTLVAIRTSDAVRGPIRLSEGRSRCGARKAEHVAARGALSIAVSVRALKWCHTVGTIDDDNLHVAAASRFDGQLRWFHKVRLYPTCAQERALIEVLRVTRELYNAMLQQRHDAWTMRRMAIPSKRQYAEITELRGCDPRFAAVYRECEDAALRRLDLAFAAFFRRLKAGEDPGYPRFKPARRWNQIEFPHGDRALRFDAPQRRMYVPGAGFVRLRKGRPVPEFGRAFIVMKNGRWYAIFEAHRKAEPLERTGRNVGVDRGIRILAALSDGTKIPNLRPGSARAAVVEWHARRLDALTEKDAAGRVLNRHDWQRTAAARRLARAREREANARRDWLHKQSRTLVDRYDLIALEDLQLRSMTRSAKGTVEKPGSNVRAKAGLNRAMLDAGFGILGTLIREKAAHAARTVVSVDPRFTSQTCAACGYVARESRKEEQFACVRCGHEADADVNAASVILQRAESPPTRALGTARGRLHDAA

SEQ ID NO: 39380 - protein, 399 aa, unknown
  TnpB Polypeptide
VAAASRIDGQLRWLHKVRLYPTCAQERTLIEALRVTRELYNAMLQQRHDPWTMRRTPISSKRQYAEITELRASDPRFAAVYRECEDAALHRLDLAFAAFFRRLKAGEDPGYPRFKPARRWNQIEFSHGDRALKFDATQRRMYVPSAGFVRLRKGRVVPEFGRAFIVLKNGRWYAIFEAHRRAEPLERTGRNVGVDRGIRILAARATVVELHARRLDALTEKDAAGRVLNRRDSQRTAAARLLARARERAANARRDWLHKQSRMLVDRYDLIALEDLRLRSMTRSAKGTVEEPGRNVRAKAGLNRRLLDAGSGILGTLIREKAAHAARTVVSVDARFTSQTCAECGHVARESRKEAQFVCVRCGHEADADVNAASVILQRAESPPTRAPGWARGRMHDAA

SEQ ID NO: 39381 - protein, 150 aa, Klebsiella sp.
MNRAKARAKVARIHAKIADCRMDNLQKLSRKLINENQVVCVESLKVKNMIRNPSLSKAIANASRGEFVRQLEYKGEWSGRSVVAIDQIFPSSKRCSGCGYTMTKMALNVRSLICPECGANHDSDVNAAKNIKAVGLITLAHGATVNPKAA

SEQ ID NO: 39382 - protein, 418 aa, Lactobacillus sp.
MKKMSDLAYHYGLKMRIYPSSQQKKIIDLNGNIARTVYNKMVAIDQELYQLKQIKLPIDSILLRIKELEKRKNARNMSNHYPYMQNKNIDSLAKANAIQNYQKAWKMFRQVHRTGTPKFHKKGYYLSYQTNAQYGKGTKMDVYSATVKFLDNKHIKLPKLGRLRVAGSHRRIIDKKKDIRIGTVTVSKDSADRCFVSMQLGSDTPFVNKLARTNSQIGIDLNTENFLTTSEGQVIDNPRYYRIIKGRLAKAQRTLSRRERRAKKEKRSLRSSKNYQKQRRLVAKIHDKIRNQRNNFLNVNSTRLINNHDLIVAENLRSKNMLKNHALALSISDVGWRSFLQKLAYKADLYQQTFIVVHPKNTTQTCHDCGFIMGSGNTEKLTLKDREWTCPACQTHHIRDVNAAKNILSKGLKQLEKA

SEQ ID NO: 39383 - protein, 361 aa, Actinosynnema sp.
LWVVAKVVKRAFKYRFYPTLRQAAELARTFGCVRLVYNMALQQALRHLQVAFTNFWGKRARYPSFKSKKKSRRSAEYTTSAFRWREGTLTLAKMDQPLAIVWSRPLPGGASPSTVTVSQDAAGRWFVSLVCDDVIEQTSASGAIGIDAGLDSLLTLSTGEKIANPRHERADRVRLARAQRALAKRVKGSANRAKARHKVARVHARIADRRRDYLHKLTTRLVRENQTIVIEDLTVRNMVKNHSLARAISDAAWRQFRTLLEYKAEWHGRDLVVVDRWFPSSKVCSACGALVERMPLTVRLWSCRCGTSHDRDVNAAHNILAAGLAVTACGDGVRPQRGNLRSGQSTMKQENPWATKGIPAL

SEQ ID NO: 39384 - protein, 384 aa, Enhydrobacter sp.
MIKGHTIELTPNNKQATYFAKACGVARLAYNWALAEWQNQYQADKVYRDNCQKNGIAIDRTKLNNPSQFKLRKQLNFIKKTKFPFMFDVTKCSPQEAIIQLGKAFDNFFKGRAKYPQFRKKGINDKFSLTNDQFKIIGKNIKIPNLGWVKLTENLRFNGKIMNATIFKKGMKWFVSIGVEINETPKPLPRTDKAIGIDLGITDLAVLSNGTKVQAPKPLKSKLKQLRRLSKQLSRKQKGSKNREKAKTKLSRLHYKISCIRKDFIHKLTTKLVKMYDVICIENLNVKGMVKNRKLSRAISDLSFYEFKRQLIYKANQSRKTIKEVDRFYPSSKTCSHCGFVMAKIDLTLAIRNWQCPSCDTQHDRDINASLNILNQADRVLTLS

SEQ ID NO: 39385 - protein, 403 aa, unknown
  TnpB Polypeptide
MPMPNNNELSLTIKAKILNPISDFEITSEQYRLACNFISEWVFNNKLEINQLKIHKKLYPIIRDKFGLKSQMAISATKTVSARYQSVKSYMRNNPVVIKDKLCGYKKYKYYKTLEHLQKPIFFSRPQADLVRNRDYEINFETKKVKITTMSGRHEFDFECKGFDRFLTKDWMLGAAKLLKANGVWYLHIAVTKIVPESEGPFENIIGIDRGLNFVATSYDSKGKTEFKKGRKLMAIRKKFANKRKELQLVGTASAKRKIRKIGQRENRWMHDVNHCISKTLVKPNSLIVIEDLSTIKEELADSGSYTKASWAYAELASMLVYKARQVNSLVIEVDANYTSQRCYKCGHIEKDNRDKKLHIFKCKSCGYQTNDDRIAAMNLHQLGKLYLLGETPSFKKAHIEYT

SEQ ID NO: 39386 - protein, 370 aa, unknown
  TnpB Polypeptide
VLYTGRPEDTDLIQTVVERLFDNLNGLSKLKENGYGVGQLKWKPPRKFRSFTYSQSGFKLDKKGGQTVLSLSKLADIPIRLHRALPDDTTLKQVTVKKEPTGEWFATFGVQIDREPPETPENPETCVGIDEGILKYAHDTDGTAVGSLDLSVERDRLEREQRKLSRKQHGSNNYEKQRRRVAKYHADLRRKRRDFLHKLSAYYAREYDLVAVEDLNVKEMMESPSNSRNTASAAWRTFLSLLEYKCKRERTHFVAVNPRGTTKECASCGVSTEKPLWVRGHSCPACGFEADRDANAAWNILSGGLEDIGVGHSESPSSESRSDSDVRTRALLSSTPVETALPVDTPVSAKHVVETGSPTLEERTTSAVSE

SEQ ID NO: 39387 - protein, 399 aa, unknown
  TnpB Polypeptide
MKTAYRCRAYPDEAQQQMLARTFGCIRVVWNRILTEQHRLRRTEGKSLSYAASDAALTALKRDPEFAFLSEVSSVPLQQALRHQHKAFEAFFARHARYPRFKSRRGRQSATYTRSAFRLKEGALWLAKTVVPLRYVWSWPDINPASLDPTSVTVARDPAGRWFVTFHLDAPGPAPLPATGRNAGVDVGLTHFAALSTGEKIPHPEDWERHERRLKRYQRRLARCKRGSANRAKRAVKVARAHAKVADGRRDFLHKASTDLVRRFDVIAIEDLNVAGMVRNRKMARAISCAAWPDFRSLLMYKAERYGRTVVAVDRWYPSSKTCSACGHLLATLSLGTRHWACPACGTRHDRDVNAAKNILAAGLAVTACGGDVRRAGTTRAQLPTKQEPLGASPGILVP

SEQ ID NO: 39388 - protein, 446 aa, unknown
  TnpB Polypeptide
MYRSDGLRIHMKRSPTRHVSSVRESQRQVYNWAIERLLADPTLTQYDLQNEFTELRRSTPWLQATERVYQDAAIVDARTAADISNLYGKGNLKFRSRKKNYSMAVVCNRQPRFMDNSHASLPGIGVIRLDKEQPYQYPHNWLHGSRAFHLVDVTPRSWKNVKPGDRIYRLRVVYDLPEPERASTGVAAGIDRGITNPTVVCKSDGKKSIYACFDTAVAFRSNQSWNDEARRTISRRNKHSRTTKKIKRQRDSYNWHNANARDYAEWLLAKEICYGVDVICIEGLDLDAITRAGGASKRGLNRGLRYVRHGMILKKVRIVAERMGIRIIEVDPRGTSQECCACSYRHKENRKGERFLCLACGRLDNADRNASANVTQRGTGMKVPAGEGIALERRELGRARKPPRLAQTAPDAMRRRENQACNRPATSSAAKHLGRYAYVTCADSGI

SEQ ID NO: 39389 - protein, 396 aa, unknown
  TnpB Polypeptide
MLVFEFKAYGKSSQFAAVDEAIRTAQFVRNSCLRYWMDNKKIDKYDLNKYCAVLANEFPFADQLNSQARQASAERAWSAISRFYDNCKKGISGKKGYPQFQKDCRSVEYKSTGWKLAENRKSIKFTDKKGIGKLKLKGTRDLHFYQISQIKRVRLLKRASGIYVQFCIDINRKENTEPNGNTIGLDVGLKEYYTDSNGVMVENPKFLRKGEKVLKRCHRRTSKKVKGSKNRGKARQVLGKRHLKISRQRKDYAIKLARCVVQSNDLIAYEDLRIKNMVKNHCLAKSINDASWYQFRVWIEYFAKVFERVTVAVNPAYTSQECSSCGAIVNKTLSTRTHVCQCGCVMDRDFNAARNILSRGLATVGHTEIFALDASNALGDESSTFAGEILHQQVMS

SEQ ID NO: 39390 - protein, 402 aa, Micromonospora sp.
VRTAFKCRAYPTPEQASVLNRTFGCVRVVWNRTLAARCAHWHAERKSTSYAETDRALTEMKKLPDLAFLNEVSSVPLQQTLRHQHSAMTAFFARRSRYPRYKSRHARQCASYTRSAFRMRNGQLSLGKTPGTLAFVWSWPKVDVTALAPTMVTVSRDPDGRWFVTFAVDIEAPPAPEPTGQTVGVDLGLTDFAVLSTAERVPHPRHMERRERRLKRYQRMMARKRKGSNNRDKAKRKAARAHSRVRDARRDFLHKTSTNLVRRFDAIAVEDLAVANMVRNRRLAKAISRTGWAEFRQMLTYKAHRDRRTVAVVDRWYPSSKTCSACGHLHAQLSLGTRRWTCPSCGTRHDRDVNAAMNIAVAAGLVETINACGADVRHEGPPSVPSAVNQEPQPARLGIPRL

SEQ ID NO: 39391 - protein, 402 aa, Escherichia sp.
VKQLQAFKFQLRPGGQQEREMRRFAGACRFVFNRALALQNENHEAGNKYIPYGKMASWLVEWKNATETQWLKDAPSQPLQQSLKDLERAYKNFFRKRAAFPRFKKRGQNDAFRYPQGVKLDQENSRIFLPKLGWMRYRNSRQVTGVVKNVTVSQSCGKWYISIQTENEVSTPVHPSALMVGLDAGVAKLATLSDGTVFGPVNSFQKNQKTLARLQRQLSRKVKFSNNWQKQKRKIQRLHSRIANIRRDYLHKVTTTVSKNHAMIVIEDLKVSNMSKSAAGTVSQPGRNVRAKSGLNRSILDQGWYEMRRQLEYKQLWRGGQVLAVPPAYTSQRCACCGHTAKENRLSQSKFRCQACGYTANADVNGARNILAAGHAVLACGEMVQSGRPLKQEPTEMIQATA

SEQ ID NO: 39392 - protein, 185 aa, Clostridium sp.
MILSKKVRIIPSVEQENPTINLTNESIGIDVGIKDLAICSNGMTFKNINKSKEVKRLKKVLKRKQRKVSRKYDMNKMKKGGENRCQYKKTNNIIKLEKEIKLLHRRLSNIRSNHIHQATNKIVKTKPSRVIMEALNIKGMLKNKHLSKAISEQCLYDFKVKMQYKCKFYGIEFVEADKRYRATCC

SEQ ID NO: 39393 - protein, 335 aa, Acidiplasma sp.
MPSEIDEYNNFQKLPAQTAQWTIKKVKESWSSFFRALKAYKKHPELFNGIPRPPKYKYKDGEFMLIFTNQQCSIVDGILKFPKIMNLELKTRLENVDLREVRIIPLGTGYNVEIVYSKEISDFNEVSANRILGIDVGVRNTITIGNSISEKGIAVKGGVLKSINQYFNKKLSRLKSINDKQRKNHENTKRINKLYMNRNRKIKDVMHKLSDAVIKYAINNKIDTIVIGHNNRWKQSAEMGKKNNQNFVQIPFNTLINQIYYKGQEHGINVIIQEESYTSKCSFLDNESIEKHDNYLGKRISRGIFKSLNGTLIHADLHASYNIIKKQSPKHLPTG

SEQ ID NO: 39394 - protein, 368 aa, unknown
  TnpB Polypeptide
VQVRYRYRIYPTPGQQRVLGRVFGCARVVYNDCLRLREECQSRGEQITDTEVQRRVITLAKLTPQRCWLAEVASVPLVQACQDARRAYKNWFDSTAGRRKGRSIGHPVFRRKHGRQSIRLTRNGFALRGSRVYVAKVGELKVKWSRSLPSQPSSVTVIKEPDGRYYASFVIERTPAPLPACSHEVGIDLGLASLVVTSGGEVFANPRFLRAKERKLGRAQRSLARKNKGSVRRVKARHRVAVIHREVRAARLDHAHKTALRLVRDNQAVYAEDLCVSGLKRTRMAKSVADAGWSQLLRLIEEKAAYYGREFFASAGGNPRRRFARHAGSRTVPRRSECEYGSAPAVALYMTVTSMQRRTSWRPDGPTD

SEQ ID NO: 39395 - protein, 354 aa, unknown
  TnpB Polypeptide
LDNYQKQQIKNMLLDNSQLYHEAYLWKQSHKEPFQTSVRYLDFVPERLHKECAIRTIKRATKADKEVKYRYRNIYINPNRFTNNQIELNNLIIPFDIDTNKINILSAWIMYKNKEYYLDLEIGKSGKHHMIAIDVGVDNLGACVTSFGDSFLVDGKKLKAYDYYCLKKINFLQGINSESKKIDKIKHNHYHYLRTYCEKASNIVKQYCIDNGIDFILMGKIPTKKSLSYHTFMGMDYKRDNITAFGMSLFVKNIKHICKVNKWEYSCIAEDYSSQCSFYDDESVKQRDKHFGRRVHRGLYRTKDNNYVNADINAAYNFFRKYVDNIDNKKKKIIQWKNCKQNLKLHTRRVRVID

SEQ ID NO: 39396 - protein, 430 aa, Escherichia sp.
  misc_feature (146)..(149): Xaa can be any naturally occurring amino acid
VKRLQAFKFQLRPGGQQECEMRRFAGACRFVFNRALARQNENHEAGNKYIPYGKMASWLVEWKNATETQWLKDSPSQPLQQSLKDLERAYKNFFRKRAAFPRFKKRGQNDAFRYPQGVKLDQENSRIFLPTLGWMRYRNSRQVTGXXXXQENSRIFLPKLGWMRYRNSRQVTGVVKNVTVSQSCGKWYISIQTESEVSTPVHPSASMVGLDAGVAKLATLSDGTVFEPVNSFQKNQKKLARLQRQLSRKVKFSNNWQKQKRKIQRLHSCIANIRRDYLHKVTTTVSKNHAMIVIEDLKVSNMSKSAAGTVSQPGRNVRAKSGLNRTILDQGWYEMRRQLAYKQLWRGGQVLAVPPAYTSQRCAYCGHTAKENRLSQSKFRCQVCGYTANADVNGARNILAAGHAVLACGEMVQSGRPLKQEPTEMIQATA

SEQ ID NO: 39397 - protein, 419 aa, unknown
  TnpB Polypeptide
MHADAGRRYRAYPTSGQDVRLTGWGHSCRAVWNLALEQRRFAWRQRGRTIRSTEQCRHLTDARADLSWLADLPAQSAQQILRQLDRAYDNWWSPEHPAQAPTFRRRSGGLSIPFPGQAVQVRKCSRRWAEVRLPKLGWVRFRLSCPLGGMVRNATISRDALGWHVSFGVATASKPAPPNRLPGCGVDFGVACSAFVSDEREPRLMPPTLTAGQKRRLQGLERRKARQVTWAKKHNGGRYSNRLGRTISQIAKLRTQQARRRQDFTHKLTTDLAKNHGWVAVEDLRPKEMTKSARGTREQPGRNVKAKAGLNRAVLDNAPYERQRQLVYKAPRFGSELRLVRPAFTSQTCSACGVRDPESRPGCGRMFACTACGHVEHADLNAARNIYNLAAGQAVHSTRSHPRAARPSSRMREPLGSIA

SEQ ID NO: 39398 - protein, 450 aa, Microcystis sp.
  misc_feature (119)..(152): Xaa can be any naturally occurring amino acid
MLNVLKVRIYPNKEQDCPLAKNFGCVRFVGNYYLNKTNNQYLETGKGMTYCDMAKDLTQLKKQPDFEWLAEATAAALQQSLKNLESAFKNFFSKRTKFPKFKSRHKKQSIRYPESCSIXXXXXXXXXXXXXXXXXXXXXXXXXXXXXXXXXXKNKGIKLPKLGVVKAKISQVINGKIKSVTVSKTSTDKYFAAILFEMDDSTTIEKLKISGIDLGLSSLVTVFDGETTYKIDPIKPTRKYAKRLKRRQEALSRKAKGSNNRQKAIKEVAKVHEKIANTRQDFLHKLSRKLCDENQIVVAENLNIKGLARTKLAKSIHDDGLGMLLNFLDYKLERGGGKLVKVDRFYPSTKLCSCCGFKNDSLTLSIREWICPECKSHHDRDENAAKNLREEGMRILSTNTDGQSEFQAWGETVRLLGTCTQKRVWGESRIPRHSVSLTAGVSNVGHSSHP

SEQ ID NO: 39399 - protein, 294 aa, Acinetobacter sp.
MKTLKLRIKDKHCKMLDQLASEVNFVWNYVNDLGFKHLKRKGEFLSAYDVAKYTKGASKECNLHSQTIQAVTEELITRRKQFKKAKLKWRVSNKKSARRSLGWIPFKKVAIKYADGYVQYGKHQFKLWDSYGLSKYSVRTGSFVEDSRGRWYVCLVVDSSKQNKPTATKAIGIDLGLKDVATCSDGTVISNPKFYRKYEQKLGIAQRAKNKKRVRALHAKIANCRKDHLHKASTMLVKENALIVVGDLSAGKLVKTKMAKSVLDTGFSAFKTMLKYKCENAGAIFGEVSERFTT

SEQ ID NO: 39400 - protein, 394 aa, unknown
  TnpB Polypeptide
MKTVLDSLCDYRRYCWNQGLELWNILNEQRLIGLPTELLSKIKTSVTDKTISFSEEEQALRALFPAPSKNVVQNELVAQKADWQFKLSSRTLQLAIKDLATAWNLFFNNPKTANKPKFQSRKKPKQGFKTDRARIINSRLVLDKPHAYKGEWSSIRFKGASIPDGHLKLCAITRIKEKYIATITVDVETIALPKTGKKTAVDANVDHFNTTEGQTSLKPELLNRLYDKVRIYQRQLARKRNVNKNYRHSKGYQATRAKLQVTYERIRNVQNDLLHKFTTDLYRQFDTVVIEDLDVKSMQMKKKAKNLHRSLFGRFHQFMEYKSEKFDKTLIVADRFYPSTQRCSNCGHVKTGDEKITLSGNAKHGTKHHEYVCYECGYKDDRDHNAVLNLLALA

SEQ ID NO: 39401 - protein, 364 aa, Clostridioides sp.
  misc_feature (136)..(219): Xaa can be any naturally occurring amino acid
MYPNKKQQELINKTFGCCRFVYNKYLAKRIDVYKNDKETFTYKQCSSDLTNLKKELKWLKEPDKFSLQNALKDLDNAYKKFFKEKAGFPKFKSKKINRFSYKTNFTNGNIMYCGQHIKLPKLGMVKIRDKQVPKGXXXXXXXXXXXXXXXXXXXXXXXXXXXXXXXXXXXXXXXXXXXXXXXXXXXXXXXXXXXXXXXXXXXXXXXXXXXXXXXXXXXXLNRNKARLKVARLQEHIANQRNDFLQKLSTKLIKENDIICIEDLQVKNMIRNRKLSRLISDVSWSEFIRQLEYKANWYGRQIVKVGKFFASSQICNKCGYKNEEMKDLNIREWICPSCNETHDRDINASINILKEGLRLITIQNK

SEQ ID NO: 39402 - protein, 223 aa, unknown
  TnpB Polypeptide
LKKAVELVDEPETVIAIDRGERNLAVAVAISKNNPDKPLKGQFWRGEEIKRIRGLYSHIRRRLQEKNRIGKIKELRGREERKVTQQLHIIANEIIAYTKQFPKPVIVMENLNGIRNNFKNSKKINKRFHSLPFRRLQTIIECKALLEGIEVKYLTRKETENTSKKCPKCGLTYYRDLNAAINIAHALTRGMGWGSCSSEPPEPAYVAGTQRRKGRLNAGSSRL

SEQ ID NO: 39403 - protein, 395 aa, unknown
  TnpB Polypeptide
MLTATRIRLYPTAKQQEILAVQFGCARWCWNEAFATSQKLYADTGKGLNYHAMAVRLPKLKEQNPWLKDADSQALQASLQNLSRAFENFFAKRGRFPRFKSKHGRQSIQYPQRVKLDGNRIYLPKVGWVKCVVHRDIVGKVKTVTVSRNACGQVYAAILTEDSVAPPPVSANGKAVGIDVGLEHLAITSDGAKFDNPRHLKKALRNLKRKQQALSRKKKGSKNRDKARRLVARVHDRVACARKDYLHKLSRRIVNENQVIAVEDLNVKGMVKNRSLARSVSDVGWGMLVGFLKYKAEREGKAFVKCDRWYPSTKTCNACGTVTETKTLDVRSWDCPHCGAHHDRDINAAKNIRDEGLRILAVGHTATACGGRVSREAKGSLRRRAATREAGSPRI

SEQ ID NO: 39404 - protein, 368 aa, unknown
  TnpB Polypeptide
MKLIAQLQLRPTEEQAKALKETLQVANAACDFLSALAWDNQTFGQFALHKIGYGGARAQFGLSSQVIVRCVSKVADSYKLDKKVKRTFKPLGAISYDDRILTYQLDKGQVSIWTTAGRIKIPFVCGEHQRQLLETRQGESDLCFVKGKWFLVATCNVEEPPTDSKGGVIGIDLGIVEIATTSEGKSYSGKKVEALRKKLREHRRRLQKCGTKSAKRRLKKAARRQERFVRDRNHCISKEIVRDAKTSRKALSIEDLTGIRDRTSFNREMRWQMGNWSFFQLRAFLTYKAKKEGVMLSVVDARNTSRICSTCGHCEKANRKSQKHFKCLACGHESNADFNASLNIAQRARVNAPTVSNPLGLGTSPLAC

SEQ ID NO: 39405 - protein, 423 aa, Boseongicola sp.
MEAAWRQPALHGPGERAEDRPGRGPETGRIRLQRRAAGPAPARQGLRRLHPPREGGRSTGLSALPQRGLRVGDGLVCREGRLRLVGVPGLARVRWHRELPARPVHAIVSRSNGKRCVTLRFKVRELRLPGEEDTRPDVGVDVGLNGIVATGDGMTVPAPKHARKAQARTQRLQRALARKERRTERRARARRNLARHHGRVAARRDFLRKLSHGLAPRHRVIAMEDLNMEALKRSMPARPVPDAAWTRFRDMPGWKRRWLRGPGRPARHLPAMQRMRARAGQTEDAWRQGARLRRLRPRPGPAQSPGRLQAPLRLSWRAAMPEHMRAIGSRQGQEGSAAIWQAAFVVQGCADAEPEELDARVCPSDRAWTQLFLRTLELRVKWLMRRCLAPMLFEDDSPQAPGRSGNRRWRETRARKARRPGPT

SEQ ID NO: 39406 - protein, 416 aa, Okeania sp.
MVEKAYKFRFYPTPEQESLLRRTLGCVRLIYNKALAARTQAWYEQKQRVSYKQTSTMLTSWKKQDDLDFLSEVSSVPLQQGLRHLQTAFPAECCANTNFFSGRAKYPNFKKKRNGGSAEFTKSAFKWKDGQVYLAKCPQPLPIRWSRQLQQGCVPSTITVKLAPSGRWSVSLRINDPRDLRLKPVKKQVGIDLGITSLVTTSDGEKITNPKNLNKLGKKLRLAQKSLSRKTKGSNNYHKASLKVARIHAKIKDSRLDYTHKLTYVANPTAPLQLIRENQTIVVEDLAVKNMVKNHKLARAISDANWGELVRQLEYKAEWYGRELIKIDRYFPSSKRCSNCGHVVEKLPLNIREWDCPECGSHHDRDINATINILAAGLAVSVCGATVRPSGSKSRKAGAKKQKAPNSDVKESHPVS

SEQ ID NO: 39407 - protein, 404 aa, unknown
  TnpB Polypeptide
MLVKGAVFYLESNLPSEVTFLLEDFRLAVNNAIRAGLQARVTSRNALVKIAYKDFRLEHPMMYSQHLVSAFGVACGILKNHCKRARKGVTYRIPYVKRLMMKAENQAYKLDRRSGIIDLPIRAGCHVELRLVVSQYHWKYLDDMSLTLGSLTVLPDRVIVAFRKDAPKHYTPESMISLDTNERSLDGVFVEDDVARAIKADFPEVAIIQQRHHDRRRRIQKKKAHDRRISRKLCRREGAREHRRINYRLHQVANSVLKFAEERRSAIVLENLKGIRPRKSKELNRRLSMWPRRKLHQIIEYKAQWKGIPVVKVDPRNSSRTCPICGRIQYSRMGAEFKCECGWHLDRHINASINLLQTAISKGVAGGLRFNPGAFQHDVMMILYEPAMAARSEPNGTSGIVGVT

SEQ ID NO: 39408 - protein, 414 aa, unknown
  TnpB Polypeptide
MQRTNTILLTPTETEEQELHALADASARLWNMANYERRQAYFVVRRVPSYENQWRTFKDSEPFKRIGTCKGQALLLKLREAWASFLALKRLQGTGRLPSHIKRVSPPRYMKDRKTQERKAEAIYVRNDGYKQQENVLTLSKTLHIRFKAGELWVGKQGRLELHYDRLRGKWYGHIPVKVKWPRKGMPHHSTQRRASIDLGICNLTTCVVEGAEKAYVYSGRAVLSDWRYWTKRIASYESTLKKTNQRDSSNHLSRLYRARRRRLNHAVKAMLRDLYDRLETHGVTDLIVGDLKHIRDNTNHGKVGNQKLHNFWPFMQIRQRICELGEEYGIRVRFKSERGTSKRCSLCGEQHKNGREHRGLYHCKTRNILVNADVNGAYNILYGRKVAAVSGSRPMAWPMLLKWNSQEWEVSAA

SEQ ID NO: 39409 - protein, 406 aa, Unicellular sp.
MFVLEYKVKPKTHQVEAINEAIRTTQFVRNKVLRYWMDNRGVGKTELFRYNTRLRKEFKFVNDLNSHACQTAVERTLRAITRFYDNCKNNVKGKKGYPKFKKHSRSVEYKVSGWKLSENKRHITFTDKKGIGGLKLIGSRDINYYQSEEIKRVRILKRADGYYVQFCIKLDPRNTVQPLSPSQQTTGIDVGLKFFLVDSQGNKTDCPQYYRKSEKQLNRLNRKKSKKYRKGVKKSRNYHKARQRYARKHLRVSRQRTEFVKRVALRLIKSNDLVAYEDLNVKGMVKNRRLAKSITDAGWTTFRQWLEYFGDKYGKITVAVSPHNTSQNCSNCGKKVQKSLSTRTHVCSHCGYTDCRDRNAALNILQKGLSMVGRTKSQALGEIPSWLVGEILLANGNSLNEESPSL

SEQ ID NO: 39410 - protein, 522 aa, Thermocrinis sp.
MFVSLQFKLELKREDKEKLIKLMRKQSSAIRVAYNMLKELEKKKTRNPHAQIYQRLRQLFPELPTKYIDSAIYKAKQYSTDKPVVFGGKRLFEKLCKNHLTGKAREKLKKQWKEQRQGTLVSIGSKSDRGNRLMRFEELNGQLCLRITTGNREFIYAKVLREPSNSKDKWLTFMAMLLESWQIPSYFPYTVELKLRNGEVYGSVSFEIPTPEVRYTKENGVIAIDINASPIHLAVAEVSKTGELLSYQTISLHHLLGLSQNSKDHQEWILAHQMVNLAIEKGKAIAVENLKKLRKGKRGDGKAKLRKILHNWNAKKFLQKLKRVAMIKGVEVIEVNPAYTSVIGMLKYAPQLNIDKDIAGAYVIGRRALGFKEDMPENYEKLLKDKTYLEFALKRYEEKEKELRELLEEETNQYKRNALESELRSVEYAKELLTNLIQSLQSEPSSCEGAYGRNPEQGRVAKTTLQSAWQVLKVALLFPILGKVLPRDLSPLKPLLVEGVWDRVRSRLVPLEAGGTVPIRDF

SEQ ID NO: 39411 - protein, 319 aa, Thermocrinis sp.
MLAEKLSAYEKGEPIPRITPAKYKEEFPFLREVDSLALANVQLQLEKAFRDYFKKQKHFRLPKFKRKKDKQSYTTNNVNGSIKVDFEKGLLYLPKIKDGIKIELHRTFEGQIKSATVRKTKDGKYYVSILVETEEPRNKVIEPKSKACGIDLGLEHFATITNDFGTYKIEHPKHLRRAEKRLKKLQKDLSRKQKGSKNYEKVRQRLAKLHAYISNARNYFLHKLSKAIIDENQVVVVEDINVKGLMQSNLAKSISDRSWSKFLTYLRYKAEWYGRTFIQVDKFFPSSKLCHCCGYKKEDWLCMKEFGLVLYVGQSTTGM

SEQ ID NO: 39412 - protein, 521 aa, Thermocrinis sp.
MFVSLQFKLELKKEDKEKLIKLMRNQSSAIRVAYNMLKELEKEETKNPHAQVYQRLRQLFPELPTKYIDSAIYKAKQYPTDKPVVFGGRRLFEKLCKNHLTGKLRERLKKQWKELRQGTLISIGSKADKGNRLTRFEDLNGQLCLRITTGNREFIYAKVLREPSNSKDKWITFMAMLLESWQTHSYFPYTVELKLRDGEVYGSVSFELPTPKVKYTKENGVIAIDTNASPIHLAIAEVSKTGELLSYQTISLHHLLGLSQNSKDHQEWILAHQIVDLAIQKGKAIAIENLKKLKKGMRGDGKAKLRKRLHQWNAKKFLQKLKRVAMLKGVEVIEVHPAYTSIISMLKYAPQLNIDKDIAGAYVIGRRALGFKENMPENYGKLLKDKAYLEFALKKYDEREKELTELIEKETNEYKRNALKSELRSVEDARKLLINLLQSLQSEPSSCEGAYGRNPEQGETKKVSQVAWQVLKVALLFPILGKVLPRDLSPLKPVLVEGVWDRVRSRLVPLEAGGTVPIRDF

SEQ ID NO: 39413 - protein, 519 aa, Thermocrinis sp.
MFVSLQFKLELKREDKEKLIQLMRKQSSAIRVAYNMLKELGKEKTKNPHSQIYQRLRQLFPDLPTKYIDSAIYKAKQYPTDKSVVFGGKRLFEKLCKNHLTGKLRERLKKQWRELRQGTLISIGSRHETVKGNLLLRFIELDGELHLRITTGNREFIYAKVLREPSNSKDKWITFMAMLLESWQTKNYFAYTVELKLRDGEVYGNVSFEIPTPKVKYTKENGVIAIDTNASPIHLAIAEVSKTGELLSYQTISLHHLLGLSKNAKDHQEWILAHKIVDLAIEKGKAIAVENLKKLKKGTRGDGKAKLRKRLHKWNAKKLLQKIKRVAMLKGVEVVEVNPAHTSIIGMLKYAPQLSIDKDIAGAYVIGRRALGFKEDMPENYERLLKDKAYLEFALKRYEEREKELRELIEKETNEYKGNALESELRSVENAKKLLTNFLQSLQSEPSSCEGANGRNPEQGRGDKASSVAWQVLKVALLFPILGRVLPRDLSPLKPILVEGAWDRVRSRLVPLEVGGASR

SEQ ID NO: 39414 - protein, 524 aa, Thermocrinis sp.
MFVSLQFKLEMKKEDKEKLIKLMRKQSSAIRVAYNMLKELEKEKTKNPHAQIYHRLRQLFPELPTRYIDSAIYKAKQYPTDKPVVFGSKRLFEKLCKNHLTGKAREKLKKQWRELRQGTLIAIGSKHKTAQGNLLLRFTELNGKLHLRITTGSREFIYAKVLREPSNSKDKWLTFMAMLLESWQTKNYFAYTVELKLRDGEIYGSVSFEIPMPKVKHTKENGVIAIDINASPIHLAIAEVSKTGELLSYQTISLHHLLGLSQNSKDHQEWILAHRIVDLAIQKGKAIAIENLKKLKKGMRGDGKAELRKRLHQWNAKKFLQKLKRVAMLKGVEVIEVNPAYTSIIGMLKYAPQLHIDKDVAGAYVIGRRALGFKEDMPENYERLLKDKAYLEFALKRYEKREEELRELTEKESNEYKKNALKSELRSVENARKLLINLIQSLQSEPSSCEGANGRNPKQGRVAKTTLQSAWQVLKVALLFPILGKVLPRDLSPLKPVLVEGLWDRVRSRLVPLEAGGTVPTRDF

SEQ ID NO: 39415 - protein, 399 aa, unknown
  TnpB Polypeptide
MGVMKQEKQDGHAEGNRVIQYNTIKVRLCPTPEQEELFQKTFGCCRYIWNQMLSDHERFYEETDAHFIPTPAKYKKGAPFLKEVDNQALTQEYNRLSQAFRNFFRDPKTFGYPKFKRKKDDRDSFTACNQFFGSSATIYATRDAVRMTKAGLVKAKFSRRPRSGWKLTRLTVERTKTGKYYGYLLYTCPTHQPEPVEATAERTIGLKYSVSHFYVADNGNSADPPRWLRQSQEKLAVVQRKLSRSQPGSQNYQELVQKYRLLHEHIANQRRDFLHKESRRIANAWDAVCIREDSLRAISGKLGGSAVHDTGFGMFRELLRYKLERQGKQLLEVDRLVPTTKVCSACGAVNETLSIRARRWVCPVCGAEHRRGMNAAINIKARGLVKGQSQQDAAALPRL

SEQ ID NO: 39416 - protein, 258 aa, Clostridium sp.
LKTNINGKLQQVRILPRNKHYVIEVIYKIEKKEKLNDNGKYISIDVGLDNFATVVNNIGLKPIIINGKGLKSINKYYNKKLSYYKEIAKRMNNLDYTNRMNRLTIKRNNKIADFIHKASKKVIDYALKNNINTIIVGNNKDWKSKSNMSKVVNQSFVGIPHQEFINKLIYKCENVGLSIIITEESYTSGTSFLDNELPIKENYNKKRRVYRGLFVSNNGIKINADVNGAYQIMRKVFSNVKADEIEGIGLSPIRVNVS

SEQ ID NO: 39417 - protein, 327 aa, Streptococcus sp.
MRITVDDCGQGWLEIANPLGRTNGKTKSPRIKVPIIIPYHFYHQITNVVMGKQIGVNPKGKPIIEHQKYSVEIIRKQNEFYVNITFDETEIGRVLDFKETPQSDVIAGIDVNPDRIAVSLCTKQGNFKGSKIFYLHNLNAFSTNKRATIIGQIVQQIKTWLLENNVGGIVLEDLKFQQSHDTDKYSNRNFHQFTYKKMLNSLIRMSLRNGFSVKTVNPAYTSVIGKLKYSKNFGISFHEAAAFAIARRGLELQEQVPQEIILLLKNQITTKLRILVASMEESKKNTQKVYKKWLQTIQTWKEYHNWKLWSILHKTVYMSNQQFVFKI

SEQ ID NO: 39418 - protein, 372 aa, unknown
  TnpB Polypeptide
LSAVRITYKYKMYNSKANKHLDRAIHIACEIWNHCIRLHRRYYKLYGKHLSDNKLKKHLTKLKKRSQYEHWNELGSQAIQDIAERIGRSYKAFFDHVKEKRSGRKSPPRFRKEEDYHSITLKQAGYKFLDETNKVVIMGHTYKYVKHRPMMGTIKTVTIKKNRLGEYFIAVSVVIDLPEVPLRAGDAVGLDFGVKCFLTTDTGELIQSPLWYRQSLNDLRRAHRQLSRCQKNSGNRKRALLDLFHVYEDVSNSRRDWLYKLAHDLTDRYAVICVEDLDIDAWKHLWGQKVSDLGIAEFLTILEQVARKKSSRVVKVSRWYPSSKTCRNCGHVNRDLKLSDRVWVCPNCGTVIDRDVNAAINIREEGLRLSCA

SEQ ID NO: 39419 - protein, 375 aa, Microcystis sp.
MLSFKTELKLNNKQQSLMAQHGGCARFAWNWGVALTQEILDYNRNNPENKQKFPTAIDLHKRFVAEVKSVNEWLSESSKCAPQQALRDLRIAWDRCFKKIAKSPKFKKKGVKDGFYLEGSIKVESNRIKLPVIGWVKTYEQLPTGGIKSVRITRKADRWFIAFKIDDVEVHPTIKQREAIGVDLGIKSLAVCSDRTVFKNAKAYRKLKRKLAHVQRAVSRKAQGSNNRKKAVKVLARVHYIISCIRNDTIHKLTSWLAKNHSVIVLEDLNVSGMLRNHRLANAIADAGLYECRRQLEYKTQLYGSKLIMADRWFPSSQLCSHCGNQQKMPLSERTYHCQKCRTQIDRDLNAAINLESLAVSSTVNACGESHKPLA

SEQ ID NO: 39420 - protein, 537 aa, Burkholderia sp.
MQATAQTRLQLPPVDASLLDGMAGLYGSMTRKLYARIAAHGGKAKSHKTVFCREHGISARMFNALAIELQGLIDGTRELLKDERKDLNRGIRRLERQLATRQAQLDEIAADRLRLKPQREAKLRRTTHQSGIRLMRLRARLARVEQRLDSNVPGICFGTRKLFRQQHHLELAGFGSRESWLREWQTGRSHQVFFVGSKDETAGNQLCQLRKTGERTYSLQIRIPDRLLKSGDDKYLVIDNVAFAYDHEALDAALETGTALSWRLHRDERGWRAFVSFNHQPAELVTLDTEYGAIGVDFNVDHLAVTETDASGNLLQTRLLPLLRENARSGQRNAVLSDALTAAVNWAKEARKPVVAEDLDFTAMKKAMAQLSPKGARMLSGLLYAKYRQLLEAKCFRAGVELIMIDPVFTSTIGAVKYASRRGWSVHAAAAGVIARRGQKLTERLPRAGTDVRVPVRGGHHILELPARMAGDSRVAAWRGVHAAYRGVVRERWLATPGGKPSRSAKGTHGGGVRAAPLSRGDRLPCESKLREQICAL

SEQ ID NO: 39421 - protein, 379 aa, unknown
  TnpB Polypeptide
VQRTYKYRLYPNKEQIRKFEQILNTCRHLYNNALTQRKEYYKENKKGLSRIKQQKLLKERKKENIYLKAVHSQVLQDVLFRVEKAFALFFVRLKVKDGKAGYPRYKSYDRYDSFTYSQQPGFKFTDKGLKLSKIGIIKIKLHRPTQGEAKTCTIKREIDRWYACFSCQANFPIKSIPQRAIGIDMGITHYAYLSNGKTIDNPRHLTISEEKLKRVQRRLSKRPRGSKNRNKQRIKVAKVHRKIKDQRSDFLHKLSRRIVNSFSFIAVENLAITNMVKNHYLAKSIADASWGQFLSYLAYKVEETGSKVVRVNPKGTSQICSQCDNRVPKSLSVRVHKCPYCGIKLDRDYNSALNILQRAIGQGLPESTPLEIANRQSLN

SEQ ID NO: 39422 - protein, 478 aa, Fusicatenibacter sp.
  misc_feature (352)..(449): Xaa can be any naturally occurring amino acid
LPAYNGRCPDGSNPKIHRKSGTNGSKKEVTNMANKAYKFRIYPDDAQKVLFARTFGCVRMVYNHWLARKIRQYEEDKTAVTYTVCAKEMAEMKKTEAYAFLREVDSVALQQSLRHLDTAFQNFFKQPKTGFPKFKSKKQNKKSYSTICINGNIAILNGYLKLPKAGQVRLKQHRAVPKEYKLKSVTVSQTPGGKYYASILFEYENQVQEKEMRRFLGLDFSMHELYRDSNGNEPAYPKYYRNAEEKLAREQRRLSKMQKGSNNRSRQRIKVAKLHEKVSSQRKDFLHKLSRQTADAYDCVCIESLDMKAMSQMLNFGKSVSDNGWGMFTGFLKYKLEEQGKKLVKVDKFFAXXXXXXXXXXXXXXXXXXXXXXXXXXXXXXXXXXXXXXXXXXXXXXXXXXXXXXXXXXXXXXXXXXXXXXXXXXXXXXXXXXXXXXXXXXXXXXXXXXPTSTGRGGCHVFYAKSCVWTGKTEAFMVV

SEQ ID NO: 39423 - protein, 412 aa, unknown
  TnpB Polypeptide
METIEINRTIKSRIIFENDKDIPKMVESQEAFRQGCNFVSEYMFNNGFPMNTTGLIKILYNDLRSKFGLKSQMAQSCVRTVIARYRSVQAQLRKEYVWDGYKKDNHGKQVKNYVLKTLEYLWYPIEFKRPQLDLVRNRDYSYKDDGTMTLNTIYGRVIVTPTFKGFEQYFDGSWKLGTAKVLKSGKHWYLHIAVTKQVEQSEFKSSHVVGIDRGLRQLLTIYDEKGRTTFVNGKQILQKRRQYKRLRKELQSKGTKSAKRRLKAIGERESRWMSDVNHCLAKTLVNRYGSGTIFVLEDLTGVTFDTVSKRSKKNRYEHHSWSFYDFEQKLTYKAVMNNSQVIKCDAHYTSQRCPKCGLIDSENRNKTKHEFCCKACSYRTNDDRAAAMNIQFLGTLYNSGNPKPSFEKLEIL

SEQ ID NO: 39424 - protein, 401 aa, Streptomyces sp.
VIVTESNVKRAFRYRFHPTEAQAAELSRTFGCVRKVYNLALAARTEAWARQERVNYNQTSALLTAWKKTEELAYLNEVSSVPLQQALRHLQTAFAHFFGKRAKYPRFKSRKRSRKSAEYTTSAFRFREGRLTLAKMSEPLDIIWSRPLPEGAEPSTVTISQDEAGRWFVSMLCEDTSVRPLPETDTAVGIDVGLDHLLTLSTGEKVSNPRHERRDRAALARAQRSLVRKAPGDGANRRKARRKVAKIHARIADRRRDGLHKLTTRLVRENQTLVIEDLSVRTMVKNRSLARAISDAAWSEFRSMLEYKAAWYGREVIAVDRFFPSSRLCSHCGKLAKSMPLRVRTLKCEGCGTTHDRDVNAAKNLKAAGLAVSVCGAGVRPQRRTPGGQSATKQKTPRRKP

SEQ ID NO: 39425 - protein, 500 aa, unknown
  TnpB Polypeptide
MVRIVVTKKTPTGTTRSIKIVSRVQVPEGPSTPNWDKEVSKSLWLPNETDCNTSGLKGSSEKILKNSWFSVSKISSKDTNLPKVNLPKVTSSTSQVQESSLRIKKYQLYLTKEMIRTYKVWFRATRWVYNKCVEYYHENLNEKISLKQLRDYTINSKTINHEPHIMDLLSQVPYDVKDSAVRDFMNALITQKKLVKEGKRKSFNMKFRNHKDLQSLGVSHSNIKNRNGILTFFPTFLGRNVQALRCREKIPKITHDVRLSWNTRNIFILHVPTDVPVGTERISKGNICSIDPGEVIFATVYGSDGYSYLIGANDSKKVDKIASIASRMRNGIKRTLKLDETKEYFKVSGPNNKRIRKHLKDKAKDLETKAKNLISDIHKKTVKFLTKKYDTIIIPKFETQSMTKRLDPQGKWKRKIGKGTSRRLIRWSHYNFRELLKAKGGNRVIVGTEEWTSKTCGNCFTINNSLGGSREFKCSKCGLKIHRDINGARNIMILNWDKIN

SEQ ID NO: 39426 - protein, 246 aa, Parageobacillus sp.
VDVLPLFHRPLSDDKKSSPPSSRKKERKKIPEKYEAEIIDVVVGEQVGVNSKGKPIFEYQPYTVEIKRKNGEYYIHLIYEEEVYGRELAYDEPIQAERIAGIDIHIGRIAVSIVSKQGNFIKPKVFYCHELEYVRANKRNNIIGETVRDVYDWLLQENVGAVVIENIQLRQQHDTDKRFNRLTHHFKKKKLTETILRRGLRLGFCIKKVNPAYTSVIGRFKYMKKYGLSVHESAAFVIGRRGLGYR

SEQ ID NO: 39427 - protein, 378 aa, Lactobacillus sp.
MYKAYKIRIYPNKQQEVQILLTFGQTRFVWNQMLAMQLERYKNGGKFVNAFGMNRLLTHLKKEYPWLAESSAQSLQEVCKDLSLAFKNLFEHRANKPKYKSRKYPKQSYRCNKNITLVDGHHIKLPKLKTMYYHSGREIKGKIKNVTIRKSATNKYYVSVLTEIEVKPLAKTKQEVGIDMGVADLAITSDGKKYRTVRFDKLLQDKKHYWEVRLARRRLKAKKEIAWDKHNKVLEPRELSDFSNYMKAKLMVAKYSEKIANQRKDYLHKISTELVKQYDVIKVEDLKAGNMIKNHKLARAIANQSWLELRLMLEYKCEWHAKDLVIVNPYKTSQICSSCGYDDGKHTLDIRSWVCPKCGTKHDRDVNAAKNILKAEAK

SEQ ID NO: 39428 - protein, 391 aa, Lactobacillus sp.
MFNTYIKLKGGESMYKAYKIRIYPNKQQEAQILLTFGQTRFVWNKMLDMQLERYRNGGKFVNAFSMDYLLKPLKKEYPWLTEAPAQSLQQICKDLSDAFKNLFEHRAGKPKYKSKKYPKQSYRCNHRIMLVDDHHIKLPKLGSVYYRSGREIKGKIKSVTIRKSATNKYYVSVLTEIEIKPLAKIKQEVGIDMGVADLVITSDGNKYKTVRFDKLLADKKHYWEVRLARRRALAKKEIAWDKHNNVLEPRELSDFSNYMKAKLMVAKYSEKIANQRKDYLHKISTELVNQYDVIKIEDLKAGNMMRNHKLARAIVNQSWRELRLMLEYKCEWYGKELVIVNPYKTSQICSDCGYDDGKHTLDVREWICPNCGAKHDRDINAAKNILKEEAK

SEQ ID NO: 39429 - protein, 404 aa, unknown
  TnpB Polypeptide
MKLCVKYRLNPTREQEEHLNKLGFYGTKLYNTDNYIRREQWEKTGKIPSWYVQKKELKENHWYRLLPSQTAQAIIKNLQDNYCSWFGLRKTDPVANPPMFRKKDMLSPLTFYQQFAIDGNKLTLGMSRKFKEENGISKMTFEFNDWKHIDGTPKMCNILFVDGKWMAHIIYEIPEVSPKDNPNIVACDIGIINLIGTADIEGNSKIYTGKQALAVQHYYNKEIARVQSSTKIQQKKKWSKSLSRMTDRKYRQINQILHTVSKEVVKDAIENKVGTIVVGDIKNIRKKEDGSGKNIGKMNNQKLHSWGFAKLLTQIKYKAALSGIRVVTVSERDTSKTCSVCGLVKKSNRKHRGFYRCKCGNRMNADVNGAVNILKRYLRENKISRSIGSVAEPLIWRCNNVVPS

SEQ ID NO: 39430 - protein, 565 aa, Clostridia sp.
VWSMSRWNKDIEVGERCVLTLPLNCHPRDTRFLDQVFQIENKLKNQLIEWYKTQLNEMTRTRLWREASQALADLHTEYGPDMKLLAELDEKAKKKPLSKTKEAKRVQLRQKAKEFQAKQKPLYETRNGMIRKYEFSRGDFEKRMAKYRRSYTDFVGSMVAQRLADDVWDMFQSYLYGKGKAIRFSGINKFLTIEGKNNSANIVFDRKAMKVFIGQGRHKTGIRVKRSRKDPCGYEAEALSREICYCRITRKAYPEGWRYFLQLVLKGAPPVKAKPDTGELLHPMGEGRVGMDIGPQTLAYCGEDVLDLVELAPGAQNLQEEIRRINRAMDRSRRATNPGMFDKAGQIIPGNRLPRELLDSHGKRKWVKSKQYREMERHRRYLYRKQADLRKAKHQQLANKLLAAGDRFYVEDMSWRALSRRSKQARKNKKGKNLSKKRFGKSIANKSPGAFLSILEKKVLAQGGSFYRINIWKARASQFHHMTGQYIKKKLSQRVDILEDGSKVQRDLYSAFLIMHSNKALDGFLVSSCNRDYPKFLQMHNKAMAALAASDKPLPSSMGVRRKAA

SEQ ID NO: 39431 - protein, 390 aa, Bacilli sp.
MLNRGVRIMEIYKAYKFRLYPTDDQKVLINKTLGCKRFVYNYYLNYLKENKSRSKYDLYKDLLKLKEENEFLKEVDSSVLCSAVDDLCKAFNDYYAKKRGYPKYKNKLSKQTYKTRCIRSTYKGKEYSNIEVDLLTRNIKLPKLGKVKIRGFRTKDKIDGKILNATISRDATNKYYVSVVVVEDILIEKVTPTNIVGIDLGIKDLVITSDGIKYSNEKVLMKYEKRLKRLQRKLSRQVKGSKNYLKTKEKIARLYAKIKNYRKHYLNDIANEIVNDHDIIVTENLLVKDMFKDKRKAFNKSLSDAAVSTLRSLIEWKCKIKGKIYYKINTYYPSSQICSHCGYKNSKLKDLSIREYNCPECGSHNDRDINASLNILLEGLRLHYNLQSLV

SEQ ID NO: 39432 - protein, 169 aa, Geobacillus sp.
MEFIQFIFSMQGNLVLEVKKGGEFRYRKTNNIKKLEFLVRKTYRRLKHIRHNSIHQITASLVKTKPEYVVMESLNTHGMLKNRKLSKAIQEQTFHEFTRQMEYKCAWNGIKLILADRFFPSSKTCSHCGAVKEKLSLSERTFVCDECGNKIDRDVNASRNLKKYGKSIA

SEQ ID NO: 39433 - protein, 415 aa, Streptomyces sp.
VIAMQLRYSFRLYPNGSQRSALTRAFGCARVVYNDALRARESAREDGLPFPRTGDLSKALITEAKKTPDREWLGEVSAVVLQQSLRDLDTAYRNFFDGLKGKRPRMGAPRFKSRKDNRQAVRFTANARWKITSGGDLSLPKVGDVRVKWSRVLPSQPSTVTVVKDAAGRYFCSFVVESDPATDLTRMPDTDAVVGIDLGLTHFAILSDGTKIDSPKFLRRAEKKLKRAQQSLSRKAKGSNNRGKARLKVAKAHAKVTDARRDFHHQLSTKVIRENQAVAVEDLAVKALARTSLAKSVHDAGWSAFVTMLEYKAARYGRTFLRIGRFEPTSQVCSNCGVKGGPKPLDVRVWQCQACGVRLDRDINAAVNVAKAAGLAVSACGAQVGPGLVPAPRSEAGTRLSAAPSVRSVEGITAL

SEQ ID NO: 39434 - protein, 367 aa, Eubacterium sp.
MKRIRGYRYRAYPDRKQQAFFARTFGACRFVYNYYLEQKKTFWEECHDTLKYTEEGRDLSHHLKKEAPWLKEADSIALQQALRHLEQAYENFFQKRGGYPKFKSKRHAQSYRTMNVNGSIRIGGDRIRVPKAGEVKIRNTRVFDGRILSATVSMTASGRYYITLQVEEEAEVLPNKGGETGLDAGLTVLYTDSSGKSVPNPRTQKKHEKKIARLAKKLSRKKRGSKNREKARKKLAREQEKVADIRRDYLHKETCRLANENQVVCVEDLNVKGMMKNHRLARSIGDASWGEFYRMLEYKLADHGGVLVKVPRTFPSSQQCSCCGKRNTGVKDLSVRRWKCPVCGALHDRDVNAAINILKKGKEILAA

SEQ ID NO: 39435 - protein, 348 aa, Eubacterium sp.
MMEKTFGCCRFLYNRMLSDRMTGDVLGEPVRPRPAMYKKEYPWLSEVDSLALCNVQIDLEAAFRNHRDRRGIGYPRYKSKHHSKRSYTTNVVNGNIRVEGKKLRLPKIGMVRIKVHREIPGEWKLKSVTVSKEASGKYFASLLFEVPECESQAEGTIEEKRCLGIDYAMDGLAVFSDGSRAAYPGFYRKAEERLAREQRKLSHCEKGSHNYVRQKRKVAVCHEKVRNQRKDYLHKLSRDLADRYDVIGVEDINMKAMSRSMHFGKSVMGNGYGMFRDMLEYKLEDRGGNLVKVDRFFPSSKRCSCCGRIRKDLRLRDRVYRCSCGNTMDRDVNAAINIREEAIRVLAS

SEQ ID NO: 39436 - protein, 449 aa, unknown
  TnpB Polypeptide
MYHHQFITSTLNPASTMKLAHKIELIPNQAQCEYFAKACGVSRFSYNWALANWNSQYLEWKEAEEEAKKNGTVNLLSKPKEYELRKKFNEIKGEQYPFVKEITKCAVQQSIKDVGVSFVRFFKKTSNYPQFHKKGKHDSFYMDNVSFKVVGKKIHIPKLGWVKMRENLRFYGKIMSATVSRIADKWFVSIQVDVPFESLQVAKKLCSENQAVINEGVASYAFATNEAKVVGIDLGIKTMATLSYADKIEPSKIDSPKPLKRLLSKLRRLQRKLSRQGQKYTMEDYVDANGETRKIRKYSNNYMETKTKLARLHAKIHNIRQDFLHKLTTRLVEEFDVICIEDLNVKGMMANRKLARAIMDLGFYEFKRQLLYKAQMWQRMVIIADRWYPSSKTCSHCGEKLKELELSDRDWKCPCCHTMHDRDANAAMNLRKLYFTGIDEVSTSATPTM

SEQ ID NO: 39437 - protein, 164 aa, unknown
  TnpB Polypeptide
LQTWVNPCICKAIVSRAKATNSTIALEDLTGIGERVNQPPRSKTERRRSNSWAFYQLRQFVHYKALRAGVTVVVVPPAYTSQICHQCLWIGQREGKRFRCVNPACSWEGDADYNAALASAKRSAYVIALLGAAVNRPPYIPLPPVYGGQSEPGSLQLLAAVNPL

SEQ ID NO: 39438 - protein, 360 aa, unknown
  TnpB Polypeptide
MLAEACFVWNHALALQKRYYRLYGGYISLYAMQAHQTKRIKRNLLGAQTVQEIIERLDASYKRFFNHKAIRPPKLRKAKEFSSFVFKQVGYSLNGNVLTINRIKKRYKFSLSRNYEERIKRITIKRNRLGEYFICIMTDTEPIKYGKSRNGASVGIDFGLKTYLTLSDGTRYENPQYMKESLTELRRRSRNLSKCKKGSNNRGRKRKELDRLWNDITNKRNDFQWKLAHELCRKYDNIFIEDLNLSNMNLSRKANRKLRDQAHAAFITKLLYVATKYDVVVHKIDRYYPSSKTCTCGYVNKDLKLTDRKWVCPYCGAVHDRDLLAAKNILRRGIYELESNGKTKKQSADGQLRYYSTIFN

SEQ ID NO: 39439 - protein, 463 aa, unknown
  TnpB Polypeptide
MTAEWIAERIAENALKVISKVTITKTIILPVSPDITKKKLNYIERLSARVTYAVTLYLDIIIKNDITKLSEANEYRESIARKMGLSSAFVQCARDMALEMYRSYKKLHKEWLKKVRKLEKAVEKAKSGNKSKVRKLEKKLKRLKERKPSLPVVRRKQPIFFDKRIGAIVFSNCRKFKVWAKISTLKKYETIYIPLITYPYADKHLKWKIKGFRLLYNHRLGRWEVHVTVEKEVKVHIKSYAGADLGMKRLAYIRQIGGENRVLSFPKENYNFFKRMHELNNRIAKLQRKGKTKALKRLKQKRRNVARDFRRKLAREIASQVTNTIIFVGHPKNVRDEYFKGNGSRNLRKRVNRWAFKEFGELLVLKLRENGNHAELIGESWSTKTCCICDSRNTIVNDRDFYCKDCNASIDRDDNGQANILKKGLKKKRVYEAVWPLPLQQLKAVTWPARPRRGSRDPARSGG

SEQ ID NO: 39440 - protein, 447 aa, unknown
  TnpB Polypeptide
MVVQASQFALALTPEQAACVRRQFGGRRYAFNWTVRTMKADITAYHATGAEFPAPSLFGLRKRWNEVKHTECVDTDSGEVWWPQVSKEAFADGIAGAVDGYWNWQSSRAGHREGKRMGFPRFKKKGRDRDRITFTTGAIRVEPDRRHVALPRIGTVRTHQNTRRLERLVAKGRARILAATVSRQGDRIVVAFRVLVTRPQQPRVTHPDSTVGVDVGVRVLATVGTPDGTVLQRSPNPRALEVALKEMRHLGRERSRRTIGSRGHRATQGRLTRLHRRVADIRAHHIHVLTTRLAKTHGTIVVEGLDAAGMLRQKGMNGARARRRGLSDSALAEPRRQLGYKTGWYGSRLVEADRFYPSSKTCHACGHRQEIGWAAHWTCQGCGAHHQRDDNAAINLARYETTSAVGPVRAAVKRGADRKTELALLVAVKRGSDTAARLSSNPVTGCE

SEQ ID NO: 39441 - protein, 659 aa, Micromonospora sp.
MGGCRWTCSSWKAVPRVARMLLLAACDRQQASIERSDTEPRRVLLRLQLPTRPDPRAYADWTWVACPIMLPPTVPAGAVVHLPTLRLTGGQVRADVAYTHAVPKVRRTGHTVALGVDWGLNTLLTAGALRLHEGGRITALGAGGQFRAAGVLAKQHRLRRHSERLHAKADHYQRLTGRDERHHLVGKLAVLRAEIRHVSDRRTNLNGALAWAAARWAVDQAIAAAATVIYVEDLRSLEAKGMGTTLNTRLSQQVRGQIVDRMRHLAAEAGIAVVTVPARNTSKHCPQCLTPLRHCKAPDKPTVAGWKWAVCPDQSCRWQGDRDQGAWRRIAARGLTHQAKTVIDKASGRMVIRAVVDKLETAAVITKSHRADRSKTGPTRHKPPRPAPRRRGAPSPTRPHNRAGKRPEGVAVGTALTGGPPHRSPHAGLPHGAPASGPGSEARRREGMHRANLGYPSSRDPAHPRPGHPCALATTPQRLEPVSGHLVLEGRHRVGVAGHCIVGRVASHHAGQPLPLHRDGLMPATLELLVDHLQLRPHPFRDRDALEPEPPALGHRADVREAEEVEGLRLAQTPLTSSSDDVPAELDQPGLVRVKLQPEPREPLAKLGQEPPRILFILEPDDEVVREPHDDHIAVRVAASPPVNPQVEDVMQVHVSEQR

SEQ ID NO: 39442 - protein, 554 aa, Micromonospora sp.
LALARRPGHPCPTTRKRTFPTAVKDRAPCPERWWRRRSVGRGPAQPDEPVPSWCVSRKCRRWQACCGAVGRFAAFRFTVDPSPSQVVVLARHAGASRFAFNQCLALVKEALDAKRRGGSVVVPWSGFDLINAFNTWKCSAQAGRRFVVDAAGSVEIVATGLSWRAQVCQQVCEEAAVDLGRALTAWADSRQGKRPGRRVGFPTFKRKTRTRPSFRIRCKTTKAGRASIRVGDPTAGPRSVCLPKIGILRVREDTRRLRRMIRTRRAHIRYATVSCRASRWTITVTVEAADLHPARQHPPRPDTDSGGWVGVDRGLAALVVAADTTGRQVLRVDDAPRPLRAALPRLRRLSRQVSRKQRGSRNRSEAVARLARAHHRVANVRRYFLHKVANRLVKTHDRLALENLHTAGLLRNRRLAAAISDAGWADLARIIGYKQRWRGGQATMAPRWYPSTRMCSACRTIGPALPLSVRIFRCDQCGHTADRDVNAAVNLAVWAEQHHAQTRDPEARGPVTNASRGDGSGQRPRAGETSPDDGGTPPPRTPATAGTPEKGGVS

SEQ ID NO: 39443 - protein, 362 aa, Clostridium sp.
VLKAYKYRIYPNQEQRIYLAKTFGCTRFIYNKMLSDRVKAYEENKGLEVKTIKYSTPAQYKKEFPWLKEVDSLALANAQMNLDKAYKNFFRDKSVGFPKFKSKKTNYNSYTTNNQNGTVYIENGYIKLPKLKSMISIKQHREFAGMIKSCTITQVPSGKYYICILIDTENIQLPKIDKKIGLDMGLKDFAVCANGEVFSNPKWFRKSEKRLAKLQKHLSRKQKGSNNRHRARLKVVKMHEKIANQRKNFLQVISTKIIRENQSIVIEDLRVKNMLKNEKLSKAISEVSWSEFRTMLEYKANWYGREVIIAPSNYASSQLCSVCGYKNEEVKNLVLREWICPQCGTHHDRDINASKNLLKLAI

SEQ ID NO: 39444 - protein, 396 aa, unknown
  TnpB Polypeptide
MKKLIKGIKIMLVPNNKQNTLMFQNAGTARWAFNWALGREKENYANGGKFISDNDLRKELTQLKKTDEFGWLNNVSNNIPKQAIKDACGAYQRFFKGQAKFPKLKTRKKSSPKFYQDNIQIKFTATHVKFEGLAKSKKGNKQQLNWVRLAEHDRIPFGKDIKYINPRISHDGLNWFISVGIEYSDSIETPLNEGIGIDLGIKDLAICSDGKTYGNINKTKKMRRLEKQKKRLQRQVSRKYEENRDGLKYIKTKNIIKLEFKIKSVQHKLNGVRNNYLQQTTTEIVKTKPSFVSLEDLNISGMMKNKHLSKAIQQQSLYKFGRQLKYKGIWNHIEVRIVDRWYPSSKTCHECGNVNKLLTLNDREWVCTGCGIILDRDFNASLNLRDTEDYKIYKVS

SEQ ID NO: 39445 - protein, 370 aa, unknown
  TnpB Polypeptide
MYNVAMKLVKTVKCKLQVNTEQAEVLLETLKRFASACNDILRVSQEHRTTNKVKLQHLCYRTIKEKYGLQANLVIRAIARVAEAAKKKRKLSKPRKFKPTSMSLDQRTFSFNEKRWEVSISTVDGRLKLPLAIGNFQRGLLAGQKPTSATLCYNRRTKEFYIHIAVKREIPFPTGNGKVIGVDRGIYNLATTSNGLKFSGRQAMHVRRRYARLRQVLQAKGTKGAKRLLKRLSGKERRWMADLNHRIAKTIVSSCKPGDVIVMEDLRYIRERIRVAQEQRFIQHSWAFGQLGRFIEYKAAERGIAVVYIDPRHTSQRCPRCGNVNRNNRHGHFFSCTSCGFVGHADVVAATNIRQVFLDTLADGPPSVGP

SEQ ID NO: 39446 - protein, 152 aa, Okeania sp.
LRIASRLIIDTLINQKIGTLIIGHNENWKQKISLGKRNNQNFVSVPYNKLIEMLSYKAKMVGIDVILTEESYTSASSFIDNDLIPVYTEGEKNHVTFSGKRVKRCSAAKGGFPHERLHQDKEECNRTASIGLINESRERFSKHYEKSSPKCL

SEQ ID NO: 39447 - protein, 357 aa, Okeania sp.
MQSIKTKLKVNNKQKTLLAKHAGVARHAYNWGLATCITEYQSTKKRLSAITLHKRLVREVKSQNPWYYEVSKCAPQQALRDLERSFKNFFTIPKRGFPVFKKKGKKDSFYLEGSIKILKGNYIKLPRIGIVKTYEILPSVPIKNVTISKRADNWYISFKYDWELAPLPPPKKRAVIGVDVGINTLATCSDGTTYANVKAYKQAKKRLSRYQRRVNKKEPGSKNRLKAVKRLAKAHKKVADIRADTLHKITTWLAKNHSTIVIEDLNVSGMLKNHKLASAIADCGFYEFKRQLTYKCEWYGSQLVIAPRFYPSSQLCSHCEHQQKMPLNVRTYKCANCGFQADRDFNAAINLENYVNK

SEQ ID NO: 39448 - protein, 380 aa, unknown
  TnpB Polypeptide
  misc_feature (32)..(32): Xaa can be any naturally occurring amino acid
MVYKSYKFRLKPNKEQETLILKTIGSGRFVFXRFVFNHFLDLWNSEYQKTGKGLSYSKCSALLPQLKIELSWLKEVDSIALQSSVRFLDDSFKNFFKKLSGYPNFKSKKYSKQSYTTKFTNDNIAVFESYIKLPKLGLVKFAKSREVEGKIVKAIVKRKSTGKYYVSVVCEVEIEPFEKTNQSVGIDLGIADFAILSTGEKIDNLHFSKEMAQKLAREQRKLSKRTLLAKEKGVRLADAKNYQKQKLKVARLHAKIANQREDFLHKLSTEIVKNHDIISVENLHTKGMIKNRKLSKAIADVSWGKFVSMLEYKSEWYGKEIIKISRWYPSSQICSECGYRDSKKSLDIREWICPNCGCILDRDINASVNIQNEGLRLLSA

SEQ ID NO: 39449 - protein, 500 aa, unknown
  TnpB Polypeptide
VPYAAFSKNGEPLNLDDVLNGIRADAELVAHYALKEMTEQNLALSVEFSRYKPAEAGRRMGLKLPTEVKKQFKSGSSRLERMFREQVVTNLRSWAARYEVVNQTSTKYVSAGWKRTASDSKPASMSPHLVLLSTDRGYHKNFSVTPERISLDMVVQGCWVTLHFPTPPQLLEVGCEPGVPDIWIDKNDRVVFGFHGKTDPGRPNFSERYVIGVDVGVKNPAAYVVWDTEKKEVVERSLLGQRARSLNNKIKRTKTQVASLKRKGKDEEAVSHRDHLSNRRLELSVLIAQELADVSWRYGNAIVSFEDLSHIKNTMKFGRWFRGEVFRRTRDMVEADGGRVMKVNAAYTSQRCHVCQSDLDMSDYSQPYCTTCSIAHHRDLNAAANIAQIANIKKACETRKRYATNTKRVRRSKCHVKPLKHPGTKNRPTPKAPQNQKRKTHTPTYPPLPSKGVSVRMCPADNRVSAVDHRGDSWFQTISGTTNSKENQTTIKVDVVYPKE

SEQ ID NO: 39450 - protein, 511 aa, unknown
  TnpB Polypeptide
MSPKTIVSRTYPRVPYAAFDKDGEPLGLDDVLDGIRKDAELVARYALKEMTEQNLALVTYFDGLKPSGAGYMMGLKLPAEVKKQFKSGSSRLERMFREQVVTNLRSWTTRVEVMTQTYPKYVSAGWRRTASDSKPTSLQPRLSLSSTDNHYRKMSVTPERVSLDMVIQGSWVTLHFPTPPQLLEKGCEPGVPDIWIDDQNRAMFGFHGKTNPGRPEFSERYVVGVDLGVTNPAAYVVWDAEKKEIVEKSLLGQRARSLNNKIKRTKNQVASLKRKGKDEEAVSHREHLSNRRLELSIFIAQELADVSWRYGNAIVSFEDLSHIKNTMKHGRWFRGEVYRRTRDMVEADGGRVMKVNAAYTSKRCHVCQSDLDMSNYSSPVCDTCGITHHRDLNAAANIAQRANVKKACQTRKRHATKTKRVRRSKCHVKTLKHPGTKNRPTPKAPQNQKKSKSNARTYPPLPSKEVSKEMCPADIRVSAVDHTWFQTTSGTTVPKENLSIVNTVDVVYTKE

SEQ ID NO: 39451 - protein, 512 aa, unknown
  TnpB Polypeptide
MASISVVSRTYPRVPYAAFNKDGVPLNLNEVLDGVKADAELVAHYALLEMTEQNLALSTYFDRYKPAEAGRQMNLKLPSEVKSHFKSGASRLERIFREQVVTNLRSWAARVEVMTQTYPKYVSAGWERTASDSEPSSMQPRLSLSAVDKQYREMNVTPERIELMMIAQGEKVVLHFPTPPQLLENGCEPGVPDIWIDDQNRVMFGFHGKTDPGRPEFSERYVVGVDLGVTNPAAYVVWDTEKKEIVEQSLLGQRSRSLHNKIKRTQTQITSLQKKNRSEEAVSHRQHLSNRRKELSILIAQELAEVSWKYGNAIVSFEDLSHIKNTMKYGSWFRGELLRRTRDMVESDGGRVMKVNAAYTSQRCHVCQSDLDMSDYSQPRCTTCGITHHRDLNAAANIAQRANVKKACQTRKKHATNTKRIRKSKCHSKPLKHPGTKNRPTPKAPQNQKKTHTRTYPPLPSKREVSKGMCPAESRVSAVDHREDSGFQTTSGTTNPTDNPSINTVDWFYPQE

SEQ ID NO: 39452 - protein, 515 aa, unknown
  TnpB Polypeptide
MSPKTIVSRTYPRVPYAAFDKNGKPLDLDDVLNGVRADAELVAHYALQEMTEQNLALSTYFDGLKPSGAGYMMGLKLPSEVKKQFRSGASRLEKMFQEQVVTNLRSWAARSEVVSGKYTDYVSVGWKRTAGKSKPASMSPRLALSATDKGYYYKNFSVTPDHISLDMVVQGQWVTLHFPTPPQLLEVGCEPGVPDIWVDKNNRVVFGFHGKTDPGRPEFSERYVIGVDVGITNPAAYVVWDTEKNQVVERSLLGQRARSLHNKIKRGKTQVASLKRKGRNKEAVSHREHLSNRRKELSILIAQELADVAWRYGNAIVSFEDLSNIKNTMKYGRWFRGEIYRRTRDMVEANGGRVMKVNAAYTSQRCHVCQSDLNMRDYSSPVCDTCGITHHRDLNAAANIAQRANVKKACQTRKKHSTETKRVRRSKCWVKPLKHPGTKNRPTPKAPQNQKKRITNTRNHTPLPTKREVSVRMCPAESRVSAVDHDMWFQTTSGTTNLKENLSIASTVDVVYTKE

SEQ ID NO: 39453 - protein, 515 aa, unknown
  TnpB Polypeptide
VNRAYPRRPYACFDEDGKGVDLHDVLEEIRCEATECARQASKHLTWKNMVRVSDYKGLKPSVAGSRMGIRLPPGGRRRGRSRFERMVREYAVSQLRSWNERFLAYRGGSNKYVSAGWKRTANVLPPRTLAPRLSLSTTDNQYYSISVDGNTTVLRMVVTGRWVSLCFKTPSRFLEAGVRPIAPDITVDYRGRVMFNWFTEVPVERAEFSDRYVVGVDVGRNSAAFSVVVDVTTGDVVEASGGNRRIRTLENRISRTERQIRSLHGAGRHDEASLHREGLANRRNELSILVGQEAADLSFRYDNALVAVEDLSGIRNTMSHGRWVRGQMVQRAADMVETDGGRVMKVNPAYTSQKCHVCGTQMDMRDSRRPRCLVCKVTWDRDENAAVNIAKRAPHSKACATRRKIASTRRRRNSKGSVTPLKHPLSKGRPTPKAPQNRPQDNHMLEHSKRFRHEKQKGGATTRTTCAVGWSPVMKTGVSVPTVGSSCEDVQTTSRTTTPCSITSRDTACCRETKV

SEQ ID NO: 39454 - protein, 514 aa, unknown
  TnpB Polypeptide
MPSKTVVSRTYPRVPYAAFDKNGKPLDLNEVLNGIRKDAELVAHYALKEMTEQNLALVTYFDRLKPSGAGYMMGLKLPSEVKKQFRSGASRLERMFREQVVSNLRSWVTRVEVMTQTSTKYVSAGWRRTASKSKPSSMKPRLALSATDKGYHKNFSVTSKRVSLDMVVQGSWVTLHFPTPPQLLEKGCESGVPDIWIDKDNRVVFGFHAKTDPGRPKFSERYVIGVDVGVKNPAAYVVWDTERKEVIERSLLGQRARSLHNKIKRGQTQVTALQRKNRPEEAASHRKHLSNRRREASILIAQELANAAWHYDNAIVSFEDLSYIKNTMKHGRWFRGEVYRRTRDMVEADGGRVMKVNAAYTSQRCHVCQSDLDMSNYSQPCCATCGITHHRDLNAAANIAQRANVKKACETRKKHATKTKRVRRSKCQRRPLKHPGTKNKPTPKAPQNQKKRRTNTRTYPPLPTKGEVSVRMCPADTRVSAVDHNTWFQTTSGTTNPKKNLSTANTVDVVYLKE

SEQ ID NO: 39455 - protein, 511 aa, unknown
  TnpB Polypeptide
MASKSVVSRTYPRTPYAAFDKNGGSLDLDDVLNGIRKDAELVARYALQEMTEQNLALSTYFDRYKPAEAGRQMNLKLPSEVKKQFKSGASRLEKMFQEQVVTNLRSWAARAEVVNQTSTRHVSAGWKRAASKSKPASMSPRLSLSATDKGYYYKNFSVTPERISLDMVVQGSWVTLLFPTPPQLLKSGCESGAPDIWVDKDNRVMFGFCGKTDPGRPNFSERYVIGVDVGVKNPAVYVVWDTEKKEVVERSLLGQRARSLNNKIKRGKTQVASLKRKGKNEEAVSHREHLSNRRHELSILIAQELADASWKYGNAIVSFEDLSHIKNTMAYGRWFRGEVYRRTRDMVEADGGRVMKVSAAYTSKKCHVCQSNLNMSNYSSPVCESCSITHHRDLNAAANIAQRVNVKKACQTRKKHATARKTRKSKCHSKPLKHPGTKNKPTPKAPQNQKKTKTHTVTTTIKKKEVSVRMCPAESRVSVVDHNMWLQTTSGTTNPKENLSASTVDWVYPQE

SEQ ID NO: 39456 - protein, 511 aa, unknown
  TnpB Polypeptide
MSSNSVVSRTYPRVPYAAFDKDGGSLNLEDVLNGIRADAELVAHYALKEMTEQNLALSVEFSRYKPAEAGRRMGLFLPGEVKKRFKSGASRLERMFREQVVSNLRSWAARVEVVNQTSTRYVSAGWKRTASDSKPTSMNPRLALSATDKGYYYKNFSVTSERISLDMVVQGSWVTLHFPTPPQLLEKGCEPGAPDIWIDDQNRVMFGFHGKTDPGRPNFSERYVIGVDVGVKHPAAYVVWDTKKKRVVERSLLGQRARSLNNKIKRTQTQVASLQKKNRPEEAALHREHLSNRRLELSILIAQELADVAWHYDNAIVSFEDLSHIKNTMAYGRWFRGEVYRRTRDMVEADGGRVMKVNAAYTSQRCHVCQSDLDMSDYSQPRCTTCGITHHRDVNAAANIAQRVNHKKACQTRNKHATKTKRVRRSKCQIKPLKHPGTKNRPTPKAPQNQPKTKNHVHLPRPSKEVSKGMCPADSRVSAVDHDMWFQTNSGTTNPKENLSINTVDWVYPKE

SEQ ID NO: 39457 - protein, 510 aa, unknown
  TnpB Polypeptide
VKYYDTVTRHRFTTKNRVNAEQVERDLAQMVSWMAQAEREVLASQEFYDLAVKALSGDRPSGSLNSWGRKKLSRYDFSFQKYNMNEMLVTNVVSALEAYAVSVGLFRVMSTHPKENKPEKIISHYRHTYPDAPQPTSGMVRAHLIRYHKKGERKASLPGVSAKLNLAVCDNFFAPKAFRDENNPLSIVAQFRTPHYGLTSVHLRLPDNTERFSTGKVCRPTIRLNNKGQVVFDIAIEHEVQQRDTNKVVGVDLGKVEPFVATVIDPEDKHRSAPYHTNYKRRLGSLIKAEMKRRELSSRLYEKLDLCERHNRTDHADVLRTEAKRVSAKATRIKHEISQCIASQVVSIAQKNDSHIAVENLSWLDSQGGRWPHAEIQSRIENTAKRYGLKVVKVSAKNTSRTCSRCGGRVSNNSKTRVGTCTVCGFELNRDVSASREIALRATSPSSRSRERMRSLLRQRQEMRSSAATRQSKQVTALGGIQGHTGTSGKDPEATLMMVRETLDSRGSPT

SEQ ID NO: 39458 - protein, 497 aa, unknown
  TnpB Polypeptide
VFDKNGGPLDLNDVLSGIRKDAELVAHYALLEMTEQNLALSTYFDRLKPSGAGYMMGLYLPSEVKKQFKSGASRLEKMFREQVVTNLRSWATRDEVVNQTSTGYVSAGWKRTASNSKPSSMQPRLSLSATDKCYHKNFVVTYERIYLDMVVQGKWVTLHFPTPPQLLEPGCEPGAPDIWIDDQNRVMFGFHGKTDPGRPNFSERYVVGVDVGVKHPAAYVVWDTEKKKVVERSLLSQRARSLHNKIKRTQTQVTSLQKKNRAEEAAYHREHLSNRRKEMSILIAQELADVSWRYGNAIVSFEDLSHIKNTMKYGRWFRGEIYRRTRDMVEADGGRVFKVNCAYTSKKCYVCQSDLDMRDYSQPCCATCGITHHRDLNAAANIAQRANVKKACETRRKHATKTKRVRRSKCHSKPLKHPGTKNRPTPKAPQNQKNRTTNTRTYPPLPIEGVSVRMCPAESRVSAVDHRGDSGFQTTSGTTNPKDNLPTSTVDWVCLKE

SEQ ID NO: 39459 - protein, 471 aa, unknown
  TnpB Polypeptide
MGKVRTSLSLSRFDVVNGTKEKVIEDLTEMIHQIQNAESLFVSSPEYQNLAESILSGQVKVSGKKNRCGRGVVPDVVFPCNSYNMNEMLRSSVMSRVEMYAMSYGLFAVLANNPAETDARRVKTLFKKRYPNSQIPHYCEISSHIHRFHDKNQKTPCLPGAPAKIDLSVCDGHYLNLSHTDREITLKFRNLPTAGRQVALRFTVPEGDRFQRDKISKPVVQIVNGRLVFKFTVEYMVPDITPTKVMGVDLGKVEPFVATFIDESLHWHSAPFFATDRIKDLGRKYDDLMSRASHLRDKENRCRASNHLSKADALAQHQLGIRDKARRVKSEAMHQIGHEIAEVAFKMNAEVVMENLSWLGSRGGRWNFHEIQDAITNSCARKGVPVSFVNAKDTSNTCTRCGSSVRHTGRDNVCASCGFRINRDVAASREIALRGADIRLREPLRQRRPGVPVPHRAALATITSGTSPETT

SEQ ID NO: 39460 - protein, 581 aa, unknown
  TnpB Polypeptide
MELSRTINSDKRYYLDKKTIENAASLLETMRVFNDAKMDLYNALYDQKYLNAGPLLDHAYPVFLKEKYKTNDYYNAAIYTAASGQISSQKELKKYYKTTIAADLKNRDEKIQSVKEELDKKRAIKNSIRLYIKTKKWIKPYPKCQSKVRGFKIILFNKMMVNLDEYERKVEADIRKLKTRLALVTEARKRKAKKLENLEKLPPERIVFGGKKLYSEKDVVEVTKSDDSSNDKNQKTSKKASNKWCQEFFEKRHQSMSLPGRHTSKYGNFLCKYDGKDLSVTCIDGSVTIFHDFKLPRNEESFQKNFTCKPEERQSLCYNFILKRDKENKQYLIVSVTMKLKAYENSYYGNGAISMDINYDHFALAELDETGKLLDQKLIRFDLMNKSTGQVTNILGAAVKDIFDWCAEKDKRLIVEDIDLTIKLASRKYGNRKGNHHMTLFAYQRIASSIENQSLKREIAFYKIDPAYTSQMGKFLFMRKYGISIHQAAAYTIGLVGLGLYEKLVPDSRMLNLLKTKEGTVPEFSQETYKNIWARITNTFSGIRKHFFYRSIPYEVLEERKRPSLRTLAAEMKIRYMPIFE

SEQ ID NO: 39461 - protein, 384 aa, Microcoleus sp.
MIVLEFKLKGRTQQYRIIDEMIRTAQFIRNKALRYWMDNRGVKLSDLYKQCAVMAREFEWAGKLNSMARQAASERAIFAIQRFCSNCKAKKPGKKGFPTFKKNSRSVEYKTSGWRISDDKKHLTFTDGFAAGPFKLVGSRELHYYAPSEIKRVRVIRRADGYYAQFCIGIERVEEVAPTGVATGIDVGLSHFLTDSSGATVPNPRHLRKSEKALKRASRRVSRKKKGSANRKKAINRLGRKHLKVSRQRKDFAVKTAGALIESSDFIAYEALQVRNMVKNHKLAKSISDAAWSQFTDWLQYLGKVYGKTVVAVAPQHTSQDCSGCGATVKKSLSLRTHLCRCGVVLDRDHNAALNILSKGLRQAGLEINTVGHTEINACGQTDL

SEQ ID NO: 39462 - protein, 545 aa, unknown
  TnpB Polypeptide
MIIQSKYTKVFHSKDLTSQKYDELHNFAVLIQKHKNIVSQHVNENLLHYLDYTKFQFAKEMRTKFKGSVPSSFDTQIYTQVFTCYQNKFDAIQRKLVFEISVFKGFELYKRDTKNNKKGDLKKVIVDKKHTPLSNCLTYLARYGKEGTIAYVKSNIDSCDANKRDFYNNIIRCCEKFCFERLYALALSKRKRMLNKYANISIEFMSLSFSGRCRKKKIIDYNRRFGSVINSFISLSGFSRKSFDIPVSFNKGWHGNMRDYRKNTPDYVYTLTFDEKKHQVNVNICKDGERYIPEPNGKTIGIDVNCKHNLFSLSDETTYDYDRKIVNDFCKLSVEIDRLKDDRSYVIGKRKQRKLDKLKEKIIKNEQQTIATMCKNEKAKGTGHIVMENLNNGFGKCYIKDGDNEDINYNRMVKFLGLSSLKQEVEHIARKYDIAISTVQASYTSKMCPMCGCIEDSNRPNQETFECVECGHKDNADFNAAKNIRNRVLVTVLRDKLLKQLDNGAFEPRLLSRDKVKEVLLSFRRSLPLVGRECIGNCIMSSEYV

SEQ ID NO: 39463 - protein, 178 aa, Bacillus sp.
MFFQTLQQNLLGNKIEFLKLGLVRFAKSRKVEGRILHATIGRNPSGKYFVSILVETEVQEILKTKSPYGIDIRLKHFFILSDGTTYKNPKFFRTLEEKLAKTQCILSRRKKGSSNWNKQCVKVARIHEHIANIRADYLHKISTEIIKNPDVIGIEDLQVSNILKNSKLAKVISEASWS

SEQ ID NO: 39464 - protein, 437 aa, Sulfolobus sp.
LKRTVRLESDFINEWKYRVLREVEEYQRLIVNEMIGVILSEGLPTTKKKLHERFYNHYKEKYPFLPSRVIEGAYIVAGRIVKSFRERRKKGLTRKDKPEYKRVMITIPNTINWRFNRVSVSVLTHKGWVDIPLRFTEQFTRYLYEGCRVSQGLKLRLVGRKVHLWLTFEKEVEVEPKEGNYLSIDVNENNVTLAIFEDFKLRELRRYETGLGKIVVNYSLRREEITKGHSTKDELIKKKLRKLRERERKIDVLRKTVKRITELARDLKAKVIVGKFSSKAKEKMESDKNDKLRHRIHQWSVIKFVEMLKAQPIDVAEVSESYTSSINPFDGGRLKKRKQIVEKVIKVFNPYLMTGSAHEGGGIKVFEVSARYLESGKVLLERDSIAPLNLAKKVDGRVVVFPSTSPNDLRVTVYDPLRGVPVAELEVIKSKGKLRHG

SEQ ID NO: 39465 - protein, 117 aa, unknown
  TnpB Polypeptide
  misc_feature (83)..(92): Xaa can be any naturally occurring amino acid
ANRMKARLKVARLHARIADARRDFLHKLSTRFINENQVIAIESLAVKNMIKNRKLAKSIGDASWSEFVRQLAYKARWFGRTLXXXXXXXXXXNAARNVLTAGLAGLALGESVSPVCL

SEQ ID NO: 39466 - protein, 214 aa, unknown
  TnpB Polypeptide
  misc_feature (176)..(211): Xaa can be any naturally occurring amino acid
MDIKRAYRFRFYPTAEQAEQLARTFGCARFVYNTMLRKRTDAWYNEQKHIGYHETSSMLTVLKKQPEYAFLNEVSSVPVQQALRHLQTAFANFFAKRAKYPAFKRKDGVQAAEYTVSAFRWDGKTLKLAKMNEPLNIRFSRTIPKAAKVTTVTVTKDPAGRYFVSMLCDDTVKAKXXXXXXXXXXXXXXXXXXXXXXXXXXXXXXXXXXXXPTG

SEQ ID NO: 39467 - protein, 359 aa, Scytonema sp.
MLLSIKTKLKLTAEQKTVMSKHAGIARFTYNWGLATWKSLYQDGYKPNKYLLKKFFNNSVKTELEWIKEKGICQKITQYAFDQLGAAFDRFFKGLGGYPKFKKKGVNDSFTIDASGKPIPVGGLRVKLPTIGWVKTYEGLPHATTTKLTISRIADDWYIAFAHEVECEPTQKSQEAVGVDLGIKELATLSTGIVFPNPKAYKKSIQKLKRLSKSLARKTKGSNNRHKSKIKLAKHHNRVSNIRKDSLHKVTNYLCKNHAVMVIEDLNVSGMMQNHKLAQSIADCGFYEFKRQLEYKCKKFGSKLVVADRWYASSKTCSNCGCKKESLLLSERVYSCGHCGHVMDRDLNAAINLSRLAKA

SEQ ID NO: 39468 - protein, 260 aa, unknown
  TnpB Polypeptide
MKMRYPYKEKKFYPLHWPMQAVSKENGRVVLPMGRGRKSLVLPLELPENSGACTLVWNNGYELHVCIEIEQREQAPGTVHATVDLGEIHLAAVTTNTGKAMIVTGRGIRTLKRQRTMQLRSISKKQARCTKYSRRWKKLQRAKNKQSKRAENRLGNQRHQATRKVINFCIQHEVGTLFIGNPHGVRNHNHGRHHNQRMSCGNMGVISTTLPTKAPRPTCRASLAPNEEQVASVLHVGINTSQETGNGTARCAVSVGIETL

SEQ ID NO: 39469 - protein, 212 aa, unknown
  TnpB Polypeptide
MQVYYMKKTDCENQAEELDYEDAKILGIDYAMHGMAVFSEDIQKENEGYFRKSEERLAREQRKLSHCVKGSNNYYRQKKRVALCHEKIRNQRKDFLHKLSHEMAETYDVVAVEDIDMKAMSQCMHFGKSVMDNGYGKFRELLEYKLTWKRKEIGTCRPFFPSSKKCCKCGSVKKELKLSDRVYFCTCGNRIDRDLNAAINIREEARRMLLAG

SEQ ID NO: 39470 - protein, 421 aa, Cyanobacteria sp.
MSITRRVTFRLYPSKTQAQKLSYWRRMHKDLYNAALYHRKTEYQKFGNRVDYIQQQNCLPAFKKEWPEYVELGSHALQATIKRVDFAYTRFFKGLGKYPRFKSIRHYSGWTYPCISGWKIETEGKNGYLTLSNLGRIQMRGKARTWGKPTTCTIVFRNGYWYASITVQCQPQRETGTGSVGIDLGCKEAITLSTGEKIAKPDFLEAGQNKVKNASKRLRRKRSSNRNKRVKASRRWKKERLKVSKLQRKVTRQREDWLHKTTSNIVSGNSLIAGEQLNVKGMTASAKKGKRKKQKAGLNRSILEVGFGIIGDLLTYKAAEAGGFYLESPTRELKPTQRCAQCWELTPKTLKDRTHFCSNPLCGHIEDRDVNAAQVNVIWARGQELASLDGESLSSTSCSKHEATGDEEASETSSMRLAWAR

SEQ ID NO: 39471 - protein, 388 aa, unknown
  TnpB Polypeptide
MKSIKTRLYPNKEQRSLLDRHFGSCRFVFNATLNFKIIMYKDYGLSKSKFDIINELPELKKEFEWLSECKAECLQNVIGNVDAAYQGFFRGGGFPKFKKKSSKQSFLQKQNFKVLENTNRLVFYKQKIKFRCSERDAIDLRTNKIKRITYSKDSCGHYYASILIDFNHELLEPNEFEIGIDLGLKEFAITSDAEVIANPRFLRKSSEKLALLQRRHSRKKKGSRNREKARIAIAKQYKKVTNQRRDFQHKLSSQLIHKNQVIYIESLKDKNMVKNRKLAKSISDASWSSFTGMLEYKAKWYGRQVIKIGTFEPSSKLCSRCGWKKEDLTLSDRVFNCRECGLEIDRDYNAALNILKIGMSNAELTLEETKSLDSRRTKKRLTEDLNPQ

SEQ ID NO: 39472 - protein, 300 aa, unknown
  TnpB Polypeptide
VDKFALTNAVYHLDAAYHKFFRENAGYPRFKTKHSHRDSYTTNFTNGNIKALFEENLIQLPKLGKVRAKLHRRFEGQIKSAVVSRNPAGHYYVSVLVETAENSFLPVNGKQIGFDMGIKEFLVDSNGIHIANPKPLSVYEKKLAREQRKLAHKNTGGKNWEKQRRKTARVHEKIKNIRNEFTNQLSHKLVEENQILISEKLMIRNMIKNHHLSKSIADAGWGDFLRKIEYKALWKGRIYHQIDPWYASSQLCSSCGKKKTEVKLLSVRKWECSCGAIHERDENAAKNILRKGLEELKEVS

SEQ ID NO: 39473 - protein, 744 aa, Streptomyces sp.
LPHRSRGGQTPVVALPKRRGGGSSVDAEKHEPVPASATSDVPVRRFRGKNKEQRWMRGEDTELAVIRLSLDVHEPAARHRVEDLYSAMWSVKRALQRDARDAIDAYWAGDVRRQTNAKAWRLELGLSREGMERRAYRHMEKSKHLAHHVTKALVMHQADEVYATSVRRHLFADSSGHRHGRPKVGRWWDYTRIPGRARSHTTAGKWETFRLHGTLAGHLDVYRHRDLGREITTPEQVAALPAGTRVLEQPNHLPAPLRPAERIETGEKTKKGKPKTRAATWWDHTGPLAVVFAGGANSSRGDLVLPVRLPSGAGRWPYLLHFLNDPGTWHKIDLVRRRDTATPGGWAHEAHLMVLTGCYASPATKARRKAAGALARVAGVDGNVSNLSIVSFPNTFDPADGDIAATRVEPSDEELAALAKARRKERGRKRALDRSRRASNPAQYGPSKRQQARAERRQAAGLTARADHAPRGARVANKAGVPKQAYRRDTLSAGYLLNRARLAEAAATAAAAKDHRARRIAADVVADHGANLTVEDCDIRTWYRLWGKALQATTPGRLITALGRECAKTGGRMLRASTFTTKLSQSCFCGEKVPKTLSDRIHHCLACGLVGDRDTVSSALGAHVHLDDPDDPSTARVDYVLARHTQILFGEGLQEALSSQPQRGARPTRGRTHAAVLGRKNPGRGPLLDKTPPPGTGPTPNETRPATKRHKAHVGTTGCTDNAPPGAPAPHRHRVGITALRDDS

SEQ ID NO: 39474 - protein, 441 aa, Candidate divison MSBL1 archaeon
MEVIGKMKRVLRQNLRGLNCEDYGILRSMCRLSKNLYNSTLYEVRQHFFDNGEYLSYYNVWRRLKGDFNYELLPSQAAQHTVMHVHQAFRSFFKLVKMKRRGEYEGETRPPGYLDKDGFFSLNLPNQSFQVKEDYIRIGIPQSFRREFNCERTEIRFPFTYEEVKAKEIKQLQVIPKAKAQYFEYRLIYEEEKTRIETEKGTWLSIDLNVDNLAVCGDHSGRSFILDGRKLKSINRWYNREIARLQSIKDKQGIQENTRRTNKLYRDRRNKIHDYFNKAVHWILEYCKANKIELVLVGDGKEWKQESEMGDKNNQNFMQIPFDLFKRKLKAKLELHGINFELVEESHTSKCSFSDGEPVEHHEEYVGTRVKRGLFKTSNGILVNADVNGYLNIARKYLEENGEKGKLKTLKGVESSGVVATPRRIREPFKVPAFPKAPYIR

SEQ ID NO: 39475 - protein, 404 aa, unknown
  TnpB Polypeptide
MPKRKQSKPLKTFKYKAKVSKTTAAHAEHWLWKCRQLYNLALEQRIEAFRRCGVSLSTFDQNNELPDFKKTFPEFAAVGSQVLQNVIARLDRAYDSFFDRLKAGKGKAGFPRFKSADRYHSFTLSQSGWKLDGRYLKITGIGIFKLHLSRPIAGRIKTITVKRDSCGDWWVTFACEDVPPRSWEQPAKEKVGIDVGLKHFCVDSDPDSQPIANPKFYHQAQAKLRRQQRKQARRQKGSKRRKKARVLTAKSHRRIRDLRLDFLHKTSTAYVERYREIHVEDLKVANMVKNRHLSKAISDAGWSTFFELLTYKAADAGRKLIKVNPRGTSQKCSNPKCGEIVPKTLAERIHSCKHCGLSICRDKNASNNIEQAEPAIRAGQALANTIRPGQGLQTLTERVAATVV

SEQ ID NO: 39476 - protein, 540 aa, Cyanobacteria sp.
MPYTSVYGPVRSWRYGRSLGIDPIGVVSTCSFNCVYCQLGEIQHHTTARQIFIPTEKIVRDLQVVNLADVDVVTLSGSGEPTQALNIGEILTAAKQIAGLPMVVLTEKMGTSLPLLGGLLDRMLSARLLNKYIAVYSERMYNGCMLNLTYEYKLIPTDAQRETIDHWLEICRKVYNFALRERKDWVNSRKCDINSCSIRQEYIIPADAPRPTFASQCKTLSSAKKSIAELKLPHTHVLQQALRQLEAAFVAMWERGHGFPRFKKRMRSFVFPQLNLETVRHFDAADEVNLPKIGWVKIHLSRPIPQGFEVKQIRIVKRASGYYAMLTLQCDVEVPQISAHGHSLGIDLGLEDFLATSDGDLVDRPRFFVDRQRKLKSLQRQLKRQKKGSVKFRQLHHRIAKHHEYISNARKDFHFKTADYLCDQAGSIFAEDLNLKAMSAGILSKHTLDAGFGQFLNILGHVCFKRGVYFARVDPDGTSQTCPRCQTHTGKKELSEPVHKCPECGYETNRDVAAAQVVLQRGYTAVGHIAVNFGEGKLRG

SEQ ID NO: 39477 - protein, 393 aa, unknown
  TnpB Polypeptide
MSRFRLCPSPTQAAILREHCRHARFVWNLAVEQHAFWRPGRARAPRYIEQCRQLTEARATYDWLRGGSHMIQQQALRDFDQAVKYFVGGTHRRPTWRKGGRAEGFRIVAVKPGHVRRLSRKTGDVWVPKAGWVRFRWSRQVPRAKSYRVTLDRAGRWHIAFAVIPEPVPSPGNGEIVGIDRGVTVSAALSTGVMLKVPRLSPQRQRRLRRLQRRLSRAARGSSRRTNVRLAVARLRLREVDARKDWVEKASTDLARTFDLIRVENLGIGQMTRSVRGTTSNPGRRVRQKSGLNREILASGWGLLVQRLEDKAPGRVERISPAFTSQRCSACGTIDARARESQAAFRCRYCAFTCNADVNAARNIAVGHTVTARGRSPLGGRMNREPQLKLPAG

SEQ ID NO: 39478 - protein, 376 aa, unknown
  TnpB Polypeptide
MTSDAARGALDQTAASFADGCNIILETSRKLKTSNKVKLQQAIYDEVRKKTGLSANLTIRAIARVAYAVKISAKRKKYVSEFRPTSIDYDQRIFVYRERDESVSLTTVKGRIHVPLKIGGYQREALAKKKPTCARVVKTGKDWYIHIVVDENPPEKKGGPPLGIDLGIRNIATMSNGKQISGTKVQAIKERYAKVRASLQSKGTRGSSRVLRRLSGRERRCISWVNHNVSKSIVREALGNGYGILRFENLKGIRERTKTRNKHKNRMVAGWSFGELQKFSEYKAERAGLGIEFVNPAWTSETCHVCGLKGVRSPAKFWLYCPTCDRVVDADKNAAKNIEAGGVEPGVIPGDRNATRIVAEILEFFSRPLQAKAAGL

SEQ ID NO: 39479 - protein, 410 aa, Okeania sp.
MLLKYKYKLKPHKRQTVIIANWLELARKQYNYRLAERLNWFEATRTPVNACPLNVSVVPVERIYQNIPEFRVQTRDGRKKDSDGNPITKKGDKHPNLVNGYVLWETVQLADLAQTKKLFPEYKSIHSQVLQDVIQRVQTTMDNFTKADKNGKTSGRPKFKGKHYYNSFSYPQLSNTNIVKNANGRFCIHLPKIGLVPFVYNRPIPVGFKVKTGTVIREVDGCYISFTIEDKGVPCEVVEIQPTEDNSKGIDLGLLHYAVTSDGEFIEVPKFFRFSEHRLSTLQVRLAKRQKHSKPWKILKHKIAKLHQLVARQRLDWQFKLAYHLFSDVSVIFIEDLQIANLVRRCKAKLGDNGQFLPNGQSAKSRLNKSLQDAATINFLISRVCSLEIGKASYQSRPQRHISTLLGMLE

SEQ ID NO: 39480 - protein, 536 aa, unknown
  TnpB Polypeptide
MAKSSRHLRSVRPGWGERTTSPAIFSRISASTARSEESPGINRCPSCRCRGSTVADATPVRGEEWTGREFPAESARVPDPLNSRPLPCQGSDLPLIYRPTPGGRGRGQDKPFSWNRFGILFRRFPGPSRAGPSFTFHREVILYLSAVGLLTVPSVVRSLVFAPPSDLPGPARILLDEFRLLVNQCLRHALTTGTTSRGQLSRFVRDRALEARVNGEVALCASKVALSLAAGHRRRIRMGIAARTPYVHTPFLRAPPTAFHFDPETGKVRLSLRRCEWVSFTVPVSDYHRKVLATPGLRVKQLHLGLHRMVLILEKEAPEPYAPTSLIAPDTNESSLDGVRVDGDGGHLVRVTFPELREIQARHFSRRRFLGRKKAHDRRVARQLLKREGGRERHRIRSRLHNLTRQLVERAARDHAALALEDLRGLPIPHRRSRSTRRRLSSWPRAELHRQLSYKAAERGVPIYWVNPYRSSRTFPRCGAVFEHRNRVGPRFDCGQCDWSMDRQLNAGVNLGATVLREHAELGGSDLPPTPFSMRW

SEQ ID NO: 39481 - protein, 381 aa, unknown
  TnpB Polypeptide
MTKRAYKYRFYPTPEQEQLLARTFGCVRFVYNSVLRYRTDAFCEKKEKVGYTAANAHLSKMKKAEETAFLSEVSSVPLQQCLRHQQTAFNNFFEGRAKYPAFKSERHRQSAEFTRSAFKYRGGQLFMAKSKVPLAIRWSRELPSAPSTLTVSKDAAGRYFVSCLCEFTAESLSITPRMVGIDLGLKDLFVTSDGHRTGNPRHTAKYATQLTKAQRVLSKKKLGSRNRAKARKRVARVHAKISDCRMDNLHKLSRRLINDNQVICVETLKVKNMVRNRCLAKSISDAGWGEFVRQLGYKAEWAGRQVARIDRWYPSSKRCSGCGHVIGVLPLSARVWDCPACEVRHDRDINAAINIKTAGLAVLALGESVSGIGQVPMSCSR

SEQ ID NO: 39482 - protein, 386 aa, unknown
  TnpB Polypeptide
MQIYKFRLYPSRQQEQKLLEVLDRCRFVYNKMLEGLNKQEKPNRFELQNSIPKLKEEFPELKFIYSKILQYESYKLFSNLRALSRLKKNGKKVGRLRFKGKDWFKTFTVNQSGFKIIENEKRCQTLHLSKIGDIRIRMHRGMKGKIKQITVKRYPSEKWYAFICCEQDKTIKTNNNKKVGIDLGTINFIYDSENNHINHPRFLNKSLEKLKQEQRILSRKKKGSVNRQKQKIKIAKLYEKVCNQRDNFLHKLSRKYVDGYGFIVVEKLDIKGLIEKSHNPRNMLDASWSRFLQFLAYKAVRAGCQVVKVEPRGTTQKCSQCGNIVPKKLWNRIHKCSCGLVIDRDLNSARNILQSGLERAYPLETEPLPIGQVQSMNQEAPFERWE

SEQ ID NO: 39483 - protein, 486 aa, unknown
  TnpB Polypeptide
MFVFEGGDNMSDTHYKTFQIWTKKGHRLFPYFQQMCQNAKNLYNMNNFYIRQIYTAFRQENRRQPLQQEVLDTLQQHVGVMNERQLQAYQSKLAKEQQKPVDERKEVRCNAFDLPSEESPFVDYHFLDSLFKVMGQTDYRALPTQCSQWVMKGVFQNWSSFFASLKDYRLHPEKYTGKPRIPSYCRAQEKEVQFTNQDCVIKAGKFLKFPKTKQQLNIGKLGTTEGKLKQVRVIPRHGQYVVELIFECPLETAALDKDRYMSIDLGIDNLATLVTTTGLRPVLVKGKHIKAINQYYNKMKAYYTGILRHGKHPKEGQHTSKRLERLHHIRHRKTKDLFHKASYRIVQLAVEQNIGTIIIGLNQGWKQGASIGKRNNQTFCHIPHQMLIAMITYKAIEQGIDVQITEEAYTSKAYTSKASFMDQDPLPRYEEGKTRLFSGQRIKRGLYKWKNGLINADVNGAANILRKVVPTASANGIRSTSSAISA

SEQ ID NO: 39484 - protein, 321 aa, Microcoleus sp.
MYGCQQNVISPDKELKSVLELLSSEASKLMNCGIYYARQLFFKTGTIPSKAKLHKVLGTDNQNIHYKAFYSDTAQQILTSVAESFKSYLGLLTGIKEGTVTQHPRLPGYRQGGLALVTFTGRSVKLKDGMLRFPLGKQVKAWFGIDAFYLPMPSNLEHSCIREYRILPRNGCFYLELVYQKEAVQSDVNADSVLMIDHGMDNWITCVSNIGTSFIVDGRHLKSINQGYNKRVATLMSEKDNGFWSKRLERLTESRNRTMRDAVNKAARKVVNHCLTNKIGTVVFGWNKNQKDSINLGTKTNQKFVQIPTGRLKERIAQLCK

SEQ ID NO: 39485 - protein, 427 aa, Microcoleus sp.
MATLTYCKGLPTPVDELNELGFTDFEMFLEAYAPIFRAANIETINHLLSTAELKKSDWNTHLQHTYGINKRHANGVISAAKGRVNGAKEHRILHVKTLEGKIKSISAWLKKAERKLALARKFYAKKKWQNSKTGCNFPRACSLQYKSTNWQSLRFQIHNKKRRLTLLTNRLKHLRVKPIKVFVPHGDIFVVGSKDESFGNQVSQWNGSTITFRVPKCLESRFGKAVSSEVGDFNRNINRLPECGAKTWHFYRKNGKWVIALQFTPKPVNRVSRNRMYGCIGIDMNPGSIGWAYVDTEGNLKAKGQIPLQMGWSNGKQQAQIVNACLQLATKATEFECPVVCEELDFSTKKQSLGEEGRKYARMLSGWAYSEFYKQLSSILSNRGIELIAVNPAYSSIIGLVKYLKMYGECQRRIGCTGDSSEGYEIK

SEQ ID NO: 39486 - protein, 384 aa, Bacillus sp.
MYIITQKEVKVMLVNKAYKFRIYPNKEQEKLINKTFGCVRFVFNHFLAKWNDTYKETGKGLTYNACSSQLTQLKDELTWLKEVDSIALQSSLKNLADAYNRFFKKQNDKPRFKSKKNPVQSYTTKYTNGNIAIDGNKIKLPKLGWIRFAKSREVEGRIINATIRRNPSGKYFVSILVETEVQELPKTNSAVGIDIGLKDFAILSDGTVYPNPKFFRRLEEKLAKAQRVLSRRKKGSSNWNKQRIKVARIHEKITNARHDYLHKISTEIVKNHDIIGIEDLQVSNMLKNHNLAKAISEVSWSLFRTMLEYKAKWYGKQVVTVAKNFASSQLCSCCGYKNKDVKNLALREWVCPNCHTHHDRDINASINLRKEALRLTVGTTGIAY

SEQ ID NO: 39487 - protein, 142 aa, Bacillus sp.
MEQKLKREQRKLSRRAFHAKKNGINLLDAKNYQKQKRKVARLHERVLNQRDDFLNKLSTEIIKNHDLICIETLNTKGMLRNHKLAKSISDVSWSAFVTKLEYKATWYGKTIMKVSKWFPSSQICSDCGHQGGKKPLEIREWT

SEQ ID NO: 39488 - protein, 377 aa, Clostridium sp.
MILGNKIRLYPTREQEQKLWQSVGTARFIYNWTLARQEENYKNGGKFISDNDLRKELTILKKTELNWLNEVSNNVAKQAVKDCCEAYKTFFKGVADKPRFKSRRKSKPAFYNDTSKLKVKENSVLVEKIGWVKIKKKSVPMNCKYTNPRISFDGKYWFISVGIEKKQPQIKLTNESIGVDVGIKDLAICSNKMTFENINKTKKVKKLKKTLKRKQRKVSRKYDMNKIESEVKNRCQFKKTNNIIKLEKQVRLLHRKLANIRTNHLHQATNEIVKTKPSRVVMETLNIKGMMKNKYLSKAITAQCLYDFKVKLKYKCEFNGIEFVEADKWYPSSKTCSECGHIKPKLSLSERTYICEECGCIIDRDYNASINLSRYSA

SEQ ID NO: 39489 - protein, 387 aa, unknown
  TnpB Polypeptide
MVKAIKVMLIPNNVQKTKLFQYAGASRFAYNWALAREIENYEKGGKFISDAELRKEFTKLRHSDEYAWLLNISNNVTKQAIKDACTAYKNFFRGLQKFPRFKSKKRSMPKFYQDNVKIRFSNTHVKFEGFSSSRKANKQKMNWVRLAEHGRIPTNAKYMNPRISFDGWNWWISVCVEFPDCREILNDDGVGIDLGIKELAVCSDGTKYKNINKSQKIKKLEKQKRRLQRSISRSYEKNKKGESYCKTNNVIKKEKLLLKRNHRLTNIRKNYLNQTISEIINRKPRFICIEDLNVSGMMKNRHLSKAVQEQRFFWFRKQLEYKCSDKGIQLIVADRFYPSSKLCSCCGNIKKDLKLSDRVYRCECGNMIDRDFQASINLKTYGEKFAS

SEQ ID NO: 39490 - protein, 388 aa, Desulfurococcales sp.
MTAGDEGFLTLSIGVRVSPEPVVIELLHRYKDALNYAIKKILDNNLKTLKQVHNFLYRDLIEIFNLPSRIAVDCYRDALANANAWRNNPKRGKRPVVKKLSMLLHPGSGYRIKDGYIEIIGGMRLKIIGWDRRYDDYKNREARLIYKRDKMILWISKKIPKPKKYTPIDVIGVDINEKKIVYGDEIINIKKDTAIDKAYKYVRLAEDLQRKYSSSRYLVWRRRKRILNRIRSYHEKARNILIDWTKKISLEIIRLAKDLRYGVSREDLTNLIKSLRKLPKDHKTKLIIMGYSRFERWIDWQAEKHGVPYVKVDPNGTSLECPKCDYKGLEEVGYRRFRCPRCGFEADRDVIGKLNVRKRGLRKLGIIPRGGALTPLTAPQMTDVNPNR

SEQ ID NO: 39491 - protein, 382 aa, unknown
  TnpB Polypeptide
MDMHSIRTISCKLQVTNAQAAQLETTLRAFAEACNFVAEWGRTHQVHRQYALHKGCYAAVRQRFGLSANLAVRALARVAARLTKAQTRHSTFQPTSVDYDARIFRFFETDGQVGLTLVGGRQRLALKVGDFQRHALSGQAPTSATLCKKRKGYYLDIQVKEPLPVPDVPTGTLGVDLGLRKIVTRSDGISHAGATLNTYRLKRHRTRRSLQSKADTGTPSTRKNARRVLKRLSGKERRYQQWVNHHISKHIVEAAKEKGQAIALEDLTGIRQRTNKRLRKSQRGLHNTWAFYQLRQFIEYKAARAGVQVIPVHPAWTSQMCSSCLHMGARSREQFVCSNCGNALDADVNGALNIATVGVSVIAPEYSLLSCPLPQWAAEAAG

SEQ ID NO: 39492 - protein, 402 aa, Moorea sp.
MRIAYQYRLRPTKEQKAKIDNWLSMLCAQYNYLLAARFAWYEQNCCSINACPLICYLPELRDNPDYYSQKKTLPNLKKTHPHYKEIHSQVLQDVVKRVKLAFDRFIKGDSNGKRSGKPRFKKWHRYRTFTYPQMKEGCLEGNLIDIPKIGKVKVVLHRLIPNEFKIKTASITKKCDGYYLVLSLEDKTVPEVKPDINPDSIVGIDVGLKEFLTTSEGETIEIPRYYRKSQKRLKFLQKRVSRRKKGGSNRLKAIKQLGRQHKKVADKRKDFHFKTANYLLSKYDVIAHEKLNVKGLAKSRLAKSVLDAGWSSFLTILTSKAENAGLLAVPVSAQNTSQNCSSCGKKVPKKLHVRWHNCPHCGCSIDRDHNAAINIKNRAEGQSVLKAQRLLSNGRIGACCLH

SEQ ID NO: 39493 - protein, 451 aa, unknown
  TnpB Polypeptide
MPQRRLVVRRYRAKLTDNQLELLSATIEAQNGLFNHALTRLHRMYGPKSKRRFPGTTKAVRSLRSKLIASYLEEVGAPVSKKTGKPRWNSKLMGMSSHQAQALLSKLLTNFGLYWESMNRMRSSMTADQKEAYRKKYGRPYYAKGRIRKRDENSKPMTVTTPGNGGLALVVSQHHIKVPHFGVVRVHEWINHHKCNRIQQVGLKLIRAATANRPAIVEIQLVIEAPIERKRPADKQVGLDWGMHENTIYTESSGDKHQIPDEIMSRVDQLEMKARKVQSEAQGVSPSRRAALLDRRRYLLAKRSNVMDQYYTSLANTLCSKYDLIAIEGVSPRGMRRRGRGSAQSRGFNRRLALVKPGRLSEITTWAAQRAGTTLLKVDPYHTSQVEFGQHPSTAKKRGLSEREWTSPFTGELIDRDINAAKNILAWGLNPSDHAKHITLGVDPTLLVVKA

SEQ ID NO: 39494 - protein, 520 aa, unknown
  TnpB Polypeptide
MKRSKTPTFLLELPLRIDAGQAKRLPAHFEAARCLYNTLLGEALGRLNQMRADPAWQAARAIPKTQKQERAAAFSHLRQQYGFSEYALHDFAKRANCTWIADHIDAMLAQTLASRAYQAVNRVCLGKAKKVRFKSKGRGLDSVENKWEKSGLRFLLQPPEEGNQGWLVWGKDRLPAIIDWNDPVVKHGLDHHIKYARLIRRKASSPNAQGADCQGYRYYLQLALAGTPYQKKKNTPGHEVIGLDLGPSTLAIVPREGEARLVPLCEELRPDARKKRRLERKLDRQRRANNPQNYDEKGRVKKHGKHRLTWKNSKGYLATKRRLAHHERKLAAHRKSLHGRLVHEIIRVGNDIRIEKVSYKGWQKQFGKSVGMRAPGMFVEHLRRTVAKTGGILHEFPTRSTKLSQYCHGCRTYVKKPLAQRFHECACGIGPVQRDLYSAFLAAYLDQPDFLPSSAQYHVYWEGADLRLRAALEVLSQRAKEGQILPRSVGITGAGARLPESLVSNRQELVYRRGRLEALG

SEQ ID NO: 39495 - protein, 363 aa, unknown
  TnpB Polypeptide
MKKRYNYRIYPNKIQQSYLESIFNINRYIWNQFLAANIRYYNHSKKFHFFNEMSSILTECKNIEGYEWLYDVPSSSLQHTLIQLERAIKDSYRKQKGFPKFKKKYDKNSFTLTGNQYSIKVNKLRIANQKSLMKVRWHRELPSKPTSCTIAKDNIGRYYVSFVVEVESKIVTYTNSKIGLDLGIETFCTTSDGEKYKLPDLKTLYKKVKRQQKELSRKKKGSNNFKKHKLKLAKTHMKIVDIRTDFHNKLVSTLINENQVISIETLKVKEMLMKSNKSLSKLAGQQGWSSFITKLISKASECNRIIHKADTYYPSSQLCSNCGYKWGRLNLSIRTIKCQECLVEHERDINAAKNMLNNYLKTI

SEQ ID NO: 39496 - protein, 441 aa, Microcoleaceae sp.
MYAVQKDVWHLTGLDKTIVEQLLRWSNNLFNVGTYESRQRYFKDRSAVKYQDLYKIAKPNENYGLLYSQVGQQSLKSVAESFSSFRALERLAKKGELNQKPRLPKYRTKGAMYQVTYPGQALKIVGNRVRLPLGTKGKEHFGTDALWVTLPERLKNCQIKELRLIPRNGKVWVEFVHESLTKQAPSCSWEVTGILGIDHGINNWLTCVSSKGKPFIIDGHKLKSWNQWFNKEKARVQSVHDQCKLPKGFSSHRLQQLSETRTRRMRDAVNKAVRTIIDYCEDRQINVLVFGWNKGWFDYAHQPQKQEVNMGGKTNQSFVQIPTAKVKDRLMQECDLRGWRFVEQDESYTSKASFLDRDLLPVKVGEKPDNWQPSGQRIKRGLYRSAQGLTLNADVNGAANIIRKSKVAIDSISIIERVGRGLLTNPLRIKLWADSSPKVCP

SEQ ID NO: 39497 - protein, 395 aa, unknown
  TnpB Polypeptide
MKYRAYKYRLYPNNEQKVLIEKHIGSCRFIYNYALAKKVKAYQIDRINLSRFDIQSDLPKMKRSEEYCWLKEVNSSSLQASLANLDSAYTKFFREHRRFPKFKSKKDNKQSFSVPKNTKVNFENNYVFIPKFKSGIKAKIHRTFEGIVKSSTISRTATGKYFISILVEMNEHNTPMRPICENKTVGIDLGIKTFAVISDGTEIPNPKYLNKSLDKIKKLQRSLSRKAKGSKNREKSRIKLALAHEKVVNRRNNFLHKVTYYLVNNYDTICLEDLNVKGMVKNHHLAQSLLDISIGAFNTILEYKAKERGINILRIGRFEPSSRLCTCGYINRSLTLNIREWVCPECGSIHDRDLLAANNIKLFALRNINTVGTTEINACGDMSGVTHSAQETPNI

SEQ ID NO: 39498 - protein, 321 aa, Geobacillus sp.
MYRTVKIPFQTSKKDIDRLFECNRISAQIWNDCLVIAKNYALKNNGKWINQTELQKQTKGKYPIHSQSIQAVCHKYLNARDSAKKAKQKGLDNKYPYKQKKYFNTKWANNGFIIHPNGTIELKMGRWERKNQPPIVVKIDKEQIPNGTVKEIELIFDAKHWKLMLCLSYENGEQPTTKKEGTIAAGDPGEIHAISAVSENGSSIIITGRKIRSIHRLRNKKIAELQKKMSKCKKGSRKWKKYNRAKQYILSKSEAQLKDCLHKTTKQLVDWCLEQNVKHFMIGDVEGVQRNKKKKRSKLVNQKLSNWCFGKLYDSGVLIIQ

SEQ ID NO: 39499 - protein, 393 aa, unknown
  TnpB Polypeptide
MAIRTFQYRLYPTQSQEQALQVQLDVSRNVYNIALEDRKVAWEHEEKRIGKREGYLLAKQYKKTFLQAKTVHSHVLQVAIEDLDRAFKAFFRRVKAGETPGYPRFKSYKRWDSIGFKQYGNGFSIDGRRLKVSGVGRIHVCWHRPYQGDIKTCRIIRNAGKWYVSLVCETADPVPLPPTGQVIGIDMGINALITTSEGEQVHNPRWYRQAQSELRLKQRKLQRAQKGGNQRKKKLLDVQRQHHHIKNQRKDFFDKLVYKLIHGYDMIVIEDLKIANMVKNHHLSKSILDAGWGYFKKRLLDKAVDAGREVLLVDPAYTSKCCSNCGAVFEGMTLAQRWVACDCDLSLDRDHNAAVNILNRAGRVREPERSEQSQAWFRSPAFRRGERHDYFMN

SEQ ID NO: 39500 - protein, 310 aa, Halogranum sp.
VSGDLNQCGFSASKLWNVARYYTQGRWDEDGEIPDDGELKSELKEHERYRDLHSQSSQRVLEELAESFTSWYKARQRGDEDANPPGYRKHGDNHPRSTVTWKQKGIKHDPKHNHLRLFKGFNHKSEGENGPSRRALRACQKLSRRKDHFLHALAKHIVERCIDHEVGRIAIGNLSKIREAENGEARNWGKRGNKKLHGWAFDRFATLLEYKAEEHGILVERKSERDTSKTCSCCEQKRDANRVERGLYVCASCGGTMNADVNGAVNIRRKITQNPPTEDMSNGRLARPVTYLFNQTSGSFHPREQVGCEL

SEQ ID NO: 39501 - protein, 308 aa, Halogranum sp.
MYSVEWGEYSRLEILVGQDLKDEYGLGHRERLRLEVRGNPNWKEHDKQGRLELFWDENAQTFRAFQPVTISEDNSRLAHSLADETAALDIGANTLVACTTTTGTQLLYEGRDLFERFRETTREIARLQSLLDGGRYSSHRIRSLYRRRTRRRDHAQDALARDLIERLRGEGVSTVYVGASTDVLDTHWSVEANQKTHNFWAFRQFIDRLACTAEEYGILVEVPSEAWTSQECPNCGSTDRTTRHRDTLTCPCGFEGHADLTASETFLRRHQNSLSSDWRTRHSVSRQRQTTVTRPMARPVRLKWDNHS

SEQ ID NO: 39502 - protein, 403 aa, Halogranum sp.
VEYRRTAVIKLDTPEGANPLFRETVEQFKHCANTASEWCWHGDDGYHVTSKAKAERALYDQLRDETDLTANLVQKGIRRAVEAVKSGVERLKRGENTSRPYFSADSAVYDKRSATFHCNHVSLSTVDGRIECDYILPDDSEKPPTKYVSDEDFEFRMAHLQYRDGDWYLHASMRKVEESDDPESDFKHRTVLGVDLGVNNIAVASTGRFWSADEFNHWRKEYEKRRGSLQQCGSRYAHENIESAGRKETGRFEIYLHSVANEIIEEAVESDCSHIVFEDLTHIRENIPEATWQHIWAFRRLYEYAEYKAEEYGVEAVQVDPRNTSKRCSTCGFTHDDNRSGESFWCQKCGYENHADYNASKNIGLQYLRRRQNANDGGAPVDVRLNRGTLNVNGEYSPPTVSG

SEQ ID NO: 39503 - protein, 289 aa, Halogranum sp.
VATQTGRNTRSRVGWSCSTTSKHKHSGPFSQSPSIILDWHNHWIRKNPLWILVRTISSLVQPRPASSICTKDETCSSGSVRRHEKSLLEEGRDSSHRIRRLYDRRTKRRDHAQDALARDLIERLYDDGVSTVYVGALTDVLETHWSVETNAKTHSFWAFRAFVNRLACTAEEYGISVEVRSEAWTSQECPNCGSTEDTIRHQDTLTCPCGFEGHADLTASETFLRRHQNSLSSDWRTRHSVSRQRQTTVTRSMARPVCLKWDNHDWLESPRSLRPNEEHTNPQVASVGR

SEQ ID NO: 39504 - protein, 405 aa, unknown
  TnpB Polypeptide
VLIHKSFRYRVYPTPAQVERIVAWEHSLRSLWNIAQEQRLLGMARSKDERRYYTAFDQINQLKELRAELPWLADVPSDVCGQLLVELDMAWERCFKKLARAPRWKHKGKGFLSLCETHSNKWRLDGDVIRFPKLGNLRAVIHRPLEGTPKACTLKRDGDQWFATISCVLDVPEPAPRTEPIVAIDRGVVVFGARSDGKPPIENPEYLLASMKRLVHADRTVSRRKKGSQNQKKARLHVMRIHRLVRRQREYHLHVQSARLAKSHGVVVLEKLNVAGMMRGNCARGIADAGWSAFSRMLEYKQAWSGGSVEFVNAAYSSQTCSECGCVDRKSRRSQSEFVCTACGHAENADVNAAKVLLKRRVNPSALPVEGSLLEGTLRSRKSLRVSRRSAESSALQGRVDYGKS

SEQ ID NO: 39505 - protein, 363 aa, Helicobacter sp.
MLIAYKQKLYNSSKNKHIGKLLRFYGICYNHCVALHKRYYRLYKKHLKLYTLQKHITKLKRTARFSFLKLLGSQTLQELVERIDKAYKRFFKKQGRPPRFKRVALYQSFTFKGKTGYKIQDNIISFSGYCFKFVKTYEFNGKPKTLTIKRDNLGDYFLCLVCEVQDNPKPAGGNSVGLDFGLKTFLTCSNGTQIPSPLFFSKFLPLIRACSRSLSKKKRGSHNRLKAKLKLARLHRKVQNLRKDFFHKLANSLAKQYSRIFIEDLNIKAMIKLWGRKVSDLAFSEFVEILAQKTQVVKIDRFYPSSKIYSSCGAVKKDLSLKDRVFHCPSCGFSLDRDLNASVNIHRGRAHSWRRGCKTRLAG

SEQ ID NO: 39506 - protein, 429 aa, unknown
  TnpB Polypeptide
MRKTYQYKLLISVSQRREIDRWLDMLRAQYNYLLRERYNWWEYSRSYLVVPQGKYCLRWCELGGELKDKPDWHSQSANLPQLKKDRPWYQNIYSQVLQDCVKRVKKAFERFVGGDLKGRRSGRPRFKNRARYRTLTYPSIPDKNLIGSSIKLPKLGILKFIKSREIAPGFKLKTASITRKADGYYLGLSVEDKSVPEVELDTVPTEFNTTGIDVGLEKLYVDSEGNQVLPQKHLRKSESKLVKLQRKLEDNARSRKAKRLIRQAISRLHQKIARQRKHWHYNKAHKLAGNCKVLAVENLSIANMKRRNKPKKVQRAGTHVGVFVENGQAASSGLNKSWSDNGVGNFLEILSQVAQKYGTRIVKVNPRGTSQHCSQCLNRVSKTLRDRWHDCDACNLSCDRDFNSAKLIKKLAVGSSQSKTLPSLKDLMG

SEQ ID NO: 39507 - protein, 430 aa, unknown
  TnpB Polypeptide
MRQVERHWIKEGHELYSICDDLTFKAKNLYNAGLYQVRQSIFKRNKSQEENKPSVLSWIELVAQFRKEKQVDMLALPSKVSTNILKLVGSTISSYYQLLKCYHDKANTSVTNEPGLPMYLHKTEGRYVVEFTNQTFSKKRGANGELILCPKDLNLAIPTKIEHPKCVRIVPKLGVFLIEVIYEVETAPLKQTGNYAAIDLGVDNLASVTFSNGANPLLVKGFKIKSINQGYNRLIAKAKSKLPTNQMTSQHIHRLWRNREMKLQSELHQITSFLSLYFDEMAIEKVFIGKNVGWKQELALGKKTNQTFTQIPFTTFISQLTYKCLLRGIEVVEQEESYTSKASFVDQDDIPTYGESDKKPIFSGKRVSRGLYQTKNGFLLNADVNGSYNILVKGLASLGKVLDRSLVSFHTRRVNGLTTQANPVLITHYM

SEQ ID NO: 39508 - protein, 368 aa, Oribacterium sp.
MKFYKMPSYIRRGAINEAIGKVSSYMGNLSNWMKNPVGSRPSYPKAGFIYPAMYRTVMYDQTGRYTAKIKVYIRNTWDWINVDFKKSDMDYIYRRCNERKQCAPTLQKRGKEWFLDFPFEEKVKLSDNSVHDQTIVAVDLGINTAATVSVMRPDGTILGRHFCSLKRETDHLRHSINRIKKAQQHGNRKMPRLWAKAKGINRDIATKTANFIMETAVLYNADVVVFEHLDRKGKARGSKKQRLKLWRSQEVQSIVTNKAHRLGMRISHVNAWGTSKLAYDGSGYVLRGRDGGFSTYELCRFQNGKTYNCDLSASYNIGARYFIREILKSLDVNSRLLVEAKVPQCSKRSTSTLSTLINLNAELMSLAA

SEQ ID NO: 39509 - protein, 440 aa, unknown
  TnpB Polypeptide
MTRQAYRYALDLSDRQRGLLASHAGAARYAWNWGLRQVVDALAAHRTGETSVPIPSAISLHRAWNAWKKGEDGIAWWSEVSKCAPQEAFRDLESGLRAFWQSRAGRRPGPRARFPRFKKKGRCRDRFRLTGAIHVEERHVRLPRLGRLRLCEEATPLLKRIQAGSVQISAATVSQEAERWYVSFAVEVERSQPASNGHSDTVGVDLGVLALATLSTGEVVPGPRALRSGLRRLRRLSRRHCRCQRGSANRRQASRRLAKHHARVAALRRDHLHKLSTMLAKSHGRIVVEDLNVRGMLTNRRLARALSDAGFGELRRLLEYKCQWYGAELVVASRWFPSSKTCSQCGAIRAELSLEDRIFRCPDCGLELDRDLNAAINLAGWAHPVVAGSAPETGNACPSGGQTAPRAARHDDAGTEQQSASGSEPTGISGGRRSRSLICP

SEQ ID NO: 39510 - protein, 433 aa, unknown
  TnpB Polypeptide
MEKTEYYCYAIKMRIYPSQEQKEIIKVNSDIYRTVYNKLNAINFQKMKIKKTLEHIEKNNLNQINTCALKAMLTRLKELEKAKAMRDNWSYMRDSRIDSMIFTCARRNYQAAWNMFRKVNNAGVPKYHKRNPYECNYQTCATYDKKHRDAKTWSLWNGTIRFFDNTHIRLPKVGRLRVSGSYRRVLDVKTDCHIGTVSVKMDNTGKYTATFLLLSETPFVNPKKKTKKQVGIDLNLENFLMASNGTVVDNPEFYRKAKKKIAKAKRKLSYRGLQAKKSNKKLCDSKNYQKQRLHVAKLEKKVMNQRDSFLHAQSAKLVNEYDLIVAEEMRTKNMLKDYAFSRRISDVGWRLFLEKMTYKANLYGKKFVTVDPKNTTQQCYDCGFIMGTENTQQIGKKREWVCPKCGRFHNRDYNASKNILALGLEKVGIEENN

SEQ ID NO: 39511 - protein, 507 aa, unknown
  TnpB Polypeptide
VPEVPAAGSHRCGRYSLRGVDSVQVRRARLGDHRPGGPARPRAPVREGSSETLPVVHREPAQGIDLTVAAQRVPTPAVPAAHAVVEVVLRGDRRRGVGGDGAAVHRHPVRAPLAAVVKRAYKFRLRPTSHQTAALTAMLDDHRALYNAALQERRDAYRMREVSIRYGDQSAQLRNIRSFDPDHARWSFSSQQATLRRLDKAFAAFFRRVRAGAAPGFPRFKGARWFDTVIWPADGDGCRWDSCADGGSTRVRLQGVGHVRVHAHRAVQGRVKTIAVKRDGRHWYLVLSCDDVSAQPLPRTGAVTGIDLGVASFLTTSEGAHVPNPRHLRASAERLAGAQRALARCQRGSHRRRKVRARVAAIHVKVRRQRLDHAHKVANSLVARHDVICHESLQIGNMSRSASGTLDQPGRNVAQKAGLNRSILDAGWGVFLRVLASKAESADRELIAVDPRNTSRTCPSCGHCCAENRTSQAEFRCARCGLAEHADTVGALNVLRAGLVLHAAQAA

SEQ ID NO: 39512 - protein, 284 aa, unknown
  TnpB Polypeptide
  misc_feature (17)..(30): Xaa can be any naturally occurring amino acid
VAGGTGHAQGESTHESXXXXXXXXXXXXXXFGLTIIANNHRKASGRKDIGAHEAQSIGKAVRRALQRHMFRKAGRPRFKSFRRGLNSIEGTNNQEIMYKPERGAIVWRKHVMTYMKPDTGYMKEALASDRRVKYCRIVRRTLKGVRRWFVQLVVEGLPPVRKVYASKCEVVGIDPGSSRIAYFHERHAAIVEVAPHVDLKEPKIRLLQRRIDRSRRANNPDGTVKKGSSTWNTSNRGRRTAARSKLRKTITDLFNAASDGRQTGGEWVSLWSISNARLKAPAAR

SEQ ID NO: 39513 - protein, 227 aa, Alloscardovia sp.
MRDSCATGDIMIETVKVMLDPTAKQARMLTEHAGVARFAYNQALSHVLDQLNNGQKPEYSYYGLRKWWNQNKNTLAVGADERVWWSRNSKEAYNTGLENLSRALRNHADSKHGKRRGKHIGFPRFKSHSRCVSSIHFTTGYRLVPDDSHAIRLPRIGRMHRMENVMRRIGHAHVLRIIVTRSADRWYASIGIEHETSPIHARCKRTSVGIDMGVKNLVTFVGRHRDT

SEQ ID NO: 39514 - protein, 420 aa, Mycobacterium sp.
VFTGLPGGDLVLPVRLPQGAGQWDHLAHFLADQSVWHKIDLVRVRDRKAPGGWRYYAHLLVHQAGYQSTSTRARRAQIPTDRRAGVDANVSNLAVASFAGGHPDQLVTEQISCTPEQQKTAAQAARRTRARQKALDRSRRNTNPDQYGPSVRQAARAARRAERGLTAKQITNPGGARHARADGVPLRAYRHDKLSGGYKRTRVDHAADARSISQAKHARAGDIAAQIVATHGNIVTVEDCSISTWARLWGKRIALFSPGMLVAALAGECAATGGQLHKAGTRSTAMSQHCLCGKRVPKTLTQRIHHCPDCGLHGDRDIVSAALAACVTLTDPDDPRTARVDYRLAHALRAGLASQQEWEGSVNRHQPPASPDAGSARTGSHHPVASAEQAALGPPPNRPGTPGRRGPSRKQPAPKLIGAA

SEQ ID NO: 39515 - protein, 226 aa, Mycobacterium sp.
MGDRGQGGHARSRAPVRAGRPDRRPGGGGAGIQGPYLARVAPGVWVSAPVPAQQRLTRAKRRSRNRDRRRQSVAARHRKIVNQRKDFHHKQARELVERYDLLVVEDLKIANMLRRAKPVADPDNPGQFLKNGARAKSGLSRSISDAGWGRFVSILRAKAEEAGRTWIEVDARHTSDRCEACGHAARENRVTQGDFVCQRCSHRTQADEMAARNILRAGLALHAQAA

SEQ ID NO: 39516 - protein, 379 aa, Actinomadura sp.
MKLVVQVKLLPDVATEAALRETLQLCNQAADHVSRRAHQSNVKTKAALQRLVYREVKGMGLSAQPAIHCVRKVAEAYAASADEPSTARHGRRPPRPLRAPVRFRKDAAQPFDDRCLSWRLDACTVSIWTVRGRMKNIRFACSTEQLSLLRHHRRGESDLVWRNDSFYLYATCEVPEADEYRPDGFLGVDLGIANIATASDGHRHSGRQLNQTRHRNRRLRSKLQKKGTKSAKRLLRKLSSREARFAADTNHRISAHVVTEAQRTSRGIALEDLTGIRERVRLRKPQRVTLHSWSYAQLGSFIAYKAKRAGVPVVYVDPRHTSQGCSACGHVDKRNRPSQAAFRCTSCGFAEHADVNAARNIAARGAASWAVSHAADDAD

SEQ ID NO: 39517 - protein, 437 aa, unknown
  TnpB Polypeptide
MGSYEAVKVRLDPTPRQLRLLASHAGAARFAYNAGLAHVKDALENGEPAEWSHYSLISWWNKSKDVLAVNSTTGEVWWGQNSKEAYSGGLRSLAQGLSNWSKSRKGQRKGKRVGFPKFKSKNGVARFAYSTGFTAPTASDPYGLKLPRIGRVHCMENVYKRLTGARLIRITVSRRAGNWYASLTVEREPAAPTSVSAPKGGVVGVDLGVKNLATLSDGTVIPNPRSLNVGLRALRKAQQALSRKVKGSVRRERARERVAQLYARVADARMDAINKSTTMIAQSYNAVCVEDLNVAGMVKNRSLARSLSDAALGEFRRQLEYKTARNGAVLRVVDRWYPSSKTCSDCGVVKAKLSLSERTFNCDACGLSLDRDLNAAINICVAGSAPETLNARGGDVSRANVLLGNVVPGEARTKRAHKGAVRLGVGLGNEAIQPSVS

SEQ ID NO: 39518 - protein, 432 aa, unknown
  TnpB Polypeptide
MKTIKLPYKSSEDLTPILKQYSSVVRYSYNRFLENKTEKEVRYLTKSLSNIDLLNSWLIQCAIKDAKAIHIRFKDEKVIFGGKKNFIERLKNKISNEEYQLKRLSPINIQGEELKQGNRSFKLDMIENNQIIFKLSRNKHIELKLPNLRNNIENELFKLQQLNEAKHQKGCTYSIRLDLKYIYISFEEFKNEKVRNLNENRYLGIDLNPDTIGISILDNGNVIYTQEFSLKPIFNKILNEKLSSNSDRMKYFQNKLKFETFEISKSIANLAKYFNCKSVFIEDLHFKRSSTIKISNRKNKNLWKRELFINNLNKRLNIEGIKLYSVNPAYSSFIGNLQHNYTDAVNASIEIARRSFEYKVKKNKKAFYPDLLVKHQWKEMAAKYKDWKEFFLEIKNLKLKYRVSLNECFHKFNVFQQNSSHKSMVLNYVFYD

SEQ ID NO: 39519 - protein, 237 aa, Rhodococcus sp.
MLAAVKAVMNQRQAERTYGIAEDELTPALGWPLPALRKQWNARKGKRAGKTIGFPRFKTARSRRSVRFTTGTIRVETDRHHVTLPRLGRIHTCESTRKLARRLEAGTARILSATLSEDSPGRWHVAFQILVHRTVTVPEHVGAGEPVVGADVGVKADSLIVVATPDGRELDRVPASKSLTAAQGRLRALQRRAARSTADRYSSSSKTCSGCGRRKPNLTLADRTYVCDHGSGRRRRR

SEQ ID NO: 39520 - protein, 399 aa, unknown
  TnpB Polypeptide
VRTYKFRLYPSEEEERKLEETLELCRRLYNHFLEELNEREKVPHRYELQRELPRFKEGHPEYKRVHSKVLQMVLHRLYSNLRSLAKRKENGYKVGRLRYRGKGWYKTFTYNQSGFTIIKTGTRLDVLHLSKIGEIPVRMHREVEGVIKQIVIKRYASGKWYACVQTDDGGERRCGSGVVAIDVNTSNYLTDSDGRIIENPKYVEEKEERLKREQRNLARKERGSENWKQQKIKVARAFESLTNCRLDFIHKLTTAYVEHYDTIILEDLDVSRMNAGSRYAKANYDVAWGVFKQLLLYKAASAGAEVVFVAPKGTTQTCANCGSHVPKGIWERTHKCHECGFTLPRDYNAALTILQRGLEKLDRGQVEVTPVETGAPTLTHVSASSVMEAGSSSLVSVAN

SEQ ID NO: 39521 - protein, 320 aa, Okeania sp.
MRTAYQYKLRPNKEQLATIELWLELLRRQYNYRLGERFSWWSENRCPVNACPLMMPIPRLRDNPDYYSQKKDLVNTKDKFPEYKLIHSQVLQDCIKRVKLAFDRWFKADKNGQKLGKPRFNGIGRYRSFTYPQITQDCIEENQINLPKIGKVKLIQHRPIPEGFMIKTVTISRKADGYYVTLSLEDKSVPALTTKVEPTLKNTLLIDMGLKEFLVTSEGESVPIPQYYRKSQQRLKTLQKRLSRKKKSSKRCLKALLAVAKQHKKADATPRRRQLACGQTPRRRQLACGMLTKRGNAHQAVADKRKDFNFKTANELLSLI

SEQ ID NO: 39522 - protein, 241 aa, Okeania sp.
VTISRKADGYYITLSLEDKSVPALTTKVEPTLKNTLGIDMGLKEFLVTSEGESVPIPQYYRKSQQRLKTLQKRLSRKKKGSKRRLKAVKTVAKQHKKIADQRKDFHFKTANELLLKAEVIAHENLNIKGLAKTRLSKSINDAGWGNFLTILTVKAENAGQKTIAVNPKNTSQDCSNCGEKVKKELNIRTHSCPHCGVVIDRDLNAAINIKNRAVGHSVLKARGARRNTGAGKREAHIVAPA

SEQ ID NO: 39523 - protein, 412 aa, Okeania sp.
MREKMKARYKYRVYPDNLQKKALAKLFGCCRTVWNDSLAYCNELYKEGKKKPSNAELQKQFITQAKKTENREWLKEVSNIPLQQSLNDLNAAYQNFFNSCKGKRKGKPARPPKFKSKQSRQTARFRKGGFKIYQDRVVLTKVGKLKIIWSRKLPSQPSSVTVIKDSANRYFLSFVVEIQPESLPQTDNSVGIDLGIKTFATLSDGRKIDAPKPLKKRIKKYRKLSKSLSKKTKGTNRYEKARLKIAKFHGKLKDTRTDFLHKLSTEIINENQVIVLEDLNVSGMVKNRKLSRAISDLGWRQFRTFLEGKAEKYGREFRIINRWQPTSQICSCCGFRGGKLDLSIREWQCLNCETTHDRDHNAAINILVAGGQSETLNGRGGKHKTTVKVAAACETSTHFEPMQLSLFDLDDY

SEQ ID NO: 39524 - protein, 403 aa, Okeania sp.
VKKYGKNPYKKSQKLRPNSVLKVPVWPSIELHKIWKQWLAAYRWVYNQCVEFFNNQRTLPKGKSLDQVIQSQQVKPENEWTIGLGKTRQEAVCEAEQAYKQAKTANNGQSVQLRYRSCRNKSQVIQFKNDAYRNGTWFPKKVKGMLFCTAIGYQVPRNCNYGTELVYQRGQWFACFPQYIEPTTTGSDQVIALDPGNRAFLTGYDGENVLEIGKGDIGRINRLCSHLDNLLSRVALSKNKRQRYQMRKAATRMRNRIQYLVKDLHNKVASVLVNSYKLIFLPTYETSQMVLKSIRKINRKSVRNMLSWSHGKFACYLEQKAARSCVLVVRCNEAYTSKTCTNCGHVHKNLGGSKVYKCPQCGHIIARDINGARNIMLRALQATAFTVVNDSIVVSDAIPTGAL

SEQ ID NO: 39525 - protein, 219 aa, Okeania sp.
LVFKYLSCRGERPFAPTNEFTPTSTPKTTEVVGVDLGIKTLATLSTGEVFKSIKPYKKAQNRLAKLQRQLSKKVKHSSNWYKAVVKLAEQHRRVANIRKDALHKLTTYLAKNHGTVVIEDLNVSGMLGNHKLAKSIADQGFYEFRRQLEYKCQWYGCELVVADRFFPSSKTCSRCGHVQDMPLNIRTYDCPECGLSIDRDLNASINLRNTVSLTVNACG

SEQ ID NO: 39526 - protein, 448 aa, Sphaerisporangium sp.
VKVTQAYRYALDPTPEQVAALASHCGAARFAFNWGLALFKAARAQRRAEKSYGVAEEPLTEEPWSLYSLRRSWNAAKDRVAPWWADNSKEAYNSGLDGLARALKNWESSRKGTRKGRVMGFPRFKSKHRAALSCRFTTGAIRVEADRRHVTLPRLGTIRTAESTRKLARHLERGTGRILSATVRREGGRWFVAFTCEIARADRAPARPDAMVGVDLGVKDLAVLSTGEVIANPKHHRAALRRLRRLNKQLDRRVGPRTPGGARRQPSARWYKAKAALGKAHARVADQRRDGLHKLTSRLAATWGTVVVEDLNVSGMLANRRLARAVADVGMAEARRQLAYKTTWRGGRLIVADRWFPSSKTCSGCGAVKAKLAMSERTYACTECGLVADRDHNAALNLAALAADVAQSYGETLNARGGAVRPGTRAGRAPAKREPRKRGTLRRKPEAA

SEQ ID NO: 39527 - protein, 417 aa, Sphaerisporangium sp.
  misc_feature (221)..(235): Xaa can be any naturally occurring amino acid
VTARQGYRVELAPALQQRARLGQHAGLSRVVENFCLEKVKAALEQREAEKTYGVADKDLTAVPWSAPALERLWRLEHRERFPWFGQEGLSSRVPKQACRVRAAGFKNFFDSRSGKRAGRKVGFPDWRKRKHGSRFRYDADRARPVSARVAHLPGIGKVATLEDMSWLTGRITDGRARVIGSTVREQAGRWWVSFQLEIDRSEVNERRAVSGDAPSCGIDVXXXXXXXXXXXXXXXFATIVDDDGTITEVHAPKPLKGALRKLRKANKAVTRRQPGSSNRAKAAKRLGRVHLEVAGRRADFLHKTTTMLARTKRVIAVETLNVAGMVKNRRLARAISDLGFGEFFRQLEYKTQWYGSSLWAADRWFPSSRLCSGCGAVNGDLTLADRTWTCRCGLEHDRDVNAARNLLAAMQLERQAA

SEQ ID NO: 39528 - protein, 466 aa, unknown
  TnpB Polypeptide
VKRSNTFAVRPLTDDDEQVLRDLLDASAALWNEINYQRLMRYNDEDGFEGGVWDADTGKLEGKYKGVLGASTAQTIRRANTEAWRSFFENKKSYHDESNTSVTEHPEPPGFRGNENDGRVPKGVVRKDAYTVEWGDRSRLEMVVGKELRDRHNSPKSRLRLEIVGEPNWPDYEDQSRLELWYDETDSTFRASQPVTVSDETRDTPLADKKAALDIGANNLVACTTTTGQQYLYEGRELFQRFRDTTREIARLQSKLREGRYSSKRIRRLYRKRTRRRDHAQEALCHDLLERLYAEGVDTVYIGGLTDVLDTHWSVETNAKTHNFWAFKQFTERLACTAEEFGISVEVRSEAWTSQECPQCGSADRTTRHQDTLTCPCGFEGHADLTASETFLRRHQNSSSSDWRTRRFASRQRQTEKAVRPMARPVRFEWDNHQWRSTTDAPPNPKEQRTDPSTVHRDGNVASGES

SEQ ID NO: 39529 - protein, 266 aa, unknown
  TnpB Polypeptide
MEQITITAKIQISATADDKVLLNKTMSVYSDACNYVSDYVFRTHDLKQFSLNKALYSTLRERFGLKSQMAQSVFKTVIAKYKTVLENESKWIKPSFKKPQYDLVWNRDYSLTQNCFSVNTLSGRVKLPYFAEGMSKYFDHTIYKFGTAKLVNKHDKYFLHISVTYDVEESDISDICNVVGIDRGINFVVTTYDSKHKSGFVSGKAIKQKTCQLFKTSERTSNASDSICKTKNESYWFTRKPLDAGCKSSSIKGTREEQPKTYIVCS

SEQ ID NO: 39530 - protein, 383 aa, unknown
  TnpB Polypeptide
MWLKMISYKYNIYHSKKTKYLDKMLRECCFVWNHALALQHRYYKLFGKYISVGKMQKHFSKRIKRNLLHSQTVQEILHRLDSSYNRFFKKLAKRPPKFKSPEKFNSFVFKQGGFTLNGNCLTINKGKKRFRFSYSRVYEGNVKQIRIVRETCYRYSLIIITDHNLINSYRKTHDGASIGLDFGLKTYLTKSDGSKIDSPLFFKRYQNKIRKLNKRFSNTKKDSNNRRRRLFELQQTYRKIKDLRSDFQWGLAHQLCKQYDYIFIEDLNIEGMKRLWGKKVSDLSHSSFIDKLTYVASKYGVTIHKIDKWYPSSKTCECGCINKGLSLRDRTWVCPACGAVNDRDVLAARNILRKGISELESMGNSGCRNAGVPYVCIQESHLL

SEQ ID NO: 39531 - protein, 403 aa, unknown
  TnpB Polypeptide
MKILQAYKFELMPNGEQRRQMSRFAGSCRYVYNRALAVQQESHKAEAGYVRYADMAKSLPLWKRDPDTVWLKESPSQALQQTLMDLDKGFQKFFKKQSGYPKFKKKGQHDSFRFPDAKQIKLEEDNQRVFLPKLGWIRYRKSRSIEGSIRNATVSLRGEKWYISIQTQRDVEEPVHSSQSIVGIDVGISKFATLSTGDVIVPIHSLRQREEKLARLQRQLAKKKKGSKNAKKIKRKIQKCHMKIANIRNDHLHKTTTMLCKNHAVIVVEDLQVKKMSRSAKGTTECPGTNVKTKSELNKSILDQGWGEFVRQLTYKQKWKGGHVILIAPHYTSQRCHCCGHTAKENRTSQARFCCTACGHSENADVNAAKNIEAAGRAVLACGEMAIAVSVNQEPSKAIQAFA

SEQ ID NO: 39532 - protein, 397 aa, Sutterella sp.
LKGLNTSNDAGKLVKLAKLNRTVCVRLLISPEDSVKLSETHALYRDACNLVVPIVCKNKESRLWQRFALHHAAYSKIREIFPALGAQLACNVIRSVSSAYKTELANHPQQLKQPDLKTIRFKNPSVHLDKNTITYREDGTVSLYTMKGRVEATLAPGDHQTALLTSSKRKESNLVLHRGYGKRPDFWELHITVENAVQPVSPSELQTKEVMMGVDVGENNMAAASTGKLWKAGKLKHNRDRKQSLRTRLQRNGSRSAKQHLRKASRRERRHVAHVNHVVSRDIVNEAKEKKKKLIILEDLTHIRERIKANLRVHARLHRWPFRKLQQMIVYKAIQEGMEVMFVDPHYTSQTCARCGKLGARKKHRFQCSCGYRAHADLNASRNLLGLGYRLMSQGLQ

SEQ ID NO: 39533 - protein, 249 aa, Methylococcaceae sp.
MSAKTTSPPIAWARSSVASICATSATVTLPCAAASSPTAERSAKQQLRQVSGKERRRVAHINHETSKAIVQTAVAAGVRKITMEDLTHIRARIKAGRRMRGCLHRWAWRQLQTFVEYKAKAVGIAVEYVNPAYTSQTCSDCGSLGKRVKHRFVCEHCGLRAHSDLNASRNLARIGGTTVPPRAAVNTPDVLMLGVRMWATLSALHNKACDFSRGLFTNGILKVTWRLKPHLKKLVAPPRKSALARPSSW

SEQ ID NO: 39534 - protein, 353 aa, unknown
  TnpB Polypeptide
VAAPKLVKTLKVRVRDKHAPLLRAMSREVNFTWNYVNELTSRMIRERHRWPSAFDLAPSVAGASQCFEHIGSTTIDEVCAVHAKSRKQAGRVRLAWRVSNPKSRRYSLGWVPFKSRGARWRYGQVHFAGHAFKVWDSYNLAAYGFRAGAFVEDARGRWYFTVTVEVGASCPAGVRHPVGIDPGLSNSATASTGLKAPSRRYRELEDAIGMQQRAKNPERVRALHAKVKNRRNDDAHKFSRAVVDGASVVCMGNWKPPASGRSRWAKSARDGALATLKGMLRYKCEHAGIPYQEVDEKMSSRTCSGCGAVHDSPRGRAWLGVREWECQHCGVVHDRDVNGAINILVSGVGHGPQ

SEQ ID NO: 39535 - protein, 446 aa, unknown
  TnpB Polypeptide
MQITCGFRFELQPDNQQRSLMSRTAGCCRLVFNKALALQNELKEQNKKLLSYNDLCKMLTVWKQQSEWAFLKDVPSQTLQQTLKDQTRGISDSFRKKGDPAKKGWPRFKSKDIGDGFRLPQLKPEHLDEGNARVKLPKLGWVRYRKSRDIRFRDGNGSWVKGCVKQATVSKEVGKWFISFAVVFEVEQPAMKTLDVGIDLGVVHAVTTSDGRFFDLDTDAIKAQELKIAKLQRQLSLNASSRKKLAKKKLAEAFDKHSPSRKRRKLLHRLQKAFQKIRRIRQDFHKKTAHMLAQEYGCVYAEDLRVRNMTKSAKGTIENPRKNVKQKSGLNRSILRTGFSDFRRTLEWALQKEGGIFIAVAPQYTSQTCPHCGHCDSGNRPRQALFHCLQCGYEENADVVGAINVKKKGRAAPTAHDKKRIACVVNGECAGNGAQSVNSRNFLCEA

SEQ ID NO: 39536 - protein, 418 aa, unknown
  TnpB Polypeptide
MLLSRKTIIQMNETQANIVGHMNYAASKLWNVCNYERQHYKELDLAKYPDWYYQKAQHKENMWYKALPSQTAQEVCKVLDQAWKSFYRLQKTGGKENPRPPRYKQQGIVITYMQNGIVHEAESETVRLTLSKQLKEYMKEAYDVHDNYLYLKNSIFKSMDSIKQLHIYPPEEDGSSQVIVVYEVPDVKMQEDNGRYLSIDLGLHNLLTCYDNEGRSFILGRRYLSICRKYDKEMARLQSQWGKCQSAQGIKYPKPSKHQRKVQRKKNNSIRDYLHKMTRYVVEYCKEQEIHTVVIGDITGIRKGKNLGRQTNQKLHGLPYARIYTQLEYKLAMNGIRMIRQEESYSSQCSPYSEKVSKEYAEGRNRCMRGLYKEEECIYQADAVGAYNILRKYSNKSAKEIKLPVMGLSALKVIKVAV

SEQ ID NO: 39537 - protein, 899 aa, unknown
  TnpB Polypeptide
MEQKGKLKSRVPSGFDNGNLLVVKHGLLKFFRDPETAPQWTDAITKLAKATSILSYHVAILHHMHFLRMCEAKESLENWDQTTVDHAFFMVSGMFPGAEAKGLKAHGGLKPTEDSMKLLRTYKDHFLPIFGYIDAGLKRAGALKLTCNSARVAYMTALKNNISTTFYSKHLKWIKMRLLKWRELKQYNGRLPKVAYIGIGKAAYHLAKWTMDPSVYLNDRITLMKEQEQILFEKMNIPTKLRAGFMVHIKDMLGTIVQYVPYQDKKIDDGLLQQDWSGYVQWFHKILIDFDDWLKYAEEKEKAKKWDQAEKNRASRKIRRFNLVPQHRVGIRHILIDIGTLRALGIQLKVWKKSLSIKTMRQDLPTYWNQVFKMDELLSHQVRKGKCTPNWSISTDGVACSTSFARPKLLVTNPPKKRNKEKIHFTESKVECKLKPQSSKRKLIADDEEDDIVIRRKVKRDSLPFREKKSSDSSETKEEKKNQIVVLNYDEEDRLPLVLPITIPLHSIIVGLDPGMRSLYSAYSPHISGEHKRSNTDGRENKEEKQAIQIKNTTIRQTGFRRPSQRICINQRIHDQSVNEKKKGKNGIHIDLSSAFFRRRTKQHRRKRRLEGKLDEWITEKQLNPKDVKNSIQSTKVWSLDALVNYWIERHELLASQWDFYSEEFHRKEKFDSYIRHQQSYTWACKRLLEPYLKTISQEHKKAGAKVVIAFGMARFKGSKGLPRPGIAKFYKCLSTQFRNHCIVVDTPEFYTSQKCPQCHGFVSPVQSNHSHESNGEMKIMRKKRWSSKKRVWMDRPPKDDEKKLKKEANHEKTEEKICNVCRSDQIYGLKACTTCKVVYDRDNMAAQGMWAALVGVQETGERPSYLWRSEGDAEAKIVAAKNIWQIQDRPKHVLERHL

SEQ ID NO: 39538 - protein, 899 aa, unknown; identical to SEQ ID NO: 39537
  TnpB Polypeptide

SEQ ID NO: 39539 - protein, 372 aa, unknown
  TnpB Polypeptide
MHLRTWKFKLKNGKLAKELFQKWANDYRYAYNKSNWLKNEHTEFLSDYDTRDLITPKEINNHIPWFLETPKDIRVGAVFENCKNFKSAFTNLKNKHIKYFNMSYLKKRSKTFCLNIPGSAIKVSESRKSIQIYNSYTNSYWFKLSKLIPKECINDKHYLLKEHKLYFNGDNYYLCLALERNVIEITNRKNLTAIDPGVRKLVTTWDISNKSYKFGENKSSQIKMLLKKRDLYQSRNNFKNFNRIEIRIKNLISELHHKTSAFLCKRYKNIILPELDVRQLIKKVKNKEYRKVMLRMSICKFNELLKTKGILYNTNIITENVSEAYSSRMCSKCLFINKKCSHELKKCTKCLLEIDRDINGAKNIYFMNKHLV

SEQ ID NO: 39540 - protein, 399 aa, Clostridium sp.
MKKLKRAYKMEINPTDEQKSKIHQTIGVSRFIYNFYIAHNKEIYEREGKFVSGMDFSKWLNNEYIPNNQDKKWIKEVSSKATKQAIMNGDKAFKDFFKKAKGFPRFKKKKNQDVKAYFPKNNKTDWTLERHRVKIPTLGWVRLKEFGYIPVNSIVKSGTVSQKADRYYVSILVEERDIKISNSNIGIKISNTNNEGVGIDLGIKYFAICSNGNKFKNINKTSTVKKVEKTLKREQRKLSRKYESLKIRNKKEKGGNATSQNIQKQIVKVQKLHQRLRNIRTDYINKTVSKIVKQKPSYVTIEDLNVKGMMKNKHLSKAIVSQKFFEFKTKLMSKCKQNNIELRIVDRFYPSSKTCSNCGKIKKDLKLSDRIYKCDCGFTIDRDLNASINLKNAKEYKIA

SEQ ID NO: 39541 - protein, 396 aa, Leptolyngbyaceae sp.
MLILEFKAYGKTNQYSAIDEALRTAKFIQNKCLRYWMDNQGVSKYDLNKYCAVLAKEFPFANELNSMARQSSAERAWAVISRFYENCKKQIPGKKGFPQFKKDVRSVEYKTTGWKLAEDRKSITFTDGKQIGRLKLKGTRDLHFYQVDQIKRVRLVKRADGYYVQFAVSVERSESVEPSGWAIGLDVGLNDFYVDQNDHRTENPRFLRKAEKRVKQAQRGVSRKVKGSNNRRKARVILGKRHLKISRQRKDHAVKLARCVIRSNDLVAYEDLRIKNMVRNHCLAKSINDASWYQFRVWLEYFGKVFGKITIAVPPHHTSQECSSCGAIVKKGLSTRTHVCQCGAALNRDHNAARNILGRGLATVGHTGSYGLEPCNAWGEDASTLAGENLLRASNL

SEQ ID NO: 39542 - protein, 402 aa, unknown
  TnpB Polypeptide
MNVQRAYRTELDPTDVQRTALRRHAGCARYAYNWGLQRKEETYLFNQLPHPPVKTPTAIDLHRELNTRKKADLGWMYASSKCAPQEALRDLDRAFRNFFEGRARHPRFHSRHSGRSSFRLTGAVKVENGHVTLPRIGRVRLKERGYLPTTAPLRSVTVSERSGRWYVSLSVEEELPTVAPPTGEAVGVDLGINALATVSDGTVVPNPGALLARQRKLQHLQREVWRKRKGSQNREKAKRRLSRCHGKVADLRKDALHKATTMLARTKPVIVVESLLPANMLRNHHLARSLSDASFGEFVRQLEYKCRWYGSRLVQADPFYPSTKRCSSCGNVKAEMPLWERTYSCPSCGLVLDRDLNASRNLAMLAASSAESLNACGGERFMPNGRCSPVNQEPSIIGVTNV

SEQ ID NO: 39543 - protein, 434 aa, Mariprofundus sp.
MLPANKGKSEWLRSGLFHDYAAVANALAPDLDAQWLRFFSSQDKGDRPMPLMSSVHPDLKDLVTTTVTQQAYANSVYPASVSKVGNVVNDIRIEINAIRAGDNPPDADLLKQLYYINKSRKWLSSEGLPAEHAAWLEDRFWHHCRRRCIPEFRENVICLDQRNCKVQQAGTSREFETWLRVSHRGKGVSMPVETNSYADRHDGKTKGLYRIRFNQHKHRLEVDFIKAINYGDSVDAYTKACDALDKTVALDFGLRNVFVSDSGNRYGVDLIDYMVKLDKRIQHIQTQCQKRKFRLSRSKRYRDMIHRMRTTIDRSINEALNAVVKTERPSMIVVERLNFMHPDLSRRMNRLIRNCGRAAVERKLNALEQEFGIEHIEVNAAYSSQTCSQCGYVDLKNRGTRDTFKCRWCAHTDCADTNAASNILTRRSWPKWWL

SEQ ID NO: 39544 - protein, 333 aa, Mariprofundus sp.
MLSMNLQRLRDKQLIMRYNESAWWLTFWKKSDEFGFLATAQSQVLQQCLKDLDRAFSDGFDRKQPLKRTPQFKKKGMGDSFRFPQSIRLEGSSVFLPKIGWVRMRLSREIEGSIRSATVSRRGKHWFVSILTAIEVAEPVHELSTAVGIDRGVVNLAVLSDGSTFEGSKPLKRLARKTKFSNNWMRQRERITRLHIKIADARNDAIHKATTIISKSHAVIVLEDLRTKNMTASAKGSLDEPGSKFRQKAGLNRSILDMGWFEFGRQLEYKQRWRGGQVILINPRNTSRKCSDCGFTDKVNRPSQAQFSCMACGHSENADVNAAKKHSGGRACR

SEQ ID NO: 39545 - protein, 418 aa, unknown
  TnpB Polypeptide
MHYAYRYRLHPTESQREKLDYYRDTCRQLYNHALTEFEQIPHSAGTLNQRVRQVRDELPDLKDWWDNLTDLYSTVAQAAVMRIEDSVKALSQLKENGYNVGSLNWKSPSEFRSFTYVQSGFEFDKKNGQTVLSLSKIGDIPITVHREIPDSVTVKEVSIKKERTGEWDASFAVEGREKPPKPENPDRCVGIDVGILKYAHDTDGRAVGSLDLKNERERLKREQRSLSRKQHGSNNWEKQRLRVAECHQRVRRKRRDFLHKLSKYYATEYGLVAVEDVNVKPMLESAGNSQNTASAAWETVTTLLEYNCKREGTHFVAVEPAGTTKECASCGVESDKPLWVREHSCPACGFEIDRDANAAINVLSRGFEKRGLGQSEAVTPVETALPLFTSSDGADVVDGKRVLETGSPTLTEAATAAE

SEQ ID NO: 39546 - protein, 322 aa, unknown
  TnpB Polypeptide
MQIDQPVSLSEKTAGIDLGICNTAAVSVGDETLLYPGNALNEDAHYFRQEEYETEGENGPSAHAEWARQKKSRRQHHFLHALSKDIVEQCARRDVGTIAVGHPKNIRDDSDWGRHGNKRLHDWAFETLLSHIEYKAEERGIDVDRTPEAKLKTSKTCCECGTEADSNRVERGLYVCETCELVANSDLNAAENMRTTVTPSPATDRSNGCLAQPSVRLFDKSTGRIAPQEQVVPETTISQRRSGIPRLQPWEDVKLSGGPGIAQISPRFFNSSMTSSTIVSTSGYGNSCSLPSFEANSMAVKLTSPASNFVPGPLGNAGTRSI

SEQ ID NO: 39547 - protein, 265 aa, unknown
  TnpB Polypeptide
VYESRTATFHDEYVSLATVDGRIEANHELPENPARTPHQQYLFNDDSDITSAELHRQHGEWQLHICCTADVESDTPARAATENGTVLGVDLGVTQLAVTSTGTFWSGDECDHWRREYEKRRGDLQEHGTRWAHENIQSVGREEEGRFTQTLHRISNELVTKARENGCTVIAFENLTGIRERTGASWGHKWAFNRLYAYVEYKAEAHGLTVEQVNPENTSRRCSECGFTHPENRDGTHFECLNCEYQNDADYNAAKNIGLRYLRQN

SEQ ID NO: 39548 - protein, 233 aa, unknown
  TnpB Polypeptide
VDLNVTGWTAVTSAGGFHGNADYLNHRRTQYEKLRGELQQTGTRSAYLRLHERAGTESAWVDEYAHLISNSILQDGLDTRSTHVAFEKLNGIRKRLSNLPQYQQWMFGRVQEYTEYKPAEHGISVGYVNPKNTSKGCSHTECQTVSDSNRREKQFECVACGRSWNSEYNAARNIGLRQMFKTLLPTSQTRSSGTATCQLALMSGVLSVEESDVTHLSTDWMSTDKPTASAVGS

SEQ ID NO: 39549 - protein, 406 aa, unknown
  TnpB Polypeptide
MPETVRKTFKEKLRPTPRQERQLELVLWRCRTLYNTALEQRITAWERCHVCVTRYQQEAELKDLREDFPDYAAIHSHVVPDVLARLDKTYQAIFRRLKAGKAGEKPGFPRFQGRTRYHSFTYKEYGNGARLENGSLVLAKLGRIAVRWSRPIEGSIKTVTISTEADGWYVCFSCAEVPTQPLPLTGDETGIDVGLKVFLITADGQLVENPRHYRTAERELKKAQQRVSQRKKGSTRRKKAVQLCAKKQQHVRRQRTDFHHKMALALVRQYDVIYVEAIQPANLSRRPAPVSDGNGSYLRNGASRKADLNKSIQDAGWGHFLSILACKAAWAGKRVEAVHPAYTSQDCSGCGERIQKSLSVRTHVCTHCGLVLDRDENAARNIQWRGQRLRGVPALAGVVNREPAGL

SEQ ID NO: 39550 - protein, 383 aa, Bacillus sp.
MLVKKAYKFRIYPNKEQEILIAKTIGCSRFVFNHFLEKWNNVYKETGKGLTYNSCSDKLTQLKKELVWLKEVDSIALQSSLKNLADSYTRFFKKQNKAPRFKSKKNKVQSYTTKHVNGNIAIVDNKIKLPKLGFVRFAKSREVEGRILHATMRRNPSGKYFVSILAETNVQGLPKTGSSVGVDVGLKDFAILSTGEVFSNPKWFRKLEEKLAKAQRVLSRRQELALKRKCKLDEAKNYQKQKRKVARIHENITNARTDYLQKISTYIVKNHDIIGMENLQVSNMLKNHKLAKAISEVSWSQFRTMLAYKARWYGKQVVTVSKTFASSQLCSVCGYQNKDVKNLKLIEWTCPKCNSHHDRDINAGQNLKNEAIRLLTVGTTGIS

SEQ ID NO: 39551 - protein, 383 aa, Bacillus sp.
MLVNKVYKFRIYPNKEQEILIAKTIGCSRFVFNHFLAQWNDAYKETGKGLTYNTCSSQLTQLKKELVWLKEVDSTSLQSSLKNLADSYTRFFKKQNKAPRFKSKKNKVQSYTTKHTNGNIAIAGNKIKLPKLGLVKFAKSREVEGRILHATMRRNPSGKYFVSILAETEVQELPKTCSSVGMDVGLKDFAILSTGEVFGNPKWFRKLEEKLAKAQRVLSRRQELALKRKCKLDEAKNYQKQKRKVACIHEKITNARTDYLQKISTYIVKNHDIIGMEDLQVSNMLKNRKLAKAIREVSWSQFRTMLEYKAKWYGKQVVTVSKTFASSQLCSVCGYQNKDVKNLNLREWDCPSCGTHHDRDMNASINLKNEAIRLLTVGTTGIA

SEQ ID NO: 39552 - protein, 365 aa, Paenibacillus sp.
VGGVLVHKAYKYRIYPNDEQQTLIHQMFGCCRFVYNHFLGLWNDTYTATGKGLSYNTCATQLPALKQAHEWLNFFDSIALQSAVRNVADSFDRFFKKQNQAPRFKSRKHPVQSYTTKYTNGNLAIEGDQLKLPKLGWLRFANSKSTEGRILSATVRRNAAGKYFASIVCEVEVQPLPQTDKHIGIDLGLKAFAVCSDGMRVANPKAFRKHENRLAMWQRRMARRSKGGSNWQKAKNKAAQIHEKIANVRHDFLHQLTTKLIRENQTISIEDLKVTNMLKNHKLAKSISDASWGEFERQLSYKSQWYGRTVKFADTFAPTSQTCHVCGLIHKEVRNLSVRKWVCPSCGAVHDRDENAAQNIKDVAV

SEQ ID NO: 39553 - protein, 373 aa, unknown
  TnpB Polypeptide
VFKKSKPVEILKAFKFRIYPNKTQQADLARQFGHVRFVYNHYRAAREGFYIDTGTGLNYNDCAMDLADILKVDYPWLKEADSQTMQQALKDLDRAYKNFFEGRADYPNFHSKHDKQSIRYPQRFKVNDKRVYLPKVGWVKCIFHRPIEGETKNCTVSKTKSGRYFVSIQCEMEVEDPTPKAETIAIDLGLTTFATLSNEDKRIKPKHLYRSQRRLQIRQRRLSKKAKRSNARNKARLPVAILHERIANQRKDFQHKLSRELVNQYGSISFESLNIAGMVKNHSLAKSISDAAWSQFVGFCEYKAKWANGQILRVDRFFPSSKLCSDCGHKNKNLTLNIRQWVCLNCGSIHDRDINAAKNILKESTLGARESYA

SEQ ID NO: 39554 - protein, 394 aa, Clostridioides sp.
  misc_feature (201)..(201): Xaa can be any naturally occurring amino acid
MYCGQHIKLPKLGMVKIRDKQVPKGRILNATISKEPSGRYYVSLCCTDVDIEVFENTNNQIGLDLGIKEFCISSCGEFIENPKYLKKSLNKLAKLQRELSRKTIGSLNRNKARLKVARLQEHIANQRNDFLQKLSTKLIKENDIICIEDLQVKNMIRNRKLSRLISDVSWSEFVRQLEYKANWHGRQIVKVGKFFASSQIXNQIGLDLGIKEFCISSCGEFIENPKYLKKSLNKLAKLQRELSRKTIGSLNRNKARLKVARLQEHIANQRNDFLQKLSTKLIKENDIICIEDLQVKNMIRNRKLSRLISDVSWSEFIRQLEYKANWYGKQIVKVGKFFASSQICNKCGYKNEEVKNLNIRDWICPSCNETHDRDINASINILKEGLRLITIQNK

SEQ ID NO: 39555 - protein, 472 aa, Erysipelotrichaceae sp.
  misc_feature (134)..(137): Xaa can be any naturally occurring amino acid
MYLTVKQQVKHLSKEDYRSIKELCHIAKNLTNQAIYNIRQHYFAEGKYLNYEKNYALLKSSDNYRTLNSNMAQQILKEVDGSFKSFFGLLKKAKQGKYALKDCKLPRYLPKDGYTTLVIGFVRLKGNKLILPYXXXXSFKSFFGLLKKAKQGKYALKDCKLPRYLPKDGYTTLVIGFVRLKGNKLILPYSNSFKKTHKAVEITVPPILLDKKVKEIRIIPKADARFFEIQYTYEAECIQRNLNTTNALALDLGINNLVTAVSSKGETFIIDGRRLKSINQWFNKKNARLQSIKDKQDYGRKPTNRQKALARRRNNRINDYMNKTARRVIDYCIDHDIGTLVMGYNETFQKGSNIGKRNNQIFINIPYGKLIDKLKYLCELNDIILVMQEESYTSKASFWDKDVIPVYKSDDTEEYHFSGKRIHRGQYRTATGQVLNADVNGALNIMRKSSVVDVNILYSRGEVDTPIRIRIA

SEQ ID NO: 39556 - protein, 391 aa, unknown
  TnpB Polypeptide
LLVLLFGTSGCLQLIYFYYFCLVSCTIAKLKGDGRFLEQSQVLEFHKKLAKKIFKHLLSKNKRPRFSNISMHLDGKVVEISKKEKDGAKAFGYWLKVSTLEKGKPVYIPLKANTYAEKLEGRFLNYCQVVEDDGEIEFRIIKQLKKREYIPATDEIAIDLGLRPLFATDKGGLFGRNFFDTLKAFDKKITKRMANLQKRNIKPRSDKKYRKLVDDLREFLKNEINRLINIIIKIYKPKRIVIEKLDFRSPELSKRMNRMIQNFGKRYIKEKLQKLQELYGIEVVEINPAYTSQECSCCGYIDKKNRKDTQEFECKVCGNKMNAQINGAKNILKRSSLGNLTKKQVLKILIERYLERLKGCESAPLDVIRDNPYFKDYLDSILNPCQSLTPS

SEQ ID NO: 39557 - protein, 399 aa, unknown
  TnpB Polypeptide
MANAVRKEGRTVAATKKIRIFPKNELRFIQALHTYRLAYNLTVEAINAKEKLGSELRRSITDKIKATYTNDESPEHYVYNVDLIHEAYRKCEGAYRAQLKKFKTKGTPFTMRFMSWKYSPRYFMVKRLAKSGFPYPKQLGEIFLTEPLPEESFNKSAVVKYENGQWYISVQQHITVASLVKGETSRICALDPGVRTFQTLYSENQVVKYGEGFSKAILLPVAQSISKWISKRDSFIAKFKDRQETQYYNDMMKCFERKLNKLKARRNNLINDLHKQVAYDIVMNNDVILLPSFNTSNMVSKGKGGKRKLGKITVRSMLNLSHYKFKVYLNYLAMKYGKTVIEVNEAYTSSTFEGKIFSIGSKEEFKTTLGKIIDRDITGARNILIRFLTKSCRVNILHT

SEQ ID NO: 39558 - protein, 234 aa, unknown
  TnpB Polypeptide
VKVKWHRCLPDTAIINTVSFKREPDGWHVIFSCELPEVEIITTLSAAVGIDLGLKSFLATSNGESIDPPRFYRQAQDKLRRAQRAVARKKKGSNRRRKAVQHLAKLHQHIKNQRKDFHHKLTLSLVRQYGTIAHENLNIKGIARTSLAKSTHDVGWAQFLAILSYKAAEAGTSVIAIPANNTTQACSVCGALPVTPLTLKDRVYSCAHCHQVSDRDLNAARNVLRLGLSLQTLT

SEQ ID NO: 39559 - protein, 410 aa, Sphaerospermopsis sp.
VLVLEYKAKCNQCQKQAINEAIRTTQFVRNKAIRYWMDSPKEAKVNKIALNNYSTALRKEFSFVEALNSMACQSATERAWQAIQKFYDNCKKKVVGKTCTEPVLSVAEGRSRSKGYPRFQKDNRSVEYKTSGWSLHPTKRRITFTDKKGIGELKLLGKWDIHTYPVKLIKRVRIVKRADGFYVQFCVDTEVKQESRIADGEIGLDVGLEYFYSDSNGHHEPNPRFLRKAEKSIKHAQRRIYTKEKGKNQRRKARQRYARKHLKVSRQRNEHAKRVARNVCKANALVAYENLSVKNMVKNHCLAKSINDAAWSTFRQWLEYFAVKFNSFVVAVAPHYTSQKCSNCGAIVKKSLSTRTHKCSCGCELQRDVNAAVNILHFGFAQCKNLAKNREGHSRINATGVGISTLVGEN

SEQ ID NO: 39560 - protein, 276 aa, Calothrix sp.
LIQYYIHIQIKDKAPTPIKSNNVIGIDFGRRDIAVTSNGDKWDGKQINDVRDKFSLVRASLQKKATKGTRSTRRRARQILKRLSGKERRFQQWLNHNISKFIVQDALKNNAAVAIENLTGIRARTNQKPRSKTERRRSNSWSFYQLRSFLEYKAIQFGVEIIAVPPAWTSQTCHQCLHIGLRSDKRFKCSNETCSWSGDADYNGSKNISAIGAVFVSHSVAGVPPVVGSGVDGVSPEEIPTRVNQPGGSNCLCCSLSTDSSGLLKAHTVTASGQCG

SEQ ID NO: 39561 - protein, 392 aa, unknown
  TnpB Polypeptide
VKKAYKFRFYPTVEQSAVLSRTFGSVRFVWNWALALRTREYRTAKKSLGYHDLSALLTAQKKNSETAWLSEISSVPLQQALRHQQAAFNNFFNKRARYPRFKSRGGRASAEYTASAFRWRDGQLFLAKMKDPLPIAWSREVPEGAPSTVTVSRDTAGRYFVSMLFEDEAEPAEPSGWDVGIDVGLKNFATLSTGQTIANPKWLRSKEKKLARYQRMMARKTKGSNNRNKARRKVARVHAEVADARRDFHHQLSTEIVRKFDTIVVEDLAPSNMVKSRSLAKSISDAGWRQFRTFLEYKAGWYGKRFVVIDRFHPSSKLCSECGHLLAHLSLGTRQWACPDCGTLHDRDINAAKNILAEGHSASACGAGVRHSGSPPMLSAVNQESPGFSRGE

SEQ ID NO: 39562 - protein, 402 aa, Bacillus sp.
MDAFLLCEYRRKRVQRYDPPVCRSPEEARVNEVHKAYSFRLYPTKEQEQQIRRTIGCCRFVYNHFLARRKDAYERDGTTLNQYACMRELPALKEQFPWLQEVDSTALQRTVEELDDAFQRFFREKKGYPRFKSKKHPKQSYTSKRNGKDNDKATIRIEGNRIRLPKVGWVKLAKSREVQGRILSATVRLAPSGKFFVSVLVDTEIQPLLPSNNRVGIDLGLLDFAVLSTGEKIPNPRHLRTLEEKLKRWQRILSRRKPAGKNREKARLKVARLHEKVRNARMDFLHKLSTRLIRENQVICLEDLRVHNMQKNHRLAKSIADASWSEFRRQLEYKAKWYGRQVVVVSPDFPSSQLCSRCGARNTKTKDLSVRQWTCPACGEIHDRDVNAARNILQEGLRCLSA

SEQ ID NO: 39563 - protein, 621 aa, unknown
  TnpB Polypeptide
MKRKKKVKPKLVFQPKQKGSFITIKTSLKSILKDYENNFQKINDIVLECNEIIIQTYQFIRLYLLDCYYKNKDFPELDKDTILYFIRAGGIRDNRGKQAQNKDFQKELEDFYDKEFKLLIQKEKYSLKNKTFLTPYLATQINTSFTNNIKEHFITRIRRFMNIFSPFPLETKEQKKEFQKIKNLILFDKLDEIPNNYKEWSRKIRNDFLPSTYEKAFGYDCKVNPNKYLFYTIKMNEEIEKKNDEIKMLSITDEEKRKQIKKLFQPIPLRNSIVPNYITFDANSILSLFGEKGESQKGKKVKDNKEFIWSKIFRTGSKVMNMKGYEYKTIQTDGIGVSICFQKIGNKKNENPSFCEMDELYLTDLTEEDLEKCKNRKIIGIDPGKQSLVYMVDKNKKKLRYSASQRRVESYRKKNSMILQWEKLNNNIIEEETKLSLQNSKTVNYEKFKNYIKEKNELNEKLKKFYNQELHRKLKWRSWIYQRKSEDKFLNRIEETYGKKEDILLCYGNWSRTSQMKYIMPTKGVGLRRVINKKYDVVLLDEFKTSALCSKCNKELENYKNIHRLLVCKNCGLENKNSVFINRDMNACINMVNLSKEWINSKKRNENFCRNTDTNLNKEGE

SEQ ID NO: 39564 - protein, 400 aa, unknown
  TnpB Polypeptide
MYIVKKKKLKTTPQLKHLAEECGRVYSKMVKTFWRLKKTKDMYLSKGAMQKLIKRSTLHSQTVQACIDSFYFMLKAYGRAKKAGYSHARPPTRGRKNFLIQWKGQCLKLADGVLTLPNGRGNEPLSLPWAYEKPCLLTIKVGSTTSTIHACYKTAALEPIAEGRTVALDLGQIHLATASDGWSVNGKKLRALRRYQNRYKGKLAALQSKKNKGSKAWRRLQHTKRKVLTKLDNQISDFTHKATTGIVSTLHKTGVKTLVIGELSGIRENSNQGKVRNQENHQWNFHQVTWQLTYKAKSKGMEVAKEKEHYTSSTCPCCGERTKTKTRNFVCSKCGFSIHRDLLGAKNILKKYLGNKGEILDFPVVGGMAPPRGVRVKPHSPVASGFAFGNKLKSLETPGF

SEQ ID NO: 39565 - protein, 362 aa, unknown
  TnpB Polypeptide
VKKGFNIRIYPNKEQQILIDKTFGCTRYIYNFMLNLKQKLYEFYGISLNYNQMSKILTELKKQKLWLQEPDKCSLQCSIKDLDNAYLNLFNGAGYPNFKSRRGKNSYRTNDKLKFDQDNKMIRIPKVGWIKFRDKSNFSGLTKINNITISKTPSGKYFASISAEVDIAAFTKTKKSCGVDLGLKDFCILSDGTKFENPKFLVSNEKRLRLLQKSLSRKVYGSKNYEKARIKLAKFHEYIANCRKDYLHKISTSLVNNYDIVCAETLQVKNMIKNHCLAKAIQDVSWYEFCRQLEYKCLWHDKKFVRINTYFASSQICSNCGYKNPDIKNLDIREYDCPECGFHHDRDINAATNILNEGLRLL

SEQ ID NO: 39566 - protein, 483 aa, unknown
  TnpB Polypeptide
MRRANTFDVRPLSHRGRLALIELLDSSAACFNEINYDRRYAYFSARYDADDQHAVSELEDIVRNAASQEEYRNKYIQQLSSSIPQQLERKNWQTWNGFFDLLRKYRDPKDDEVTGEPSPPGYWKEDGKRHLHTVIRNDTYSLELGERSRLEVPLGKELKEKYGYGYNEKLRLEVRGRPHWDGPNGSLELAYDRTAETFTAHQNVGRDDVDPVRRDHTNSCTLATARGEVDGVVAAVDIGANNLAAVVTSEGDHVVFHGRPCFERFHDLTVEIANLQSKLPNDRYCTERIDRLYRRRREQRNHAQDALVRHLARWLVERDVTDLYVGKLDDIREEHWSATVNEKTDLFWAHGRFRNRLKNVLKDEFGIPVHEKSEAGTSSTCPTCGGENVHRSGDDLQCLSCGFEGHSDMVGAANFLTGQADLEGGPMARPAAHGQNSPRDAVACLEWDDHRWQRRDRSTKEEPADRSTARERGNLASGGTGTA

SEQ ID NO: 39567 - protein, 442 aa, unknown
  TnpB Polypeptide
MQRLQAFKFELRPNGEQRRQMRRFAGSCRVVFNEALRLQKERHEQGEKKLGYAGLCKELTAWRNDAPLPSGRVASWLADAPVHPLQQMLKDLERAYANFFAKRAAFPRFKKKGQSDSFRYPDPKQIKLEQGNSRIFLLKLGWMRLRLSRPVLGELRNATVSLSGGKWFVTKREVEQPTPKAASAIGIDIGIACFATMSDWRYLVPLASFKRHEVRLRRYQRAMSRKVKFSSNWTKAKARVQRIHARIANVRRDYLHKATTAISQNHAMVCIEDLQVRNMSRSAAGRAEQPGKNVKAKAGLNKSILDHGRFEFRRQLDYKLAWNGGLLVAVPLPNTSRTCPACGHVSADNRQTQAKFACVECGYEENADVVGAINILSRGMQMLRDEGQDMANAFAEWKPMVPTARIACGGDVSHAKPERAQRAASMKQEPTEATHGVLQCTA

SEQ ID NO: 39568 - protein, 436 aa, Macromonas sp.
MNLVQRLQSFRYELRPNGQQACQMRCFAGACRFVFNKALALQQERHAAGEKRFTYAQLCQTLTAWKKQPELLWLNDAPSQPLQQALKNLERAYTNFFEKRAAFPRFKKKGQSESIRYPQGVRLDQTNGRIFLPKLGWVRLRLSRPVLGTIKNVTVRLRAGKWFVSIQTEREVAAPVPQATNAIGIDMGIARFATFSDGDFLAPLNSFKRHQVRLARYQRRMSRKVKFSNNWKKEKAKVQQLHTRIANCRQDFLHKATAAISQNHALVCIEDLQVGNMSKSAQGSKDKPGKNVKAKSGLNRSIMDQGWYEFRRQLTYKLEWSGGMLVAVPPHHTSQTCPHCGHISPDNRRTQAQFLCVQCGYQNHADVVGAMNILERGLRLLACGEDVSRAKVARPKRAASAKQEPAEATRAQHDAGTGAVGIPVLWDGEDVTVPPS

SEQ ID NO: 39569 - protein, 497 aa, unknown
  TnpB Polypeptide
MNDVIVPVETCVVPAAWPEDKSFVFEQADLVINTLTISSKVKPEAYAWLEQAAREVNDVWNFCNQTSHKAWNNYVGQRTWMSAFDMNDLLAGVGEVYNKIGIDIAQSVAGEHAIKRNTTHYSKLGWRKSGGSKKSLRWIPFKANTMRFSLYDINGKRVKLKNDPQPIVPAWPKKNESESKDDYTTRKEKFAPIRYEAEKQLQAWEYRKIQAADTIKLSFMDKTIRLFNAHRLLEAYRLSKQGVGCLRSGNFAQDSLGVWYLNIVVDRVELQLAPLSGLDSSVGLDPGQVTAMTGSDGSHYIPNIQGANVVSNVLPELRSRRYREMESKIQQAQKNGHKKHAKRLHRKVKRQRKNDRDLFCKAITMTYSRIWIGDIKPQKLAKSKLKGQAKSIMDSGIGLASATLKSLGHRAGRVVQTVDERYSTRRCCCCTQLTGPYGLSACDVRQWTCSACGTFHLRDTCGGENIRLTGEISWNQVSFEDRVKSVAPKYWRPTGTR

SEQ ID NO: 39570 - protein, 418 aa, unknown
  TnpB Polypeptide
VFVGIHGFRFRFYPTPEQETLLRRTIGCTRLVWNKALGARSERWKREKKSTNYGEQSATLSEWKKLPELAFLNEVSSVPLQQSLRHQRAAFKNFFEKRARYPRFKKKSRGGSAEFTRSGFRFRYEDSQLTLAKMTGPLDIRWSRPLPPNAKPSTVTVTLDAANRWHVSFRCEDPAVKALPKVAQAVGIDLGLTNLATLSTGEKIRNPRHAEREASRTRRLAQALSRTKKGSNNRYKARIKLARHHARVADRRRDDLHKLTTRLVRENQVICVETLNVMGMVKNRSLARAISDAGWSLMLQFLAYKCAWYGRSFVKVDRFHPSTRICHKCKFVLDELPLHIREWTCPGCEAVHDRDANAAINILAAGLAVVGNDDVCGLDVRHLILRDQMLSGMKQKTQGAIPWNPLPFREGRMSRTLP

SEQ ID NO: 39571 - protein, 285 aa, Ruminococcaceae sp.
MSGGRVERNTTIKYRLYPTPEQAQKIETTFACCRWMWNAILADEQEFYAATDRHFLPTPAKYKKDAPFLKEADSQALVTVHQNLRRAFQDFFDGKSGYPQFKRKHSRDAYTVYCHHYDLYPDSIYVSDVGVRLPKAGLVRADMHRKPLHWWTLKSATVSKSRDGKYYCSILFGYEAAPPEPVEPENIGNYEPCESPEYIIKAEKKLGVMEQKLRRMLPGSKNYEAQQRRIARQREHIANQKRDKAHKESRRLADTYDAVKAGEADTRAREQLRYKLERQGKRLIE

SEQ ID NO: 39572 - protein, 420 aa, unknown
  TnpB Polypeptide
MKTLKVPLDPTSEQKESIDHNIEANRYVYNNFLTACKLKFDSTGKLPSAYDLNRLVTRFRKNCPFIEEAHSNAMNETSKRAIQACERTLGEHRKESATLFIETDILEVAGPHFPRYKKKGEFNSYTYPTHRDFSIVMDTTDDECTNKGKGTKKKKKGKGPKRRIRLGKIDGPIRSYNQSTKIDGKVKTCTVNRKDMGRYYRYSASITYEDVPKSYPEPKGPIGVDVGISNIAALSDGTVFENDHIYQKKESRFRKEHRKLSGLQPNTPEYLKQRTKLNHLYEKVKNHRRNNIEQISNHIVKNHDIIAMEDLSVEQLRSISMDRRMTKGYNDASIGELRKRICDKAESAGRTIVLVDPRDTSQICSNCQGIVEKDLSVRTHVCPHCGYEEDRDVNAARNILARALSILQGLRDRPAILSDT

SEQ ID NO: 39573 - protein, 282 aa, Methanococcoides sp.
MDAFFRRITNGEKPGYPRFQGRNRYNSFTYPQASNGSVKFVDGKLKLAKLGTIKIKLHREIEGKIKTCMIKHEGDQWYAIFSVDLGRAPRKVVPQTSVGIDVGLTSVISLSNGEQVNPPKFYRNAEKKLAVQQRRLSKKQKYSNNWKMQCKVVSKIHRKVANQRKDFNHKLSRDLVNDYDLVVFEDLKIRNMVKNHHLSKSIHDASWGQLIQMTEYKAEEAGKHVELVNQYNTSQTCSNCGNIVKKGLSARIHTCPHCGLVLDRDVNAAINILNLSTVGTTG

SEQ ID NO: 39574 - protein, 203 aa, Salmonella sp.
FVSCLCESEPTSLPVTTKTVGTDVGLKNLFVTDTGFKTGNPRHTAKYAKRLALLQRRLSRTQKGSKNRARGRLKVARLHAKIAGCRMDNRHRLSRKRINGNQVVCVESLKVKNMFRNQNLSKAIADASRGERVRQLQYKGERAGRSVVAIDQFFPSSRRCGCCGFTMKKMPPDVRNRTCPECGEAHDGDINAARNINAVGLAV

SEQ ID NO: 39575 - protein, 442 aa, unknown
  TnpB Polypeptide
MSIKTIEKTIKLKLVPLTKSDGRHLCSLLEDYSSIIREALDIIVRNDVRSRRRAHELCYGFLREKYPHLHNKFVQEAYKRALAAYRSYRKLLNKWKKLPEGKRRIVKPPSLPKVENNKVVELHVDTYKLTRESGALVLIVSKGADVYLKLSVMEYEHARRELEDAKLGNSKILVGDNGVFLLLTVRKGVEVAEHRNKLIVDINEDSVDCLLVDCDRNEAVLFSIKHDIRKLRTNYRRIRMKIQEKVENPPLKNKLLSKYGFRERKRVEDRLKKITTLLAKIAKKRNADLVRENLKDLKLNGKKRSRQLNYRLSTFPYRRFIECIDYKIYERGLSVVEVDARKTSTTCPLCGYSDKKNRVNKEKFRCTKCGFTFNAQYIACLNLLSRSNDGLVAIRNGVLALISRKAGPVVPVNVAPNEPSIEMRWLREKPVQVFKASLITKR

SEQ ID NO: 39576 - protein, 256 aa, unknown
  TnpB Polypeptide
MVPTLNKVRLKEYGYIPVGSKIISGTVSKKANRYYVSVIIDVENIPQKNTNQGIGIDLGVKDFAICSDKIIYKNINKTQRVRKLEKKLLREQKRLSRKYESLKIRNKKEKGEATRQNIQKQIAKVQILYQRLNNIRTDYINKVVSNVVRNKPSYITIEDLNVKGMMKNKHLSKAIAEQGFYEFMRQIKYKCEFNGIEFIQVDRFYPSSKTCSCCGFIKKDLKLNDRNYKCDKCGLEIDRDYNASLNLRDAKIYKTA

SEQ ID NO: 39577 - protein, 281 aa, unknown
  TnpB Polypeptide
MAPRARILFATCRRHGARWHISLNIQAPDFHPHRRHPSRLANDHAGFVGVDRGLSAFAVAATATRTEVGRFAPPRPLQHSMLRLRTRSRTASRTQPGSSNHAKAVRRLSREHARIANRRRSFLHEVSSQLVKTHDRLCLEDLAVANLLGNRQLARAISDAAWTELARQLGYKAAWYGTELVVCDRWFPSTRTCSQCGRVAPRMKLSERVFCCHGCGLVADRDCNAAANLAAWAEAASIAATWAPDRRAGGRVTNASGGEGAGHRCRDGKPSPMKEEPRLTP

SEQ ID NO: 39578 - protein, 376 aa, unknown
  TnpB Polypeptide
MLKAYKYKIKPNDIQKELLSKFFGCVRYIYNWGLNAKTSAYKENGKAVGYVQLAKELTSLKQQQDHEWLNECTTEALQQSLRSLDNAFTAFFRKKAQYPKFKSKKFTRNSVKFINSVHFDFENWTVKLPKLGKVALCKNKTFDQSNCKQGTCTVSRDHCGTYWCVITVDDLKQKPTKTKLVKDNAIGVDLGIKDYATLSNGIKFSNPKYIENVQKKLAHLQKTFARSKNDSRNHEKIRVKIARCHRRIANKRSDLLHKLSTHLVMNYDAICLEDLNVKGMEQNHCLARAIQGAAWSEFVRQLSYKSEWYGKNVLFIGRFEPSSKLCHNCGYINKDLLLNNREWICPVCGTRHDRDINAAINIKEIAFDKQNLVGVK

SEQ ID NO: 39579 - protein, 299 aa, Burkholderia sp.
VLTTGSSKALGIHSGTINATCEQYAKSRSRNRRPYLRYRGMKSLGWVPPKGRDLKREGEAFRFAGNTFRVFNSRPLPEGKIKDGTNFAQDARGNWFLNIVIEMPDVQVRPARSGVGIDLGLKDFATLSTGEKLPNDRFGRCAAEKLTKAQRARKHKRHIAKLHAKISNARADFQHKLALDLVRRFDYIAVGNVSAVKLARTRMAKSVYDTSWSSFRNKLRYKAIAHGATFEEVDESGSTQSCSSCGSKDSTTRPKGIAGLRIREWACSDCGVEHDRDTNAALNILRCGRASPGVGILSP

SEQ ID NO: 39580 - protein, 396 aa, Streptomyces sp.
MVDRTSVFCVKIVAQVKLLPASAHDADALAATLRACNRAANHTSEVAFAKDLKRRNVLQKEVYFALKADYDLGAQPAVRVVKKVCDAYAALRANIKAGNLGRDGSKSRLRAESKPIVFREEAAQPFDDRILTWNLNARTVSIWTLAGRIKHIPFVCSDHALKLLASRRGESDLMVRDGMFFLIATIDLPEAEAFEPDGFLGVDLGIVNIATTSDGEIMAGRGLNRYRERHRELRDKLQKKRTKSAKRVLKRVRRREARHAANQNHIIAKQLVATAERTSRGIALEDLSGIRQRVTAKKDQRARLHSWAFAQLGAFVEYKARRAGVPVVFVDPRNTSRQCSECWHTHRTNRVTQARFVCRSCGIVMHADHNGSRNIAHRGEAAWKRGAVNRPRTSTR

SEQ ID NO: 39581 - protein, 276 aa, Herbidospora sp.
MCSIFRSIRAGLPIVAKMVKRAYRYRFHPASEQAEELSRTFGCVRLVYNKALEERIHAYRVEGERTSYMQSPARLTAWKRTKELSFLSEVSCVPLRQALRHLHVAFGNPAFKSRKRSRASAEYTRSAFRWRGGRLTRAKMDAPLDIVWSRPLPKGSGNRARAKQVVARIQARTADRRRDHSHKVTTRLVRENQVIAVEDLNVASMVKNRSLARTISDAGWRELRSTLADKAAWYGRELIVVDRWFPSSKRCSACGASHDRDVNAAENILAAGLAER

SEQ ID NO: 39582 - protein, 372 aa, unknown
  TnpB Polypeptide
MLKTFRYRLYPTPAQATTMQHTLNECRWLYNHLLEQRKTVWDERGETLGYYDQNVTIPPLKAERPTLKDVHSQVLQDVAVRLDLVFKAFFRRVKAGEQPGYPRFRGRGQYDSFCYPQSGYKLDGQRVFLSKIGHVKTVIHRPIGGTVKTCCVRRTATGKWFATLSCAMEDAPLPAMDSAIGIDVGLASFATLSDGAEVANPRFFRRDEKALAKAQRRLAQEPRPEKGQRATPARRRRRLVVARVHERIAHRRKDFAHQQSRRVVNAHDTIAVEDLSVNRMVHNHCLAKSISDAAWSLFTSYLSYKAASAGRRFIAVNPAYTSQDCSRCGHRQKLTLADRVYRCPCCGLEMGRDHNAAINIMTLGLQSLGARP

SEQ ID NO: 39583 - protein, 393 aa, unknown
  TnpB Polypeptide
MTDIPAVAQLDIKRKPQGMSKKPKGLQQTYQVRLYPTPEQGRLLMAHCQEYISTVNVLSSALDVDLIPHDDTFSTKDFTAVLPSCVKNQALRDARSVFKRSLDLDVLPVLKKPICQWNNQNWHIRASTLIVPVVLGGKTQQLHLRCAEVSLDGLPGILRIKKKRGKWIADITMTLPKPTPVSTERVMGVDLGIKVPAVAYVCGVGTRFYGNGRYQRMMRRRFYSRRKKLQQARKTRAIRKSRGKEARWMKNINHQLSRQIVNHAQEQGVGTIKVEALTGIRKNTTRNSGGASARKNNRMKNSWSFYQLTMFLTYKAERLGIKVEQVDPAYSSQECPACSARNKAQDRTYVCAGCGWMGHRDKVGAINISRRAGLPDKRASATGARGSARGRAA

SEQ ID NO: 39584 - protein, 381 aa, unknown
  TnpB Polypeptide
VYKAFLYRLYPSKLQIEKFASLLDIARAFYNAGLQERRNAWKQGVSINYYDQANQLKEIRDTNPEYALLNYGATQDVLRRLDKTFKSFFRRVKNGEGKAGYPRFKGKDRFNSITFPTYGDGIKLRDNRLYVQNVGLIKVKMHRALEGEINTVTIKQVCDKWYAVFSNSIDIEPLPASDKQVGIDVGLESFAVTSEAEFIENPRYLREAEAVLRKAQRKVSRRKKGSHNRRKAVKLLAKHHLKVSNQRKDFAHKFSRHIVNTYGFIAVEDLQIKNMVRNHHLARSISDAAWGMALDFTAYKAEWAGRQFVRVIPNGTSQDCSTCGAEVPKSLSVRIHRCLNCGTVLPRDLNSSLNILARGRRVWGVTWSNSSCVPQEAVCFS

SEQ ID NO: 39585 - protein, 473 aa, Cyanobacteria sp.
LYKTIPIKAEFTEEEKIFWVNMSKHANSLINCAVYYTRQTQYTQLEQQENAFTVYWRGDELRYGWKTYKCKTSYPELDKALKDNPQYKAMAAQSAQQTLKSVGESIVSYNRLVNLYYKGEVARPSLPKYRKKGGLAAVTFPRQALRYKDGDFYPSISRETLPHLLVGVALPLPEFIDSDWVKEVTIRPSLGELWIDWIIDDGKEAITNNPSLDYSQAWSFDHGGTNWLTGVSTRGKSLIIDGRKLKSMNQGYCRLVAKYKQGKSDFYWDSNLDRVQRRRNNQMRDSEALASLRASAINKAARFIINQCLNDRIGNLVIGWNEGQKNCSNMGKRNNQNLIVIPTGRLIERLKQLCPEYGIVLTITEEANTSIASFLDGDSLPKHGEKPKGWEASGKRIERGLYKTALGFLVNADCNGAANIMRKVATQLKLNLAEVGRGSLALPQRFDLFTRLDKSYRKSALRSVSLDHLATTI

SEQ ID NO: 39586 - protein, 434 aa, Nostoc sp.
VSYIVSHATKWYYDYMLLTYQYKLNPTPEQIVVLEIWGELLRRHWNYALGERLDWLKRTRSQIDRCSLVSEPIGEIPEKPDYYTQASLLKQTKELFPDYKSIYADCQQQNLIRLDKAWKRWLIPDKKGKRGGKPRFKKRGNISSFTFPRVNSPKAGAHLVGNTLKLSKIGEIEVILHRPIPDGFEIKQATILSKADGWYVSFSLEDKTVPELLPIDEIKTNTGIDVGLEKFLTTADGQSIEVPQYYRKAQSKLARQQHQLARKTKGSKNHSKQSNKVAKTHLHVARQRKEFHYHVAHWLVNSYDLIVFENLNIRGLARTRLAKSILDVAWGAFLEIMQAVAVKRGKLTLGVDPRGTSINCSSCGERVEKTMSVRVHSCSCGLVIDRDWNSALNLLKRGSVGLPIPGCGGLGDTQPMKQQVSFVNLRCSRYTACS

SEQ ID NO: 39587 - protein, 384 aa, Lyngbya sp.
VFKAYKYRLYPTDEQKCQLIRSMGSARWFYNYALNLTSETYKETGKGLSRNDIIKLLPGLKKKHEWLTEPPSQSLQQVALDLSSAFLNFFEKRAKYPTFKKKHNKQSIRFPQSIALQGDYLKLPKLGKVYCKVSRLPEGKIKSVTVSLVPSGEFYASCLYDDGQEKPTANSDGKAVGIDCGLSHFAITSDGAKHGNPRYYRKYEDKLARKQKQLSRKQKGSNNRNKSRIKVAKVHSKIIRCREDFLHKLSRKLVDENQVIVVENLAVKNLVKNQKLAKSISDAGWGQFCTMLKYKTEWEGKLYIEVDRFFPSSKTCHFCLNQVESLPLNIRQWTCSQCNTQHDRDINAAINIKDEGLRLLAGGHLAAASGVRVRPSKGTAFTRR

SEQ ID NO: 39588 - protein, 473 aa, unknown
  TnpB Polypeptide
MIAMQLRYGFRLYPNGPQCSVLARSFGCSRVVFNDALRVREDARAAGLPFVSSGELSKRLTASKKTPERAWLGEVSSVILQQSLRDLDTAYRNFFDSLKGKRPTMGPPRFKSRKDNRQAVRFTANAGWKITSGGKLRLPKIGDVSVKWSRSLPSVPSTVTVIKDAAGRYFASFIVETGPEEVLPPTTPEVGIDLGLSHFAILSDGTKIDSPRFLRRAEKKLKRAQRSLSRKAKGSNNRGKARLKVARAHAQVADARREFHHQLSTKIIRENQAIAVEDLGGQGTRPHTHGQVRARRRMVAVRVHARIQGRPVRAHPREDRPVRADLTGVLTVRHQGWPQAPPSPGVDVRELRGRPRPGHQRGGQRRQSRRSCGYSLSSADKTDTRARAAQRSRNPPEGQPHPRQPGGDRPPLGGRGFQVLFCPFRTPARSGHAVARGGHAARPPLARVRAPRRHSYKTGGPRPPHHEPHERIR

SEQ ID NO: 39589 - protein, 454 aa, Streptomyces sp.
VGWCADLVAGMTGALLSEHGNPADVDALASGVDAGGRGLPSKAWMALRRLGWTVAPPDGVRVNDRIVRMAQEQAGRVLRSVRWRADVIAGVLATWPADPDRRTPTEWDQVRAAIPGGERLPSGVIRSRTRQITSHVRRHGRLPLDVFELEPVPDTARMLLLAACDGQQATIERSEDGHRALLRLQLPVRPDPASYADWTWVACLIALPPTVPANAVLHLPTLRPTDGKVRTDLAFTQPVPKARRAGHTIALGVDWGLNTLLSAGALRLHDDGRITALGAGAQFRAGGVLAKQHRLRRISEHLHTKTSHYARLSDPALNGKAERLAEEFRRVSQRRSHLNDALARSAARWAVDQAVATGATVIYLEDLRSLEAGGMGRTTNTRLSQTVRGQIARWMRHLAAETGIAVVTVPPRNTSRHCPHCLTPLRHRKAPDRPTTPGWKWALCPDCGWQGDRD

SEQ ID NO: 39590 - protein, 498 aa, unknown
  TnpB Polypeptide
LYTVINCQVGVSSGPVFEYFDKITKAGNCLYNATLFRIRQVLTLTEKPPEKWTDNEREVYDEILKALPLMPKKFAMPTKGRSILSYEFLNALLKASDNPDYRREGLPIQSAQHVIKDAVRAMKSFRHATKEYYKKPSSFTGKPKLPGYHQKGGNSTIILTNQDCVVYPKKDGPGYEVKFPKFDKRMDLGNAPITGRLKQVTIKPNHGIFIVSFVFENSDKNPEFVEPRRICSIDPGLENLAAITSNIGAPCLLLKGGVVKSINQLYNKLMANEASQQTSGTVNKFHMTDKTHRICLRRNNQINDFMQKTAARIVNWCVENKIDTIVIGTNRMQKQGINLGHKTNQSFVQVPFSKLRSLITYRAERYGIQVIEREESYTSKASFLDNDFIPTYGVDDKNAHFSGTRPKRGIYKAKDGTRINADLNGSGNILRKEFPSAFCEDGQVPDFNSVIIIRHPDYDRATANRKKQLSVPHIDSKSKLRRLAKKEKRNPSGIELCE

SEQ ID NO: 39591 - protein, 217 aa, unknown
  TnpB Polypeptide
LGHVRLHSARQERRNTAYRQRGHTEVHQGPRHLKKYERKLAREQRRLSRRKGTRRGEKPSGRYLKQRKRVARIHAKIADARTDTLHKVTTMLADENQVLCMEDLNAKGMMRNCHLAKAVSDASFGEFARLLEYKCAERGRTLVRVGRFYPSSKTCSGCGHRLDALPLSVRSWDCPACGAHHDRDVNAARNILAEGKRILSNTEGTAGHAGTVAATTA

SEQ ID NO: 39592 - protein, 811 aa, unknown
  TnpB Polypeptide
MKMLSAFKYRLYPKPEQEKRLDRSLFLLCNLYNNLKAEEIRRYREEHKSTSKTRFRRLALEARKEDGELQTAHSQVVQNVGDRIHRSFRNFFERRARFPRWKKPHRYNSLTYPQSGFKLSPEKGLYLSGIGDVRIFVHRPLLGKVKRLTIKREADGWYAIFITEREAPQRKPLSEIPTARVRGADMGLTEFATFDDASSVKYPQFLRRSEDEIKHLQRHFSKKLKGSRRRHALGHRLARLHLHIRRQREDFQNKLVHRVFAENDVLVLEKLNVPGLLKNHSLAKSISDASWSSFARRAVFKSELFGKNVVFVDPWGTTQFCHWCLHWVPKDIATREHVCPNCGEEIPRDVNSALLIKRLGIQSRPPTDSGSSPAEQGPLPSLREMVSPSVEAGSPRIWSWEDVTSVCEGRQARYGRPVKSFLSKPTHSTSVSKQGLFPTSVVGSLPRPRWLIDAIQRHERKELSEGELKESYDDAVKLAIREQELTGVDELSDGEQRRFSFLAFVAERLPSFRLIPVKELMNRDAEKFVREMNLPIDIISNPVIVEKVRRSRPLAVDEVKFALKHTSKKVKAPIIGPYTLLINSWNKSKSGHVYKSPDEAFEDMARLLREEIIALRDAGASFVQLDEPGIGNFCDYKYTSWLLALNGWKVSDMRELQKISAELINRTVKGIDGVKVGVHICRGNWPADEAHLSKGGYENMIDEIVELKVDQLVLEYATKRAGSFNAFEGDRWDGEVGLGVIDVKNPRVESPEEIVSRVEKAKDVFGLEKITLNPDCGFASGRPWPVVQRDVAYAKLRSQTEAARMLMKKYA

SEQ ID NO: 39593 - protein, 369 aa, unknown
  TnpB Polypeptide
MKLTAQLKLQPTPEQADVLRRTLETANAACNFISRVAWDTRTFGKFALQQLCYQKVRETFGLSAQMTIRSIAKVADAYKLDRKTQRAYRPHGGIAYDDRILSFNLKRQTVSIWTVADKRRQTIPFVCGERQRRLLSSRQGESDLVFRNGQFYLLVTCNVDEPTPDDVDAVLGVDLGITNIAADSDGEQYSGAQAERVRQRYQRRRDALQSVGTKSAKRRLKTISGKQRRFQSNTNHTIAQRLVRKAKDSARGIALEDLTHIRQRTTVRKSARAKHSNWSFNQLRRYIWYKAQMCGVRVLLVDPRSTSQACNRCGTVDKRNRPDQATFRCVGCGHTNRADVNAACNIRDRASVSWPMASNLRVQAQAHLL

SEQ ID NO: 39594 - protein, 435 aa, Deinococcus sp.
MRVTISAKLKLRHSPEQKAMLDAVSLAYRDALNFASEKAFEMDKTSSAPKLHKETYAVLRERFGLGAQLACTVERQVAANYKTQWTKLKQNIQARERGFTKRRYKGLDAAPRFVSRTLEYQYQRDYSWKKDGRVSISTLAGRIVLEFDGYTKHLEYIAQGCETGAAKLSYQKSKKQYFLIVALNLDLPDPRPTDHKNVVGVDVGQRYHFVATDKDGQSLFEKGAAVRQRKDQFARTRKSLQRKGTRSATRRLVAISSRERRFVADRNHLLSKMLLTRFPGSIFGLEDLTNIHDRTEGRRNPKASKKAKRAKRRRSQWSFAELQSSLAYKAPLHGSLAVRVEAHYTSQACYKCGHTSKGNRPGAGLEFVCKVCGHRGHADRVASVNIGLRTMLVRQDWMSTGALSVRPDVSDVEVKAARLSRYAELRWNPDTSLAL

SEQ ID NO: 39595 - protein, 445 aa, Escherichia sp.
  misc_feature (205)..(304): Xaa can be any naturally occurring amino acid
LGITGCHQNASGKPRPSGRGGKEAVFRLTVFCIITFSSLICEAMKRAYKYRFYPTTEQAELLAQTFGCVRFVYNSILRWRTDAYYERKEKIGYLQANARLTALKKEPEFAWLNDVSCVPLQQSLRHQQTAFANFFAGRAAYPAFKSKRHKQAAEFTASAFKYRDGKLYMAKNKIPLDVRWSRPLPSVPSTVTISRDAAGRYFVSXXXXXXXXXXXXXXXXXXXXXXXXXXXXXXXXXXXXXXXXXXXXXXXXXXXXXXXXXXXXXXXXXXXXXXXXXXXXXXXXXXXXXXXXXXXXXXXXXXXXLHAKIADCRLDALHKASRKLINDNQVVCVESLKVKNMIRNPSLSKAIADASWGELVCQLQYKGEWAGRSVVAIDQFFPSSKRCSCCGFTMKKMPLDARKWQCPECGTDHDRDVNAARNIKAAGLAVLAHGEPVNPESLKAA

SEQ ID NO: 39596 - protein, 382 aa, Glycomyces sp.
VQVKLVPDAAQASAIERTLHAANEAANRVSADTFAHCGLKASVKELRSRCYGELKDAGFGAQAAQHVIKRVADAYTTLRANIKAGNLGAPKSKRRRKAESKPVRFRPDAAHTFDDRCLSWNYDAQTVSIWTLDGRIKNVPFACSPDALKQLTEHRQGESDLVERDGKLYLVATIDIDEPEPFEPVGWIGVDRGITNLATTSDADNHSGRRLERYRRWRARKKAELQAKRTRSAKQLLKKRARHEARHATHINHKISKNVVAVAQRTGRGLALEQLDGIRERVTVRRDQRARQSSWPFHQLGSFIAYKARRAGVPYLEVDPAYTSQRCPRCGHTERANRPDRDRFQCRRCGLAGPADVVAAVNIAKRAATAWVFVDMPDPVPA

SEQ ID NO: 39597 - protein, 338 aa, Nocardia sp.
LPYIRGAALQTRVITTAKKTPERAWLGEVSSVVLVQALADLHTAYRNFFASVTGKRKGGKVAPPRFRSRKDNRQSIRLTRNGFSLRPNRRLYVAKVGELKLSWSRELPSVPSSVTITKDPAGRYFASFVVSVDDSPLPPVESEVGIDLGLATFAVLSDGRTIASPRYLRQVERRLRRAQKALSRKHKGSSDRAKSRVKVARIHAKLADTRRDWAHKYAMAIIRDNQAVFVEDLCIAALARTRLAKSVHDAGWGMFTRMLAEKASRYGRSFARVDRWFPSTRLCSACGLIGDKKPLYVREWSCACGATHDRDLNAAINILAAGQAERLNACGGTVSPAA

SEQ ID NO: 39598 - protein, 203 aa, Limosilactobacillus sp.
MKSMAKMKYHYGLKMRCYPSDQQKQLIKINSDASRFIYNEMVAINKELMQLRRVKLPIDIVQDRIKQLTMRQNAKQMSNHYQFLEDKRIDSLTKANAIQNYRKAWNAFRKVHATGVPKFHRKSYHWRYQTNCQYPGQKNALLTNGTVCFLDNSHVKVPKIGLLRVAGSQARLLKRICETRIGTVTLTKDSADRFFLSMQVSFR

SEQ ID NO: 39599 - protein, 461 aa, unknown
  TnpB Polypeptide
MVGFLRAFPSCITAFLYLGISEVIHRLDNDTFSQLSPRTSYVLHRREESVACRRSLTFAVQVDDPRAKWLLGEFRLIVNKSIRIAMAHDIRSRTRLARVAYHDLSADHRVHKKYILSAFDVALGLLKGHRRRIRKNRKSSPPFVRKPMLIAANQSYWLDRETGRLRIPIRGTEGIQLYLPLSEWHRSLLTDSTWSLGTLTVVPGKIIVLVRKASPPIHEPMSLIALDTNEDSMDGVACSPGETKLVAAPLGGVRLVQATHFRRRRRLASKKAHDWRVRRRLLAFEGRRERNRVRQRLHLVSRRLIQVAEEHEAAIVLEDLRIPRLAGYSRRTNRRRNMWPFREIHRQIEYKAALAGVPIIKVNPAWTSKTCPVCGARRRDRVGKVFVCLMCDWEMDRQINAGMNILKTALASNEALARAVRFQPGALRHDVVIPLYDLLREGGGAREEPSGVESRPSTRVT

SEQ ID NO: 39600 - protein, 461 aa, unknown
  TnpB Polypeptide
MIVTRIVFSHRLNPGKYAALEEQAARLGVIRSEVWQRYGSIHGVGLTDRMIRDGWLREQRVFPVSANAWKETLRDAKADIAMTVEAAKVKARQALRRHTDDAQERQRLYTALKANRFAQDRYLARIMRKYGVRGHNHTHNPIIVRSDTHTTFHLGGRAWIKIPGLERGRRIAIPLNTTVEPTGTLRLILREGRVEVHFAVDGGTAHTCGIRTLGVDKGYSEVLVDSDGDHHGVNLGDLLTGESDALKIKNQRRAKLRARAKNTRNPRKRRNIEKHNLGCKKKQRRARKIQARLRTTVYSAVHAVVDKAAVIAAEDLTAPMNRKNFGKNVNRRLSGWTKGVIAEALENVSQRRGSTLVLVNPAYTSQMDSRNGCLLGKRQGDAFYCFDGVVLPADENAARNVLARLHDPEMDRWTPYQQVQSILQARTERHRLGLLNLDSSCSSETALSTESEMPKQLWLSF

SEQ ID NO: 39601 - protein, 342 aa, unknown
  TnpB Polypeptide
MIKTFRYRIKDATDGAKLDKLARSVNFVWNFCNETQEHALRWNQRWPTGFDLQKLTAGSGKVLGLHSQTVQAVCEQYADRRKQFKKRKLRWRGRRSPGWIPFKTVGVRINGDTVRYSGQEFRFWNSRDLPGPIKSGSFSQDARTRWYVNFAVDCPDEPPTAGTQHVGIDLGLKTLATCSDGRKIEAPRGYRNQQRRIAEHQRKKRSRQARNLQAKIANRRKDFLHKESDRLTKECELIVVGQISSSSLTKTNLAKSVNDAGWAIFKNLLSYKAIARKVVYREVSERFSTQTCSGCGAIGGPKGREGLGIREWVCRECHTIHDRDVNAALNILRMGHHTLALK

SEQ ID NO: 39602 - protein, 466 aa, Oscillatoriales sp.
VAKAKKTMGVQQVLLSPTKEVKALLEYLCQQSGKLYNSGVYLARQTFFKTGKLLIGKFDLSFEPSISKSMVAKSLPSTPMQQTLMSVTEAFKSFKELRDLYIKGQLHFKPKPPGYLTGAKLFKVAYPNSGGLQPKLVGNQLRFSLGLTVKRWFGVSEFFLPMPSNLKFSKIKEFTIIPKNGAFYLEMSYEVEKEQYNLDIGQALSIDLGTADNLAACVDTLGNSFLIDARAIKAMNQLWNKKVATRKEGKPEGYWDNWLDRVTRQRNHQMRDGINKATKLIVSHCLKYGIGNIVCGWNEGFKSSVNMGRVNNQKFVQMPLGKLKDRLKQLCYLYGIRFTETEEAYTSKASFLDGDSLPKYGEKPFGWKASGRRIKRGLYQSADGTVVNADLNGSANILRKVVSKLGVSLDRLNRRCLTTVARVRLWALPMSILSAESSVSLDRLSVKGMLKFQRTATVATCSIFVL

SEQ ID NO: 39603 - protein, 380 aa, unknown
  TnpB Polypeptide
MLRVLKVRLYPNIEQQQKIFQHFGSCRYVYNVLLDAKIKAYECGDNLSIYELKKRLVPMKKAKGGEWLREVDSTALQNSILNIGKAYDNFFRRVKKGEAKVGFPKFKSKHNPRQNYSTSGAKRKDGKIYLPKIGLVKAKMHRNIEGIIKTSTVSYEAGQFHISMNIEDGKESAYGTNNSKTIGVDVGVKVFAYTSDGEAIKHVPLKKEIADVVKAQKTLSRRLKGGKNRAKAKATLAKKHLKLRNKRDDFLHKVTNRLSENQAVKVENLNIKNMTKKAKGSIDNPNMRSSAKRGLNHSILKQSWGKFFELLEYKLTRNGGKLIKVDPKFTSQKCSKCGHISKESRKSQSKFVCTVCNHTKNADYNASINILNSHAVGTTV

SEQ ID NO: 39604 - protein, 365 aa, unknown
  TnpB Polypeptide
MRKMMKYRLYPTTAQTKALEEQLGEACRLYNAALQERRDAYQHSGLSLNYYDQANQLKAMRAEGACGLANFSASQDVLRRVDKTFKAFFRRVQVGEAKPGYPRFKSRRRFDSYTFPSWGDGCRLTDADRLSLQGVGHLKVKWHRPLTGTIKTVTVKRQAGKWFVCFSVEYTADALPVLDARVGIDVGLSSFATLSTGETIANPRHARKAQAQLRLAQRRVARRKRGGRNRRKAVVLLQKAHAHVQNQRTDFHHKTSRTLVDTYGVIAVEDLNITGLARSMLAKSVHDAGWSAFIATLAYKAADAGRQLVYVNPRGTSQTCLCGAPVPKTLSQRWHECGECGWSAARDHVSAQLILGLGLSLLGLT

SEQ ID NO: 39605 - protein, 384 aa, unknown
  TnpB Polypeptide
MITYKFRMYPKKTEKEKMEIAREVCRQTYNHLLSELNEGYSKNEIQNTLLDLKIIYPEMNRVHSKVLQMENQRLFGNLSSLSQLKKKGHKIGRLRFKGKNWFKTFTYNQSGFRLTHLRAKKGILWLSKIGDIPIKLPRQIEGNIKIVTIKKLNGKWFASIVTDAVIKREHGNGEIGIDLGIENYIYDSNGNAYENPKHFDKYHQDLKIAQQCLSKKIKGSNSRRKARLRVAKIHEKIANARDDFIHKLSAKLIRENKFIAIEKLNIKNLIGISYNAKNIADASWGRLACFLHYKAESAGCVVQDVDPAYTTRDCNFCGHRNRKLFLWQRQFCCEECKKELPRDYNSAINVLARGKELASMEKASNTEQFVQQDVSMKSEAITST

SEQ ID NO: 39606 - protein, 378 aa, Escherichia sp.
  misc_feature (64)..(64): Xaa can be any naturally occurring amino acid
  misc_feature (74)..(74): Xaa can be any naturally occurring amino acid
  misc_feature (118)..(118): Xaa can be any naturally occurring amino acid
  misc_feature (151)..(151): Xaa can be any naturally occurring amino acid
  misc_feature (170)..(170): Xaa can be any naturally occurring amino acid
  misc_feature (173)..(173): Xaa can be any naturally occurring amino acid
  misc_feature (315)..(315): Xaa can be any naturally occurring amino acid
VKRLQAFKFQLRPGGQQECEMRRFAGACRFVFNRALARQNENHEAGNKYIPYGKMASWLVEWKXATETQWLKDXPSQPLQQSLKDLERAYKNFFRKRAAFPRFKKRGQNDAFRYPQGXKLDQENSRIFLPKLGWMRYRNSRQVTGVVKNVXVSQSCGKWYISIQTESEVXTPXHPSASMVGLDAGVAKLATLSDGTVFEPVNSFQKNQKTLARLQRQLSRKVKFSNNWQKQKRKIQRLHSCIANIRRDYLHKVTTTVSKNHAMIVIEDLKVSNMSKSAAGTVSQPGRNVRAKSGLNRSILDQGWYEMRRQLEYKXFSEKPEDAGETSATVKPQGQIQQKLAEAETQNTATAFLYRKYPQGLPSQSHNDRQQKPRNDSH

SEQ ID NO: 39607 - protein, 278 aa, Halobiforma sp.
  misc_feature (19)..(19): Xaa can be any naturally occurring amino acid
MHGALHWPTTRPLWTLVQXFRASQPVTVSDDARGTPLADHKAALDIGANNLVACTTTTGEQYLYEGRELFQRFRDTTREIARLQSKLREGRYSSERIRRLYRKRTRRRDHAQEALCRDLLERLYEDGVDTVYIGGLTDVLETHWSVKTNAKTHNFWAFKQFTERLACTAEEYGMSVEVRSEAWTSQECPQCGSTERTTRHQDTLTCPCGFEGHADLTASETFLKRHTEQAVRPMARPVRFEWDNHQWRSTTDASSNPKEQRTDPSTVHRDGNVASGES

SEQ ID NO: 39608 - protein, 544 aa, Sulfurihydrogenibium sp.
MDNLTLSYSLTLPQSIYPHLDYLMSINKRQIKNYLKDLWNNETLSKLTEKAKALAVLKKDTKRTDKWIPSRVYRNSLELTGQILRSQIERKQIYEFIANHPCTIVYNENYLAKYLEKSPLFILNIQRQLKKQIKKGYIEKDYLKAVKPDFNADIFISSADDSIENGQFKKLEFYKKKGLWFMKLKIKLPITNQKFKWFEIKKAVSNKIAKLLNKEAKPKAPLIKKELLSNGYEIFKLIIPFEIKINTPKVEKIEEEKLLSIDLSPSENRLAVATVVEEKGHSKPAFFKAKRIIRKIDRIQKEIDRLEKKIDHIANNIHTTTNKTHKEELQKRLQHLYQEQKRKQKKIKQIRKEVLEIFTNWIIEYARSYGIKVIAIEKLSFKNIPNWKISKAIKRFTDWFYSKVKDKLEYKAKIKGIKIIEINPANTSRYCHKCGEKGKAEKLVFKCECGEYDRDYNASVNIGKRAIKIIKRIKEETGKSKSQEQGSRDTPARNPFRQGLASFRSLLSIKPLTQLVAYSSLVEVSAIKLKKLSKWIDLHDYGYG

SEQ ID NO: 39609 - protein, 345 aa, Clostridium sp.
MFKVLEENWKSYFASVKDFGANPSKYKAKPRPPKFKNTDKNKNEIIFTNLAIRHNDGLLKLSLSKAIKSLFNVESLNFEVPKKLQSIINWNSLQQVRFNYDKVQKYWSLIVIYNKEELANNKTNVMAIDLGLDNLATLTLKDGLNQYIFCGKKLKSVNAYTNKQIAYLQSIEMFKYGSDKFKNTKRINKIRRYRNNYINDYMHKVSKSIIDKAIENNVGKIVIGKLKGIKQNMDFNKTFVQIPIQRLAELISYKAKLQGIVIKFQEESYTSGCSAFDLEPITKKNYDKSRRVVRGLFVSGYGLINSDINGSLNILRKSEKCIPNLVQTMRDNGKLDSPKRIRVAC

SEQ ID NO: 39610 - protein, 370 aa, Aigarchaeota sp.
MVKECIKYALSHNVSSPMKVERALYEEFKQKYGFATHYCISAARVACNVIRSWKRLVKRRRADPNNPPTFNALSMRLQKELMRFKGDRIVITTMPHRYVEVPLIIGSYQKRFIDAWRNGELSLGEVTLLEDRAMVTFKRAVEDKIPIGYASIDVNLMSIDFLKVKGDSAEYRKVDLKKLYGIRVHYFEKRRKIQSLSKHKPITSKRLMQKYSRRERRRVNDILHKITTSIVKELSQEGLAPIFENLKGLSYNATRNKRTKRKNRKVASLPYRKVQSLIGYKMAWLGYKVQYVPARNTSRACPRCGRLSKTNGQVFRCKHCGYEADRHFVACINILRMWGHGFAPKALDEMIEREGLGRGNESNKALRTST

SEQ ID NO: 39611 - protein, 426 aa, unknown
  TnpB Polypeptide
MPTTRRTHICRIQNHGQVQDALDKHGWSASKLWNVANYHARQVWDDTGEIPDEAELKSEVKTHPKYKGLHSQSSQKVLEELSEAFTSWFNSADSRDNPPGYRKQNYYDDEGRRVHEEHPRSTVTWKANGFRHDTKHNRFRLSKGRFHKPSPRARDYILVEYQAPPEVELENVQQVRAVWNSDKQGWELHVVCKHEIAAESPGKKVAGVDLGICNVAAVALPNEALLYPGNTLKEDMHYFTQQEYDTEGENGPSNEAQRLRETLARRTDHFLHALSKDIVERCATHDVGTLVIGDLEGVNEQDWGRHGNKRLDNWPYKRLTSLIDYKARERGIEVEVRDERGTSSECSQCGHEDGDDRVERGLWMCSRCEAVANADVNGADNIRQLALTTTPPLGSSEEDSGTGCLAQPHVIHFSRTRGFQLRATAG

SEQ ID NO: 39612 - protein, 363 aa, unknown
  TnpB Polypeptide
MNKAFKFRLYPTEEQKKMILMTLGHNRFLWNRMLQDKQEHYAFYQTHLYNRPAQYKDTYPWLKDIDSLSLANTQLALEKAFKAFYAKKSEIPKFHSKKQDYGYTTNLVNNNIEIVDGYLKLPKLGKIKMNKHREIPSHMTLKHVTVSKTPTDKYFASLNFTYERDTIDIEVKETLGLDFSMTHFYVDDRGTKTEYPQTIQMDFLKLKRLQRSLSRRTKSSSNYKKKQKEIALLYERIQNKRDDFLHKLSNTIAKGYDSVTVETLDLIKIAQSNKHFAKQIQRFGWQRFITFLKYKLENQGKRFIQLNQWYPSSKTCSSCGEVHGELKMQDRVYQCPSCNYSIDRDINAAINIKRQGLIILGIA

SEQ ID NO: 39613 - protein, 481 aa, Mycobacterium sp.
  misc_feature (360)..(462): Xaa can be any naturally occurring amino acid
MPKFEVPDGWTVQAFRFTLDPTEDQAKALARHFGARRKAYNWTVATLKADIQAWHASGTVTAKPSLRVLRKRWNTVKDDVCVNTETGVAWWPECSKEAYADGIAGAVEAYWNWQTSRAGKRAGKRVGFPRFKRKGRDQDRVSFTTGAMRVEPDRRHLTLPVIGTVRTHENTRRIERLIKAGRARVLAISVRRNGTRLDASVRVLVQRPQQPKVVHPGSRVGVDVGVRRLATVATADGTAIEQVENPRPLGAALRELRHVCRARSRCTKGSRRYRERTTQISRLHRRVNDVPHPSPARPDDTVGSNPRPHCCRRLGRDRDVAAKRVAGCPRSSARTVGCGPGHSASALVLQDSLVRVGAGXXXXXXXXXXXXXXXXXXXXXXXXXXXXXXXXXXXXXXXXXXXXXXXXXXXXXXXXXXXXXXXXXXXXXXXXXXXXXXXXXXXXXXXXXXXXXXXXXXXXXXXKITHLQRSPRRCSSSASSP

SEQ ID NO: 39614 - protein, 593 aa, Mycobacterium sp.
  misc_feature (99)..(143): Xaa can be any naturally occurring amino acid
  misc_feature (459)..(567): Xaa can be any naturally occurring amino acid
VTEVGSALNGHRRKFLALLRDPSVKRIVVEHRDRFCRFGSEYVEAALAAQGRELVVVDSAEVDDDLVRDMTEILTSMCARLYGKRAAQNRAKRALAAAXXXXXXXXXXXXXXXXXXXXXXXXXXXXXXXXXXXXXXXXXXXXXKAYNWTVATLKADIDAWQATGIQTAKPSLRVLRKRWNTVKNDVCVNAETGAVWWPECSKEAYADGIGGAVDAYWNWQNSRSGKREGKTMGFPRFKKKGRDPDRVTFTTGAMRVEPDRRHLTLPVIGTVRTHENTRRVERLIAKGRSRVLAITVRRNGTRIDASVRVLVQRPQQPKVTDPGSRVGVDVGVRRLATVATADGAVLERVPNPRPLDAALNELRHVCRARSRCTKGSRRYRERTTEISRLHRRVNDVRTHHLHCLTTHLAKTHGRIVVEGLDAAGMLRQQGLSGARARRRGLSDAALGTPRRHLSYKTGXXXXXXXXXXXXXXXXXXXXXXXXXXXXXXXXXXXXXXXXXXXXXXXXXXXXXXXXXXXXXXXXXXXXXXXXXXXXXXXXXXXXXXXXXXXXXXXXXXXXXXXXXXXXXLKITHLQRQRCLTKGRRTRFTSLAWA

SEQ ID NO: 39615 - protein, 398 aa, unknown
  TnpB Polypeptide
MLSFKYRVYPSKKQIFRLHGQMQLARELYNILLEKCKEHYKETGKTFTQFDMNNYIKGLKKERPEFSDIHSQVLQNISKRIGDAYKAFFRRAKEKKQGKKVKVGFPRVRKFVSSLTYPQTGFKFKSQRRIYLSRIGSIPIVLHRLPKGQIKICVIKQYRSGKWYIGFSSDIPQKEFKPNNKPSIGVDVGLKDFVTLSDGEKIESPKFLRKSEKKLKFLQRRVSKKKNGSKNRRKACLKLSRQYEKIDNQRYDFLHKLSRQHVGSYSKIAVEKLQIQNMQKNHYLAKSIADASFGKYIQMLHYKAWSAGCEVIEVNPKNTTQECSNCHKIVEKDLSDRMHNCPSCGLSIDRDINAALNILNRATVGLTGSNACGDLSSTPSAMKEQDISSKQELNEVRT

SEQ ID NO: 39616 - protein, 239 aa, Sphaerotilus sp.
VALFAATTDGECVAPLNALKRQQKYLKRVQRSVSRKVKGSNNRRKAIERLGRVHAQIAAQRSDWLHKQTTRWANEHPVIAIEDLKVAAMSASAKGTATEPGKRVRQKAGLNRAILDQAWGEARRQLDYKTAARGGAVVPVDPAYTSQRCSACGHTAKDNRPTQARFECEACGHSENADLNAAKNILAAGHAVWVARPEACGAEVRRAGPERGRRAAARKQEPAEGSAAQAIGSVGIPAL

SEQ ID NO: 39617 - protein, 238 aa, unknown
  TnpB Polypeptide
VKGSDIMAEKAYKYRIYPNKKQQELIQKTFGCTRFVYNYYLDKRIKTYEQDKMTFTYNMCSKDLTQLKKELIWLKEPDKDSLQKSLKDLDMAYQKFFKEHSGYPKFKSKKNRHKSYKTKNTNNCLGFENKHIKLPKLGLVKVRDKQIPQGRILNATISQESNGQYYCSLCCTDVEFVQYEKTSQNIGIDLGLVDFAILSDGNKIDNPRFYEKSEKNLLNCNENYQEKQLVVIVGIKQE

SEQ ID NO: 39618 - protein, 295 aa, Nitrosococcus sp.
VLIPGERLRLPKLGPVRAAWSYRAIAVMPNSATVSRNACGQWFVSLQCNGIDVTYPPMTDKTIGLDLGLSTLVAMSDGRKEKPRRFLKNALRRLKFAQRRLAKAARGGNNRCKQRSRVARLHQGIASKRANFLHGLSTSIVRENQAIAMEDLNVRGMMANGKLARSVGDCGWYELRRQLTYKAKWYGRQLNIVPRFQRTTGVCPDGGTVGEKLPLRVRSWTCEHCGSAHDRDIAAARVIDLIGNTVGARELMPVDWHTNRRRLSLDDGHYPRAGLKQEKRGERERRGALSPGRER

SEQ ID NO: 39619 - protein, 377 aa, unknown
  TnpB Polypeptide
MQLSETIKLYMTKEQKEFVVMTMTEYINTVNSLVSDATNGISISKYTTADVNANLPSALTNQCIRDAKSIVKKYHKACRDADRKNAKLAKQDKNITVTAALPILKRPCCYINNQNFKINGDCIEFPVMMNGKSKRLSVRTKMSDKQKSVFTHSKLGTMRIVYKGNKIVAQVVYETTEPIYNTEGSVMGVDLGIKCPAVSYIFDGSVKFYGNGRKNKYMRRHYRCLRKKLQKTKHIDAVKRVNDKEQRIMKDIDHKLSHDIVETAVAHNIKTIKLERLANIRSTTRTSRKNNHSLHEWSFYRLAQYIEYKAKLAGIKVEYVNPAYTSQKCPVCGHVHHANDRNYTCKCGFHIHRDLLGAMNICNSTEYVGDSNIRHTA

SEQ ID NO: 39620 - protein, 344 aa, unknown
  TnpB Polypeptide
MGCAVNRIWNNANETQQLAISSEHKWPSSFDLNNDTAGWGKHLNIHSDTVQETNQQYIKSRTQFKKPYLRWRSNSKSLTWVPFKARAIHVDFTLGSARYLGINFDLFYHRPLEGTVKTGSITADSRGRFYLNLVCELPDFVGPTGNHKVGIDLGLKSVVSLSDGISVESPKYFRMMQNKLAKAQRAGKKKQTRNLHAKIKNQRLDFNHKLSNTLVNSYDVLYVGDVKSSDIIKTKSKGMAKSVNDVGWFQLKSFLLYKALARGKVCQEVSEKYSTQTCSECGTISTASPKGVAGLNIREWTCAECGVSRDRDTNAAKNILRSGTRSLPSKNLDTKLSLVGSPGL

SEQ ID NO: 39621 - protein, 569 aa, Ferrimicrobium sp.
MKRTVRLATLPLNKGKYDELCLVIGHYTDAKRVFVAHLRQTSLWRLLDRSKSFRDYAKARGLYPEGINVHLIDQAAFDAVDTCIRHIESCFAIGNIKAKIWRRFTDENERHYAYACLARYSAIGQIMGGGIPEIPTVAIPPDARAKIASYLHRVIRDALGSSWPTVVKARSMSLDSTLYSVVDNETAKGKTRRYVKVISSTHHKRISLPLSGISRVSGNIRVVLDEEHRRAFIHVIYDLARLPKATGPAVALDWGITEVCTDSSGVHHGKEYGPALRSMAERRNKTGKARNRLHALSKRDAGSRRTKHIARNNLGTKKQQARTRRARAQLKTISGAAIKEVVYGEGNRTRAKKRVPQLPSQRPREIIIEDLSRLQGKARSKNISRLCSSWARNENQERITVHAYVGGSGIKTVNAAYSSQTCPDPTCGYVHSGNRHGDVFHCRNPYWDCNWQGDVDHVAAMNLLNRIEDREINRFTPYREVKKILDERFLRRLESRVGARIVPLGTTGNGVRGTCVEDGATAHGRTPSILRQPKLDVGGGQPPTRPSSVPVDGAEHSKAAGERRQKRCI

SEQ ID NO: 39622 - protein, 399 aa, Mycobacterium sp.
MRDRHCGDARYVWNLAVEQFRYRERRERGTTARSAPGPAARQRQLAEARQEFEWLRGGSSSVQQQALRDFDRAAQACFDGNANEPTWRKRGKSEGSCVRDTKVVVHSRAWAQIAIPKLGWVKFKLSRALPAGKLGMARITCRPSGRWHVSFPAPQPVIADAGRTGKSIGIDRGVATTIATSDKQMFRAPRMRKREERKLARLEREKARRRKGSARRKAVVQRIAGLHETVADRRRDWIEKITTRIAAHYDFVAVEHLPVRNMVRKPKPKPDPDHPGQYLPNGAAAKAGLNKCIYANCWGMFACRLAQKVKASGTTLVAVSARYSSQECRNCGHTAKENRQSQAVFLCVVCGHGDHADHNAAQIILARARSAPTPGPGAIPQGVGTARCAHERENQGWAA

SEQ ID NO: 39623 - protein, 414 aa, unknown
  TnpB Polypeptide
MVRGTREAGKISKRGPSAEVVGVFQTWVLPFMLCLFAWGPVFSQSGWLLREVPRLIAKGRSSMPTTFQAFKYRIYPTDEQVEIIEKTFKCCRFVWNHFLEQTSKIYERRQEKMTTFDCMKVLTEMRERWPWLADCGCTAERYAIIDLFEARKAFFRRIKAGEKPGYPKFKGASHPTQSFTTAGTIYVTNDYIQVPFGGQYQKINKLRRGTGRPIEGSPREVTISRSATGKYWASVCCKVERDTLPIVDGEVGISLGLKELAIDSNGVHYENPKHLSKSAKRLAREQRRLSRKKKGSVNYEKQRRKVAGVHEHIANQRNDYRHKISRELVNANQLIAVEKVAVKPLVEGNEQAKSILDAGWSELTGMIKYKADWAGRTLVDVDTATVAPEAKHDEALAQVVLSEGQRMASEQKPA

SEQ ID NO: 39624 - protein, 310 aa, Bacillus sp.
MYETHIKNGTLPPIIFGGRKNFYERMKDKISNQEWKDLRTRQLYSRGDKSKKGNLNMRITVDDCGQGWLEIANPLGRTNGKTKSPRIKVPIMIPYRFYHQITNVVMGKQIGVNPKGKPIIEHQKYSVEIIRKQNEFYVNITFDETEIGRVLDFKETPQSDVIAGIDVNPDRIAVSLCTKQGNFKGSKIFYLHNLNTFSTNKRATIIGQIVQQIKTWLLENNVGGIVLEDLKFQQSHDTDKYSNRNFHQFTYKKMLNSLIRMALRNGFSVKTVNPAYTSVIGKLKYSKNFGISVHEAAAFTIARRGLELQE

SEQ ID NO: 39625 - protein, 355 aa, Okeania sp.
MKSIKTKLKVNNYQKTILAKHAGVARHAYNWGLATCITEYEATKKRPSAITLHKRLIAEVKSENPWYYEVSKCAPQQALRDLERAFKNFLTIPKRGFPKFKKKGKKDSFYLEGSIKIQKGNYIKLPRIGIVKTYEVLPSVPVKNVIISKRAGNWYISFKYDHQSNPTTKERDIIGVDVGINALATCSDGTKFANVKAYKQSQKRLTRYQRRVSKKKRGSKNRIKAIKKLARLHKKVADIRADTLHKLTTWLAKNHSTIVIEDLNVSGMLKNHKLASAIADCGFYEFKRQLIYKCEWYGTELVIADRFYPSSQICSHCGHQQKMPLHERTYNCANCGFQADRDFNAAVNLESYVNK

SEQ ID NO: 39626 - protein, 220 aa, Okeania sp.
MYSCQQVLVGKNPELIPILTFLCEQSHKLTNMGIYYGRQLFFKSHKTLGKFDLEKVYKHNYHYKVLYSQAAQQILRTVAESFRSYYSLIQAYREGKISDRPRIPNYRKKGGMAAVSYPAQALKLKGNQIRVPLGNTCKRWFGLDCFLIHKPSNLAFSTLKELRLLPRNKCFYWEFIYEKEVVKPQLDRDNVLGIDHGLNNWLTCISNVGTSLIVDGKQIK

SEQ ID NO: 39627 - protein, 352 aa, Okeania sp.
VVDRSFKSFFNLIQKAQESLYRWEQIRIPRYLKKEGYFPLIIPRIKVINGYFNIPMSRKFKTEYGAVKITFPERLVGKNLKEVRIIPRYDARFFKSVAPPQEAVEFITEEQPQPKVKSDNALAIDLGLNNLATCVSNIGSSFILDGRKLKSINQWYNKENSRLQSIKDRQSIKGNTKKQISITVNQNNKVRDYLNKAARYLINWCSENQIYTIVVGVNPGMKKNITHPHPLQGGEQEGGYQKFVQIPHHSLRLKLKTMCDRYGLTYIEQEESYTSKASFLDGDRIPLYNADNPSEYSFSSKRIKRGLYKTKQGKLINADCNGAANIRIKSNLNGFTPDRRLGIFGYAIKGKI

SEQ ID NO: 39628 - protein, 380 aa, Okeania sp.
MKSIRTKLKLNNKQKTLMAQHAGYSRWCYNWGLSLWNAAYKDGYKPNARKLRKVFTNHTKPLYPWMKNLSSKVYQYAFINLGEAFKRFFQGLGKRPRFKKKGKSDSFTIDNCGKPIELNGWSHKLPFIGIVKTYEPIEATTQKITISRQAGDWYLSCRGERPFAPTNEFTPTSTPKTTEVVGVDLGIKTLATLSTGEVFESVKPYKKAQNRLAKLQRQLSRKVKHSSNWYKAVVKLAKQHRRVANIRRDALNKLTTYLAKNHGIVVIEDLNVSGMLANHKLAKSIADQGFYEFRRQLEYKCQCYGGELVVVDRFFPSSKTCSSCGHVQDMPLNIRTYDCPECGLSIDRDLNASINLRNAVGLTVNACGRSAADSSGGSRK

SEQ ID NO: 39629 - protein, 441 aa, unknown
  TnpB Polypeptide
MKISTTYSAKIKHYNDIFKETVRLYRAAVDFFLMVCDSEWDAISSLEGSKRKLQFIEKLTHTTARRPVVEYCFEADFYKFPSYLRRAAINEAVGKYSSYRSNLANWEAEPCGRRPSFPKAGYVYPCMYRKNMFCLTGDYTAKVKVFIRNTWDWIEIKLRKSDMDYIRRRCSERKACVPTLQKRGKEWFLDFAFEETAALNDVPVAGRTVLSVDLGLNSAATAVVMRADGTVAGRHFCSLPVEKDCLSHALNRIKKAQQHGARKTPRLWARANGINHRIAVRTAQFIIDVAVLYNADVIVFEHLNLNGRKHGSRKQRLHLWKSRHVQSIVADKAHRLGMRVSRVNAWNTSRLAYDGSGRVLRGRDSQKTSSSYSLCEFQSGKVYNCDLNAAYNISARYFIREILKSLPATERLAIEAKVPPCAKRSTCTLSTLISMHAVLAA

SEQ ID NO: 39630 - protein, 422 aa, Deinococcus sp.
MSVRVLKLKLRTVNRGKFARLTAMQREYAACAQFHLEGIERLQTTNATALHRELYVPAKERFTLPVVNLQRARDKAIETFRSYLARKAKGKRANVPQFGPGLPLGVGQRALAIVGRTLRLSTEKARDYLWLPIEVDDRHAPFVDAVAAGTLKYGASELHRRGKDWYLHLTVYEDVPNTVESGVVLGLDLGVANTAVMSGPGLVRFWSGQAVRHTRNRYSARRRSLQKAKLMGEVRRSKGKESRWMRNLNHQISCQILGEVAQQGAALAIEKLLGIRDRVKLTRKVNRMVHNWAFGELIALLHQKAPRYGVRIVEVDPRHTSQGCSKCGHTEKGNRLRQDRFKCKACGYAVHADLNAARNIANRGALMLGYTSSVTGALTVPGGVKSTSVSREFGDGQAMGVEAEGSSDQLKQSQVATSLSSW

SEQ ID NO: 39631 - protein, 603 aa, Deinococcus sp.
LAHSPVTKPFHVAGFTSIGPRSQNCCRDAPVFKPGRNWSAARRAASEAEAGMLSLCVPAASSPTFTCTFVVRVSAGETHELERRFELARLLYNRLLQDARLRLKRLQNHPLWTGAWDALKTWHKEKKTALTALPKSSPAAKKVAREFDDRKKILSGQMSAARKAVGFSEYALHALSTRVRRTRCHLGSFSDLDANTVQKLASRAFRACNEVLTLKRGTPRFKSMGQALGSVEGKTNISGLIFKASDATLRWGSLKLPCVFDDTDAYHQHAFEFRTKYVRLLRQTVRGKVRYSAQLVCEGKPFQKRPSEVASGAVIGLDLGPSTLAAVGDEDALLTPFCTELRTSAVTLRRHARKLDRQRRANNPDNFKPDGQIVRGKKLVWVSSAKQKQTRARIAELHRRQAAHRKTLHGKLSNDLLSLGTVFRVEKLSIKAWQKLWGRSVLRNAPSMFLLLLSRKAESAGGTVQWINPFAAKLSQTCVCGHVQKKALSQRWHTCNQCGASVQRDLLSAFLARHTDPETSMCVGPGLAWTPGVDRLLSLAHTEALQQTASADLKISTFGIGPRGTHRSQSGSANDVSGDLVVSALNPRPRKCGEGRAARTLAL

SEQ ID NO: 39632 - protein, 436 aa, Natronolimnobius sp.
MFRLGIYTHGYFFISFNYYAHVLVVVTTTATKTLEATLVPPTTGKEQRLERTVATYRRALENAFESGADTQSAVNDVVTPYTLTSYAKDALKNYVPQLRRTYNASELEDDHPVRFTNRGFRIDHSDEREHEFCWRVPQAGRGNAFWIPLRINPKQESLWFDLFDEDETVGEFRLQQHRTNWVLHVTVEYDVAEPETLDDPTRIGFDIGESKLLTGCACQNDTPTQPYICDGGRARALRKEMFTTLKRLQERDAAEWRIDERFDHYQNALTDIVEKASREAVEYAKSFEDPVIVLEDLSYIRENLDYGKYMNRRLHAWAFARLTKRIEDKALEAGVPVEFVNPRYTSQTCHECGHIGSRGSQAEFKCTNAECWVTEYQADINAAANIAGRFDPWGESVPWKPERDDSPRNGCRCDTATGHRTPSRQSRQTTLAVFES

SEQ ID NO: 39633 - protein, 416 aa, unknown
  TnpB Polypeptide
MQRAYKYRIYPTEEQEVLLVKTFGCVRVVWNWALDVKSTAYKEHGESISTNTLINRMKAELKAEKEWLGEVNSQSLQMSIRNLGTAYGNFFRGTARFPKFKSKHDRQSFQCPQHCSVDFEHGTISIPKAKDIPAILHRRFRGEVKTVTISRTTTGKYYASVLVNDSVVAPKKPTTSAEQTTIGIDAGLKTFAVLSDGREFKNPHFARKEARKLKLLQRRLSKKTKGSCAYRRVKQRIARLHERVTNRRTDYLHKISHQLTHESQVRTICVENLNVKGMQRNHHLARSVSDVSISEFMRMLEYKCEWQGVRLVKIGRFDPSSQLCHVCGHRYSGLRLSDREWTCPSCGTHHDRDLNAAINIKNFGLGLNEALPSVRGKVKPVKQPPVDDRCPVQPKKQRCAEAGKAKVHRDPKPRSL

SEQ ID NO: 39634 - protein, 371 aa, Brasilonema sp.
LSRLHPHGQGETLEHREPSAQKWARSDRAREGRRIIPPLDSTNWGLATWGSLYKHGYKPNKFILKKFFNHSVKTKLEWIKEKGICQKITQYAFDQLGAAFDRFFKGNAGYPKFKNKGINDSFTIDASGKPMPMGGTSVKLPTIGWVKTYEGTTTTTTTKLTISRIADEWYIAFAYEVDCVESHSTHEVVGVDVGVKELATLSTGVVFANPKAYKKNIQKLKRLSKAHAQKAKGSSNRHKSKIKLARHHAKVSNIRKDSLHKLTNHLCKNHAVIVIEDLSVSGMMQNHKLAQSIADCGFYEFKRQLEYKCKKYGCTLIVADRWYPSSKICSSCGHKKESLSLSERVYVCDKCGHTLDRDLNAAINLSRRALA

SEQ ID NO: 39635 - protein, 506 aa, Brasilonema sp.
LAARTSSFVCEIPLVATSKDIAILAVRLEAGRQLYNAVLSEGKNRLTLIRNSELYQQAKAITKTDKKSRSTAFQKAREAYRFSDYDLQAFANKTAIASVWIKSHLDANTIQKIATRAFKALERMMFGQAKKVRFKQKGQFASLEGKTNKQGIRWTGKAVEWSGLKLQAIMTNDPVILHGLNSKIKYVRLVRRILNQKNYWSAQLVCEGKPYQKPKNTIGDGNVGIDLGVSTVAIVGDSETIWTPFVVELTSKQKEVRKLQRQMDRQRRAGNPDNFNSNGTLKKDKKRWNKSNRYKKTAAKKREIERKQAAHRKSLHGKLVNQTLKLGSNIKTEKVAVIAWQKKWGKSIGVKSPSSFQSELKRKAENAGGTVLMFSTRKTALSQTCLCGNTQKKSLSQRVHNCSKCSLKMQRDILSAYLSRYVDPKTETLSIQLARDGWLGMEQSLLDGWHNGSNQSTRTAASPKSPTFNSGTEWMFSDSIACEESEPVRVNETYAVSWNPPDLSVG

SEQ ID NO: 39636 - protein, 457 aa, unknown
  TnpB Polypeptide
VYNQYNIVGELSSVRRLSFLVTPQHPDFQVFHEQSVQSRVLYNMVNAIARTLYFHNSKHDYGSGIYTIAEQLNYDVTNAKPSYSYMGLLSIAQHLIDNGFFTPPLSFGTKAIQQTIRLLAHNWASYWGMWKAYKRGTLSDRPSIPGYLRDYAPVIYNNQMISKKLLKQGIVRPMPTVVKQGFELPEHIKPSAILSARLIPRAGGQYFELEILYQEHAPQQASGSVTAGIDIGINNLYTIAFDDFTEGLIVSGKTLKHINQAFNYFIDDHRSKLAKHGLTEVTKIERRWWENRRRRLYHEYTTLNNRTVDALVARNVGTVIIGWNDGFKKNSNMGRCNNRKFVSLPHKKIVDNLAYKLESLGINVILVEESYTSKASFIDNDALPVFNKDTNVKYTFSGKRRHRGLYITKHGCRINADLNGAFNIIRKHVPGFSPQADLMVKDAVVYPVHTLQGFHKH

SEQ ID NO: 39637 - protein, 349 aa, unknown
  TnpB Polypeptide
VYYILREDFPTIPSQGIIKIYKECISAFRSINSNGHIEHKIPEKKNCSMRLDKRLYSKLNIDSIALCSAKSNHRAVAEIIKFPRLVELFKKYPTQDPLIFKCNGKFYLSIPFNAPEIPVQNENCIGVDLGERRFAITSDGIMFNDKEYNARRRKLRYLKRCLQKKGTKSARKHKRRLSVKEQNQATDMCRTMANAIIGSTDSSIIVLEDLSGIKQKTSKTKTGFKKKNHNRRIGQVPFYKFKQILSYKALLNGKRVETVSPFMTSQTDCTTGKKDGTRKNRRFYCSNGIILDADWNGAVNIAQKSKHPFSFKMPLDGALRTWKAGCKSATQSYIRLPMETVGAVQARTL

SEQ ID NO: 39638 - protein, 465 aa, Haloferacaceae sp.
MTGADIPRSNPIFYNTTVHNKLWKRSTMHIHRTYRATILNHCEVDESLDWHGWSASKLWNVANYHSRQIWENTGGIPDDSDLKSELKTHNKYKGLHSQSSQRVLEELAEAFNSWYGKRKSDHRANPPGYRKKNYYDNKGRRVHEEHPRSTVTWKQKGIRHDTKNGRVRLSKGANHKEHPRAWEYILVEYETRPGVTVENLQQVRAVYDKEKGRWELHLVCKQEVETPDAPGEESAGVDLGICNFAAVAYSTEQADLYPGNRLKQDGYYFPKEIAKCDDSGGEGATRLHKKWSERRTHFFHSLAKHIVEKCIERGVGQINVGKLAGVREDENGDSKNWGRHGNLDLHGWAFDRFTNILEYKAKVEGIDVVKIPERNTSKTCCMCGREDESQRVERGLYVCEEHDDAFNADVNGAENIRLDINQSNSESPASLGEDRSTGWLAQPGVYLHDLSRGFQPRAEVVGCKP

SEQ ID NO: 39639 - protein, 357 aa, unknown
  TnpB Polypeptide
MKRACKVSLKFATERKQRQIVALIQSYRSAVNYYIKILWNSNRKRNAGILALLKGSRISERYKQAALKQAWDIVIATKKSAKAIGKPRSVPVFGGQAILDSRHVVIEDGKHAFDLVVKLSALKSGKRITIPTRHTAMTRKWLLKPGAKFIQGCALSETSLTLWVDIPVQSDKTIGRVLGIDMGVNKLMADSDGNFYGRDFKNISSKIRRKKPKSKAKQRAIKERDNFIGRSVNQLPWGKLKAIGVEDLTGIKTGKKKGRGKSFRKAMAPWIVSQVVNRISNKASENRVRLVKVNPTNTSRTCPICRGVSKENRKGEKFQCVACGYKGDSDHIGALNVLAKTLVTLGSLQSPRQRRVA

SEQ ID NO: 39640 - protein, 402 aa, Microscillaceae sp.
VQLVERHIIKKSHEVFKQIDTLSFLSKNLYNAGLYEVRQFFFKEGGYLSYNTLQKKFQNEKNVDYYSLPTKVSQQILMVLDRNFKSFFNALRAFKLNPKKFKEKPKIPKYKHKTKGRNLLVYSIQSVSAPNLKKGIVQVSGTTFGIKTKQQKIQQVRIVPRANCYAVEIIYNSDKKPRKDLNKKLIAGIDIGLNNLVAVTSNKAGFKPFLINGRPLKSINQFYNKQKGYLQSKLPNGRKSSNKIQALTFKRNCKIDDYLHKASRQVIDELVKHKIGNLVIGKNDGWKQEIKIGKVNNQNFVSVPHARFIQMLTYKAELEGIKVRLTEESYTSKCSFMDNEQICKHIQYKGRRIKRGLFKTAKGFLINADVNASYNIIKKVAPKIFNGVEAVVVQPYRYFSIK

SEQ ID NO: 39641 - protein, 262 aa, unknown
  TnpB Polypeptide
LPKIPAIRANIHREIVGKVSSITITRNAAGKYFASILADDGQEAAAKPTCITTVAGYDLGLSHYLIGNDGDKVANPRHLVNAYRRLRRDSKALFRKKPGSANRRKARLRLAAQHERVANARADFQHKLSRRIIDENQAVIVETLKSANMMKNRRLARHIADAAWSGFVAKLAYKAESAGVHLVKLDQWFASSKTCHCCGHKMPEMPLRVRAWKCPGCSADHDRDINAAINIQHKGITELMAAGHVVKAHRGLRKSGSMPVAA

SEQ ID NO: 39642 - protein, 354 aa, unknown
  TnpB Polypeptide
MIIRKLKLKLNKSQEQTLETWLWNLTGVYNWSIRKIELDAQNKIYYSGFDFQNLLAGHSDKLDIPSHILQGTLTQAHSAWSRCFKKIAKKPKLKSIRNKLNSIPFPDPIRSPKGNRINILGLKGLKFHKQSLPEGKIKLGRILKRPSGWYLCLWIDATHTFPVKMTDKVVGIDPGFHTLLTLSNGTKIENPRELRKGSERLAQAQRGGRKKLASRLQEKQANRRNDRNHKISRNLIENYKTIYYSDDNFKGMSKLFGKSIAEASLSNLIGMINYKGRLGGRSIIPVNSKHTTMTCLTCWSLTGPIGLNGLAVRHWQCSDCGSVHDRDINSARVIANVGSGFDLGVLESSIVGDR

SEQ ID NO: 39643 - protein, 250 aa, Okeania sp.
MNGEALYLNFSVTITKTPTRNYYASLLFDTEQQTPEVVLTGKIIGIDLGLKDFCITHDGSKTAKYTNPKCLKKHQKNLARKQANLAGKKKGSKSRQKARQLVARVHERISNTRQDFLHKLSRKIVNDNQVVVVENLNIKGMICNHKLAKAISDVGWGIFVNFLDYKLQQKGGLLVEIDRWFPSSKTCCNCLYQMSEMPLEMREWTSPNCGTHHDRDENASKNIRAEDIRQLSVLEGLLLFVQRSVGKEGK

SEQ ID NO: 39644 - protein, 499 aa, unknown
  TnpB Polypeptide
MQTAWKFKLDPSNVQNKTMSEWQALVGRFYNFCLADRIHSYKQTMVEGAYCDIRNQPKIYVLNSEDDFAAHPITCSVNKSASVGYPWKSTNPALRKAKDKTKPQNPKRSAYEMHSSLIAEWRQIKPEYKGVSADVLQQSLRHLDKAFSNFFNQSFGYPKFKQHCQVGFEFKPATVRINGNYITFPVLGTMQFFKSREIPQGWEIRTTTIKRDADGWYVSILFRDETIPDIPCLNDSEIKSVLGVDVGIKKIASFSDGTTVTNPQFLKKLQRRLEIRQRRLSRRKKGSRNRAQAGKQVAKVHQKIRRQREDFQWKLAKKLASTADVVAFEDLNIKGMKARCKPKKDELTGRYLRNNQSAKSQLNKAISDAAWHSLRLKTEYQASKLGRRVVTVNPRYSSQECSECHYISPKNREGEKFVCEQCSHHADADIDGAVVIAQRAAQSLGNKVPVVSRKLTLKPESTGSCKGEISLPLGGEPGNPLKARYVQMSLFDLEEWKTG

SEQ ID NO: 39645 - protein, 419 aa, Dolichospermum sp.
MLRVVKVRLYPDAQQQQSLARAFGSCRWLWNYFLNLMNETYKETGKGLSGYEVKKTIPQLKKEHEWLSLTYSQCLQQVCLNLGVAFNNFFEKRARYPKFKSRHGKQSIQYPQNVKIADNQLILPKIGKVSAIIHREIEGKIKTVTITKNCSEQYFAAILFEDGKEKPESIVEGKAIGIDLGLTHFAITSDGSKFDNPRILNKHEKNLKIKQQQLSRKQKGSNNRNKARKKVARVHRKITNCREDFLHKLSRRIVNESQVIVVENLHVKGMMQNHCLAKSIQQVGWGMFCTMLKYKAENEGKIYQEVDRFFPSSKTCHVCLNQVSSLPLDIRFWTCEKCQTKHDRDVNAAINLRDEGLRILTSGTGDKAMKCGLGGFPHEQLHQEACRPEVSRSNRGRKKSTTVLSVGQEAHTVPSGQCG

SEQ ID NO: 39646 - protein, 380 aa, unknown
  TnpB Polypeptide
MIKSYKYRLYPSNAQIRLLDQTLEICRGWYNTCLAERKEAYEAEKRTVGKYEQLRRVKELKRSNPYAANVHSHILQVVVQDLDKAFQAYFRRVKAGEEPGYPRFKGRNRFDSFGLKEYGNGFKLDGRRLRLSGIGRLRVRWHRPIEGTIKTIRICRQAGKWYACFVCEVMEQPLQPTGQSVGIDVGVHHLLATSNHEVVENPRWYRYAQAKLRILQRRVARRSKGGSNRRKAVLALQRQHEYIANSRRDFLNKLAHSLIDRYDFIALEDLQIKGMVRKRHLSKSILDAGWGYLKQRLIDKAAEAGRQVILVNPSYTSKTCSSCGVLYEGLSLADRWIECSCGLSVDRDVNAALNILWVGQTHWGKSTDDGLRLPQEAPPL

SEQ ID NO: 39647 - protein, 671 aa, unknown
  TnpB Polypeptide
MANELKRAPWYNDNIESLNKRLWTPNGNLITKNNVKFNSKIIEFSSFKNTVLNKLNNYCNIDDLNRFKEMRQHYINILIRLLNDKKINHKLYEEYMNTKELNYLNSNDYKEDHNIINFKENSNNIQDCYDKLFHEYKKEEQIFEQLTEQNLKIVNINVNSYQKQYNEITKSFHSKKLALIRKQKKCTDIFNDYISRTYNNKLYGKNINKYLNDNAIEDYNKQLSIFKAKNYKLTKKYNNSIKMINKSIRSYKMKVKFNNEQKTKIFKWMDEADKVYNYCVNLYNTDKNFPSNFKGGKMYVFNKLYVKGEQKSAPYDLLSYVIKVYYENLSSNYSSLENKTKTHFEMKPINNNKNRTITIVKNGIGFNGIYSSILGINNKNKKFNNDNIACDCKLTYNRTTRKFYLYVPQYIEYKQTNYKKKPICAIDPGEKVFATYYSLDDYGCIGNDIRKPILDIQAKIKKYQRLLSQIVKNGKNYNKKNKKGKPINRTKIRKKIKRLFEKISGIVNELHKKTAYYLCRNYNIILIPEFQTQKMVSKSDMNKQSHESQKQNKLNKEAIKEQNKDNNNNLRHELKLYKRKSRLNERVKFVLNHQAHYKFRQHLLSKAKEHGCLCIVVTEEFTSQLCGNCGGLDSTYIGRTKRCKHCNHQINRDVNGARNILLKYISNYIKH

SEQ ID NO: 39648 - protein, 402 aa, Escherichia sp.
VKRLQAFKFQLRPGGQQEREMRRFAGACRFVFNRALARQNENHEVGNKYIPYGKMASWLVEWKNATETQWLKDAPSQPLQQSLKDLERAYKNFFQNRAAFPRFKKRGQNDVFRYPQGVKLDQENSRIFLPKLGWMRYRNSRQVTGVVKNVTVSQSCGKWYISIQTESEVSTPVHPSASMVGLDAGVAKLATLSDGTVFEPVNSLQKNQKKLARLQRQLSRKVKFSNNWQKQKCKIQRLHSRIANIRRDYLHKVTTAVSKNHAMIVIEDLKVSNMSKSAAGTVSQPGRNVRAKSGLNRSILDQGWYEMRRQLEYKQLWRGGQVLAVPPAYTSQRCAYCGHTAKENRLSQSKFRCQVCGYTANADVNGARNILAAGHAVLACGEMVQSGRPLKQEPTEMIQATA

SEQ ID NO: 39649 - protein, 423 aa, unknown
  TnpB Polypeptide
MPSTKTIKQTLEHRFLEWFKTTEELFNEVTAFYFGIIQDHELILELSNKEALTELERFTHKTKDNPSPSFPLKWDVPAMFRRACINTALGAARSFFSNLNKWKDAKARTESKGKKFTDRPPIPPREWHRDILFYTGQYKDYRGTNIMLKLFDGKTWRWVKFHLTGRKFPDGWEIGCPHTVIKKNRIELHFPVEKENIKVQKISEQTKDPELKICTVDLNIGDRLAVCGIFKSDGTQVATRFICGGNNLNGRRKRLLGIIATKRSLTSGILPEDIQDNKNLWNKIQHIDDYEAHRVSRRIVEFAQEHSASIIVFEHLGNFRPEKGKYSKWGNSKRSYWLRGKIYHYAKYKAWEHGIITSRVSPKNTSRKCSVCDLDVARHGEKDKPEGYRPGASLFTCKCGKKGNADLNADRNIAKKFFLRYAA

SEQ ID NO: 39650 - protein, 379 aa, Pyrobaculum sp.
MACKTDKLIATVKAKVEPTPELIELLKRYRDGLNMAIRWAVEAARAKGRPPTLSKIYRAVYEQLRTMGLPSYIASACYREALAIVRSYLASGARGRMPVVNTLHMWLHKNAYRVRDGYLYVTGGYKARVVGIEEKYKEGEWKEAKLVYRGGDMYLYIAVEVPKPMLVKPKGVIAVDINERYVYYGNSQWVKKVETPVEKAMRLRELAEKLQRRYSAPRYTPWNRRGGIRERIRRLHKKARDIVEDWAKKTAKRIVEEARERQYAVAVEDLTGLKEAIRELTKEHRVGLMLLAYRRLLWWMKWQAAKRGVVVVEVEPRGTSTTCPKCGGKMEEVGHRRVKCVKCGFEAGRDIVAIYNIEKRAREKLGNPSFSPLAVLTPS

SEQ ID NO: 39651 - protein, 294 aa, unknown
  TnpB Polypeptide
MYHATQAGANDVVVDSDLSGYAKNALKKYVPQLKTTYNAGELHDDHPVRFTNEGLRLDHKPENAIEWYVKIPHHEDYHLWMPAQPNPEQRDWLEALNAGDAEMGESRLFERDGTWYLHVTATRDVEERSEVSAEERTPIGVDIGEASLVTVCHRDDHGSPTSPELWTDEGKTVRRLRKTHFTATRRLQQRGSERIADSFGDGIWNQIDDVFHTVTSEVVEYAESVENPVLVLEDLTYIRESMDYGEYMNRRLHGWGFAKLHAQIRYKAVEKGIPVETVNPRNTSKECHACGEVR

SEQ ID NO: 39652 - protein, 395 aa, unknown
  TnpB Polypeptide
MQVRYRYRIYPTPGQQQALARAFGCARVVYNDCLRLRDSCYAAGEKINDTEVQRRVITLAKATPERAWLAEVASVALVQACQDARRAYKNWFDSLTGRRKGPKIRHPRPRGKRGRQSIRLTRNGFTLHGERLYVAKVGNIKVEWSRGLPSVPSSVTVIREPDGRYYASFVVERAATPLPACDRDVGVDLGLTSLVVTSDGETVGNPRFYRTAQRRLRRAQRVLSRRKKGSANRAKARHRIAVVHRQVRNARLDHAHKAALRLVRDNQAVYAEDLCISGLARTRLAKSVADAGWYQLLRLIEEKAAQYGRTFGKVGRFEPTSQVCSACGLKDGPKPLSVRQWTCVACGIVHDRDVNAARNILALGRRERLNACGTGVRLPLAVAAGAEAGTRRSAA

SEQ ID NO: 39653 - protein, 381 aa, Halomonas sp.
MTKRAYKYRFYPTPEQAELLAQTFGCVRFVYNSILRWRTDAFYQRQEKVGYVGANARLTELKKDPELAFLSEVSSVPLQQCLRHQQTAFKNFFEGRAKYPVFKSKRHRQSAEFTRSAFKYRDGKLYLAKSKTPLNIRWSRELPGEPSTVTVSKDSAGRYFVSCLCEFEPSKLPVTSNMTGIDLGLKDLFITDQGERVGNPRHTAKYAARLAKAQRRLSKKKLGSANRAKARQKVAKLHAKISDCRQDNLHKLSRRLINENQVICVESLKVKNMIRNPTLSKAIADAGWGEFVRQLAYKAEWGGRSLVAIDQWFPSSKRCSGCGHTLSSLPLTVRKWNCPECGANHDRDHNAATNIKAAGLAVLALGENVSGMASVSMSCSR

SEQ ID NO: 39654 - protein, 429 aa, unknown
  TnpB Polypeptide
MNTVHVYHLHSLSQTQFQRLKAAQQEAAQVWNRCCTLHKDARMAHAKWPGRDALQKATKGRFALHSQSVQMVVHAFLATIDTTRQLRQTHPQMRMKYPYHEKQFYPVHWPAQAVSREHGRVVLPMGRGRASLVLPVELPEHSGACTLVWNHGFELHVCVEVPQREQAPGDVHATVDLGEIHLAAVTTNTGKALVVSGRGIRTLKRHRLQRVGKIARKQKRCHTGSKRWRRLQRARNKVCRRSERRVRDVRHKATRQVIDFCVHEQVGSLFIGNPHGVRTRNGGRRHNQRMALWEYGKDIAYLTHKANVSCMMSFTGSERGTSSRCPACGHQHKPRTREWHCKKCGFSGHRDVVGSVNMHPLAFGEQVMFPRSVTYRRPGPLRRRSRADTPLASSDACCLSEARVQPPVADRASTEAGVPRAVVQKLLPF

SEQ ID NO: 39655 - protein, 495 aa, Thiomonas sp.
MQRRKVTLKLYPNAAQMARLEAWTRLHCELYNAPLEERIDAWRKAGKSISDYAQQNALPQIKADQPELNELGSHALQQTLRRLDLAFAAFFRRVKAGQTPGFPRFKAAKRFSGFAYPDPAGWKLMQHGGRGATLRIGSGEAAMSIRARGLHRFGDQAKPNDITLTRKGGGWFVSVTLRVPESACARQRAAGMRRGVDFGITDWATFDDGRAIDNPRWVREELPRLAALQRQRARKKNGSLRFKRLGRRIARLHDRISNLRRDFVRKETTKLVRQCAVLATEQLAPKTMSRSAKGTVDAPGRRVRQKAGLNREILSAGFGMAHPMLAYKAEEAGTRLHLSNTRQLKPSQRCSACWEIVPKTLAECMHVCPHCGHVMPRDRNRASVVIIDAFNTQHTHGTGVAARPKPRPRQRGKSKPVTRETPATTPCVERRESSLLNANQMETNRGDPFTATCSQPAGVGAALRSGGVLPLGGPLRLERLGVHPYQCQASGLRCW

SEQ ID NO: 39656 - protein, 425 aa, Thiomonas sp.
MQRRKVTLKLYPNAAQMARLEAWTRLHCELYNAALEERIDAWRKAGKHVSYYDQQNVLPQIKADRPEFNELGSHALQQTLRRLDLAFQAFFRRVQAGQTPGFPRFKAAKRFSGFAYPDPSGWKLMQHGGRGATLRIGSGEAAMSIRARGRHRFGPDAKPNDITLTRRGGQWFVSVTLRVPDAACARQRTEEQRRGVDFGVTDWATFDDGQTIANPRWVREELPHLAALQRERARKRNGSLRFKRLGRRIAKLHDRIGNLRRDFVHKETTRMVQQCAVLATEQLAPKTMSRSARGTVETPGRRVRQKSGLNREMLSAAFGMAHQMLAYKAEEAGTRLHLSNTRQLKPSQRCSACWEIVPKTLAQREHACPHCGHVMQRDQNSALVVLIDANTPGTGVAARPKPLPRQRGKSRSLTRETPTTAPSGA

SEQ ID NO: 39657 - protein, 400 aa, Thiomonas sp.
LYNAALEDRIDAWRKAGKSISDYAQQNALPQIKADRRELNELGSHALQQTLRRLDLAFQSFFRRVKAGQTPGFPRFKAAKRFAGFSYPDPAGWKLLQNGHRGATLRLGSDSSALSIRARGQHRFGGDAKPNDITLTRRNGQWFVSVTLRVPEEACARQRTDDQRRGLDFGINDWATFDDGQTIANPRWMREELPRLAALRRQRARKRKGSIRHRRLGQRVARLHDRIGNLRRDFVHKETTRMVRQCAVLATEQLDAKTMSRSARGTEQEPGRRVRQKAGLNRELLSAGFGMAHPMLAYKAEETGTRLHLSNTRQLKPSQRCSACWEIVPKTLADRMHVCPHCGHVMQRDQNSALVVLIDAHNTQDTPGTGVAARPKPRPRQRGKSKSVTRETPTTTAQAV

SEQ ID NO: 39658 - protein, 412 aa, Thiomonas sp.
MARLEAWTRLHCELHNAALEERIDAWRKAKRSISYFDQQSVLPQIKADRPEFNELGSHALQQTLRKLDLAFAAFFRRVKAGQTPGFPGFKSSKRFSGFAHPDPAGWKLMQHGGSGATLRIGSGETAMSIRARGRHRFGGEAKPNDITLTRRNGQWFVSVTLRVPDATCARQRTADMRRGVDFGINDWARFDQGPLIANPRWVRDELPHLAVLQRQRARKRKGSLRHRRLGQRVARLHDRIGNLCRDFVHKETTTMVQQCAVVATEQLTPKTMSRSARGKGEAPGWRVWQKAGLNREILSAGFGMAHRMLAYKAEEAGTRLHLSHTRQLKPSQRCAACWELAPKTLAQRVHVCPHCGHTAPRDQNSAMVVLIDAHNTQDTPGTGVAARPKPLPRQRGKSRSVTRETPATTPCV

SEQ ID NO: 39659 - protein, 428 aa, Thiomonas sp.
MQRRNVTLKLYPNAARAARLEAWTRLHCELYNAALEERVVAWRKAGKSISDFDQQNILPQIKADRPEFVELGSHALQQTLRRPDRAFQSFFRRVKAGQTPGFRRFKAGKWFSGFAYPDPAGWKLMQHGGRGATLRIGSGDTALSVRARGLHRFGDQAKPNDITLTRKGGGWFVSVTLRVPDAACARERTADMRRGLDFGINDWATFDEGPPIANPRWVREELPRLAALQRQRARKRKGSVRHKRLGHGIARLHDGISNRRRDFVHKATTRLVQQCAVLATEQLTPKTMSRSAKGTAETPGRRVRQKAGLNREILSAGFGMAHPMLAYKAEEAGTRLHLSNTRQLKPSQRCAACWEIVPKTLADRMRVCPHCGHVMQRDQNSALVVLIDAFNTQDTPGTGVAARPKPLPRQRGKSRSVTRETPATTPCV

SEQ ID NO: 39660 - protein, 516 aa, Thiomonas sp.
LDVRSHCRPRHGHELPQERAQAPAGRHHWRRSRALGHHAQRRPAALWRGTRVRDLRGQGRGSRHSQPRGGRDVRGRFGEGRSGDHHRVFGAAVWKPLAQEPEAHRRRARRCGRHGTMILAHKIALDPNNAQATYFARACGVARFAYNWALAEWKRQYEATKADSALPKPSQMSLRRQLNAIKREQFPWMLEVTKNAPQMAIIQLGEAFNNFFKKHARYPTFRRKGVHDRFTLTNDQFSVEGSRIRIPALGWVRMREPLRFEGKITSATVSRVADRWFASIAVETQDTSHLAQAENQGMVGVDLGIQALATLSTGEVVHGPKALAMLLARLRRTSRSLSRKVKGSANRRKARAKLAKLHARIANVRQDGLQKLSADLTRRFSTIVLEDLNVRGMVRNRHLARAVSDMGFAEFRRQVEYKAAMRGGEVILADRFYPSSKTCSGCGHVLDVLPLSVREWTCPACGAAHDRDHNAAVNLKNLAASSAVSACGEEGSGARRKARVKPASTKQEVSFDHVCA

SEQ ID NO: 39661 - protein, 433 aa, Thiomonas sp.
MQRLQAFKFELRPNGPQQRQMRRFAGSCRVVFNEALALQRARHERGEKKRGYARLCKELTAWRNGAPLPSGRVAPWLAEAPVHPLQQALKDLERAYTNFFARRTDFPRFKKKGQGDSLRYPDPRQIKLDAGNSRIFLPKLGWLRYRNSRDVLGAVRNATVSFSAGQWFVSIQTEREVEQPFPSATRAIGIDVGIARFATFSDGAFLPPLNSFRTHAVRLARYQRAMSRKVKFSKNWRKAKAKVTKLHQRIGNARGDALHKATTTISQNHAMVCIEDLQVKNMSRSAAGTAERPGRNVRAKRGLNRSILDQGWAEFRRQLDYKLAWSGGCLIAVPPHNTSRTCPCCGHIAADNRRTQAQFKCVACGYANHADVVGALNILARGMEILRDEGQDTAHACAGRKSAARIACEVSGAVRPPAAGTRRSDSGTVQCRT

SEQ ID NO: 39662 - protein, 356 aa, unknown
  TnpB Polypeptide
VKALCVKPKLNQYTFNYALKKLKEEYPFLKEYCHSQVLQQKVMDLYEAFKKFFKGTGGYPKFKKRHSDDGFRYPQGFKVEEDNGRIFLPKIGYIRYRNSRKIEGIPKNVTVREEADGWYVSIQCEFELKPEISIPDIDTAVGIDMGVKRFLTLSDGNFIESLETRLKPLEDKIALLQRRIKHKVKGSNNIKKAYLKLTLLHKRKADIRNDFLHQVSTLLVKSHDVIVIEDLKVRNMSKSAKGSIANPGTKVKAKSGLNRSILNEAWHKFFTYLEYKLKLKGGILIKVNPKHTSQTCIKCGHISKDNRKEQGIFKCIKCGYEANADHNAAQNILRRAGLARMACQANLIRGRQQEPA

SEQ ID NO: 39663 - protein, 399 aa, unknown
  TnpB Polypeptide
MDTSTFGHVILIFLIMREMLMAVERVVRITMPRESEFLETIRVYNEVCNFFLKIGHAAKRFNKGYLQRCGYQQARAIWPSLRSSLVQGARDQAADILQRNGFERLSRKNPWSAIRFNRRTFTPFLSTGIMSVSTVTGRKRIRITVPEYFSQYLSGEIKSFEMRAEKRRIIGHLVITVPDHACRVPHNPTVLGIDRGIINIAVLSDGRFFGGAEARNIRGRHRYLRKQLQAAGTRSAKRHLRRLSGRERRFQLDLNHRITKNIAAMAFDVVAIERLHTRPSKSQGREFNSMIGGWAYGDFARKLKYKCNWQGRVVLEVNPEHTSKTCSRCGHLGTRTGSTFRCRICDFEINADLNAARNIAQRGKAMLGRVPVNHPNVTRVVIGHNAHLGYKSSMLVDGS

SEQ ID NO: 39664 - protein, 249 aa, Shewanella sp.
KFKDGNIYIAKSKQPLDIRWSRELPSEPTTVTISKDSAGRYFVSMLCRFEPKPLPVTKKTTGIDLGLTDLVITADGFKSGNPRHTAKYEKKLAQAQRRLSKKKKGTANFHKARIKVARIQAKIADCRRDFTHKLTTTLINENQVISCESLSVKNMVKNPRLAKAIGDANWGEMVRHLEYKAEWRGRTLVQIDKWYPSSKRCNCCGHVVDSLPLHIRHWTCPACEARLDRDTNAAINIKAAGQAVLACGA

SEQ ID NO: 39665 - protein, 277 aa, unknown
  TnpB Polypeptide
VLFHLSLEKEVEIYRPGNIKPVDVNENSVTTLYEAFAIILETDLARTTLGYSYRKESIQRRNGSDSRETRKAMKKLREGKKKKDHRMKTANMIVRDALRMRGVIVIERISGDDIRVMIARYRNKQLKHRIYQSALKGELNTIIDKAREYGVPVLMVDPRNASKICPIHKAVIEYGEDRIGICSKGGERWHREVVALINIYLKTLEALYEGSAQKGFGVSTLDGSPMPLGSTATHEPIEIPRSLWGKWKSLDDHRDVITSLWIKKQGNPKQKNISDNQ

SEQ ID NO: 39666 - protein, 214 aa, unknown
  TnpB Polypeptide
LTIASNTGETLIIDGKKLKAINQQYNKHNSALQSLKDKNGVLGQTKLQKRITRKRNNRVNDYIAKACRRAIGFCIDNGVGTLVFGYNKGWQNESGMGKVKNQQFVNIPFAMIKEKLSYLCELYGITFVVQEESYTSQASFFDRDFIPVYGETGAGDVKFSGWRVKRGMYRAANGYKFNADVNGALNIMRKSKVVGLTILYCRGEVDTPKRVGVA

SEQ ID NO: 39667 - protein, 464 aa, Mycobacterium sp.
MTRHTTFEFCLDPTVEQRDALFRHAGASRFAYNQCLRMVQAALSARRADEQVTVPRSGFDLINAFNRWKKSEAAGRVWAVSNDGAVELVSTGLAWRYEVSQQVFEEAAVDCARALTAWSDSLSGRRRGRKIGFPRIKKKKGTRPRFRLRNTQRKGRRPTIRVGDTGRTRSITLPQIGVVAVRDDTRRLRRMLAQNRARIPFASVSNRAGRWWVALNVEADDLHPSHRHPARSEDDHGGWVGLDRGLTAYAVAAEADGTMVARIGAPPRALRGAMTRQRRLARRLALRKRGSRRHETTLLKLRRHHHRVANVRRHFLHEISNSLVKTHDRLVLEDLNIRGMLANHRLAKSISDAAWSEFARILTYKQRWRGGQVVYANRYFPSTKTCSRCGAKRTDLKLADRIFSCECGHTADRDHNAAVNLARWAQRTHGTDRFPDPKQEAGSPMPVDETAASSISLMLATPLR

SEQ ID NO: 39668 - protein, 488 aa, Desulfotomaculum sp.
  misc_feature (217)..(217): Xaa can be any naturally occurring amino acid
  misc_feature (232)..(232): Xaa can be any naturally occurring amino acid
  misc_feature (234)..(235): Xaa can be any naturally occurring amino acid
  misc_feature (253)..(253): Xaa can be any naturally occurring amino acid
  misc_feature (373)..(373): Xaa can be any naturally occurring amino acid
  misc_feature (383)..(383): Xaa can be any naturally occurring amino acid
  misc_feature (392)..(392): Xaa can be any naturally occurring amino acid
  misc_feature (404)..(404): Xaa can be any naturally occurring amino acid
  misc_feature (408)..(410): Xaa can be any naturally occurring amino acid
  misc_feature (417)..(417): Xaa can be any naturally occurring amino acid
MIRTYQLKHQANKSKQTEIKAILDEYRVLASKIAVRQWHLFFTKGGFNKNADIKTISTRLSERYKQTCQYQVVGSLESFISNRKNDFVDRVCHSSLDVRTKTDLLYINKHGKWFNDSIKIPVFGDKGKKVKGEYREISPEVIRLARKIFKHILSKHRKPTMGRINMALDQKVAVIKTRNNNGAKKFDYWVRLSTLDKGKPVYIPVQSNEYFEDIPGXLKNFCQFNLTKEGKXTXXFIKDKPKSKEYKPLTPKXALDLGLKSIFTTDRGDLFGRKFYETLLKYDGIITELARNRQKQGLKVRSPRYDRLVSKLRSYLKNDICRIVNRIVKLYCPKEIVIEKLNFQNPNLSRRLNRLLSRFGKAVITAKLDAAAXEYGIKVTYVXPAYTSQTCXSCGYVDKSNRSXQAEXXXRYCGYKXHADVNGARNICVRSSDEIGSVYKSKKLVLRILVERFTGRLEREPCRCSTAKDLILRNPYFKDYWDKFKEVS

SEQ ID NO: 39669 - protein, 368 aa, Thermomonospora sp.
MPQLVKRAYKYRFYPTPEQAEELLRTFGCVRLVYNKALEERTRAYTQEGRRVSYVESSAALTRWKKTPELAFLNEVSSVPLQQALRHLQAAFANFFAKRAKYPTFKSKKKSRASAEYTRSAFRWKDGRLFLAKMDGPLNIRWSRPLPEGAQPSTVTVSRDAAGRWFVSILVEETIAPLPPTGSKVGVDAGITALATLSTGEKITNPGHERRDRRKLAKAQRALARKAKGSANREKARLKVARIHARITDRRRDFLHKLTTRLVRENQTVVIEDLTVRTMLRNHSLARAISDASWREFRSMLEYKAQWYGRTLVAVDRWFPSSKLCSACGTLQEAMPLNVRTWQCPCGAVHDRDVNAARNILAAGLAER

SEQ ID NO: 39670 - protein, 261 aa, Escherichia sp.
  misc_feature (43)..(43): Xaa can be any naturally occurring amino acid
  misc_feature (250)..(250): Xaa can be any naturally occurring amino acid
VKRLQAFKFQLRPGGQQEREMRRFAGACRFVFNRALALQNENXLERAYKNFFRKRAAFPRFKKRGQNDAFRYPQGVKLDQENSRIFLPKLGWMRYRNSRQVTGVVKNVTASQSCGKWYISIQTENEVSTPVHPSALMVGLDAGVAKLATLSDGTVFGPVNSFQKNQKTLARLQRQLSRKVKFSNNWQKQKRKIQRLHSCIANIRRDYLHKVTTTVSKNHAMIVIEDLKVSNMSKSAAGTVSQPGRNVRAXKSQRPSAKTTQ

SEQ ID NO: 39671 - protein, 391 aa, unknown
  TnpB Polypeptide
MSYYKIMTQSISVKCKLIVHQELRREIDRTLDRFADACNQILDTAKVAKCWNVTKLHHLVYHPVRLSTGLKANHVCQAIRRVVSNAKAVKQIHKFRPTSISLDARTFKYDESNQVAGITLISGRVNLPLKIGGYQIALLRGQAPTSATLNKTRQGDYYINIVVEIDAPPTGKTPKVVGVDLGRIDIATTSTGKAWSGKQIQSVRDKYSKTRANIQRKRTRSARRLMRRLQGREQRFQSWLNHNISKQLVSEAKQLNAALAFEDLTNIRQSLNQQPRNKTERRRTNNWAFYQLRVFVAYKAIIAGVRVVFVPPAYTSKSCSRCGHVHPETDKKKSYRHGKKFKCGHCGFDHDSDINAACNIAALGRSVSSPESPGFSCRLEGQLDLFPIAAL

SEQ ID NO: 39672 - protein, 509 aa, unknown
  TnpB Polypeptide
VRFYDTVIRYRFTAENRVDVEQVERDLAQMIVWMTEAEREVFASTEFHDLALKVLRGDRPTGSLNSWGRKRLPRYDFEFQKHNMNEILVSNVVGALELYAMSVGLFQVMSTHPKETKPEKILSYYRSTYPDAPQPTSGMVRAHLRRYYLKGERKAPLPGVSAKLNLAVCDTHFAPKAFREDVDSLNVTIQVKTPSYGLIRLYLRLPENTDRFGEGKVCRPTIRLNSKGRVVFDVAIEHEAQQRDTNKVVGVDLGKVEPFVATVINPKDKHRSAPFHANYKRRLGSLVKAERKRRDLASHLYERADLCEKHSRDQHAQVLRTEAKRVGAKATRIKHEISQCIASQIVSIADQNNTHVSLENLSWLDAKGGRWPHAEIQSRIESTSKRYGLKTIKVSARDTSRTCSRCGGRVSNNSKSRVGTCTTCGFSLDRDVSASREIGLRAVSNARNRERMRSLLRQRALERSSAVTRQSKPVTALGGNQGHTGTPGEEPGATLMMVRETLDSRGSPT

SEQ ID NO: 39673 - protein, 380 aa, unknown
  TnpB Polypeptide
MLATYRYRLYPTKAQKRGLEATLETCRRWYNACLEERNTAWEERQESVGKFAQLGKVKNHRRDNPWAAQLHSHILQVTTTDLDKAFQAFFRRVKSGEKPGYPRFRGRDRFDSFGLKEYGNGFRLDGRRLRLTGIGRVPVRWHRPVGGTIKTVRIRRQAGKWYACFSCEVRPEALPSTGAEVGLDVGITSLLTTSDGEHIENPRWYRSSQARLRVLQRRVSRRRLGGSNRRKAIGALQAQHERIGNRRSDFIKKLVHGLVERYERIAIEDLQIPNMVRNPHLAKSILDAGWGYFRQHLSFKAECAGRVVAAVAPAYTSRTCSACGLSFENLTLAQRWVRCSCGLSLDRDENAARNVLALGRSAWGVTWPMAASVPQEAAGL

SEQ ID NO: 39674 - protein, 398 aa, Kribbella sp.
VSRFRMYPTPAQQAALLQQCRHSRSVWNLALEQWSMWTRDKPATPGFAEQCRQLTEERAAFDWLRAGSQTVQQQALRDFNQAVKNFHAGTHRRPTWRKARLHEGFRIVGAQASRIVKLNRKWAAINVPKVGWVRVRLSRAAPDAKSYRITADRTGRWHLAFAVIPPSIPAPGAGEVVGVDRGVTVSAALSTGELLSCPGLSERAKVRLKHLQRRLARCHRGSNRRRRVKEAIAKLNARAGDRRKDWVEKVSTDLARRFDVIRVEDLRIAQMTRRPRPKPHPARPGVYRSNRRRAKAGLNRGILANGWGLLVQRLEDKARGRVERIKPAYTSQTCSVCGHCAPESRESQAVFRCVACGHQAHADLNAAVNIAAGRAVSARRETPVQVSLKREPQLATST

SEQ ID NO: 39675 - protein, 381 aa, unknown
  TnpB Polypeptide
MRATVSAKIRINPTKEIVDTIKAYTKAIQFCVDYAWKHKITQNFKLHYPIYQTIRKKFKLPSQIAVACIRQACGMVKKAKSKPVIKRASVSYNFPRSANIKGDTLVLRLLKTRQEFKLNIPVCYKDYFSWDVKESLLRMDKKGRCFFLFTFSKEVSVTEANGCSQTPVLGIDLGVNNLAVTSDCQFFNSNKVKKIKRKFKFLRTKLQVKGTLSAKRLLRKISKRETRYMAWINHNISKQIVSNFNGNKIVMENLKGIRNKRRGKIMNYWISNWSFFQLQSFIQYKAVQKGIEVVRVKPNYTSQICHRCGQLGSRSKGCFSCFHCGLLNFNSDLNASRNLAHPMLVERQGAITHPNSLCDEYKASLTGIACEHKAKIPHTSV

SEQ ID NO: 39676 - protein, 442 aa, unknown
  TnpB Polypeptide
MKQRQHRQGQGQPQRITKAVTHIRLLEANSGKLAALDTLAPVFLSLCQQYVTLFCTDEQPDKFHPPVFPTPLSERWHRAAIQQAAGIAESWRSNRKQAYQDYIDELADYEEQRAAGTLDGIIHAPTWHEWDVPTLRQTCIQANINVVKLETSTDSTFNYWLKISTLDKRHPIQIPVKLAEYHRQALKGHTINSSVQLNRREDGWWLTLTYDEVVIIQTEPDAPVIGIDVGIANFLTTSDGKHYGTFNGKLRERHKRDREKRSRKAKLRACLKKKGVKKLPSTSSRSGQRLIRHVRQSINRAVNECFAEHPDAQFTYEQLSVATMRYKARAMNAYLRASNLAHIPKQIAWDAAKRGIRATRVKSAYSSQECNVCHYTHRKNRPNQQTFCCQVCGIKAHADLNSARNIERRMGDLELQACKDKKEIKALLMRRHEAWRKANGWP

SEQ ID NO: 39677 - protein, 394 aa, Archaeon sp.
LKKTILLNFLPLTSKKQNILDTFLAEYLRVLNLTLKQLPNANSSTELHHLTYSNIRKTSFLPSDIVEEARKDVWAKRKTVKEKFARCSVRLNKRWFKFFKTNRGTPSFKVTYSPRKHFVIPVRIDGSYKRFKDFLKAGWKIKTISLLNGKIAVNIEKDYPEVSDNKRNVIGIDIGSSTLAAVTVYDTRKVMVIKQLYLGRDVASRQRKYENRLAKLRSHADKGSEKAKKYMKRLKHKQANFVKTRSAQIAKEIVNLATKYNASITVEKLTIRGRRHRLNRKANRKINRIPHAQFREFVKSNCLTNGVSFQPVDAYHTSKWCPRCGMIVNSDRKASLAVAIKSALVRELQGLTRPFLISQFTRAGVAVNQLFRPDDGVLSGAVHLTQPLMESHLR

SEQ ID NO: 39678 - protein, 401 aa, unknown
  TnpB Polypeptide
MKEIHKSYKFRIYPTKEQEVLMSKHFGCSRFVFNHFLSVRKEQYLNDKTSLNYYDNASSLTQLKKEGETEWLREVNSQSLQAAIRNLDTAYKSFFNKQNQFPKFKSKHNKQSFNVPQNVLIEEGVLMIPKFKKGIKAKTHREIHGKILFATISKNTTGKYYASVTCEESYEPLKKTGKSVGIDLGIKDFAILSDGKVYKNIKPLKTRLKKLKYNQRQLSKKEKGSESRNKQKQKLGVVYEKITNIRTDYLHKISTEIVKNHDIISVENLNVKGMMKNHKLAQAIADVSWSKFNAMLEYKSKWNNKEYVKIDRWFPSSKTCSSCGWINQSLELKHREWTCDGCGETHDRDINASKNILKQGLNIINCVSGTDSQSKQKRNEALPSGESVTSETQIVALGVTG

SEQ ID NO: 39679 - protein, 412 aa, unknown
  TnpB Polypeptide
VKTHRALVFPVTWQSPLLDWLLREFRLLVNESIRIALKEDIRSRARLVRAAYKGLSATHVVYKQYIPSAFEVALSVLKAHRRRLKRGKRSSTPYIRKLMLKAENQSYRLDPKTGRLRIPIRAMEAVQLHLPLSEWHQSFLSDPSWGLGSLTVVPGKIILVVRSGAPRPYEPEAAIALDTNEDSLDGVVASGERMVPTALPFDGVRTVQETHFRRRRRLARKKAGDRRVMRRLLNREGQRERHRIRQRLHRISKRLVQFAESRRAAIVLEDLTLHGAGGRSRRMNRRLSSWRRREIHRQIEYKAALAGVPVIKVNPAWTSKTCPVCGARRRDRVGKVFVCEMCDWEMDRQINAGLNILKTAIASNEALARAVRFQPGALRHDAVSPLYDLPREGGGAREEPSGVESHPGRGLT

SEQ ID NO: 39680 - protein, 389 aa, Photorhabdus sp.
MLRATKVRIYPTPEQAVFLNAQFGAVRFAYNKALHIKKQMYNRHGVSLSPRKALKPLLAVAKKPRKYSWLKEYDSIALQQAVINLDVAFSNFFNPKLKPRFPTFKSRHGRQSSYHCTSIKVLDGAIKIPKTSPIEANIHRQIIGELKSITLSRTPAGKYYASLLCDDGMEAPVKPSQITRVTGLDMGLSHYVIKSNGDKTPNPRHLINVSRNLRRKQKSLSRKKKGSANRRKARLQLVGVHERVANTRADFQHKLSRAIVDENQAIIVETLKAANMMKNRRQARAISDAGWYGFITKLEYKAAEKGVHLVKLAQWFASSKTCHCCGHKVPEMPLNKRIWQCPECGVEHDRDINAALNIRRKGILELQTAGLVVSAHGGQRKSVTQTVAA

SEQ ID NO: 39681 - protein, 466 aa, unknown
  TnpB Polypeptide
LLDNESKDIAKSKKPKALVFDLAYRDKLLQRRFGKATRLTVLNNKAKAVAGRLLANVPGICFGSRKLFKQQFHLETTEFGAGDAGHAAWKRAWRDSRSHQFFLVGSGDETAGNQSCKASVVHAPPTTEIAARPTLTLAIKMPAALIAKEAPKFLKIEGVHFEYGNEQVLQALANGTALTYRFHSDNHSAVGWRVFVSTDTIDTKLTTLQANLGTLGVDFNADHLAVAKTDRFGNAVQFWHFDLPFTSKASGQRDAILSDALDKVFALAKEHKCPVAMEDLDFSAKKKELTKLGMKHARMLSGLAYASYKQLSLAKASRLGVELIFVDPAYTSVAGSVKYAVRLGRTVHQAAAGVIARRAQGYSEKLPKSDAKGEYTFRAPLMGRMAVLTLPVESSKRTHVSLAVIRRSLSRHCAEQVRLRKESTNGRCKRANVSSNLLDEDPSSSREPVKLLDRRAIPPDFTDVPL

SEQ ID NO: 39682 - protein, 373 aa, Chlamydiae sp.
MFVRKAFQFRLHPTKAQAKLLQAQLDECRWLYNELLSQRKMAYEELDMSLSKYQQLMFLPILKEERTSLKTVHSQVLQNIVDRLDKSFQAFFRRCKTEEKPGFPRFRGMHRYDSFCYPQSGFLVLGKEITFSKVGRIRMKMHRPIEGEVKTCTIKKTPSGAWDVTLSCEVKITQLEPLAEAIAIDVGLESFATLSSGDKIANPRFFKKGEKALAKAQRKLSKLQKGTKERRKTGKAVAKIHERIKNQRRDFCHKQSRKIVDQYQYICIEDLNVKKMIEGSHFAKSIADASWNQFRQFLTYKAAEAGRKLGLVNPAYTSQICSQCGHLEPKKLAEREHKCSQCGYTAHRDINAAQNILALGLDGLGEIPRSLRL

SEQ ID NO: 39683 - protein, 400 aa, Calothrix sp.
VQVRWNFKLKPTKTQSNQMSRWMVTLRKHRNYALRERETGYNTNNQDVDEPVVYAWGSWCDVESKIEYGSCCPLTCPVIKHGVVPHELTMALKKSKEKIDRKNGEIVKPSVVSWDSASGIQSKVTTQLRHERENFAEINSDVLQRNLARLDTAYSNFFKYGRGFPNYLRVLNSFEYKPGCIKLVEIKENYGIIYLPGIGNVKFHNSRDFSEILPGEVSPGKVSRQVIDTRTCTVKRKGGYWFISILVEIPGELPEVKPIEDVKSVVGIDVGVNKLAAFSDGSFAENIRPTTNKRTARRLRMRQRAISRKVKGSKNRKKAVERLSRTQHKLEQKRDGHNWQVAGAAVKKADVVAREDLKIKNMVKRAKPKHDAKVSGGSTPSGTFRGKGGYQKMVQVAKLV

SEQ ID NO: 39684 - protein, 414 aa, Desulfobacteraceae sp.
MFFVYLSIMPTIRKAYRFRLKTNRDVEEKLTRFCGSTRFLWNKSLAMNLERLEKKQGMLRYNELAFWLTLWKRSDEYSFLQECPSQVLQQKLRDLERAFMDCFDKSQPLKRMPVFKKRGSGDGIRFPQGFKIDNRRIFLPKIGWIGFYKSCTICGKVKNITITRRGDRWYASAQVEQTIETVKHPSDSEIGIDAGVKCFAAFSDGTMARGVHSFRKHEDRLAREQRKLSRKQKGSQNWKKQKKRISRLHHTIANVRQDFLHKLSTEVSKNQARVYVEGLHIANMSSSARGTIDEPGRNIKAKAGLNKSILDQGWFELRRQLSYKLSWEGGKLVEVDYRYTSQTCSCCGHRAKENRPSQAVFRCLACGHEENADVNAAKNILTVGQTGMACQANRVSGRQQEPAGNREEVLPVAC

SEQ ID NO: 39685 - protein, 512 aa, Mycobacterium sp.
MRARDTCAGELAAHGVCRAAFESVDELRYRQGGRVRDEQVDVVGLAVELDELGIEVGANLTHRGLAVGEHVVGEHFPPVFGHEHQVGVQQRHAVAGVAVGRWCQWAPLRLFSRYRIEPTPAQQQMLARVFGCARVVFNDALRVREQAYRAGVKLSDSEIQRRVITAAKTTTERSWLSEVPSVALVQSVNDSRRAWRNFFDSTSGKRKGRRVGRPRFKSRKDHRQSFRLTRFGFSIRGNSRLFVAKVGEVRVRWSRDLPSTPSSVTIIREPDGHYYASFVVEVPASPLPVVEQEVGVDVGITRLATTAATDGERSDIDNPKHLRRKLRKLARLEREKSRRQKGSANRDKSRRKVAVAHNQVARARRDYHHKQALALVRENQVIHVEDLNICGMVKNRRLARAISDAGWGQFVRIIGEKADRYGRTVHAVSRWLASSKTCSTPGCGHRLDELPLQIRQWTCPSCEVVHDRDHNAAKIILAAGRAERLNACGASVSPPNTREARGDEAGSTPTAA

SEQ ID NO: 39686 - protein, 374 aa, Saccharococcus sp.
VHKTFKFRIYPTKEQEILINKMFGCCRFVFNHFLAKWNETYEQTGKGLTYNACANQLTQLKKELEWLKEADSTTLQNALKHLDDAFKRFFQKQNNRPRFKSKKNPVQSYTSQCNYPKKGRPTIEVVGNQIKLPKLGWVTFAKSREVKGKILSATIRRNPSGKYFVAITCETEIKSLPTSEKAVGVDLGLKDFVILSTGKKINAPKYFRKYEKKLARWQRILSRRQKGGSNWNKARLKVVQIHEKIVNARRDFLHKLSTKLIDENQVICLEDLQVKNMVKNHHLAKSITDASWSEFVDMLEYKAKWYGRTIVKMDKQFPSSQLCSECSYQNKEVKNLNLRVWTCPNCGAHHDRDVNAAINILQEGIRLFTAGPAG

SEQ ID NO: 39687 - protein, 208 aa, Saccharococcus sp.
MPVIANLPVVWNECLRLAKEHFLQHGRWITKSELQKQTKRKFHLHSQSIQAVCHKYLFARQSAHHAIQQGHPARYPYKKKKHFPTKWAKDDFKVYENGKIELSMGIHHGKREKPIVVYASRLPKGTIKEIECCWDQGLYLAVTYEDGQKAEAYKQGSSVGVDLGEVHTIGAFCENGQALLITGRKIRSPYRLMLKLVRTEKDFCVQCI

SEQ ID NO: 39688 - protein, 407 aa, Saccharococcus sp.
MCYNQTIHQTKKEGILMLRGQKVFFRASKADLDRLYACNRESARVWNECLRLAKEHFLQYGRWITKSELQKQTKRKFHLHSQSIQAVCHKYLFARQSSHHAIQQGYPARYPYKKKKYFPTKWAKDGFKVYENGKIELSMGIHHGKREKPIVVYASHLPKGTIKEIECCFDHGLYLAVTYEDGQKATAYKPNFSVGVDLGEVHTIGAFCETGQALLITGRKIRSLHRLRNKKLAEIQRLQSKCQKGSRQWKKYERAKQYVLSKSERQLRDALHKTTKQFVDWCRAQSVSDVYIGNIEGVQRNTRKKKRLSRKQAQKLSNWSFGKVKQYLTYKLAPHGIRLHEIKESYTSQTCPVCQKRKKVSSRLFVCRCGYEEHRDVHGARNILSKALHGTFKHWNVQTKLMYLRIA

SEQ ID NO: 39689 - protein, 372 aa, Saccharococcus sp.
VDITLTAKIKISPTIEQAELLQQTLSVYRSACNYVSALIHETKILVQAKLHHMAYRTLRANYSMRSQMAQSVMKTVIARYRSLKSNGHEWTLIRFKKPEYDLVWNRDYSLVQRTFSVNTLEGRIKVPFETKGMEHYFDGSWTFGTAKLVYKHGKFFLHIPMTKDIPCVEDHHIRQVVGVDLGVNFLAVAYDSQGKTTFFHGQEIKHIRAKYKRMRKALQQKETASARRKLKKMGQREHRWMTDVNHTVSKVLVRQYGERTLFVLEDLTGIREKTERVHIHDRYETVSWAFHQFREMLEYKARLYGSKVVVVDPHYTSLTCPKCGHTEKANRNKRTHMFCCQTCGYTSNDDRIGEMNLQRKGIEYIVEGTAQA

SEQ ID NO: 39690 - protein, 385 aa, Saccharococcus sp.
MAKKKKEQLPHQSFKFRIYPTKEQAILINKNIGCCRFVFNHFLAKWNEAYEQTGKGLTYNTCANQLTPLKKEWEWLTEVDSTALQNALKHLDDAFQRFFQKQNGRPRFKSKKNPVQTYTSQCNYPKKGKPSIEVVGNQVKLPKLGWVRFAKSREVEGRILSATIRRHPSGKYFVSILCERNCCPYKPVSQGKAIGIDLGLKDFAILSTGEKINAPKYFRKYEKKLARWQRILSRRQKGGSNWNKARLKVARIHEKIVNARRDFLHKLSTKLIDENQVICLEDLQVKNMVKNHHLAKSITDASWSEFVDMLEYKAKWYGRTIVKMDKQFPSSQLCSECGYQNKEVKNLNLRVWTCPNCGAHHDRDVNAAINILQEGIRLFTAGPAG

SEQ ID NO: 39691 - protein, 407 aa, Pleurocapsa sp.
MKTYSFKLYQHKRNKHLHRTINAASNIYNHCIALHKRYYRLFGKHLNKNRLMKHIAKLRKKSEYWLLVGSQAVQDIIQRIDRAYQLFFKHHKKGVRPPNFRKRIKYKSFTLKQAGYKFVKTNQLKIGGKIFKFWKSRDIEGKIKTVTVKRNPLGELFVFVVTDYVDHQISTMTGKSAGFDFGCKIFLTCSEGFEIKSPLFLKQSLKKLRLASRSHSRKKKRAECTAPQALEATSREWRGSNGREKARQNLVRVHEKITNRRRDWFWKLAHELTDKYDYLFFETLSLKGMKRLWGRKISDLAFAEFLKILDFVATKKGKVVSYIDRWYPSSKECSECHHVLDSLPLDIRYWICPNPACNARHGRDENASKNIKRAGSLSLGLNGVRQSQTATVARTLNPPNLIHEASA

SEQ ID NO: 39692 - protein, 249 aa, Sutterellaceae sp.
MSDNELCWYLAFRTKLDPTKEQAEYFARASGTARLVFNWGLGQWKKQYEEYKNGLRSSPPKIKDIKKQLTQLKKEGEKFFWMKKVTKCAPQYALTDLGMAFEHFFDNPDDFKYPNFKKKGSSKDSFRLDNWQFKVENNRIHVPHVGWVRMHERLRFRGAKLLWATISRQADGWYVSITLELHDLDHLSPAKNHGRIGVDLGVLNFATLSNGLVFEGPKPLKKYSKKLAKLQRKFSRTEKKQPESCEASN

SEQ ID NO: 39693 - protein, 268 aa, Sutterellaceae sp.
LRSFSENFPVLKKNSRNRAKLRIKIARLHKKVSDIRLDAIHKLTAFLTANYSEVCIQDLSVKGMMRNHHLACAISDMGFREFRRQMEYKMKLRGGRLVIASRWFPSSKMCRFCGLRNKDLKLKQRLWVCPHCGRIIVDRDVNAAINLCNYIDRVDKKDSCSDSGSVAVSNQKRNAVTSESYPDVSPAGEDPSRLKATAERRGCQSTMQTCRKTLAGNDATDPGENSKAFYYGVGSDDWGSQWNSLPGSFGAEVVSKQTVNVQVCSEAQ

SEQ ID NO: 39694 - protein, 407 aa, Streptomyces sp.
MQLRYSFRLYPDSGQRTAVAKAFGCARIVFNDAVRAREDARRAGEAFPAVGKLSKKLITAAKQTASRAWLGEVSSVVLQQSLRDAEAAYRNFFTSLKGERKGVKTGAPRFKSRKDKRQSIRFTANARWSITDSGRLNLPKVGAVKVKWSRTLPAQPSSVTVIKDAAGRYFASFVIDTDPAADAARMPDTDHTIGIDLGLTHFAALSDGTKIDSPRFLRRAEKKLKKAQRELSRKQKGSKNREKARLKVARAHAKVADARHEFHHQLSTKLIRDNQAIGVEDLAVKGLARTRLAKSVHDAGWSAFVHMLEYKAARYGRTLVKIGRFEPTSQTCSACGIKDGPKPLNVREWTCTACGTLHDRDHNAAINVKTAAGLAVSACGAPVRPGLVPAQREETGSLGSPPETRAA

SEQ ID NO: 39695 - protein, 246 aa, Streptomyces sp.
VLPGPAVPGPRERFHEVAGRAGGAIPTCSPWRGPRSARAPEGGSDRPRFLRRAEKKLKKAQRALCREQKGSKNREKACLKVARAHAQVADVRREFHHQLSTRLIRENRAVAVADPAVKSLARTRLGTSVHDAGWARFLAMLEYKAQRYARVLVKAGRFEPTSQVCSVCGVKDVPKPLHVRTWTCTHCGTIHDRDHNAAKNVEQAAGLAATACRAQVRPELVPAQREEAGSHGIRTGVRAAQRHSTR

SEQ ID NO: 39696 - protein, 222 aa, Streptomyces sp.
MGRSVVVHKLNRRWSQVKVPGCGWVRFRLTRPELPKAKTFRVTLRNGQWHVAFAVIPVPVEAPGTGEVIGIGRGAKITAALSDGRKLSCPQLTVKERAKVRKHQRRAARAPKGSEQKTAGYAKVAKLKAREAGRRKDWCEKTSTMPARTYGLVRFEKLNIKNMTRSARGIAGQPGKQVQQKAGLNRAILAQGRGLLRQRTEHKAPGRVEDVPAPDDQPVPHG

SEQ ID NO: 39697 - protein, 404 aa, Streptomyces sp.
VLVGRKYRLVFTPGQVEMAEEFGNICRAVWNTGLEQRREYRRRGAWVGYVQQTREMAEAKAEQSWLKAAPSQVLQQTLQDLDKACRTHGAFGVRWKSKQRWQPSFRFPTPDRFSVERLGRKRARVRLPKFGWVTFRWSRPLGGSAKSATVSRDGNYWYISFLVETGTSGPTLSLERGRVGVDRGVVTLAATSDGRFFDRRFITPGEAERYRRLQQQLARTQKGSKRRKACQAKLRVIMRRVRDRRQDFHAQAACEVVDGNALVVFERLNITGMTATARGSVAEPGARIRQKSGLNRSILDKGWHSFELAVRNRARRTGAMVHTVNPAHTSTTCPVCGHVHPDNRKSQARFVCTACGHKEHADTVGAKNTLARGHAGHRAWRPRRQPVREAPTSVNPQGSSAPNP

SEQ ID NO: 39698 - protein, 440 aa, Streptomyces sp.
VTTECVWGKRQFGHRARLALTPAQVRVIDDQAHASRTMWNLLHDWWTMLPKHKRSLVRADAAIRQARKDLDRLAVLPAQAAQAVLKAYFQAWKNCWDGRADAPHFKSRIRSVMSVDIPQGRDLNIVRVHRRWGMVNLPKVGRVRFRWTKDLPVGKRAAKDSRITGARLVEGALGWHIAFRVQILEVEPEPHQGAEVGIDTGVNLPLALSDGNHFDHARPARLPDKTADRDRWLNREEKARLRFLEQRAAHRKSFRKKREPSSNRLRNTYDQIKQLRATATRRAVDWQHKTTTRIAEQHTTVVVEQLNITNMVKSARGTIEEPGKNVAQKAGLNRSIGQEAWGRMGTMLTYKLAHRGGTLHKVPAPGTSLRCSACGFTTPGSREGQATFVCKNSGCGFEANADWNAARNILHLYRIGHVAIPAAGRCSRQARKRVKPTTAR

SEQ ID NO: 39699 - protein, 421 aa, Streptomyces sp.
MFPLVVVGARSYDHRMQLRYAFRVYPDTGQQTALAKAFGCARVVFNDAVRAREDARKAEQPFPKAGELSTRLITQAKRTAGRSWLAEVSAVVLQQSLRDAETAYRNFFASLGGTRKGPRTGPPRFKSRKDARQSIRFTANARWNITGGRLNLPKIGAVKVKWSRTLPTTPSSVTVIKDAAGRYFASFVIDTDPAADQARMPETDRTIGIDLGLTHFAVLSDGTKIDSPRFLRRAEKKLKKAQRELSRKQKGSRNRAKARLKVARAHAKVADARREFHHQLSTKLIFENQGIGVEDLSVAGLARTKLAKSVHDAGWSAFLSMLEYKAARYGRRLVRIGRFEPTSQTCSTCGVKDGPKPLYVREWTCSACGTVHDRDHNAAINVKTAAGLAVSACGAPVRPGAIPAQREETGSHGIPPEPRAA

SEQ ID NO: 39700 - protein, 484 aa, Acidimicrobiaceae sp.
MARMAAFRFTARDDPVLEAHVRRHIGARRFAYNRCLEAVKDTLDERRARPDVEVPWSGYSLINWWNGWKRSEDAGCLFAVDPSGRAELVDAGLAWRTEVSAQVFEEAAVDLGRALAAFSASKKGARRGERVGFPHFQKKGQGPESFRLRNKVSRSGHHCIRVGERGPRSLTLPVIGPVALREDTRRLRRMLRPGPDGLPRARICSATVSLRRGRIVVTVTCELADVHPGMRHRSDNGARRSFVGVDRGLSHLVVVAGSDRSEWGRIEPPRHAVAARPALARASRSLSRKVPGSANSTKARARLGRLHGRVANRRNDFTHRISSTIAKTHGAICIEDLAVKNLVKNRHLARSIYDAAWGELASQLRYKAAWYGATLVVAPRFFASTKTCSSCGWLCQEMTLGERIFRCQNCGLTADRDINAAANLAAWGEAEQRSATQAPDPEARGRVTKACGGRSAGHHLGDGGTAPETPDPGKKQEPVAAPAA

SEQ ID NO: 39701 - protein, 408 aa, unknown
  TnpB Polypeptide
VTRTDYQDPAQVRRAYKFLLRPTSRQARLLAECLEDHRQIYNAALEERREAWRIRQVQASYSRQAGQLPTIRAADPCGQGRWSAGSQQQTLRRLDKAFAAFFRRIKAGEKRPGYPRFKGRGWFDTIEWPAEKNGARWDSVPHPKMTRVYLLGIGHVRVHRHRAVKGRVKTIMVKREACRWYVVLSCDDVPAGPLEPTGAVVGIDVGIASFLTTSDGGYVPNPRLQAATAERLAVAQQSLARKTRGSNRRRQAVRRVAALHAKVRRSRLDHAHKTALALVRDHDVIVHEDLRVANMTRRPRLRPAGDGTFEPNGARAKAGLNRSIYDAGWGMFLRVLATKAESAGRTTIAVDARWTSQKCARCGHVAEGNRASQAVFRCLACGHEAHADVNAAINILGAGLALQRAEAA

SEQ ID NO: 39702 - protein, 429 aa, unknown
  TnpB Polypeptide
MIVAVKMRIEPNSKQRRAIDAAIEVNRYAYNFFLTACKLVYESTGGLPSQFDLNNLATRFRHVFPGASDVHSSPLQNTASRALMASQQGIENARKSKKKIKSASMIIDDELNCAMHRPRHRNMGTYNSFSYPRYKSDYRFVQAKDSKGHAVRKLKLGKVPGEIRCYNQHSPINGILKRCTIKRVDIGTHYEYYACIDFERPDTGIISFDRDERWIGIDVGVVNIAALSDGTKYSAERAYASVSNELKSKNSKVGKSLPNSLKRKKARAKHIHAWNKISNHRKVTIENISRDIVDKADVIVMENLSIRGLRSKNSSKHMEHAYNDASLGMLRRRICDKAQGAGRRVLLVDPRGTSQICSNCGRDVRKDLSTRRHECPFCGFTADRDVNAAINILNRGWTGHPSPVIWENSSAPKCRRSTGESTSLFRASC

SEQ ID NO: 39703 - protein, 631 aa, unknown
  TnpB Polypeptide
LASELANLHVRRCIHDNLPLGDLFSANWLYNLYNEVTNGKGKPKVVAELRKTRDEWMPPYEAPVRTGVLQCLLYECRNLAAVAETNVWKHFAARVHSHVRCKFALSREAYDALSGQEKKQRSVLLLKIAHDLIKPPEEVARAPDEHAQWVSTERARLGIDEAVGAWNKKPLLYHLKAQPHRFVRAMALMSHERESSGGSSFALFPLRHTYVPRHVRFDQRALRELLKLGSSEHTRKKSKSSRSKSVATENDEIGFPPLGPCGYDSDEPPPLPPLPPPAPTKKRNRRAADELVDEKAELFGQVVDLRAAGIKRCNHFDFAFTTDGVCARVQMKAPNKQGGGKLTSMPSRGLWAIDELKRVSRLDQLHVVGVDPGKRELVVGVDMDDPKDSTAVRYTQKQRQFEMRTKQYRHEGRCNKPCLVAQAEAQLKGFNSRSADLPTFYAYCAKRHERLDLCLAFYSGLDHRRRRWKGVIKEQQSEEKLFKRLEGIKKKGDNRPLVLAYGSWGMVAGRPGAACNKGNAPCIGVGLMRKLAKRFVVSPTPEAYTSKTCCKCLGPCGRWKEVEEATNGGKQIRGLRLCQTEDCKLPLNRDRNGATNIGTNFKRLFQDLGPIRSMSDEDLRLHKLRCCLTCD

SEQ ID NO: 39704 - protein, 631 aa, unknown; identical to SEQ ID NO: 39703
  TnpB Polypeptide

SEQ ID NO: 39705 - protein, 185 aa, Borrelia sp.
MRHFLVSSEGEKTNHLKYLLKNERKLKKYQRKLSKKQKGSVKRAKSRLRVAKLHRKISNQIKDFLHKLFYYFVANYKNIAIENLSIKGMQKGMFSKSVNDLGWHEFVRQLSYKSEWYGSYLHKVDRYFPSSKLCSKCHIKNTTLKLSDTRWTCRSCNTLHDRDINAALNLKAYYYKEIKTKARTT

SEQ ID NO: 39706 - protein, 504 aa, Allosalinactinospora sp.
MSRFGLRPTREREAQLFEHCAQARHAWNLAWRVTDTYRKGGARAARPPRYVGMAALLTEVRRTATTGMSPEEADYFAWVASGNAEIQQQALRDFDQALPNFLGGTHGYPKRRKKHRHEGLRVIGAGRVPAFTPDGEPVLNATGKQVHHRRVVVQKLNTKWAQVKVPGCGWVRFRNTRRGLPDAKSYRVTYRHGQWHISFAVVPDPTPAPGDGSVVGVDRGVAITAALSTGKTLNCPPSSKKELAKRRKHERRAARAPKNSPRKAAEHAKANRLKRREADRRKDWVEKTSTRLARSFDVIRFEGLRIKNMTASAKGTGEEPGRNVGQKAGLNRMILAQGWGMLRTRTEHKAPGRVEDVPPAYTSLRCSLCGWIDKNSRKSQAEFVCSFCGFTCNADTNASMNVAAGHAGGTTPPRRSSVREPQPAWVGIPLFIRGGGCQSRAAHGRQRRHARPLPQPASAELSCVGLIGDSEVTHQRVLRRDCAGRSWLRGTFGWGTSSDPAVVC

SEQ ID NO: 39707 - protein, 429 aa, Streptomyces sp.
LLSVAGSRVVVRGWAWVIRAYKFLMRPTVGQRVALGEMLRDHCSMYNGALQERRDAYRHGSKKGVKYGQQSAQLKDIRAFDPERQGRWSFSSQQATLRRLDKAFTAFFRRIKAGDTPGYPRFRGVNWFDTVDFPKDGDGCRWDSTPHDPVPRVRFQGVGHVKVNQHRRVIGKVKTVSVKREGRRWYVVLTAEQSAPEPLPATGCVVGIDLGIASFLTTSHGEHVANPHHGRKAAAKLEAAQQALARFPRVRRDKRTANHRRAVQKVADLHRKVRRQRLDHAHKTALDLVREHDFIAHEDLKIRNMVKAPAPKPDPETPGGFLPNGAAAKAGLNRSISDAGWGVFLAILTSKAESAGREVIAVDPRNTSRTRPECGHTAKENRPIQDRRSSTASRATTRHTRTRWALSTFYGPGWSVATPTRHSEEPPHS

SEQ ID NO: 39708 - protein, 390 aa, Streptomyces sp.
VKLVIRVKLLPTPQQASALKATLHACNEAANHASHHAFTTGIKRNRELRAQIYTQLKDRWGLGAQAAQHVIKKTCDAYTALAANVRAGALGRPNSRRRTKATGKPITFRPDAAQPYDDRMLSWQTEHRTVSIWTVEGRMKRLAYTGHEDQLLLLARRRQGESDLLQQNGQWYLLATIDVPEPPENPAPHGFIGVDLGIENIATTSSGRRHSGRPVNRARENDRRLQRDLAKKNTRSAKRRAKCNAGKQARRTRDINHKISKHIVAEAQRTGRGIALEDLGGIRERARLKKPQRVTLNSWAFGQLGSFIAYKARKAGVPVVYVSPAYTSQECSQCHHIDKRNRPRQAVFACRSCGFVEHADLNASHVIGQRGWWVWVCGAGSQVPVLTLVA

SEQ ID NO: 39709 - protein, 566 aa, unknown
  TnpB Polypeptide
VGNRPAPAGGPRGDRGRARTERSPPQVPGPAARPGRDRDRGRAPGPVRPVRRRVRRGRAICAGASAAGRRPVRSRRRPRAGRDRDPRVAVRPAVRAASREEPRSPRGRRTRAGRPGMTLLAYRFALDPTPAQERALRSHAGAARVAFNWGLARVKAVMDQRSAEASYGITGDDLTPCISWSLYSLRRDWNAVKGEFAPWWGECSKEAFSTGLDQLARALKNWGDSRKGKRKGKRAGFPRFKSKRKARPSIRFTTGAFRCENQHAVLPRIGRVKLHEDGRRLVGLVAAGTARVLSVTVRYERGRWHAAFAVETEISRPAPCLPEAVVGVDLGIKTLAALSTGEEIPNPRHMLGALRKLRRLSRAVSRRRGPDRRTRREPSNRWRRASAALGKAHGRVADQRKDGLHKLTTRLTSEFGTVVVEDLHVAGMVKNRRLARHVADASFGEFRRQAEYKAAWSGGRLIIADRWFASSKTCSGCGAVKAKLLLSERTYACTACGTVLDRDVNAAINLAEYGNRQVAGSGPETLTGRGADRKTTPGSQVAVKRQPGTRQRGQTGTVPAQAGTAA

SEQ ID NO: 39710 - protein, 250 aa, Bacillus sp.
  misc_feature (206)..(239): Xaa can be any naturally occurring amino acid
MSIDLGIDNLATIVTNTGMKPVLVKGKHVKNINQYYNKMRSHFTSILRNGKQTNEGPFTSKRIEKLHQKRYLKIKDVFHKVSHHIVKLAQEEDVCKIVIGQNKSWKQETNMGKRNNQSFCHIPHNLLIQMITYKANAVGIHVVVTEESYTSKASFLDNDFIPTYGENDQNTTFSGKRIKRGIYRSANKTLINADVNAAANILRKVXXXXXXXXXXXXXXXXXXXXXXXXXXXXXXXXXXRSNRLITTIYC

SEQ ID NO: 39711 - protein, 375 aa, Bacillus sp.
MLINKAYKFRIYPNKIQEILIVKTIGCSRFVFNRFLTMWYSTYKETGKGLTYDSCSSELTQLKKKNDTIWLKEVDSIALQSTLKQLADAFSRFFKKQNDPPRFKSKRNKIQSYTTKQTNGNIAVIGNRMKLPKIGLVKFAKSREVTGRIMSATIRRNPSGKYFVSLLVETEVKELSKTGSSVGIDMGLKDFAILSNGTTYKNPRFFRTLEKKLAEAQRILSRRMKGSSNWNKQRVKVARVHEHITNARKDYLDKISTEIIKNHDVIGIEDLQVRNMLKNGKLAKAISEVSWSQFRNMLEYKAKWYRKQVVVVSKTFASSQLCSNCSYQNKDVKNLKLREWNCPSCGTHHDRDINAGLNLRNEAIRLLTVGTTGVA

SEQ ID NO: 39712 - protein, 372 aa, unknown
  TnpB Polypeptide
MLTRELKLKLTKKQETQILEYFYILTGVYNSVIRSIELNPLDKNDNYKVFKNPFYFNNLYSNHAKRVGIHSQVLQQTVKQACNSWERYFKKLSKKPRLKGIKNKLHSFCYPQFDNKKLTFSKIKLPSIGEVRYHKQEIPLGKIKQVRILRKASGYYVQLTIDTTHKFKVNDTDKKVGIDTGFKHLAILSDGIKYENQRNFIKSQTRLAQSQRGRNKKLTSRIHERIANKRKDYNHKVSKEIVVNNKEIYVTKDNLRNQTKIFGKSVSDAGIAQLRSFIAYKSANSGRLFKLVDSKYTTMICSECMGRSGPTGLSKLKVRAWECSVCRTVHDRDINSARVILKLGAGTALEQSRKQLTENSFFKEESSSLRKR

SEQ ID NO: 39713 - protein, 413 aa, unknown
  TnpB Polypeptide
MQRLQAYKYELMPDGEQARAMRGYAGACRFVYNKALAMQKENHEAGNQYIGYVAMATCLTGWRNSVETPWLKNAPCHPLQQALRNLDKAYKNFFEKRADFPRFKRKGSSESFRYPDPKQIKLDQANSRIFLPKLGWLRYRNSRNVQGEVRNVTVSQSCGKWFASIQTRREVEQPHPVSTTAIGIDVGIARFATMSDGHFIAPLNSFKNHQQRLARYQRRMSRKVTFSNNWKKAKARVQKIHTRIANARKDFLHKTTTTISKNHALVCIEDLQVRNMSRSFRGTLEQPGKKVSQKRGLNRAILDQGWGEFRRQLDYKVAWCGGVLLAVPPHHTSQTCPFCGHVSKDNRQTQASFLCVDCGYENHADVVGAINILARGHRVLACGELAQSGHSMKQEPTEATRRSARGAVGISVP

SEQ ID NO: 39714 - protein, 367 aa, unknown
  TnpB Polypeptide
LKQSLLVKLVPDDKQFGQLKQVMERFNKACNYIAGVAFKKRLANKIALHHILYYRIRKRFGLSAQMTVRAVSKVVETYKRDKSVKPIFKDHSAMVYDDRILSWKGLDYASLLTLKGRIKVPIIIGEYQKGRMDRIRGQADLLLRNGAFYLSATIDTPEPVPFEAKDWIGVDLGIKNIATDSDGVLYSGSQLNSLRHRNARLRAKLQKKDTKSAKRLLKKRSGKEARFARNINHTISKGLVAKAKDTERGIVLEDLMGIRDRITVRKTQRRTQHSWAFNQLRRFVEYKAKLAGVPLKFVDPMNTSRTCPNCGTIDKNNRNGEEFICVVCGFAGHADHIAAENIRRAVVGQPYAGDHLIHLQTHDFVHG

SEQ ID NO: 39715 - protein, 374 aa, unknown
  TnpB Polypeptide
MMKTMQTVVLEDASQKAILEDTLSRMSSAQNFVVDVCYESEDTNTFRVHHKTYRKLRQDFGLPSQLAVVANKYACASVKTSIKRKGRKPVFSGKSIHYDARSCTINLEKSVVSLLTIKGRIKVKFEIPKYFKQFVGWKAKESNLVKCRDGKFRLMVSIERTSIKSKKTGRIIAIDRGINNLIATSDGWLYESRHVWEIKQHYVSLRSRLHSKGTRSAKRHLAKMRGRERRFMRDVNHCISRRLIGSAGKDGVIVLEKLNGIRDAKHRHEQNWLFSNWAFYQLEHFLIYKGEETGVAIEFVPAKDTSKTCSACGSLRRGQRQGSAFRCKACGVVLHADLNAAKNILHKYHADGLLSTSLLLPKGLSKPFISMDGS

SEQ ID NO: 39716 - protein, 422 aa, unknown
  TnpB Polypeptide
MPKKPTKKVLFGVQKQQLKHLTVNEYKALKELCFLSKNMYNVALYNIRQYYFTEKKFLGYNNNYHLCKDNENYALLNANSAQQIIKVVDRNFKSFFALISKAKKGEYQYKDIKLPKYLPKDSFFNLIFGEFNCSGDTFKVPMSPFFRKLYGKVEINIPSNLKGKTIREVRILPKNNARFFEIQWIYEIPAFEGNLNKNNTLAIDLGIDNLCTCTTNDGKAFIIDGKKLKSINQWANKENSRLQSIKDKQKIEKTTKAQRNLWSKRNSRVNDYINKAVKIIIDYCLENNIGTIVVGYNPIIQKNSNLGKKNNQNFVNVPIGNIREKLNYQCQRYNINLIEQEESYTSKADFLANDSMPIYNAFDNKSYAFSGKRILRGQYKSATGIILNADINGSLNIMKKAKIKNINLANEEYLNPIRIKIA

SEQ ID NO: 39717 - protein, 378 aa, unknown
  TnpB Polypeptide
MQTVRTLKIKLNLDKEEKLMMDNTLKAFLEGLNYASQVAFDNGEITNKHKLQKIVYRDLRNKFGLKSQMAVNICTVVCGSYTSQHSNNVYGSLAIYKFPKVIYSYGRDYSFLNDKKIISLNTIDKRIKVPFKVNDYFKKYLTGDWKFGSLEIIKTNENYYAHITVNKEAKEKPLNEFKNIIGIDVGQNFIATVYDSKGKVKFYKGRYLKDMRAKYKHLRKQLQEKGTHNAHNKIKALDKKEQRTMAYINHCISRNVVNYAKKTNAIIVMEDLKGINLSCKVRKNNRYYRVSWAFDELQRFIEYKAVELGLKVIYIDPSYTSQTCPKCGHIDKNNRDKKLHLFKCKACDYSLNDDLIAAMNIHHKGYDEKIKLEVDKSA

SEQ ID NO: 39718 - protein, 373 aa, unknown
  TnpB Polypeptide
VKTVIKGYKYRIYPNKEQKVQLSKTFGCCRFVYNHILAMKIELYKTEKRSLSKTDCNNYCNRELKKEYPWLREVDKFALTNSIYNLDNAYQKFFKEHTGFPKFKSKHNHRYSYTTNFTNNNIKVLFDDNLVQLPKLGKVKAKLHRQFDGRILFATVSQVPSGKYYVSFNVECEHKALPRNSNKVGFDLGIKEFLVDTNNNHIENPKVLYKYEKQLKKLQRQLCKMQRHSKNYKKQTKKIARLHEKIANVRKDFLNKLSSQIVKENQIIISEDLNIKGMLKNHNLAKSISDVSWSEFTRQLQYKAQWNGRMYYKTSPWFASSQICSVCGNINKEVKCLSIREWVCSKCGSTHQRDENASKNILKQGLKELGASA

SEQ ID NO: 39719 - protein, 380 aa, unknown
  TnpB Polypeptide
MYKLYRSKRNRKLHRLINIGGAIHNHTIALCRRYYRLYKKHVPLFQLQAHIAKLKKLPTYTWWKQLGAQAIQKIIDRIDKGYQRFFQHLKDRKAGKTTQKVGPPTLRKIAKAKSFTLTQAGWKLLGGNRLRIGSTVYKFAKSREIEGTIKTVTIKRDRIGELSVYFSCVVDPQPIDRVMTGKSTGFDFGLTTYLTGNDGTEYQAPQPFKQELRRIGKANRALSRKVKGSQNRRKATQHLARVHRRVASVRQAFQWKLARDLCQQYDHITLETLNLQGMKALWGRKVSDLGFGSFVQTLHHVASKLGTVIYHIDPWFPSTKLCAVCGHTNQHITLRDRVWTCQRCGTTHRRDHNAATNIFREGASSRGGDPVSLAPASRGC

SEQ ID NO: 39720 - protein, 504 aa, Kandleria sp.
MHTVRLLLATTKYDEQIINKRFHAVSHIHNVLVKHSKKCLKKLSCDKEYQSLKAEYSAILKKNKISKEERAYKKQISRRMAEIVKGHGLSEYSFQAYIKICARQFRGCLSSQQVQKEATRVWRGAEKILYGNGHELHFKKFRDFNTICGKTNTNGVKFYKNAYFIEWLGLNIKCRLPKNRDYIIKALNSDISYCEIERKMFPNGWHYYVVIYLKGDAPHKLSTAENNDSITGVDIGVSTVAAVSENEVILKELAPRCKVYNRKIEKLQISMDISKRISNPDKYNPDGSIDRSNHEKWAYSKTYLKKLNRLKSLYRQKKAYIKQSHEEIINGLLEQSASFIVEDMSFKGLQHRAKKTERRKEAADIKQKDGSFKKVYKYRRKKRFGKSLNDRAPASFITILTRKANLYGGNVYKADTRSFRASQYNHVTDDYTKPELSERNKLVGGHKVQRDLYSAFLLRNSNKELNKPDRAKCMCEFDRFLKLQNCLLTEMKENGISMKQCFGF

SEQ ID NO: 39721 - protein, 472 aa, unknown
  TnpB Polypeptide
VRYLQAFRFGLDPNNEARSALASHAGAARFAFNWGLALIKDRLDARRVLEALAVRQGASTAEAAVWAAGLAGPVPWTLPALRREWNQAKDQVAPWWAANSKEAYNAGLDALARALKSFFDARSGKRKGGRLGWPKFKKRGGRRSFRVTTGSFGVIDGRHVRLPRIGVIRTKEPTGKLSGRLAAGAGRVLSASVSERTGRWFVSFTCEAGRSKVEAPAGRPAGVDVGVKCLAVLSTGEQVPNPKHLSRWQRRQARLQTELARRQGPARGQAASMRWKATKARLGKTHAKVAQARSDGLHKLTTRLARAHAVVVAEDLNVAGMTAKGAGRAKRGKAGLNRAILDVAPGELRRQLACKTRWSGSGLVVAYRWYPSSKTCSACGAVKTKLPLAERTYSCEQCGLVIDRDYNASINLAALAARTGTASGAGTGQSDLAIGRGEDKSMPPGRWSSENRQDSAAPAGQTATAAEQSTAA

SEQ ID NO: 39722 - protein, 342 aa, Oscillibacter sp.
MQAQKTASDRANQYTVIKVRLHPTAEQTELIEKTFGCCRYLWNKMLADAREFYAATDLQYIPTPAHYKKQAPFLREVDSQPLCTVHQNLRKAFLNFFRNPSAFQYPRFKAKKDKKDVFTVYCRQYRTGPSIYLTDKGIQMPKLGEVPATLHRRPLHWWSLRSVTVSRTRSGKYFCSIVFGYEARTPEAAVPTPESTIGLQASPACFYIDSEGCCPDLPETARAQEKLRRMQQRLSRMERGSQNYEKQLQKIRLLHEHIANQRRDFIHKESRRIANAWDAVCVRDVNLVELARTGQAAGAGFGMFRECLRYKLERQGKHYIAVSGSAETAEEIKQSGLAQLCA

SEQ ID NO: 39723 - protein, 419 aa, Streptomyces sp.
MYVRSVIVKLTVQVRLLPTPVQAAALEATLRACNEAATWVSGVAFEKDVRRNFALRRLVYDEVRARWGLGAQAAQHVVKKTCDAYATLRANLKAGNLGKPGSKRYRRAAGKPVCFRPRGAQPYDDRMLSWQTVERRVSVWTVAGRIKDVAFTASPEQLATLALHRRGESDLVCRDGMWFLNATCEIPEAPTNPDPVDFLGIDLGIVNIATTSDGEIMAGRELNRARVRERGLRARLQRKNTPSAKRRLKKRRRKEARRARDVNHKIAKHVVAEAERTGRGMALEDLTGIRERVRLRKPQRAAHSSWAFAQLGQFIAYKARKAGVPVVHVDPAYTSRTCAECGYIDKANRVSQAWFACRSCGFVDHADRNGSRNIRARAWELWRRGAPSTAPAPSRTPRSGTGRKRSITASDARCANPAP

SEQ ID NO: 39724 - protein, 377 aa, unknown
  TnpB Polypeptide
MKAYRFRIYPNGIQIKLMESHLETARKLWNRLLMETKELYDKEKKFYTKSELQSMSKRTGLYSQTSNGVAHRLYRAIRAKIKMKKKELKWGFPRFKKYCQLRSLYYPQSGFKLEDKLKVTPFGEIEIKQHRPIEGRIKTLTLKREPTGKWFAILVSDAPLSNNLKVGEGSVGVDFGLKTFATLSDGKTVDSQRFSKKYEGKLAKEQRRLSKKKKGSNNRQKAGMKVARIHEKIAASRRDFFHKTANELIRNYSFIALESLNARAMAQGWLGGSINDASWSAFTNILCYKAENAGCKVVFVDPANTTQECSRCHEKVKKELRERTHACPHCGLIMDRDLNASKNILMKATAGTAGSKAFGDGAAVPSMNQEADGFGHW

SEQ ID NO: 39725 - protein, 353 aa, Ignavibacteriae sp.
VRRSFKYRLYPNRAQLPRLGSLLDAGRMLYNLALEQRRDAWRSRKLSLNYYDQAAELKELRDAFPQLSTLNYSSCQDVLRRLQKSFNGFFGRVKRGGAGFPRFKARERWDSIVFPAYGDGIRLNGKLRVQNVGLVRINVHREILGTIKTVTIRREDERWYAVFSCDDVPARTFPSARQEVGVDVGLLSFATLSTGESVPNPRWYRHTQVALADAQRRRDTKRARCLHEKAKHQRSDFQHKLALRLVRENTLIAVEDIGSRALIESSSRGLSKSISDAAWSQFLNILSYKAEEAGRQFVKVNPRGTSSTCSRCGKEKKKLLSERVHQCECGLVIDRDLNASLNILRLGRSLAVA

SEQ ID NO: 39726 - protein, 253 aa, unknown
  TnpB Polypeptide
MMIAHKIALKPNNRQRTYFAKACGVARLAYNCGLEMWQQQYQAHKENPDNPKPTEMLLRRQLNAIKREKFPFMLEVTKCAPQQAIKDLGKAFKNFWAGRAKYPQFRKKGHHDSFYLSNDQFKIIDNKIKIPNLGWVRMTENVRFSGKIMSATISRIADKWFVSITIETEIQPKQAENQSAIGVDLGVSTLVTLSNGEIITGAKSHNALLNRLKRLSRSLSRKIKGSKNREKAKHKLARLHAKIKNIRKIAYIN

SEQ ID NO: 39727 - protein, 317 aa, unknown
  TnpB Polypeptide
LLQITAKSNEQYGSASLKLYINNDWVWVTVKLRKTDLKYIQKYWQHCKPSAPVLEKRHGKYFLRFAFEEKVYLSKTPIQEQRICAVDLGFNSDAVCSIMTSDGTILARKFINFPSEKDHLGHVLNRIKKYQREHGSKNVKSFWQYARRINDEMAKKIASAIAEYAVLYSVDCIVFEHLDFRGKKAKGSKKQRLQMWRKNGIQDMVEHKAHRCGIRISRICAWGTSKLAYDGSGVVERDKDNHALCTFAHAEGEHGKQYNCDLSASYNIGARYFIRELLKPLSAMARSDIEAKVPGCQRRTSNTLSTLRALTATLEAA

SEQ ID NO: 39728 - protein, 393 aa, unknown
  TnpB Polypeptide
MLKSYKTEMLPTAKQADKIRRSIGICRWLYNEYIARNKRLHKLYQRGCLDENQKHFISAMDFDKFVNHKLKNREERAWINECGSKARKKSITNAETAFKKFFKGEAKFPNFKKRNRQSVKIYFPKNNKGDWTVKRHWVQIPTIGKIRLKEFGYLPVDATVKSGTVSQKADRFYVSVVVDMPELQYAKPQGEPLGIDLGLKDLVILSDGTNYKNINKTATVRRLKKKLRREQRRLSRKLENKKKRGEKSATYFANISKNVLKVQKLYHRLTSIRTNYTNQVVNEIVKREPSHITIEDLNVKGIMKNRHLAKAVAECKFYEFRIKLIAKCHERGIELRVVDRFYPSSKTCHECGHIKHDLKLSERTYVCPECGNTIDRDYQAALNLRDAKEYKVA

SEQ ID NO: 39729 - protein, 445 aa, Natronolimnobius sp.
MAKQVVTRTYTASIRNQQQVSDDLDSLGFAASKLWNIGRWTISRVWDEIDYIPEHDELTAYLKSHERYDDLHSQSSQRVLQELAEAFNGWYGKRRNGDTRANPPGYRKHGDDHPRSTVTFKAAGFKLDTQYDRVRLSKGSNLKEHWSDFILCEYQTRPDVDLSTIESVQQVRAVWTDEEWELHFVCKVEIEVSESPGEKTVGVDLGINNFAALAYEDGHAELYPLNCLKQDDYYFSKRIARCDDADSKQATRLHQTKSARRTHYFHTLSKHIVERCVDEGVGTVVVGDLSGIREDEENGESKNWGKHGNLDLHSWAFDRFTDLLEYKAEMEDIVVEQVSERDTSKSCSCCGRKRDANRVERGLYVCDNCGAVANADVNGAENIRQKVSPSLATDGVDETQNVSSAHQNLNRSEDGDRSNGWLAQPSTFLFDKETGVFAPQEQVTS

SEQ ID NO: 39730 - protein, 484 aa, Vulcanisaeta sp.
MLCRAVAVELETPREVSKLLYDVESAYLGIVREVVEYAVLNNVTSANKLHGLFYRRYRSEYQGLHAHLVIQAIRQASQIAKSFIARRRKGLVSKPYPEVKAVSIRFSEKAWSYEEFVKSTAPVRLELSLPGGRREVWLRPHKRFWLYWWRVLNSEAELASTLVVKRRLNKWYAVFVFEIKPREERPQSIVAFDINENTVAVGRIDLPSTVSKVVNWNRQYMVPELYTIRTDFGRLARRYKRVRNAIIERLKPGFALPNGKYANVTNTREYRKRVKRLRERVRKVGRVRHVANELTRIPAIIVTEELGENPQESMIEDVGRGELRHRIKQTPFKSIEKTVEDKALERGSRIFHVSAYRNSRVCPIHFTRLEKTDDWHTLYCPRGHYVDRDHASVMNMAWKLTPEAWTKAFWWNLRREMEWEEYEGKSNPIIPHPIMQYIHAMLKTFMASEEGPAVLAGGNPMNPAGGANEGWARAPPRSKGTLAL

SEQ ID NO: 39731 - protein, 442 aa, unknown
  TnpB Polypeptide
MRPRHRIERADCSIERMSRPSPRERMKRIERVKLYPTASQGARLQACLGVGRKLYNTALEQRRDAWRSRRLRIDHKRQYAELTELRAADLRVASIYRELQDAALHKLDLAFRAFFRRCKTGGAPGFPRFRSARRYRISPRQPCPEVQWRPDQGQGPRRWQRGLSTRSCRSRLWPGYARAFPAWLVRFVRVRARSQSFARNGESGRHRCGHCGLLRDVGWPHRTKSSVGQEARGSRSSLATDHSQTLPRQCWAAQGGQSICASARSAALGETRLASQASAQLSWYDAIAFEKLPLRSMTRSAQGNTQAPAKNVRQKSGLNRAILDAGWSRFTNVVVDKAAEAGRQIVFVNAKYTSQTCSRCECVDTANRCTQALFVCVFCGFALHADVNAAVNILKRAKLSPAARGAALADPADPRSVLSPARTWLAQHDAARGRIQRRQGTE

SEQ ID NO: 39732 - protein, 234 aa, Hormoscilla sp.
ISYKVDVEPQPVEHPYGCIGVDLGVKTLATLSDGKTFPAVKAYRKAKRKIARLQRSVSRKVKGSNNRSKAILKLQKAHHRVACIRNDATHKLTTYLAKNHSEVVIEDLKVSGMMKNHRLAQAIADGGFYEFRRQLLYKCQWYGSKLTVVDRFFPSSKTCSHCGHIHKGLKLRSRTFVCPNCGFSSDRDWNAAINLALAGSSPVSACGASNQRSASAGRRRRNRKRTHDVGHVQQ

SEQ ID NO: 39733 - protein, 466 aa, Streptomyces sp.
MIRAYKFLMRPTVGQAAALGEMLRDHCSLYNGALQERRDAYLHTSKTSIKYGMQSAQLKEIRAFDPERQGRWSFSSQQATLRRLDKAFGAFFRRIKAGDTPGYPRFRGVNWFDTVDFPKDGDGCRWGSTPHDPVTRVRFQGVGHVKVNQHRPVVGKVKTVSVKREGRRWYVILTAEQSRPEPLPATGSVVGIDMGIASFLTTSSGEHVDNPRHARKAAAKLEAAQQQLSRFGSVRRDKRTGNHQRAVQRVADLHRKVRRQRRDHAHKTALGLVRDHDLIAHEDLKIRNMVKTVAPKSDPESEGVFLPNGAAAKTGLNRSISDAGWGVFLTILASKAESAGRAVIAVDPRNTSRTCPECGHVAKESRRTQEKFHCVSCGHQAHADHVGALNVLRAGLVRRDADPAKREAPSFMRGRSHEVQLGGSGVAVAGAVAAVVAVVEGEVVGDEHLLDQVEGVEAHAAATWRR

SEQ ID NO: 39734 - protein, 484 aa, Streptomyces sp.
VKKFRPQPGFVVQAYRFALDPNASQEAALRSHCGAARAAYNWAVGWVTASWWQRRAEESYGISEAKLTQWRPWSLPALRKAFNEAKKTDPRFAAWWEENSKEAYSTGLTNASSAFDNYAKSKNGKRKGRRTGAPRFKPKRKARLACRFTTGTIRVDTDARHVTLPRLGTLRTHEPTVKLLTRVQAGTARILSATVRHERGRWFASFQVEVKRDLVKVARPDAAVGIDLGVKTLAVMADSMGEIRTVPNPRHLDAALKQLRRTSRTVSRRQGPDRRTGQKPSRRWEKANAARNRVHHRVANLRADALHKLTSAVAAEYGTVVVEDLNVAGMLRNPRLARHIADAGFGEIRRRLTYKAQRNGCRIVAANRWFPSSKTCSGCGAVKAKLPLHVRTYECGACGLVIDRDDNAALNLAALAAACVTGTGVAGDQDTAPAVPKPRGADQKTRATRPRRKTGTGRAGGATLPHQRQTESRDRPQAEALTLW

SEQ ID NO: 39735 - protein, 380 aa, unknown
  TnpB Polypeptide
MLRGIKIRLYPNKTQEQTLNKVLGCYRFVYNQMLARKQNAYKTDKTNLSVTDLSKWFHGTLLKDEQYAWLKEQNTKVMKQAIRQMDGAYQNFFKQHNGFPKFKTKKDKQSALFPYEAISKRNTFETKHISLITSLKNIKFRCSDLYLSRLQTYKDKIRSATLSKTKSGNFFLSILIEMDDTKLKKFGHTNKQVGIDLGVKDFVITSDGEVFENKHLFKKKENQVKRLQRQLSRKVKGSNNRDKQRIRLAKVFERLTNQKEAYIHSVTNELLTYYDTVFMEDLNVKGMLKNHNLAKAIQEVGFYKFKEILVNKALVNDKKVVFIDRFYPSSKTCSKCGYKKRDLKLSDRFWFCPECVAEHDRDLNAARNILLEGQRILAAV

SEQ ID NO: 39736 - protein, 220 aa, unknown
  TnpB Polypeptide
LLATCEVEEPETHSGGGVIGVDFGIVELATTSAGKSYAGEQVKAVRRRTREHRRRLQKKGTRSAKRRLKQAAKKQERFVCNTNHCISKELVRDARASKKALGLEDLTGIRARAHGFHKEMRWQMGNWAFAQLRQFVTYKSKQAGIAVIIVNSAMTSRTCSVCGCCEKGNRKSQPHFQCLACGHESNADFNASINISRRAAVNRPPVAAPPGLVTSPRLSP

SEQ ID NO: 39737 - protein, 399 aa, unknown
  TnpB Polypeptide
MRKTYKYRIYPSREQKTLIEEWLNICRVLYNDCLTERRDAWQSCRKSINYYDQQNQLPEIKTFDDGLKRVHSQVIQDVLKRIDKSFKNFFKKVKKKEKAGYPRYKPRSRYNSFTYPQSGFEISEDGKKLILSKIGSINIKKHRDIPENAKIKTCTIERDLNRWYACFSVEIEVEDLDQNEGIRNEITNPIGIDLGINHLITFSDGSTIDNPRYLAKSEKRLKRDQRRLSRAKKRSNNRKKRIFELAKTHRKVRDQRADLLHKISHSLVDTFDLIIFEDLNVRGMLKNHHLAKSISDVSWSQLTNFVSYKAEEAGRRVEFVNPKNTSQECSNCGGIVRKSLSQRVHKCPFCGLVMDRDENAALNILKKGLSRVGQELSKVKPEDFSKRRVIQEAPSVRVG

SEQ ID NO: 39738 - protein, 331 aa, Escherichia sp.
  misc_feature (23)..(26): Xaa can be any naturally occurring amino acid
  misc_feature (276)..(279): Xaa can be any naturally occurring amino acid
  misc_feature (304)..(325): Xaa can be any naturally occurring amino acid
LDALPEQPSGHGCCEKCHCQPVXXXXRGQNDAFRYPQGVKLDQENSRIFLPKLGWMRYRNSRQVTGVVKNVTVSQSCGKWYISIQTESEVSTPVHPSASMVGLDAGVAKLATLSDGTVFEPVNSFQKNQKKLARLQRQLSRKVKFSNNWQKQKRKIQRLHSCIANIRRDYLHKVTTTVSKNHAMIVIEDLKVSNMSKSAAGTVSQPGRNVRAKSGLNRTILDQGWYEMRRQLEYKQLWRGGQVLAVPPAYTSQRCACCGHTAKENRLSQSKFRCQXXXXQASVARTVVIQRKRTACHKVNSDAXXXXXXXXXXXXXXXXXXXXXXSVSVSD

SEQ ID NO: 39739 - protein, 371 aa, Actinomadura sp.
VGQAVKRGFKYRFYPTPEQAKLLHRTFGCVRLVWNMALAERIRRYKDEGLNTSYVDTARWLTEWKQDPELGFLREVSNVPLQQTLRAQQNAFTAFFAGRARYPRFKSKRKSRKSATFASNAFTFTGGALKLAKTTEPLAVVWHRPLPEGAQPSTVTVSQDAAGRWFVSVLVEDTITPLAPMDAMVGVDVGLENLVTLSTGEKVTNPWHERACRRKLARAQKALSRKAKGSANLAKAQLRVARIHARIADRRRDHLHKVTTRLVRENQALAIEDLTVRNMLNNHCLARAISDAAWSQLRSMLEYKTGWYGRQLLLVDRWFPSSKLCSTPGCSHINNTMPLNVRSWRCPLCGTLHDRDVNAATNILAAGLADR

SEQ ID NO: 39740 - protein, 445 aa, unknown
  TnpB Polypeptide
MKMIRSDRLKINTSAEQRKVLGDTLSVYRKYVRDLMVMVNARWRHFQHTQGNEVVKVVESMIHPTSARPCVKYTHFHKNYYKFPSYLRRVAIMDAVGQVRSFHTRYNDWLDAGMKKMPPKLTVSTHTFPSLYKGQCVKFSEDNKTAFIKVWYNSDWMWQAFRLSGKSRFLGKGKAMSPLLTLKGKQWALSTPVKLDIPLKSKTDFSGYVLAVDIGIKTSAVCAVVDKFGTVVHRAFFDRTDKDRTHHIMQRIRKKARKATRHGNKLDTVFCSKYHRILRNLNDNQAHQISRQIVNLAHEYQCDAIVIENLKYWRPKAGRKRSTMKMRFHTWFKSSLVERIESKSIEIGIRTLSIYARGTSSYAYDGTGKVSRDKDNYTNAKFSTGKRYNADLNASYNIATRGILKLYYPSLYKQQWSRGKPNACPTTGNPLVLSSLWLLTQSKAG

SEQ ID NO: 39741 - protein, 255 aa, unknown
  TnpB Polypeptide
MVPCVFKPYGYGIPAQELVWEKGICSVDLGINTDAVCTIMRADGTVLGRKFIDFPSEKDRMYRTLGRIWRFQREHGSAQAGERWAYTRRLNIELSRKIAGAVAEYAWENHADVIVFEYLEMNGKISGSKRQKLQLWRKRDIQKRCEHQAHRKGMRISRICAWNTSRLAYDGSGIVLRDWRNHSLCAFQTGKRYNCDLSASYNIGARYFIRELLKPLPATERSLLEAKVPAVKRRTSCVYADLKELHIQMEILKAA

SEQ ID NO: 39742 - protein, 414 aa, unknown
  TnpB Polypeptide
LKATLRLRLHTCRLQTSAAPVGGQEAEAILLETLRQSTACFNAVTAHGWEAGERNGTRLHHATYAGLRAEYPSLPSQLHCAARVKATEALKSVDERLRQGRKAGCPTSELCPVRYDARSYWVKLSEGRASLASVAGRVCVRLNVCAYYRRYLDWTPCSADLCFDRKTGRLSLHVVVEADAPEAACDGVCKSFLGVDLGIAEIATDSEGNQYSGEAVKGVRRRVRRIRRLLQARGSKSAKKHLKRIGQKQSRFSRDTNHVISRRLVATAAAHEKALALEELKGIRDRAETVFGREMRWLMGNWAFDQLRQFLSYKAEAAGVPLVSVAPRNTSRTCSKCGHCDKANQKSQAKFLCLRCGFELNADANAAINIGVRAAGSDGLLSQLCVPATLPLMGVNAVRATELGTSPQPLGGGI

SEQ ID NO: 39743 - protein, 412 aa, Streptomyces sp.
MKLVVQVRLMPTPEVASALERTLHTVNDAANWLSGQAYERGGETSRKALQGFAYRDLKDRGLSAQPSLHVLRKVADAYTTLRANLRNGNLGKPGSKRRTKAEAKPIVFRPNAAQPYDDRCLSWRVDEQTVSIWTTAGRIRDVRFACSEPARKLLAEHRKGESDLVHRDGMWFLIATCEVPAAEQYEPTHFLGVDLGIANIATTSDGKIHAGRGLNRYRKRQLALRAKLQKKGTQSAKRVLKRQRRKEQRKATEANHIISKSIVTEAERTGRGIGMEDLAGIRTRVRLRKPQRVALHSWAFAQLGQFVEYKARRAGVPVLFVDPAHTSRMCAECGYTDRLNRVSQGRFACRSCGFVDHADRNASRNIGARAWKLWRSGAESHAPAPALGAGRRRPPSTQLGSTSKPGPSRPGS

SEQ ID NO: 39744 - protein, 488 aa, Streptomyces sp.
VFRVKKFQPQPGFVVQAFRFALDPNATQESALRSHCGAARAAYNWAVGWVTASWWQRKAEASYGVAEEELTPWRPWSLPALRKEFNQVKRTDPRYVDWWHENSKEAYSTGLANASAAFDNYSKSKQGKRHGRNMGAPRFKSKRKARLACRFTTGTIRVDADGRHVTLPRLGTIRTCEPTGKLLTRIQADKARVLSATVRHERGRWFVSFQVEVKQDLGRVARPDTAVGIDLGVKNLAVMADTTGEIRVVANPGHYDRARKQLRRASRVVSRRQGPDRRTGQGPSKRWEKANAQRNKVHHRVANLREDALHKLTTSVAAEYGTIVVEDLNVAGMLRNRCLARRIADAGFGQIRHQLDYKTRRRHGTRIVVADRWYPSSKTCFECGAVKVKLPLHVRTYECDACGLVIDRDENAALNLAALAAAAVTGTGVAGDQDTAPAASKPRGADRKTRATARSRKATGGRAGGATLPHQRQTETRDRTQAEALTLW

SEQ ID NO: 39745 - protein, 513 aa, Streptomyces sp.
LSERDVAVLTEVGALLGSLASRDLAVRSRQGAEPSAGAWADRKRELTVSSSARWAGSITKATHDQWALARRGQAAEMRWLRAETARIEARLARPLGAKAEKLTALPRGYADRTEWHAKARRLQALRVRLASVQADWASGRVRVVRGGRRLARLWNRLDESGPSREAMRRRWKAARMFLSADGESGKRYGNETIRVTDGGHVSIRLPAALAHLANAPHGRYALASTVAFGHRAEEWRDRITADRAVAYRIHYDVQRGRWYLTAVWQRAVVPALSLPAALARGVVAVDMNENHLAAWYVDVHGNPVGEPRRFPYDLSGGASHRDAQIRHALTQLLHYARRRGAASIAVEDLDFTDAGTREKHGRAKHFRRLLSRFPTTRLRTRLVAMAAEQNITVVAVDPAYTSQWGAQHWQKPLTTRTRPTTRHDAAALAIGRRALGHSIRRRKAPPRTHRSDGYGHRTLQAESEPGRREGPRPRPSGPRTRSVPPGGGANARNQRAQHHSEHAAEHGVLPLGP

SEQ ID NO: 39746 - protein, 301 aa, Nonomuraea sp.
  misc_feature (214)..(224): Xaa can be any naturally occurring amino acid
VELARTFGCVRLVYNKALEERTRAYRLEGRGVSYAESSAALTAWKRAEELSFLGAVSCVPLQQALRHLQAAFAGFFAKRAGYPVFKSRKKSRLSAEYTRSGFRWRDGSLTLAKMDEPLDIVWSRPLPERAEPSTVTVSKDAAGRWFVSILVKEMISPLPPVAQVVGVDAGITALVTLSTGEKIVNPRHERADRRKLARAQRALARKEKGSNNRXXXXXXXXXXXASWRELCGMLEYKSRWYGRRLVVVDRWFPSSRLCSVCGTLQPSMPLNVRTWVCACGACHDRDVNAAKNILAAGPAES

SEQ ID NO: 39747 - protein, 521 aa, unknown
  TnpB Polypeptide
MDRRSKKRDKRWMWVVKPGDKIVVSRTAVIPSKQLSRREFRALEEILNIYSRMLENVLPHASRNIIESYYRLKNEKYRELRSMYPNIPSHYIHGLCQDAVERVSSLRRNRARQYSREIFDELVKYLNLGKKDLRSKRLVRYLWRRSWEIAWHQVDLEMKEGILVPRINSVSLWLVDDHVWKPIDATKININGVVNTFFTSVAINTHRGWVYLDLEPSKEFYKLLARGFKPTSHAKIKLDRKNRRVFFHLSLEKEIEIYRPGNIKPVDVNENSVATIHKAFAVILETDLARITLGYSYRKKSIQMRNRSSSKEARKAMKKLREGEKKKDYRMKTANLIVRDALRTRGVIVIERITGEDIRVMIARYRDKQLRHRIYQSALKGELNAIINKAREYGVPVLMVDPRNTSKTCPIHKAIIEYGEDRIGICSKGGERWHREAVALINLYFKALEALYEGSAQKGFGDPSIDGSPFPLGSTATNEPIEIPRSLWGRWKSLDNHRDAITSLWIKKQNNPKQININDNQ

SEQ ID NO: 39748 - protein, 548 aa, unknown
  TnpB Polypeptide
MVVGMLLYSFIINYWLKWRFRDKEGLGIMDRRSKKRDKRWMWVVEPGDKIVVSRTAILPSKQLSRRDFRALEEILNIYGRMLGDVLSHASRNIIESYYRLKNEKYQELRNIYPNIPSHYIHGLCQDAVERISSLRRNRARQYSREIFDELVKHLDLGKKDLRSKRLVRYLWRKSREIARHQVDLEMKEGILVPRINSVSLWLVDDHVWKPINPTKININGVENTFFTSIAINTHRGCVYIDLEPSKEFYKLLARGFKPTSHAKIKLDRRSRRVLFHLSLEKKVEIHKPEDIVKPVDVNENSVATLYGAFAVILETDLAETTLGYSYRKKSIQRRNGSDSRETRKAMEKLKEGKKKRDYRMKTANMIVRDAMRTRGVIVIERISGDNIRVMIAMYRNKQLRHRIYQSALKGELNTIIDKAKEYGVPVLMVDPRNTSKICPIHKAVIEYAEDRIGICSKGGERWHREVVALINLYFKALKALYEGYAQKGFGVLSIDGSPVPLGSTATHEPIEIPRSLWGRWKSLDGTGLKTLWIKKQNNPKQININDNQ

SEQ ID NO: 39749 - protein, 471 aa, unknown
  TnpB Polypeptide
MNSDENKTIRKSFKYRCYPNAGTKRRTFRAMYIQGEVWSNATAQKSRAWFAQQDAIYLAGKNAGRELTPEEKDVIKKQSPIPTFYDQYSLIRKREHPQYCKFDAQSLQNVLHKVDSSFKSFFALKKNGQPDVMPPNQKRIHRCLAYRQSGWKLEGNNLYLSYIGKFHLKLHRPIIGKIKLISITENNGKWYASFSCEVNILSGTCNPVSKSKSASADDLRQEYAPSGGDEPEKASTYNKRVLASEIFGGGDDPEKASTYNFLSSGSPIALGGDDPEKAGEIEIAFGLRDNVFIIDSAGFIIEHPEFYGSELDKLKRLNQNLAQKKYRSENWYKARNTLIKWHERIENKRAYFLWNLARYYAKNFEKVTIQKWPLNKEIKYAIDNKTARRLCDGAYGKFIQMLKHKCNESGTEFIERKELSWQTEIERLTEQAKMEELTRVLRESKKAVNRKYHARFKYLETACERLMMLRI

SEQ ID NO: 39750 - protein, 545 aa, Lachnospiraceae sp.
MQTNQNVEQTEYKKMLKAYHKLSDRHVLVLETNLSHKDKCMVFHYADLERKAGNELVAIMKNNYEQMVRTKKYRKLKTLYGKYSNTEDNDRRKDIAKQLNELQEQYNVTWNFCRTSMIPIGKKYGIDAIFALTKAEDIWRGLEKCLYSDAKTIHFTKRNVLPNIRAKQINRGIVISSVNNRLQFKFNGVKFGVFLKDRFENDEAKAIVNYLAEPDVKDKLAIETLQEEGICISTYRPCYATLVFKKIRGKLRVYVHVTIEGLSKTKYDSKGNPKHQYGKGYVGCDIGTQTIAYTSDTEVDLKNLAERGSTIQTNERKERLIYRAMDRSRRATNPQNYNADGTVKKGYKTWTYSNRYKRLKAKHTELCRINSVNRHLAINEDVNHIRELGDTFITEPKNAKRLQERAKNTTVNSKGKINKKKRFGRSIKNRCSGYFQAQIERKFKNTNGVYIEVPNDYRASQYDHTADDYLKKRLSDRLYKLRDGTEVQRDWYSSYLLYCYDYKTQNIDKNKCRTDFNKCYGKEKALITWIKANSIKILNSGIKVS

SEQ ID NO: 39751 - protein, 407 aa, Parageobacillus sp.
  misc_feature (376)..(407): Xaa can be any naturally occurring amino acid
MFSIFSIVSWLRIKNHLSLPHIKRKKKKSCRIYVLKDPNKGEGKGMKTVRVMKIVSHDESQLRSLDELMRVFCSAKRYAFHRLLEGWNAKDIIKHLPHQFRLNKRFAEDAVLLVQSLISSQRELLPMRLEDVQVKIEKTEKKIDEYQHGRKTPKKVDLPTCLGGLHQRLEKLKAKEAELKRHLGQGTIPRVIFGGKQNFYKRLKGKITNEEWKDVRSNQLYARGDKSKKGNLNIRLVYDDHTDECYVEIANPLGQQEGKHAPRLRLPVSVPEKYEEEIIDLVMGEQVGVNAKGKPIMEYQPYTVEIKRKNGEYYVHLVYEEEVYGRELTYDEPIQAERIAGIDINIDRIAVSIVSKQGNFLQSKVFYCHELEYVRXXXXXXXXXXXXXXXXXXXXXXXXXXXXXXXX

SEQ ID NO: 39752 - protein, 524 aa, Microbispora sp.
LGYHVVWCPKYRRRVLGGRVKARLEELTRAKAAEHDWEIIALEFVKPHPKRSPSYVANQFKGCTSHHLRAEFPHLRSQLPTLWSRSSFVASVGAVSAATVQRYIETQYERVPRTAGALMRRSFKFLLRPTVKQQITLTAMLDDHRALYNAALEERREAYRRAKISIRYGDQSAQLKEIRADDPAGQGRWSFTSQQQTLRRLNKAFEAFFRRVKAGQPPGYPRFKGRGWFDTVTFVEGDGAKWDSQPHHPSATFVKLHGIGQVRAHQHRPVRGRVKQIEVKREGSRWLVVVSCDDVPAVPLPATGREIGVDMGVVHFATASDPIAGVSDEHGHIPNPRYLRTAQEELAAAQRAYAGTKRGSQRRRKAAQKIGRIHRAVARQRADHAHKTALALVRNADVIVVEDLRIANMTKSPKAKPAPEQAGVFLANGAAAKAALNKSILDAGWGVFLGILAHKAESAGRELISVNPANTSRTCPRCGHASGENRKVQTDFACVACGYAANADVVGASNIKRAGLVLRDASAA

SEQ ID NO: 39753 - protein, 395 aa, Methanococcoides sp.
MKAVLFNSFFTKHICIVKTSGELMLKAYKYRLYPTEPQKEILLKHIGACRFTYNWALEQKIKAYETDKKHLSRFELQSRLVHELKPGNTWLKEVNSQALLNTLINLESAFTRFFREKKVFPKFKSKKNPMQSFHIPQHYVVDFENNAIKLPKIKQPIMAKLHRKFDGKMKTATVSFTKTGKFYISILVEDGKELPKAQAFDDETTLGIDVGITHFATLSNGKKIENPKHLKNSIKRLGVLQKRLSKKQKGSANRDKARQKVAKIHEKIRNQRNDFLHKTSSKLISENQAIAVESLNVSSMLKNHRLAQAIGDVSWYEFSQLLEYKAQWYEKTLLKIGQFEPSSKICNVCGYHNGEMTLADRKWECPDCSTKHDRDINAAINIKKFALQNQNLLII

SEQ ID NO: 39754 - protein, 162 aa, Methanococcoides sp.
MKRMKVLQKRLSRKQKGSANRQKAKLAVAKLHEKISNQRNDFQHKLSFKLISENQAVALETLNVEGMMKNHCLAQHIGDASWSSIVEKLEYKAEWYGKTILRIGQFEPSTKICNICGYYNKNITLADRKWDCPDCNTNHDRDINAAINIMKFALDKQNLIGI

SEQ ID NO: 39755 - protein, 429 aa, Haloarcula sp.
MTGTATKTLEATLAPPTAHKERRLHRTVATYRRALEDAFESGCDTQTAVNDVVTPYNLTSYAKDALKSYVPKLRDTYNASELDDDHPIRFTNRGWALDHSPERTHEFCWEVPQAGRGTSFWIPLRINPDQRDLWTDLLDGDVSVGEFRLHQHRTSWQLHVTVEYEIPELKTPDDPTPVGFDIGESMLLAGCAFEQDGPTDPIFVDGGRARHLRKEMHTTLKRLQERDAAEWRIDERFNHYQNALTDIVEKASRRAVEYARGFEDAVIVLEDLTYIRESLDYGKFMNRRLHAWAFARLQGRIENKARDAGIPVEYVHSHHTSQTCHACGHIGSRGSQAEFRCTNDECWVTEYQADLNAAANIASRLDPWGESLSWKPADDDLPRDGSACDCTTGHREASRKPRQTTLSAYGSETSESATDLVGSPAVHGG

SEQ ID NO: 39756 - protein, 289 aa, Haloarcula sp.
VEYRRTAVIKLDTPEGADIHLRETIEQFKYCSNTASEWCWHGDDGYHVTSKAKAEDALYDQLREDTELTANLVQKGIHQAVEAIKSGVERLKNDHDTSRPMFTADTAVYDKRSATFHRDHVSLSTPDGRIKCDYSLPDDSEKPPTKYVTNEDYKFRRATLHRRDGDWYLHASMLKEDDDTDTTTGHRTVLGVDLGVTQLAVASTGRFWSADEFNHWKREYENRRGDLQQCGTRAAHDAIAGVERKEDGRFEIFLHRVANEIVAEATEHDCSHIVFEELTDIRERLPEAS

SEQ ID NO: 39757 - protein, 404 aa, Aliterella sp.
VFNLTYEFKSSPIQSQVAMFEEWLETHRRVYNHALAERKDWYQSRSCQINACSLRSEYIIPADAPRPTFASQCKSLTAARKENEYLKRVNAQSLQQTLRRLEKAFVSMWEQNHGFPRFKKLGRMRSFSFPQLGTNPLANGFVKLPVIGVVRVRQSRSIPNGGLVKQARLARKASGWYVMLTIQWDVSVPSPLPHGEAVGIDVGLTSFVATSNGLTVNRPRFFVDAERKLKLLQQRVSKKRKGSNNWKKAQKKVALLHEYVANCRKDWHRKLSHQICNSAEMVFVEDLNLVGLSRGMLGKHCLDAGFGQFFNILEQTCFKRDVYFQKVDSRKTSQICPSCGLETGKKELSERTHICSSCGYTTDRDVAAAQVVLSRGLAAAGYSVKMLAEGKFIGIPVTQESLPL

SEQ ID NO: 39758 - protein, 361 aa, unknown
  TnpB Polypeptide
VTPQGKAPGLPRSGRLFPPLYKNQQFVRNGRYCARIKVFVRNTWDWITVGLRKTDVDYIALHCTLRKELCPTVCKRGKVWSLDFAYEEEAALNKTDVNDQVIVAVDLGINNAATAVAMRSDGTVLERRFLHLSSEKDRLERSMGRIGKAQRRGVKKMPRLWARAKGISDEIARKTAAFIIDIAVEAGAHVIVMEHLDLKGRKRGSKRWRLHHWRAQYVQEMVERKAHRTGMRVSRVCAWNTSRLAFDGSGRVVRDSTNYSLCTFQTGKRYHADLNAGRNIGARYFVRELFKSLSETTRQALSAKVPEVLKRSTCTLCTLLRVSAVLRTQCHSATELSLHRAKAVPRTPNEGSRIHSDGFAG

SEQ ID NO: 39759 - protein, 444 aa, unknown
  TnpB Polypeptide
MTIHTCYVIDIKSQLVTEKGEVTGSRRVDESLMRATRKVCLDALKFCAELFLKEWENLKGLQSLEMKSRCEVLIHTTKDSIAKYPEFDEKFPYMPSYTRRAIVADALGIVRSYKSNHKNWEALSPAERGAEPKMGFPTIYELTFYKQERRLNFSEGVMELKLYDGTKWDWYAFRINKSESEYIAKMSKTRKLLSPVVEKVKEKYRVRFCFEEKRQLVQNECPLKYRILVVDLGINAPASWSVLTADGTVHARGVIHLGRDEDRLNRRINRKRMYQQAGKKSKNIYRAITSANQQLPLTRQKPSWIPQSHTMWTASCSSTLTLLVKRKAESTANVSICGVPTMCSPEWSCRRTAWVCGSPASVHGAPQSTPLTEAAPPTAAVFTTTNTVTKSITTVYVSSRTGRYTTVISMHRITSGHGSSSGSMRSWMAARNSLRCRCVHWIPF

SEQ ID NO: 39760 - protein, 153 aa, unknown
  TnpB Polypeptide
MDTAVAYDVDCIVFEYLDFTGKKKGRKYRERIHMWRANDVQSRVELQAHRMGMRISRVCAWGTSKYAFDGSGTTNRRSVYHYEHGNKKYNYSVCKFQNGKIYNCDLNASYNIGARFFLREYEKLDGCPKLPPVPMRTLDTLLTLLYSSGEKAA

SEQ ID NO: 39761 - protein, 319 aa, Halopenitus sp.
MLSGMIALRNIEHKRIITRPCERGRRSTVGTKRHFTNRTRLLKRLKIQRAPTAISICRLPLRSNPAITNKPPGYRKRGDRHPRSTVTWKQNGIKHDDKHGQLRLSKGWNLKDGRSDFILVEYETRPDVTVENIQQVRAVWTGDRWELHLVCETVIPVEDAPGDNTAGIDLGISNYLAIDYEDGPSELYPGNRLKQDKHYFTRDEYQIEGENGPSKRARRARRKLSRRKDHFLHTLSKHIVERCIEEEIGTIAVGDLSDIREDDDGDSRDWGQRGNKKLHGWEFDRFTRLLEYKAEAYGILVDRVDEENTSKTCSCCGQI

SEQ ID NO: 39762 - protein, 413 aa, Halopenitus sp.
MYYAYKYRLKPSDAHRKELDRHRDICRQLYNHTLYRLNEYQDERGELPSMTTLRSELPDLKKWWDGLSDVYSKVLQTVVERLFDNLKGLSKLKENGYGVGQLKWKPPREFRSFTYNQSGFKLDKKGGQAVLSLSKLGDIPIRLHRAIPDDANLKQVTVKKEPTGEWFATFGVEMDREPPEPPENPERCVGIDVGILKYAHDTDGTAVGSPDLSAERERLEREQRSLSRKEHGSNNYEKQRVEVAKVKRRIRRKVLDYQHKITTWLVHEYDAVFVEDLNVKGMLESPSNSRNTASAAWRTFLTLLEYKCERKGTHFVAVNPRGTTKECASCGVSTDKPLWVREHSCPACGFEADRDANAAWNILSRGLEDVGVGHSESTPVETVLPVDTPVSAKRVMEAGSPTLKERTASAVSE

SEQ ID NO: 39763 - protein, 360 aa, Porphyromonadaceae sp.
MKLTLKIKLLPTDEQADLILSTMKEANAVCDAISEIAWENKVFNQFKIHGLCYHGFKSSFGLSAQMLVRCISKVADAYKLDKKTQRFFRPLGAITYDSRILTYKDSSVSIWAIGGRLKMPFVCHNPKYLPYIKGEADLVYKKGKFYLFQTVEVPEEDVEDIEEFIGVDFGLTDIVVTSDGVKHSADGLNKYREHRQKVRSSIQRKGTRSSKRLLKRLSGKERTTATIINHTIAKSIVKSAKEQGKGIAIEDLTNIRFTSKRRNKKFKVKLGRWSFGQLRSFIDYKARLNGVKFVVVEPAYTSQTCSVCHSIGTRKNKSFTCTNCGNDMDADFNAAKNIATLGAAVNQPEKSGMYCLLHTA

SEQ ID NO: 39764 - protein, 400 aa, Thaumarchaeota sp.
MIKLTANFKLDGDSSRVEPLFPTFIDMVNELLEFAHKNHITSFKRLRISKYYEFRRKFPDLPSHYIYTACQMACSIYRAFRKLKRRGRAKDGKPVFRKSTIMLDDHLFSLDLRSWIATIATPQGRVKFRLLHGQCHEKFETMKLGQGWLVKRGHELWLKVVFRKVVELREPNGRALAIDVNENNVTIAFPNGFKQIITRERPIRTAYFLKRRRVQSAIKYGKRKQRLLAKYRGREKRRVEDIYHKVANQIIEQALNEDISTIILEKLTHIRRKIHYTRSTNGRLHRWSFRRLQTVIEYKAKLAGINVVYEDAYKTSSLCPICGEELSLNGYRELKCRKCGLVADRDVIGAWNLLKRHVGSSVPPERLQMKALMPDGGRPTKKVMEVNGRSERLSYLSFLP

SEQ ID NO: 39765 - protein, 398 aa, Filamentous sp.
MITLEFKLKGKANQYRIIDEMIRTAQFVRNKTLRYWVDNQEVKLVDLYKQCAIMAKEFEWAGKLNSMARQASAERAIFSIQRFFANCKAKKPGKKGYPQFKKHSRSVEYKTSGWKLSADKRCLTFTDGFAAGTFRLLGSRDLHFYAPDEIKRIRIVRRADGYYAQFCINIERTEKVVLTGKAIGIDVGLNHFYTNSDGETVPNTRCLRKSEKALKRLQKRVSRKKRGSKSRKKAINKLGRKHLKVSRQRKDFAIKTASGVVKSNDFVAYEDLQVRNMVKNHKLAKSISDAAWSQFAEWLEYFGKVYGKTVIAVPPQYTSQKCSNCGDIVKKTLSIRTHICGCGTILDRDHNAALNILAKGLKAHTGIDLNTVGHTGIHAGGQTDLYSLVATPTSKSTG

SEQ ID NO: 39766 - protein, 436 aa, unknown
  TnpB Polypeptide
MQYNVVAAYRSWQERVKAANGESSKYVSQGWRRTADGSVPSYGGDYVNLGAVDQQYAVIENTPSIDGEIILKMVIQGQWYRLVFDFDTVRFPEGKVALPLIRVQDGLPLIRVQDGLPVFVFTVVTDNPVVQFSGDWMIGVDVGLGDYATVVVRDVKTGRIVYETTLSQRVHSLWNSVRASQRQVHALRHKAGRLLSQRQAHMAALDEAQLHREAASRKKRELAILAAQEIAALSHLWGNAVVAVEDLSWVANTMQNGRWNRGAFIQWLTHYVSQNGGWVVAVNSANTSQQCHVCGQRVTHPTHKLSVCPEHGVMDRDVNAAANIAARAVPRVAKARATRAKNRKLQPQTTLRTPPTRASLKYPGRDRTKNAPTPKRKNHRPFSKEVILPVCPARAQAPRLQASVLADQDAHGTLETNKAALKQGNVAYECRLCSPI

SEQ ID NO: 39767 - protein, 381 aa, Nocardia sp.
VQLRYQYRVYPTTGQRNALAQTFGCARVVFNDALRARRRAHESGVKLSDTAVQKLVVTEAKRTVERAWLAEVASVALVQACQDARLAYRNWFDSISGKRKGRKLGAPRLRSRKDNRQAIRLTRNGFSLKPGRKLYIAKVGELKVAWSRELPSSPSSVTIIKDSGGRYFASFVVEISNEQLPEAESEVGIDLGLTTFAVLSNGKRITSPKFLRQAERRLRRVQQSLSRKEKGSKNRAKACLRVARVHASVADARLDFAHKHSTQIIRDNQAVFVEDLCIRALARTRSAKSVHDAGWGMFIRLLEQKARRYGRAFCKVNRFYPSSQICSTCGVRDGPKPLSVREWTCVCGAVHDRDLNAAKNIHAAGRAEWLNACGEAASLSA

SEQ ID NO: 39768 - protein, 359 aa, unknown
  TnpB Polypeptide
MKLTLKIKLLPNKEQEKGLLNTIKEANTACNEISKTAFAKKFYNQFKLHKEVYYPIKGSFNLSAQMIVRCISKVTDSYKIDKKVQRKFKPFGAITYDPRILTYKGSLASIWTIGGRIKIPFVCHNHNYLPYIKGEADLLFKKGKFYLFQTVEVPEEDMKDVEDFIGVDFGQTDIAVLSDGTNYNSEQIKKVRKKYSKVRSSAQSKGTKSSKRLLKRLSGKERRFVSINNHTIAKQIVAKAKAKEKGIAIEDLTDIRKTAKPKSKQQKTELNRWSFYQLRQYLAYKSLLAGVKLVVVPPAYTSQTCNVCNHIGERNGKRFRCKNCGNVADADHNASLNIATWGRTVNRPESSTMFCSLHS

SEQ ID NO: 39769 - protein, 392 aa, unknown
  TnpB Polypeptide
MLTYKRKLILTKKQEERISSWIGACRVVYNMGLEIRIDTYKKTQKSVSKFDLMKQLTQIKDVDWIKDVPSQSLQNTMERLDFAYKNFFKNYSKGAGFPKFAKKNKYRSILLKEVAILNNNKIKLPKIGELKLFKDAPILGIPKTATLIKEPTGYFVCIVCDEINKTIQCKDESQVCGIDMGVAYFCVDSNENIIENPSHFKKYEKQLRIENRSLSRKKKGSNRWKKQAKKLAILHHKIANIRKDFLHKESTKLATKYHTIYVEDLKIKNMTSTCEPKQDENGKFIPNGQSAKSGLNKSILDCGWGMFRTMLEYKTNVIRVNPRYTSQTCNECGNVDSKNRINQSEFVCTNCGHISNADKNAAKNILLKGEGIAINRKSETLVCALVEEPHML

SEQ ID NO: 39770 - protein, 384 aa, unknown
  TnpB Polypeptide
MIKTHKIALNPNRDQIAWFYQQCGYAKFAFNNSLADFKAGLSDDVFHSEIDLNNRWNKRKYEHDWVKAQDQRAGLYAIKNLGRAIEHWKEKRAGFPKFKKRGCKHSYTTDEQSVRMAGKRIKFPKIGWIRTFEKLRFKGKILSVTISRTAHRWFASITVEVEPPIRCCPAPTEFVKMYASHTDIGTPEQMERSIYPTIGIDVGISTLATLDDGTKYENPKPLKRYERKLKREQRKLSRKVFLSANWYKQKQKVERIHYRITCIRRDAHHQATTDILKCASRIGIETLQVTNLLKNRKLSKALSDAALGGFLEKLKTKAKSLGIPIVQADRFFASSKTCSTCGHKKDDLTLSDRQYHCSTCGVSLDRDVNAALNLRPLAAGHAES

SEQ ID NO: 39771 - protein, 430 aa, Streptomyces sp.
LAHFLIRPELWHKIDLVRNRDVSAPGGWRYEAHLSVLADGYVSPATTIRRTQAAALDRVGGVDGNVSNLAVVSLPATGDRAHGKVLSSRITLTSDEQATLARQSKQTRDRNKALDRSRRASNPVHYRPSRPQQQRDERRAAKGLKPRRTTVPAGARTLNATGKPRQAHRRDELSNTYLRLRGRQTMAAACAAEASQHRARRLAAGLVAAHGARLTIEDCDIRSWFRRWGRACQATTPGRLIAALAAECAAVNGGRLLRASTFATALSQHCLCGRRAPKPLNQRTHHCDPDEGGCGLRGDRDLVAAALAAYTTLTDPDAPSTARLDILQARNAQIVFHQGLQEALTESTVDVSPPHSRGRSTTAAHPAPAHTQHRLPVPGPQTAASARRTAGTWITATPDETRTALLRPKAHAGTTRPHPDPSRTPLRDSS

SEQ ID NO: 39772 - protein, 465 aa, unknown
  TnpB Polypeptide
MYIEKEESLMKDNLVTYKIKYNCNEDLLPVVKQYNSVLRFTYNRLLNDGLSTKELTVMQKTLNNTEMIQSHLRNSAIYDSKTLIAKSTTPIIFGGKKLFTQRCKQQITHEEFQLKKLFPLTSIGEMCKGSNRLFKIIDNKTISFNLNRNSHYELNLVEVGSKRAKELDQLLKLQSNKQIAITYKLDLEYIYLTFDYNMLKSYNYKVKKNRVMAIDMNPNSIGWTITDWSNGSYHLVKAGTISIKPLNDYRDSKSVASSNNFHKYITNKRNHEVIHIAKDLFNLCKHFKCETFAIEKLNMKSSDKEKGRRFNKLCNNVWNRTLLVQQLAKHINSSSTTFIDVLRQYTSFVGNILYRQEHLPDECLSSIEIGRRGLEFTNQYIFKRRLLQKNVVFPDLESAKSRIVLSLEELNIDVPDFNNWMALYSAVKKSKQKYRFSSSDAQTYNSEVLFSKFHKHKYVLVYNYL

SEQ ID NO: 39773 - protein, 295 aa, Lyngbya sp.
MRHQAIKVRLYPTTEQKQILAQHFGCSRFWWNYALNLCIETYKATGKSLNQSALNSMLPKLKKEEGTTWLSECYSQVLQATTLNLVTAYKNFFEGRARYPRFKAKKNRQSIQYPQSTKIVDACLKLPGRVGIIKAKLHRPIEGKIKTVTVSTTPSGKYYASVLVELEGDNQSPNSEGKVAGIDLGLKDFAIVNDGLKTSKFANPKHLAKHERNLKRKQQKLAKKQKGSKSRDKARKLVARVHERISNVRQDYLHKLSGQLVDDNQVIVVESLNTKGMVSNHKLAKAISDGEVLPR

SEQ ID NO: 39774 - protein, 352 aa, Rhizobiales sp.
MTGTPLSALVRGTHCKSAPNNKKREGSYGEIGFPPADRLSEECRQSRPEDGRNGEPGHDDREGLAEDTKLLEHALMKLDMAADASPELVRETLAAVCDRAISMALKHRCGAIVLEKGLGKLRSSGKSRSLNRLLNFGASMVFVQMLTRRARLAGIDVLEVWAGYSSTIGNLAFDAPDACASATEIARRGIARLAGIKDVLPALEEGCVSSLWKNGKVSAELGSWQDVHRTIKAAKIGYRRPHPDVPLCAKGSDVHGAKIFCGHAVVRPGRRHRPGLMFRPIVTERLFENNLIILMLANSEVPIEKLPSASASSVRLRERARSAGTRAYVFACETISMMMILSKPFVEESFAG

SEQ ID NO: 39775 - protein, 281 aa, unknown
  TnpB Polypeptide
VRRADGYYAQFCVDVEREIKHEYTGSIVGIDLGLEYFYTDSDGQTIANPRRLRKSEKRLKRLQRRVSRRKKGGKNRKKAINKMARQHLKVSRQRQDHAVKTAGALVASHDLIAYENLQVRNLVRNHKLAKSISDASWSMFIEWVEYYAKLHKVVTVVVPPQYTSQDCSGCGERVQKILSQRIHQCVKCGTILHRDHNAARNILVKGLEVLGHKQAENPHSRVQKERRGIFQDSTDGQSGTYTPGDENHLWLVEGNFGWLSGLVEPGTRRGDSMESPVIAPA

SEQ ID NO: 39776 - protein, 454 aa, unknown
  TnpB Polypeptide
MPRRFRPPDGWVVQGFSFALDPSDEQLAMIARFFGARRKAYNWTLEQIKAGIDAYGATGVESKRPSLYGLRKRWNAEKSAVCVNTETGEVWWSEVSKEVFANGIAGAVDAYWRWQGSRAGTIAGRRVGFPRYNKRGKDRDRCTFTTGAMRLEHDRRHLTLPRLGTVRTHENTRKIERLVASGRARILSVTLSRRGTRIVAAVKLAASRPQQPGLAEPSSVVGVDLGMRRLATVATAEQVIAVVDNPKALERRLKELRRLNRQGSRRTSGSSRYRETAKKLTRLYAQVAAVRQHAIHNLTARLAKTHGVIVVEGLDAAGMLRQEGLPGARARRRGLSDAALGEPRRQLRYKCAWYGSALVEADRFFPSSKTCQLCGHVQDIGWSEHWSCGACKAEHQRDDNAAINLARAASLGSVGAPVKRGAEHKTGPRPAAGEDTRKGGSASAEPNNSVRSAA

SEQ ID NO: 39777 - protein, 178 aa, Helicobacter sp.
VSYPKFKKKREFQGSFYIGGDQIKIIQTANTDYLKIPNLPPIKLTEKLRFQGKINNATITQKGDHFYASISCDIDESEYKRTHKLQESHNKLGIDIGIKSFVSLSNGLNIYAPKPLDKLTRKLVRISRQLSKKIHPKTKGDKTKKSNNYLKHSKKLTHLHEKSLTSDLIFYTSSQALL

SEQ ID NO: 39778 - protein, 406 aa, Symploca sp.
MYAIKVELKLNNKERTKMAQHAGFSRFIYNYGLSLMQQLDHKEYKGSSTKKIDEIQKTFTNFTKKLPEFKWTNKMSSRVYQTGFRAVKDAYSRWHKGLGKKPVFKRKKDKRSFTIVNGSGKVVLEAGKHIKIPTLGTFRIKWSLDCRYVTQTFTVSETAGRWFVSFSVDAERLPPLMHEVAEPVGVDLGVKCFATLSDGSKYVAPKPYKKAKTKLGKQQWRNRNKVLGNRRQGIKASNNAKKHYAKLAKLHARTANIRKDFLNKTTTELARKYAVLHIEDLNTSGMIANHKLAAAISDLGFYEFRRQLGYKQRHYGNRVMLVDRWYPSSKTCHNCGNMQPMPLSERTYECKKCSHIADRDLNAALNLADAPHSELKRLEPSARGGLPVDGLAADSPGRSRKKTVNL

SEQ ID NO: 39779 - protein, 278 aa, Cyanobacteria sp.
MITTRRITYKLKPKRSAVQTLHWARKMHADVYNAALSHRKTQYKRFGVSISYFDQQNSLPSFKEELWEYKQLGFHTLQASFKRVDFAFQWFFKGLAKYPKFKTKRKYRGWTYPDSAGWKAYTEGNNGYLELKDLGLTIQMRGKARTWGKPTTCTIIWDSRDWYASITVKCDPVRETGKGVIGLDFGSKTAIATSDGEFIETPRFQAKAAKQEKSLSKGLRRKWKPEKGKIKASRRWKKLQRQIRQVKRKVANQRHNWSHQVAAESSAVTASLLRKSSI

SEQ ID NO: 39780 - protein, 378 aa, unknown
  TnpB Polypeptide
MKITRTVKLKLECSPKELLPTIELYTKSFNKVCAIGWADQDFNGVSLHHKTYKDVREYLPSQLAVTSRMKATEALKSVKKKKKTSCPKSNLSSIRYDARSYNAMLDKGAVSLLTISGRKIFKTFVPECFLKYLSWKRTSADLFMRNNKIFLHIVFEKDIPDPVLTGDVIGIDRGINKIAVTSVNRFYSGKTSNFIISKYRQVQAKLQSCGTPSAKRHLKRISQRENRYRADVNHCVSKSIVAETKAGTVLVLEDLKSIRQNCRFRKKQRAQVHNWSFFQLQEFLTYKALEKGVAVEYVDSRYTSQKCSVCGYTSRSNRLTQADFKCKQCGLTLNADLNASRNIRQNYLTAKCCDDRAAVNQPIVVSDDTGSVRASCRA

SEQ ID NO: 39781 - protein, 354 aa, unknown
  TnpB Polypeptide
MKITHIYPLNRLSKTQFHILRDAQMEAAQVWNECMQMHRDARLQHTSWPGLKELREATKGRFALHSQSVQMVVQTFLANVDTTRQLRQTHPQMRMRYPYKDKRFYPVAWPAQAVSREQGRVVLPMGRGRKSLVFPLNLPENSGSCTLVWNNGFELHVCMEIPQAENPPGDAHATVDLGQIHLAAITTNTGKAMIVTGRGIRSLKRQRSMQNRTITKKQSKCKKYSRRWKKLQRAKNKLSRRAERRIRNQRHQATRKVIDFCIERKVGTLFIGNPHGVRNQNRGRHQNQRLAQWEYGKDISYLTHKSKQAHIMCFTGSEGSALRKEPHSRKVDKCGTVFVRRGIYAMVVRDKGMR

SEQ ID NO: 39782 - protein, 480 aa, unknown
  TnpB Polypeptide
MSKIYRINEFAKRIGKEPSTMDDRDRRRDELQMHRVFAGHRTHLSLSAVWTAQIQARHQGRFPRLCRNTPQGALRMKVTRTLQADVPPEHTPICQAMGYLRADIWRRYGALGNVGRSALDIRKDIIAQNDQWLDDPFLHRQMRKHFRHGVSHTANQFIVRSDKQSCEIVDGRLVIVIRIARKYGQHLRLTTTSSGQRVDLTGCNLRICLKVGFTEIHYATEKGAGRPHGAQALGIDKGYTEAFADSDGDAHGRAFGAIPTAYSDAASATGKQRNQLHALEKKHRGKGHHAKAERIRRRNLGRKKIDARRSRAQQRLRTIAFQSAHSLVDKAAPVVSEDLTSPIANKVQWRRYNRRMSGWAKGTLADALDSVCEQRGAEHVLVNAAYTSQMDSATGLLQGHRVGDKFYRATGDVLQADRNAALNVLARLSDPEIKRFTPYRDVKRLLLARSPAPLSVNRLELGDPSRQPSAYKSIEQVCSR

SEQ ID NO: 39783 - protein, 249 aa, unknown
  TnpB Polypeptide
MTADGTILARKFINFASDKDHLYHVLNRIKKFQRLHGSREAHNFWAYAKRINDELSKKIASAIVDFAVLYSADVIVFEHLDFKGKKASFKKQKIQMWRKNGIQHIAEHKAHRCGIRISHICAWGTSKLAFDGSGKVTRAQNNHSLATFESGKQYNADLNACYNIGARYFIREVTKPMSKKAWSQCKAKVPDTERRTQCTLYSLKQLHSLLNPPVATQQPGPICWDYTVLRELCGRLTPMWRPMPSGIVS

SEQ ID NO: 39784 - protein, 401 aa, unknown
  TnpB Polypeptide
MRKINRSYKFRLYPNKSQIDLLERHFGCTRFVYNYFLNQRIEQYRLTGKSDNYYSQAKALTALKRQEETAWLKEVNSQTLQFAIRCLEEAYVNFFQKRAKFPKFKSKRSKNSFTAPQFASITDKRLFIPKFKEGIKCHVHREIKGKIGKVTVSKTPSGKYFVSVFTEEEYETLLENTNKSVGLDMGLKYFIVTSDGEIFKNNRYTIKYGIKLAMAQRHLSRKKKGSRGFENQRLKVARLYEKISNSRTDYIHKCSISLVKKYDTICIEDLNVKGMMKNHHLAKYIADVSWGSFVTFLTYKADWNGKKVVKIDRYFPSSQTCNVCGNVNKEIKDLSIREWECPICHTHHNRDVNAAINILNLGLNKNISAGTVDYTDGEDVRANLLKGQSSMKSEAREETRG

SEQ ID NO: 39785 - protein, 410 aa, unknown
  TnpB Polypeptide
MDRTVRIQLHPTPEQAEALQETLVQFTQAFNAVCVYGWQHREKNGVKLHHAMYYETKAACPGLASDLLIQARVKATEALKSAFTWQKKHEQVYQKKVAQAKKRGKPEPICKPVRMPQSKLCPIRYNVHTYSLNWDTQSVRLSSSAGRLTIPFTVPHFSTQYAGNKIATADLMYRKGTFWLHVVVDVPEPVLPKGTEVIGVDLGLNRPAVTSKRQFLGSKHWKEVERRRFRLKRKLQSKGTKSAKRHLKKLAGKALRFHRDCDHVLSKRIVQTASGGSTIVFENLTNIRDTSKMGRGKQNKNVDNKRRLHGWSFAQLYDFTVYKAQERGIRVERIDPRHTSQQCSRCGHQARNNRRSQSLFLCRKCGYCLNADYNAAKNIREKYIASLASLGTSLGSGSPSSGLSLPSSEE

SEQ ID NO: 39786 - protein, 416 aa, Okeania sp.
MRIAYQYKLRPTNEQAEKIDRTLDMLRCQYNYMLAERFNWWEQNRCSINACPLICHLPELKDRPTRFSQQKSLTQLKVDRPWYKEIHSQVLQEVPKRVELAFDRWLKGDVNGKRLGKPRFKGKGQYKTFTYPQFKQHHFVNNKVKLSKIGDVKVIVHRPIPDGFSINTVSVTIKSNGYFVTFSLEDKSVPEIQPDIRGGKMVGIDVGLIDFFVTSDNESVPAPKYLRKSEGKLKSAQRKVSRRKKGSKRRQKAIKQLAKKHRKVADTRKDFHFKTANNLLSKYDIIAVEKLNIKGMAKSRLAKSVHDAGWGQFNTILTNKAVSLRDMKSAAPLKEAKAGQLIVEVKPHGTSVECSRCGHKVTKTLAQRQHNCPNCNLSIGRDLNAAINIKNRAKVLIEDLLPPIKFETEKGTQLSL

SEQ ID NO: 39787 - protein, 353 aa, unknown
  TnpB Polypeptide
VLSTSGVQGIPSASASRKHSLRPAATELANARQNYQRAWKQFRAVHHAGVPNFHKKTSVESYQTNPHYSKGTEISLFTSNARFLDKHHLMLPKLKRIRFQGSRKILDRLFAMKEVRIGTITITKDSRHRYFASFQLGSDEPFVKTSPKTKAEIGIDLNVENFYADSNGEIVANPRYYRRQKRRLANAQRKLSRRIVRAKKEHRPLREAKNVEKQRLLVARLTAQVMQRRRDFLHRTSATLIKNHDLVAAEELRSRNLLKNHALAMSIQDNGWRMFLSMLTYKAALYGKNFVTVDPRNTTQTCHACGHIMSGKEKLTLKDREWICPKCGIHHIRDVNAAKNILARAKAKLVSMH

SEQ ID NO: 39788 - protein, 132 aa, Cyanobacteria sp.
SETIAVENLAVKNMVKNPQLALAISDASWGELVRKLEYKCGWYGRTLILIDRWFPSSKRCGNCGHIVEQMPLNIREWNCPSCGTHHDRDLNAAKNILAAGLAVTVCGATVRPEQSKSESGWCETPKGTEAET

SEQ ID NO: 39789 - protein, 411 aa, unknown
  TnpB Polypeptide
MLKAIKIRLYPNMEQESYISNLLGSYRVVYNLALNHKKEIYKETKENYRLKELGKEFHQNWLKADEYFYLKEHNTKVLKQSIINMLDSYKRFFVNGTGFPKFKSKHDSKQSCRFPSEAISKRNDYLSNRITLTNKLKDIKFKTSDKYKKYLDKNKFNIKSATLTRNKSGSYYLSILVDGEANPQISKPNNQFIGLDLGIKDFIIDSNGNTVENIKIKRNNKKKLAKLRRELSKKQKGGSNRNKAKIKLAKFYEKLNNKKENYLHHVTNQLLNENQVIIIEDLNVKGMMKNHNLARSIQELSLYRFKEILMYKANWYGNHIVQVDRFFPSSKLCSCCGYKNKNLQLKDRYWVCPDCKTKHDRDKNAATNILNEGMKLYKENIGHRLSDLKPVEKTSLDGSMKQEIKTVHINA

SEQ ID NO: 39790 - protein, 419 aa, unknown
  TnpB Polypeptide
MFCAIILFGNNRTGDFRFAQKVYRETGKMLTHKFRLYPSRKTETKLLETLEICRQGYNTFLGELNEQKEIDKSEIQGTIPDMKICDDKFSKVHSKTLQYECYKLFSNLRGLAQRRKTGKVGQLRFKGKGVFKTFTYNQSGFRMINNSKRCQTLWLSKVGNIPIRCHRPVNGNIKQITIKHFPSGKWFAFVREDGNRQNQYPMTNKIVGIDLGLIDIAYDSDGNKVTNPKHLKEKDKRLKHLQRMMSKKQKRSSNRNRFRIQLARQYEKLVNTRDDFLHKLSNYYVQNYDVIAMEDLKIANMAKGYYSKSILDACWGRFGQFISYKAENAGRIRMLVDCRGTSQRCSQCGKLVPKEIGEREHRCNNCGFIAPRDYNSALEIKRLCLERIRQELPEYKHLEMEALPIRQLLSVKNEAPCES

SEQ ID NO: 39791 - protein, 291 aa, Moorea sp.
MEFKAVIKKSQKVAIDEAIRTARFVRNKVLRYWMDNRGVGKKELDRYNTQLRDEFKFVKDLNSQACQASVENVERAIKRFFDNCKKKVPGKKGYPRFKKHSRFGVADAARTVEYKQSGWKLSPDNKSIKFTDKKGIGNVKLKGTWDLWRFDQKLIKRVRIVQRTDGYYVQFCIKVDNHEQLEATGFTIGLDVGLKEFYTDSDGYSEPNPRFYRTGEKRLKFYQRRVSRKNKGSSNRRKAINKLGKQHLKISRQREEHAKRLARSYRKKSAAFIVGRLCIKGDRFCCKAALF

SEQ ID NO: 39792 - protein, 411 aa, Kosmotoga sp.
MSRHIKVYKFPVPYTHNSQYKELMQLAGRIYSKTVSIIKKTHKRKGFWLSINTTQKYILRWAQDIPLHSQTKQALVEKYFEALKGYFKARKTNSDLKPPFRTPKYFVVIWKNQAVRLLKDGTLRLSMGNGRNPLYVLTTLPQGVDIRRVELVYDRKQDQYFFSVAVAFESKTEQLGNKVAGVDLGVIHPIVASTEDQTILYNGGELNAKLQYRNKKHAEFQRKLSKKKPGSRRYRKLVKAKRMFLKKTQNQINDILHKYTTHLVGWCLSQGIGTIAVGDLRGIRDRVDYNSTANQKIHQWLFRKVSDLIKAKAETVGVKVVFARESYTSQTCPVCGAKHKTSTRNFKCPDCGFMGHRDAVGAFNIIKKYTGESLVVGSLAYPVGVRYSSHLCCPVSMWSPWKPTIEWARTS

SEQ ID NO: 39793 - protein, 409 aa, unknown
  TnpB Polypeptide
VLRTSTVLLKPTDTQPLRALAEQSAILWNIANYERRKAFYEHRKSPSYPTQCRELKHTEPFRKLGTCKAQALLSMLNEAWQSFYALLRLKKAGKLPLHIKKLTPPRYWKRNGKREARAFYVRNDGWGINENEISIAKGIKIPYQCGELWVGKLGRLDVLYDKLSGKWYAHFPVEVEWEPPSRTAERKASLDLGICNLATLYIEGERPIIYSGRAVLSDWVYYTKKIADKQSKLPKKRHTSKRIRLQFRKRQRRLKHAINTMLRSIFSILEQKGVSELYTGDINGIRKEANHGKKGNQKLHNFWAYQIVEKRSMELGEECGIKVVAVSEAYTSETCCLCGKQHNGRVERGLIVCHEKHQSINADVNGAVNILNVAVNRFPSVLSTDKTETSGSRLLAEPLLLRWNYNEWR

SEQ ID NO: 39794 - protein, 374 aa, Paenibacillus sp.
MNKAFKYRIYPNAEQEILMNKTFGCVRFVYNQMLANRKEIYEQFKDDKEALRKQKYRLPADFKKEFEWLKEVDSLALANAQLHLQTAYKNFFRDKSAGFPKFKSKHHDGKSYTTNNQGGTIRLIDSKTIRLPKLKDVRIKLHRQLPKEAVIKSATISKTPVGNYYISILVEYEAHIEPVLPTSETVLGLDYSSQSLFVDSEANDADYPKFYHQAEEKLKKAQRKLSQRQKGSKNREKQRRKVAKMHEKVANQRKDFLHKLSRQIANAYEAVAIEDLNMRGMAQSLNLAKSTNDNGFGMLKTFLAYKLAEQGKQLVVIDKWFPSSKRCRFCQHENKALTLADRTWVCNHCGAELDRDVNAAINIKNESCRMLGIA

SEQ ID NO: 39795 - protein, 509 aa, unknown
  TnpB Polypeptide
VRLYDTVTRHRFTTDGGVDMEQVSADLAQMVAWMAQAEREALASQEFHDLALRALRGDRPTGSLNSWGRKRLSRYDFSFQKHNMNEMLVSNVVSALELYAMSVGLFQVMSTHPKETRPEKILSYYRGTYPDASQPTIGMVRAHLRRYHVKGERKASLPGVSAKLNLAVCDTYFAPKTFREDVDSLNVIVQVKTPSYGITRLYLRLPDNESRFGDGKVCRPTIRLNNKGQVVFDVTVEHEINTHQTKNIVGVDLGKVEPFVATVIDPETKHRSAPFHTNYKKRLASLVKKEQRRRDLASHLRKKADLCEKHNRNFHAQVLGIEAKRVSAKATRIKHEISQCIANQVVSIADQSDAHVSVENLSWLDAKGGRWPHAEIQGRIKSTAKRYGLKVVKVSAKDTSRTCSRCGGKVLNNSRTRVGICSGCGFSLNRDVSASREIALRAVSNAKNRDRVRSLLRQRQEMRSLAVTRQSKPVTVLGGIQGHTGTSGEGPEATLMMVRENLDSRGSPT

SEQ ID NO: 39796 - protein, 385 aa, unknown
  TnpB Polypeptide
MMIRKGYRFLLKPTAAQAELFCQFAGSSRFVWNKALECQKSRLENGKGVFSYAEICSRLVEWKDEFNFLKEVHSQPLQQAVKDLSLALKNCSDGTKGFPKFKKKGEHDAFRFPQGTKLDNKKVYLPKIGWVTFRQSQEIEGTIKNVTVTRSMGKWFVSIQVEMEVQEPVHPSKNEVGIDMGVTRFATFSDGTFVAPINSFGKVKAKLARAQRQLSKKQKYSNNWLKQKHKVQLIHSKIAHVRKGFLHKLTSSISKNHAVIVLEDLKVTNMSASAKGTIEDPGKNVKAKSGLNKSILDQGWYEFRRQLEYKQQWRGGQVILVNPSQTSLQCSDCHHRAKENRVSQAEFKCVMCHHEEHADLNAAKNILAAGRAVRACGDIIKRVAA

SEQ ID NO: 39797 - protein, 519 aa, Natronomonas sp.
MVVDAYRTAPLPTQVSGDTVQALHDTAEQYYYCQNQTTDYCWPDHPKKPSDLITTKREVRDEIYARLKSETDLNANLVQAAIKQTVENIAGLKTDWKKGRRISKPEYDSSEEGWSVLFDKRSSTFRKWKATLSLVDGNRHETQFILPESLDNPYGGYVLSDVFEYQTLRIVYRPDSPSDHEFYAHVQTRTEVEPAPLPHPESIPNTTAFGELVGSAWQESIRSRGNGSDTQKHQRVLGVDRNVTGYSVVTSAGGFHGSADHLNHRRTNWENTRAGLQQTGTRSAHRTLQSMKGREWRWFDQLAHSIANAICVDVIRVRATHVVFERLLDIRQRISNKKEYQQWFFKRVEDYVEYKLEPYDMVVDDVSGAYTSQACSRMDCSHVARSNRSGKEFECGECGYALDADLNAAKNVAYRYVREEFYGDSVAEGENWFDVVEQAEEADTGVSESHKSSSGRAASEATEDTDSQPAPMTTIVLKSGLLELDGRFAGEEWPQPATVDVTAESRTSPTLNEATSVAE

SEQ ID NO: 39798 - protein, 407 aa, Natronomonas sp.
MNYNYRYRLRPSNALAEQLAWTVDTCRQVYNHFLHRLNRTDDTSAYSEQEQLPDLKKWWNDLNQVHSKVLQKVVQRLYDNLSTLRGRKKNGYHVGTLNWKALGEYRSFTYSQSGFKLKNTSGRTTLWLSKLGEIPLTFHRDLPDNADIKTVTIKQEPTGKWYAILGVETPEESPEKPENPEKCVGIDVGILKYAHDTDETAVESLDLSDERDRLESAQRDLSRKEHGSRNWEKQRQAVAERHADLKRKRRDFLHKLSNYYAREYELVAVEDLDAKGLVELPGNSRNRAGAAWGTFLSMLEYKCEREGTYFVAVNPRGTTKECASCGVSTEKPLWVREHSCPSCGFEANRDANAAWNILSRGLEDVGVVHSERTPVETALPTDTRSVSAKRVVEAGSPTLKREPLGER

SEQ ID NO: 39799 - protein, 584 aa, Rhizobiales sp.
MIRTFETRIGKLDDQKAFLLDDLAQRMCVAERKIYAFLASGREWKADNYRQIYQNLGLSSAMFRSAKDSLDGKLSSISELAKVQEADLQIRVDEKEAQIACKLEQQLSGRKKLGDLQGKRHRLRAKADELKGRLNGPGVDERKRAGLLKKLKKLLNKSDAIAEECTELKAALASIPFALHQHKRKLVSLKHNLKRASERIARPRICFGTKALARKQNNLKLNGFSSLTEWKKQWVEARNRSFQFVGVAKMDGGNEVACLQLQDDGLFSLELRLPPAVREEYGESTIFHELSFNHGHDAIVTALATRRALTVRFVKDETSWKVHVAIDQPVATVKFADNLGCLGVDFNADHVAATLVDRCGNPIQTWAIPMVTYGLATDQAKDLTRKVAKELVEIAKMHDVPIAAENLDFAKKKAQLTTESGARYARMLSSLAYSAFQQALASACARNSVHLRQVNPAFTSLIGRTKFARRYGLSVHAAAALSIARRAMGFSEKLPTSGDGKLVLPFDDGDHVTLPRPVRIEGRHVWSSWRKLNTGYQKAHAAHRLTRHKSRSLRLTPDGPNSGTALLRRNDVPLSVGSVQGVPG

SEQ ID NO: 39800 - protein, 490 aa, Rhizobiales sp.
MQTISLPYQCSVEDKAFVALVQRKYSAAVRTAFKHCLDGHGNLVKEQELRDLVKRRHAGGTVDSWALHCATLEARDMHKSGQPRHMVFGGRKNLERRQKGLIDKEEWRRMRLRPFVSRGDKQYGGNRHFKLDLDGRSCLFTMMLPKISGQKMQWRSVALHLPEITGNAGRILRQAAELAADKKINVMFRIDQKKLHITIDPDDLPAHPERQRPARAVAARAIGIDLNPESIGVSVVENRGNAADLRNTRLLDHLIVKTVAPGSTTSETVREMLASICDRTIGLARKWGVGVISVENGLGKLRSASRSKDTNRKNNYWTRTVLVQMLTRKAKLAGIEVVQVWGGYSTTIGNLAFDAPDAAAASAEIARRALARRAKIKDVLPVLDEGWLASLRKDLLPPAERVGWKDVHQAIKAAKIGYRRPHPEVLPPDPDGRVRRYASTGHAVLRLGHRRRPGVLFRPGPIKMQGDSSETCVPKAKVVLPALHSTRKSG

SEQ ID NO: 39801 - protein, 408 aa, Rhizobiales sp.
MKEQMAYKFRIYPDEHQARLFRMTIGCCRFVYNLFLEQKKLERGRSNARRLSQVDQIKQIPQAKQDFPFLKDVPNHCLQQAVVDLHKAWGNFFAKRSAFPKPRRKYENESFRFPDPKQVKVRSGQVFLPKAGWVEMVDHRRIIGTIKNVTVSISGDHWYASIQVERSVKEPPVREGLELGGDLGIVHALALSDGTIYDVPRMTDKEKRKEENLARIVSRRKKGSRNRAKAQRALRHYKAKLVRRRKDAKHKMTTDVVRRCAVLHLEDLKVKNLTASAKGTVEEPGSNVAQKAGLNRAFADVSPGETRTQIIYKMRRSGGSVLFHNPAYSSQRCAECGHIDAENRPNRDTFRCISCGHAACPDTNAGRNILYMGVKAQTGGPPGLACESNRVAGRKQEEDGSSQGAKAA

SEQ ID NO: 39802 - protein, 407 aa, Cyanobacteria sp.
VIKVLEAVKVRLYPTQEQELILSRSFGCARWYWNFALNACIQHYQETGKTLKMATYKRMLPQLKKEFPWLKEDCYSAVLQCVAINLNKAYTNFFQGRAKFPRFKSKQGKQSIQYPQNVTVSGDKLVVPKIGELKAVFHREIIGTIKTVTISKTPSDKYFASILCEVEGNEFDCTGDKTLGLDLGLKDFAIVHNGEQVTKYANPKTDQRHEKNLARKQKKLARKTKGSKTRERYRKFVAKVHERVSNTRQDFLHKLSRKLVDESQVIVVENLNVKGMVRNRKLSKAISDVGWGMFVNFLAYKLERKEGSFVEIDRFFPSSKKCSCCGHVMDELPLDIREWDCPSCGTHHDRDINAALNIRTEGIRILTMDGGNPVPAGGACVRPDNRKVKGQRAMKLEAHTDSLERCG

SEQ ID NO: 39803 - protein, 221 aa, unknown
  TnpB Polypeptide
VTITQEPDGKRYYSILMEYPKPQAATRSAIQDGIGLDYSMPNLYVDSNGNSPEFPRPYRTMEPKLARAQKKLSRKKPGSKRYQKQRMKVAKLYAKSKHQRKDVLHKLSCTLTDTYDLIAIEDLDMSAMKQALRFGKAVSDNGWGMFVSMLTYKAERKGKLLVKVDRWFPSSKTCIACGHIHKELKLSDRTYLCPVCGHAMDRDEQAAKNILNEAKRMTGAA

SEQ ID NO: 39804 - protein, 387 aa, unknown
  TnpB Polypeptide
VFQAFVYRLYPSKNQRGRLEAVRETCRHFYNACRRERKDAYEERGETISKTVQLRKVKVEKATSPYALDIHSHILQNVVADLDKAFQAFFRRVKAGENPGYPRFKTRNRFPGFGFKEYGNGFKVGPRQDAGEGRRLYLSGIGRIAVRWHRGIEGTIKTARVFCRAGKWFVAFACEVEKPEPLPETGESIGIDLGLLRLATLSNGEKKENPRWYRKILRELRVLQRKIARCMPGGRNRRRLILRLQRLMVHVANARKDFLNKFVHELIERFDRIVLEDLRVPAMVPGRFAMSILDAGWSYLVSHLAHKAESAGREVVKVDPAYTSKTCSGCGARFEHLSLWDRWVECDCGVSLDRDHNAAIVVFQRGRNGPLGAKLANGWVCPEAARL

SEQ ID NO: 39805 - protein, 411 aa, unknown
  TnpB Polypeptide
MDSIVYVVRDVEIVLDDGEIERVREVFKSYRKLMRILRKYCECARNCKKYHRKYSEAYLGRSPEEMLNRNTLKKVLERHPELKIPSVTCFHRELLANVKAGGKQRHILAPWGRNKTIYINRKGELVIRGLNIRRELDSRTLDRIRRLKERGFRPVVAQIIWRGSRRLLVKVVFRGLSRVPRRIDVIEALKEDRLSIVSTDINSIHGIWIGLFRVVNGEISLMNVSKQNVDWVRVWQLKGRERELMSKLDRYWLTRKEFTELRIIRKYIREKIRLNKNLAVHKIIELIEEEKKLGRTVVLALERCSKRDVERMLKRYRRLPRYQRWGMSWFMRGWEKRLKEVARTYGAWFISIDQYKNSTICPHCRVEMKRVKNRTMKCPRCGKRWDRDKTSIWNIARKALERIIKWIEENR

SEQ ID NO: 39806 - protein, 421 aa, Crocosphaera sp.
MIVLEMKAIAQQYQQNAIDEAIKTVQFIRNKALRLWMDASQEDKIDKYALNKYCAVLAKEYIFAKELNSTARQASAERAWAAISRFYDNCKKKVKGKKGYPKFQKNNRSVEYKQSGWKLSDDKKKITFTDKKGIGTIKLKGTRDLNFYPIDQIKRVRLVRRADGYYVQFCINLDIREYRKPLEPTKHCTGIDVGLKYFYADSDGKTVEIPQFYRKAEKALNRLNRRKSKKFVRGQKHSSNYKKARKRYALKHLRVSRQRKGFAQEKALRVIQSNDLVAYEDRRPSLNLIQAGKRRCIPHLNVKAMVKNQRLAKSINDAAWSTFREWLEYFGFKYGKATVAVPPHNTSQNCSNCGEKVKKSLSTRTHICPHCGYVEDRDINAAINILKRGLSTVGHTESKAWGDLPSGLVGEILLGDGESVN

SEQ ID NO: 39807 - protein, 381 aa, unknown
  TnpB Polypeptide
MARLFGKIEKDLYKDLERGKKLNDLKKSYQIKYQINARQFNSVHIFLKGKIASRKEGYSRQIKEIETKIKFLTKRLSDSKKKLKKLGFSCGLNSQKTEKNKLKFFLNQKQRKLTQLQDRLGSLKNQKPSLIFGGKKLWSSQFNLEENGYENHEQWLNDWRNTRSSQFTLVGSKDETLGNQNCQLLPDGTWKIRVPLCYEPIFGKYYIVENVHFPYGQKDVEYALNHKQALTFRFVRKEGKWYVFCSLDLPVVPTQTRCQNGMIGVDLNPSVIGWAYCDAEGNLKAKGQIPINVRDKRKNQTKAIIGDAVKELVDLAGKYGCPITIESLDFSRKKATMIDGGVRYSRMLSNFSYSCFHQMLISRANRFGIEGATRCLENQTL

SEQ ID NO: 39808 - protein, 362 aa, Methanogenium sp.
MYPNKEQKKLFFQHFGACRFVYNWALENKIRAYESENKPVSRFTLNKMLPDLKSEHVWLKNINSQSLQGATLNLENAFTRFFREKNGFPTFKSRKHPVQSFSVPQGYAVNFETHKIRLPKIGWVKTKLHRGYEGVGKTTTVSLTPTGQFYISILVDDGLEQPEAQQFDENTTIGIDVGIKDFAVLSNGEKIDNPRHLKAYLLRMKVLQRRLSRKQKGSNNRNKAKKAVAKLHEKIHNQRNDFQHKLSFRLVCENQAIALETLNVAGMLKNHKLAQHIADASWSSFVTQLKYKAQRQGKTILRIGQFEPSTRICSNCGYYNRGLTLADRDWVCPDCGSTHDRDINAAINIRKFALDKQNLIGI

SEQ ID NO: 39809 - protein, 462 aa, Holophagaceae sp.
MQIGFRTRCYPRPKLAMILAQWTGCQRVVGNAKHDELNLLIWLRKRAILSPSWEGPDPQLDPFPLDQTFSQFKTDQTPWLSEVPAVILRNGVVRYKRGWSNHWKNPSHFRRPRRKKKADTNSVWLTRELFRFISPGLVEIGTAAHPVGVLPFVQHREIPQPASLVISRARYGHWFLSYASDCVQGPEMLADEARLQALAGQPDLEGKVQGIDRGVVLNAACSDGSTFAMEDDAKARFEWLEKRRRGYQRKAAWGKKGSRRRDKVLGKTARCSARIASIRDDFLRKTSSQIAKAAPEVTALEDLNLKGMTKRAKAKQDETGKWLRNGAAQKSGLNKALANAGLGNFRVYLEQALRKLGKMLILVPAHHSSQECSECGHTEAANRPDQETFLCQRCGHADNADLNAAKVIKKRGIALITSAGSADSARRVPKGRGAVRRIKGEQPSAASVKRETPSLTEPTWAA

SEQ ID NO: 39810 - protein, 402 aa, unknown
  TnpB Polypeptide
MRLLLKAFKTEIAPTIEQKEKIIRSIGIARFLYNQYIAYNKKLYKMYQRGLLDINQKHFISANDFDKYVNHNLKLKLPWIDKCGSKARKKAQVNAETAFKKFFKGETGFPRFKKKANQDVKLYFPKNNKGDWTIWRHKLMIPTLKQVRLKEFGYLPVDAKVTNGTVSYEAGRFYVSVVVDIDEKSKCNKDLEASYHTVTEGIGIDLGVKELAIVSNGKTFKNINKSLKIKKLKKRLRKEQRCLSRKYEFRKKKGGRTATSSANIEKQKLKVQKLHQRIDRIREDYENKVIHEMVKQKPCFITVEDLNVKSMMKNRHLAQAVAAQRFNILLTKLKRKAEIIGIELRIVDRFYPSSKLCHACGHIHKGLKLKDRVYICPECGYTEDRDFNASLNLRDAKKYRAA

SEQ ID NO: 39811 - protein, 369 aa, unknown
  TnpB Polypeptide
MANKAYKFRLYPTKEQEQLLAKTFGCVRFVYNQMLAERIEIHEKFKDNKEALKKQKFPTPAKYKQEYPWLKEVDSLALANAQLNLQKAYQNFFSGRAEFPKFKTRKAKQSYTTNMVNGNIKLLNGYIQLPKLKRVKIKQHREIPSHHMIKSCTVSRTKTGKYYISILTEYEHQPVPKEVQSVVGLDFSMNTLYVDSEGKRANYPRFYRQALEKLARAQRVLSRRRKGSNRWHKQRLKVAKLHEKIANQRQDFLHKTSRQLANRYDAVVIEDLNMKGMSQALHFGQSVHDNGWGMFTSFLQYKLAEQGKKLIKIDKWFASSKTCSHCGRVKASLSLSERLFRCACGFVADRDINAATNIHKEGLKQLGIA

SEQ ID NO: 39812 - protein, 395 aa, unknown
  TnpB Polypeptide
VRVRYRYRLYPSPGQQQALVRAFGCARVVYNDCLRIRDMAHATREKISDTEVQRRVITLAKATPERAWLAEVASVALVQACQDARRAYKNWFDSLQGRRKGPKIRHPKPRRKRGRQSIRLTRNGFAIHRGRLRVPKVGDIKVEWSRDLPSVPSSVTVIREPDGRYYASFVVQREPTPLPAGDREVGIDLGLNSLVVTSDGETVANPRFYRAAQRRLRRAQRVLSRRQKGSANRDRARHRVAVVHRRVRDARLDHAHKTALRLVRDNQVVYAEDLCVSGLARTRLAKSVSDAGWSQLIRCIAEKAARYGRTFARVGRFEPTSQVCSACGVNDGPKPLSVRQWTCVACGTVHDRDVNAARNILALGRRERLNACGAGVRPPLTGAAGAEAGTRRSAA

SEQ ID NO: 39813 - protein, 443 aa, Deinococcus sp.
LQSKIFFVKITLTAKLKLNHTREQKAALDAVTLSYRDALNYTSQVAFEMGKSSNQAKIQKEVYATLRERFGLGAQMACSVPRQVGATYKTLWTKVKQAKAARERNPKARRYKGLDNAPRFVSRTLSYQYQRDYSFKKGQQVSISTLAGRLVLPYEGYARHLEYIASGGAEIRAGKLWYDKRKKQYFLLVPMEIELPEPDPMTHKQVVGVDVGMRYFAVASNTSNKALFKSGKATLRKAERFQKARKSLQQKGTRSAVRRLVALSGRERRFIADTNSSLASEILKTYPHAFIGVEELTGVRNRTERRSRKGSSEKTRKANRRRAKWSYAELLGFLAYKAPLHGSMVVKVDAHYTSQTCSRCGHCSKGNRPNSGLMFVCQSCGYHLHSDLMGARNTGLRALLVRQDWASTGCLSCTPDVSDAETKAARLSRYAELRWSPDTSPRL

SEQ ID NO: 39814 - protein, 434 aa, unknown
  TnpB Polypeptide
MFLAVQKDDFTPDSATRKLLEGLASLANNLYNQAVYESRQSFFEHGRKPWKVLSYPKIYAALKTSENAKLLHSQVAQQTMKSANEAFRGFKVLSRLWKLGELDHEPKLPRYRSKGGLYQVVFTGQSLTVNDGMIRIPLGRGYAKEQGQDCFHVPLPDRLANVQIRELRFIPTNGQWVIEYVHESMETPALSCLLQPERVLALDPGVNNLLTGVTNTGEAFVIDGRSIKAENQGWNRLVSRLKSILTKGKESTKGITSKQIQRLTHNRNNFMRDAVNKAARWVIDFCQQNQIDTIVYGRNKRQKESINIGGKNTQEFVQIPHYKLFSRIQQLCLVHGIRLIETEESYTSQASFLDHDLLPVFGEKPEGWKASGKRVKRGLYRTAQGWLINADGNGAANIMRKVSTKLGINLSGVGRGAVAAPSKVKLTPAGFSLT

SEQ ID NO: 39815 - protein, 361 aa, unknown
  TnpB Polypeptide
VNLTAQLKLEPTTEQVTALGRTLVASNAACNYISGVAWDSKTFRQFDLHRLCYRTARERFGLSAQAAVRCISKVADAYKLDRKAKRTFRPMGSAAYDQRILSYDLEGSTVSIWSLTGRLRIPFVCGEHQRSMLANRKGETDLAFVRGKWYVLANCSTPTPKAVMPHGFLGVDFGVAQIAADSDGVLYNGSEIKSVRHRQGRLRARLQARQTRSAKRRLKQLSGKEHRFAKHVNHAISKQIVAAAERTGSGIAVEELTGIRDRIRATRQQRGVLHSWAFAQLRAFLEYKAKRAGVRFVAVEPRNSSRKCSACGHTEKRNRPNQSTFRCVACGFAAHADTNAARVISGRAIVSGPNVASCALG

SEQ ID NO: 39816 - protein, 445 aa, Cyanobacteria sp.
MGRNGGAAPYLRCPNHWLRLHEDANIKLRRETIMRQTLTAKLKLEVTQEQKEQLRVTSLAYRDALNYTSLVAFEMGKTYNGTKIQKQVYYTLREQFKLPSQMACNVPRQVGATYKSLRTKLKQNEEAIKAGRTKKRYKGLDKPPKYVSRTCALNYQRDYSFVKDQKVSVITLDGRIKMNYHGYSKHLEMINSGVAKIGAAKLWYSKPTKTYYLLVSIEVEVPELTPTDINRVMGVDVGQRYIAVAADTRNQTQFFSGKEVRHKASRYVRARKSLQRKGTRSATRRLVALSGRERRFIADTNHCIAQQVVTPSTLIGLENLTHIRERTEPLRKGKKASNKQRRANSNKACWSFAELHGFIDYKAVLAGSLAVKVDAHYTSVACPCCGHTSKENRPNKGLAFVCQQCGYTLHADLVGARNIARRSVTLSARLGEYGAFFSRPWCVIG

SEQ ID NO: 39817 - protein, 421 aa, Micromonospora sp.
LADGTHEQFGVLANAWKETVRDAMADIGANLAAATVQVRRAVGRRRSDPTERRRMLTALRTGQWAGEPFLARQMRKHWKRGRNRTHDQIVVRADQYNVVADERGHLWLAIPGLQRRRMVRIPLSTLVAPTGTLRLILRAGRVEVHYQIDASQLRSSQRPCGGRTIGVDKGYTEALTDSDGDHHGRSLGELLSSESDQLKERNRRRAKLRSIANNAALRGDQAKAHRIRCNNLGTVKRERQAARHRARVRTEIFTAVHRVVDKAATVVAEDLTKRFTGRKTFGKNVNRRLAGWTKGVTAEALTNVSERRGSALVHVNAAYTSQACHRCGSLRRRGGDRLHCNPCGVVWQADVNAAINILQRAVDPDIALHTPHHRVKQILQDRTDRHRTRLPVQDSSPATTERRAKHPNCSATSNSRKQVDR

SEQ ID NO: 39818 - protein, 410 aa, Micromonospora sp.
VRTAYKCRAYPTPEQASVLNRTFGCVRVVWNRTLAARHARYHAEGKSTSYAETDRALTEMKRLPELTFLNEVSSVPLQQTLRHQHTAVTAFFAKRARYPRYKSRHGRQSASYTRSAFRMRDGQLSLGKTPGTLRVVWSWPDVDVTALDPSTVTVSRDPDGRWYVTFAVAVAAPDGPEPAGQVVGVDLGLTDFAVLSQPVPGLSDDEGRIAHPKHMERRERRLKRYQRMMARKRKGSANRAKAKQKVARVHSRVRDPRRDFLHKTSTALVRRFDAIAVEDLAVANMVRNRSLAKAISRTGWAEFRTLLAYKAHRDGRHLAVVDRWYPSSKTCSACGHLLATLSLGTRHWTCPSCGTRHDRDVNAAKNLVVAAGLAETKNACGADVRHEGQPSVQSAMNQEPSRVTGGIPRL

SEQ ID NO: 39819 - protein, 423 aa, Micromonospora sp.
MPSSSAINQWYFALVQLRYNYRVYPTPSQQASLARAFGCARVVFNDGLRARQEAREQGLPYLSDAELSKRVTAAKGTPERAWLGEVSSVVLQQALADLNVAYRNFFASITGKRKGRKVAPPRFRSRKDNRQAIRFTVNARFKVLDNGRLRLPKIGDVEVRWSRGLPSEPSSVTVIRDAAGRYFASFVVQTADEPLSPVESEVGIDLGLTHFAVLSDGTKVAAPKFLRCAARKLKRLQQDLSRKTKGSNNRKKAVVKVARAHAQVADTRRDWQHKLSTAIIRDNQAVYVEDLCVVGLGRTRLAKSVHDAGWASFTAMLEYKAARYGRTFARVDRFFPSTRMCSDCGRINDKMALDVRAWDCPCGSTHDRDVNAAINVLAAGRAESLNACGAQVRPASVPAPREEAGICPDAACSTRSVEGTSVL

SEQ ID NO: 39820 - protein, 411 aa, Micromonospora sp.
VQLRYNYRVYPTSGQREALARAFGCARVVFNDALRARQEAREQGLPYISDGDLSKRVITEAKTTPQRAWLGEVSAVVLQQALADLHLAYRNFFASLSGKRKGRKVAPPRFRSRKDNRQAIRFTANARFKVLDNGRLRLPKIGDLAVRWSRALPAAPSSVTVVMDAAGRYFASFVVQAADEALPPADAEVGIDLGLTHFAVLSDGTKVAAPRFLRRVARKLRRLQQDLSRKQRGSNNRKKAVVKVAKAHARVADTRRDWQHKLSMQIIRDNQAVYVEDLCVTGLARTRLAKSVHDAGWAGFTAMLQYKAARYGRTFAKIHRFAPTSQTCSVCSRLDGPKPLNIRSWTCPCGAVHDRDVNAAINVLAAGRAESLNACGAQVRPAPMPAPRREAGIRPRVARCSTRNAEGTPVP

SEQ ID NO: 39821 - protein, 428 aa, Micromonospora sp.
VAGADLNWLGGSAGLTAVRRAYKFLLRPTKRQAAALTACLEDHRQIYNAALAERREAYRRAGVCIRYTDQSAQLKEIRSGDPCGQGRWSFSSQQATLRRLDKAMRGFFERVKADHRPGHPRFKGIGRFNSVEWPKDRDGCRWDSAPDTGGFRVYLQAIGHIRVHAHRTIQGKVKTVGVKREGRRWFLLLSCDEVPTTPLPPTGGVVGIDMGLTHFLTTSEGKHVENPRCLDASRCRLAEAQRALGRCQRGSNRRRKVRERLAGLHSKVRRQRLDHAHKTALQLVKHYDLIAHEDLPVSNMVRSAGGSRDQPGINVRAKASLNKAILDAGWAAFLSILSAKAESAGRTIVAVNPRNTSRTCPACGHCASENRVSQSRFACISCGYLANADVVGAINIHRAGLARRVGPAPREAGAPDVPGSHIVAGHDA

SEQ ID NO: 39822 - protein, 598 aa, Micromonospora sp.
MWYVLYVRLRYNYRVYPTPSQQASLARAFGCARVVFNDGLRARQTARENGEPYLSDAELSKRVTAAKATPERAWLSEVSSVVLQQALADLNVAYRNFFAWISGKRKGRKVAPPRFRSRKDNRQAIRFTANARFRVLDNGRLRLPKIGDLEVRWSRTLPSAPSSVTIIKDAAGRHFASFVVQTRQDETLPPAGAEVGIDLGLTHFAVLSDGTKVAAPKFLRRAARKLRRLQQDLSRKQRGSQNRKKAVVKVARAHARVADTRRDWQHKLSTAIIRDNQAVYVEDLCVVGLGRTRLAKSVHDAGWASFTAMLEYKAARYGRTFARVDRFFPSTRMCSDCGRINDKMALDVRAWDCPCGSTHDRDVNAAINVLAAGRAESLNACGAQVRPASVPAPREEAGICPDAACSTRSVEGISVFQGGEIVNTSTSAPASVGTGGATSARPTIRSRGRARGDHHEHGPPAGRLSRRVTDGAAGGCRRAHLTATAPPVEGCHRVGDLPEFRRELGYDVVVVAGWDGLAEGVEHRPHADLGQRRLHLGASADPLHEDVEAEPLAGLAGGERVRLQVLGKLGGEVTGLAPVYPFRQGPQRGPSEGGRSRR

SEQ ID NO: 39823 - protein, 565 aa, Micromonospora sp.
MPRRRDPCGPRVAYRTARVGLRVTVGQRRRCFGLLRSAGDVWACLLEINGWRRRRGDAPLVGYQELCRELAASGPGTFAELDSTGARSVLRRFSDAWFAAAKRRNSGDVSARFPRRRRGLVPVRWYHGTFTVDGRGVRIPVAKGSPSLWVRLARDLPYPPEQVRSVTLLCEGGRLFLDVTAEVPVATYPPGEGPDPGRVAGVDLGVIHPYAVAGPDGEGLLVSGRAIRAEHRMHLADSKARGRAVARRAPKPGQRGSRRWRKYRRRARLVQGRHRRRVRQAQHEAAATVVSWAVRQRVGVLHVGDPRGVLEVPAGRRHNLRLRQWQVGGVMQVLTDKATLAGITVHLVDERGTSSTCPACRRRIPKPRGRSLSCPHCQLTGHRDLVAAAIIATRIPGGGPTTPTAAVVLPGVLTHRRAGRHLPGAGRSRRDPRRPPLVARGSVGPRRPAPPSGGESLARKARIRTLTGHPVNVRGHRTSRRPCGPAPRPPSATGCSGRTPATSCRRSRGPAGPPRPRRGRSGRRPATARSCPAGPAAGAARHPGSRRRRRAADAARPATSPPTAR

SEQ ID NO: 39824 - protein, 411 aa, Micromonospora sp.
VQLRYRYRVYPTPEQQVSLAQAFGCARVVFNDGLRVRQQARENGEPYVSDGELSKRVITQAKCNPERAWLTQVSSVVLQQALADLNVAYRNFFASITGKRKGRAVAPPRFRSRKDNRQAIRFTRNSCFAVLDNGRLRLPKIGHVRVRWSRRLPSAPSSVTIIKDAAGRYFASFVVATTKDESLPPAKSEVGIDLGLTHFAVLSDGTKVVAPKFLRRAARKLKRLQQDLSRKQRGSANRRKAVVRVARAHARVSDTRGDWQHKLSTAIIRDNQAVYVEDLCVTGLGRTRLAKSVHDAGWASFTAMLEYKAARYGRTFARVDRFFPSTRMCSRCGRMNDKLSLSVRSWTCPCGAIHDRDLNAAMNVLAAGRADNKNDRGARVRPPAMVAPRGEAVIHPDAACSRCSVEGISAD

SEQ ID NO: 39825 - protein, 388 aa, Micromonospora sp.
VKLVVQVKLLPTPGQASALEATLRACNAAASDVAAVAREAGTYRNYDLRKHVYAGIRADYALGAQAAQHVIKKVSDAYATLKANLRAGNYGKPGSKRRRNVETNPIGFRWNAAQPYDARMLSWQADARTVSIWSTHDRLKGVAYTGSADQLKAIATSKTGESDLIFRDGMWFLYATVEVAEPELIDPCGFLGVDMGIANIAYDSDGTGYAGDRLKGYRRRQLRLRKRLQEKGTKSARRLLARRNKKEARHAANVNHRIAKTIVTEAVRTGRGLAVEELTGIRERVRLRKPQRVTLHSWSFHQLGSFLDYKARRAGVPLLQVDPRYTSQTCHSCGHRDKRNRLDQEIFHCRSCGVVAHADHNAALNIAQRGVEGWGAVNRPHAASPCIQ

SEQ ID NO: 39826 - protein, 434 aa, Bifidobacterium sp.
MLEAVKVALDPTPRQERLLESHAGAARFAYNNGLAHVKDMLERGDKPEWSYYGLRRWWNQAKNTLAMDKTTGEPWWPRNSKESYNSGLESLADALKNFSKSRKGRRKGRRMGFPRFKSKDKAVPGFAYTTGSFGLIDCDPHALRLPRIGRVHCMEDVSRRVDGAKVLRMSVSKRGGRWQASLTVERADLPIPSPPKGGSVGIDLGVKELAALSDGTVIHNPHALKSNLRRLKKAQRSLSRKRKGSNRRRKARAQVARLYARVANLRSDALNKTTAMLAHTYADISIEDLNVAGMVGNHGLARSIQDAAFAEFRRLLTYKTARAGARLHVIDRWYPSSKTCSNCGTVKAKLPLSERVYHCEECGLVIDRDVNAAINIQVAGSAPETLNARGGSGRQTRLECGTMRHPAKREPSGGESRVRLGAGLGNEAMQMTSL

SEQ ID NO: 39827 - protein, 185 aa, Desertifilum sp.
RLRQAQKALSRKVEGSNNFEKARKQVARIHARIADSRTDFLHKLTTRLVRENQTIAVEDLVVKNMMKNHKLAQAIADASWSELIRQLEYKCQWYGRTLVKIDRWFPSSKRCGNCGRIVDKLPLDVREWDCPECGTHHDRDINAANNILAAGLAVIVCGANIRPDRHKPKGQLRNTRKGKKQKPKS

SEQ ID NO: 39828 - protein, 414 aa, Lactobacillus sp.
MAKKMANLNYYFGIKMRLFPSSAQRQIIDNNINASRFAYNEMVAIDKELYSLHQVKVPIAIVQDRIAYLQRRKNNTQMLFAIHPWLAGTDIRTDVVDQARRAYQNAWRMFRQVHRSGVPVFHRKRDNGSYQLPTRYTKTEVGLANGSNRFLDKRHLILSGLGKIRVSGSQKRLFSHADSIRVGTITIRCDATGRYFLSMMLGSDTPFVHTAKPAQAAVGIDLNIDNFLTDSNGNVIPNPHYYRVIKGQLAKQQRILARRRLRAKKEHRSLRTARNYQKQRIMVANIQCKVANRRKNFLHLVSTALIKNHDMVVAEELRSQNMLRNHALAMSIADVGWRTFLGMLAYKAELYDCQFVTVNPRNTTQTCSDCGFVMAGDQKLTLTDREWTCPQCGAFHIRDHNAAKNILAKGLALN

SEQ ID NO: 39829 - protein, 513 aa, Streptosporangium sp.
LRASAPAFRPGVKAARECPSGRERALACLVLLLDPPCIGNKDGAGFTVLLDHEVFAPVVGFVDPASELVAQVVGRGVLHALHGTKRLIRTVRTCSTIGSVQLRCNYRLYPTTGQRESLARAFGCARVVFDDGLRARQDARDNGLPYVSDGDLSKQVITEAKRTPERAWLGEVSAVVLQQALADLNTAYRNFFASLSGKRKGPKVGPPRFRSKKDTRQAIRFTKNARFAITAGGKLRLPKIGDIPVRWSRDLPVEPSSVTVVKDGAGRYFASFVIETTDEALPGGTHEVGIDLGLSHFAVLSDGRKVNNPRFLRKAERRLRKAQRNLSRKEKGSANRAKAKLKVAKAYAKVTDTHRDWAHKLSTMLIRDNQAIYVEDLAVSGLARTKLAKSIHDAGWSQFVGMLEYKARRYGRTFVRIDRWFPSSKLCSECATLQESMPLNVRDWVCACGATHDRDINAAINVLAEGRRIVAAGRKPAAETRQEAETSNACGGQVRPPLAVAQADEAGSLRGAA

SEQ ID NO: 39830 - protein, 382 aa, Lachnospiraceae sp.
MFLMGYMANRAFVFRIYPNRAQRELLSRTFGCVRLVYNHYLDRKKQLWEESRQSMSYNACSRDLTSLKKEKEFLKEVDSIALQQSLRHLDTAYSNFFKQNGSGYPRFKSRKRGKQSYTTVNVNNNIRLEGGRIRLPKLGAVKIRQHRQVPEGWAPRSVTVRRVPSGKYYVSILFEYESQVEEREMNNVLGLDFSMPDLYVTSEGSRCGYPKYFRQAEQKLARAQRRLSKMQKGSANYRKQKVKVAKIHEKIAGQRKDFLHKRSHAIAEEYDAVCIEDLDMRGMSKALQFGKSVHDDGWGMFTRMLEYKLADRGGKLVKIDKWYPSSQMCSGCGHIAAEVKDLGVRVWFCDWCLEYHDRDENAAVNIRGEGQRLLRMEQKKTA

SEQ ID NO: 39831 - protein, 190 aa, unknown
  TnpB Polypeptide
VAVSDRVDSSHVGVDLGLRDLVLSDGRKVEIPRFYRQSEAALATAQRAKKTKRARAIHQKIANRRSDFIHKLSAQIARDYALIVVGDVSPSKLAKTNMAKSVLDAGWSDLRSKLLYKSIRNGGNCIEVCERNTSGDCSSCNARSGPKGLKDLRIRAWTCGECGAVHDRDVNAARNILARGLASLAEGARS

SEQ ID NO: 39832 - protein, 413 aa, Pseudoalteromonas sp.
MKKTLRYNYRLNPTPEQEAKLIEFGATARGIWNLLLSENMRRYEFDKTFLFYNDMASLLKEIKPFEEFTWIKSFDSAAAQQVARDLETALKNAISKGRLQRFPKHKISYKKKKLHNDSFRAVNNSNCIRIEDGTISIPKVGKVPIILHRELASKIKTVTVQFRHGKWECSITQEVECKTALRVLKTITGFDINSKQTVVGSNGYVADNPKFLTQSKAKLNQLQRQLARRNKGSNRWHKTRQRINKLHGKISRQRLDFAHQISRQITNENDILVFEDLNVKAMQKFNGSMVADNVMALITQLSKYKAELAGKLYHEIGRFEKSTGICSECGQHHVLTLNDRHFICVACGVHQNRDLSAAKSIANTGELDLIAAGIVARVNPTSQRKAANKMKVFELSKFAVGSEKKRSSLAFIS

SEQ ID NO: 39833 - protein, 344 aa, unknown
  TnpB Polypeptide
MYRNIVEQLVLHAVNNGITKFTRLKAEKYRDVRSLYPQLPSHYAYTACQDAAERAHSFLRLKKMGRARKAYPEVRSVSIWLDDHLWRVEGLTSISIATHRGRLRVSIELNRHFLRYVNRGWRLTTEAKVKLDRRNRRLVLYLTFKKEVNEYRPKAYITVDVNENAEAVLIDGVVYLFETGLSRVTLGYYYRRRSVQEKYDRVYGPGNRPERRVLKRLGNNEKALKKEIRWKLATLIVREAARRQAAIVLERLGREPAKGMIERIKDPQLRHRVFQAAFKGIQRAIEEKAREYGVPVIYVNPRNTSKVCPIHGAEIVYGGRIGTASAQGEVRPGTGTWLHATTSF

SEQ ID NO: 39834 - protein, 240 aa, Hormoscilla sp.
ISYKVDVEPSPVEHPHGGVGVDLGVKTLATLSDGKTFPAVKAYRKQRRKIARLQRSVSRKVKGSNNRRKARVRARVRARVRARVQAIKKLQKAHHRIACIRNDATHKLTAYLAKNHSEVVIEDLNVSGMMKNHRLAQAIADGGFYEFRRQLEYKCQWYGSFLTVVDRFYPSSKTCSHCGHIHKELKLRDRTFICPNCGFFLDRDWNAAINLAKAGSSPASACGASKSAICLGGSDASKQE

SEQ ID NO: 39835 - protein, 376 aa, Halorussus sp.
LVEAWKRGCQLAVNEAWGVCHTRSEVQQLAYDRLREETDLGSQHAVLATHRAAEAIKRAHQRDAAKPEFTSPTVAFDTRTMTVFDDRTVSLTTTGERVRCDLKLPADDGYQSRYLDDEDWEPAKSTLHYRDGEFTFHLGFRTPRPAIDPPTEGATVLGVDLGVENLAVTSTARFFDAGELNHRREEFERVQASLEATGTRSAARTLRQAGNRTDRFVRQRLHEVANGIVAEAEQYDCELVAFGELDEAIDLLPEADPYHEWLFGRLLSFVEYRAAERDIAVVEVNPEYTSQRCMECGFTHPQNRNLEDNQFECLKCEASAHDDYNAAKNIAFRCVRRGPLSSRGLGAAACALQSGLVTPDDGFTPYAELSEAPRSG

SEQ ID NO: 39836 - protein, 380 aa, Varibaculum sp.
MGKGFEYRLYPSREQMRLLARFFGCVRWVYNFFLRLCIDTYEKTGKSPSIYECMRMVTELRKAEDTAWLAEADSTALQQSLRDLGKAFGNFYKRRNQGVGFPRFKKKMARKSYRTTKVRIVDDSHVYIPKIGVVKARISRPIQGRIVSATIKQVPSGKYFIVFTCTDVPEAPKAKTGKAVGIDLGIASLVTTSDGQKIGGTEGARKLERKLAKEQRKLSRKKKGSNNRAKQKIRVARAYEKIANKRKDHLHKVTAKIIDENQVICAETLNVDGMLKNHHLAKSIAMQSFATILGFLEYKAREKGKIFVQVDRWFASSKTCNSCGVKADAMPLGIRSWQCKSCGATHDRDINAAKNILTEGMKVLEGTEGHSGAAAITIAA

SEQ ID NO: 39837 - protein, 395 aa, unknown
  TnpB Polypeptide
MKKTYRYRLYPTKKQETILNQQLALCCELYNAALQERRDAYRMAGKSINFTQQSAQLPEVKVVRPEYEAIYSQVLQEVLHRVDKAFKAFFRRCKAGGRPGHPRYKSSMRYDSLTYPQSGFGIDEQGKLSLAKIGHLKMVQHRPFKGVVKTCTITRSATGKWFVCFACDEVSPVVLPASEAHVGIDVGLATFAYLSDGTTIANPRFFRQEEESLVRAQRQLFRAKLGTPQRARRRKTVARVHERIRWRRENFVQQASRRLVNRYGMIAVEALVVRTMLKRPKAKREGTTGAYLPNGASQKAGLNKGIADAAWSAFFDALMAKAEEAERTVIKVPPAYTTQTCHDCGQKQRMPLSVRVYTCEQCGAVRDRDHNASLNILHAALGRQGQGARPQEAPG

SEQ ID NO: 39838 - protein, 329 aa, Photorhabdus sp.
MPMLILKAYKFRLEPTVAQSQRLRQLCGCARFIWNYGLAETQRILGSGGRLPSAFELNRMLTGWKKMPEHAFLQAAYTDNLQQKLKDLHGAWQRCFDKTLAAKAPVFKRKNDGRDSVRFVNFEKYCRLESRRVKLPAGLGWMKFRPSRDVSGKIKNATLSQQAGHWFISLQVEIDVPAPQHQSTSIVGLDAGVAKLATLSDGTIFEPVTRFKTRQRQLARLQRHLSRKVKFSANWQKQKRKIQRLHAHIANIRRDYLHKTTTTISKNHAMIVIEDLKVKNMSKSAAGTLALPGRNVRAKSSLNRSILDQAGTKCVVSLSTNNAGAEVKC

SEQ ID NO: 39839 - protein, 454 aa, Azospirillum sp.
MAEASPNRTVMRTFKFRLYPTAEQDARMRSWCGAVRAVYNAALQQRQWYGRPAGTDWHRRDCRFNANRQSLDLKHARAEFDCLADCPADILMAGLRDLDKAFQNFFAGRARYPSPRRKHQNESFQFRVFQHRKSETHPFYMLVVFGRDSVKLPKIGRIEWVKHAHIRGEAKTATVVREGDRWFICVAAEIVLTPRPAPGGAVGIDVGVAVPLMTSEGEALAVDRTPPHLEKRRRRLQRELSRCRRGSRRRAKRREKLAVIARRISARRKAQLHQVTTDLASRYGLVAIEDLRVRNMTASAAGTVEQPGCNVKAKAGLNRSLLDVSPGQFRLLLTYKVTARGGMVVAVDPRDTSRTCPACGHVDAENRRSQAEFRCVRCGHEDNADANAARNILRRALATLSSATVSGRRKAPSEPRRRSATPKPSVSPSRAGQPSESQVQPKGMIVPDQLLVPG

SEQ ID NO: 39840 - protein, 547 aa, Streptomyces sp.
MADQRRPLRQIARPFVADGPRGVSIRDRLKQLTAEDEKVLRLVGAHLGMLASRDLARRCRDGLKHSTDTWAGRKRDLTALSSSRWAGSITSSTHDQWGLSRRAQHAHLQSLEAGIRMIRHRLSLPVGQKGSRGKPGGYGSSHEWFNKSRRLAILEERYEQVTAERDAGQVSITRGGRRLLGTRHNLTAANLTEAQWRAQWEAARWFLTADGESGKTFGNETIRVSPDGKISIKLPAPLAEHANAKHGRYVLAAKVAFRLRGDEWRDRIEANRAVAYRIHLDTARGRWYLDASWRRKDLPVVPLATLRADGVIAVDTNADHLAAWRLDEHGNPIGTPRRFDYQLTGSASHRDAQLRHALTRLLHWAKQTGVQAIAIEDLDFTDSTTREKHGRHKRFRQLISGIPTGRLRARLLSMCAEVGIGVIAVDPAYTSVWGAQHWLAPLTSKTHKTSRHAAASVAIGRRALGYRIRRRTTPPRAHQSDVHGHRTAQARPSDQGSEENRPRIPGPRTRSVRAGRGANAVDQNTQDRSGYSAEHEFWQQDSLPLSL

SEQ ID NO: 39841 - protein, 459 aa, Lyngbya sp.
MYKTIPVKANFTDEERAFWVFQCQQANSLLNCAIYYTKQKHYSWLEQKEEAFTTYWRGDDLRYGWKTYKCSIKHAELCKNLKENHHYRAMAAQSAQQTLKTVAESINSYNHLVGHYYKGNVDRPKLLRYRKKGGLAAVTFPRQALNYKSGLFYPSISKETKPELITEIALEPPDFIDPDWVKEVTVRPYLGELWIDWVIDDGKQPVSDNPNLDYSQAWSFDHGGDNWLTGVSTHGKSLIIDGRKLKSLNQAYCRLVAKYKAGKSDFYWDANLDRVQRKRNNQMRDGINKAARFIINRCLNDRIGNLIVGWNERQKDRSNMGKRGNQNFVVIPTKRLIERLKQLCPEYGIKLTITEESYTSKASFLDDDSLPKIGEKPKGWKPSGKRVRRGLYKTSFGWLVNADCNGAANIARKVATQLKIDLAKVGRGVLALPHRYDLFTSMNRSYRTRCEEVRFQPTS

SEQ ID NO: 39842 - protein, 464 aa, Lyngbya sp.
VKAATKVIRTDKWKLNPTPDQKLLFGETVKVYRRACRYLVGIIYTHWSELGCLTADQLTPAVERLMHETAKRPNIKYPQFNQAFYKFPSYYRRAAIRQSRRFANAFAAGQVSSFVTRYREWQAGTRKRRSDSPPRLNADTGCYPALYKGQCYKLHGFNQVDIKVFNGLDWVWTTVQITGLRERHQIASNKILSPSLIFNERVCHLSVPFSCKPEKRKPEANVTAVDLGINTTATISVVTHSGTVIHRKFIHPGRDIDRRDKRLKSVSMRASKTMGKGGKLHKGFCSKTYQKCRRINHQIGHIVSKRIVQIAEEFNSEAIVFESLKGWKPKGGRKRSNLRQRFHGWLKAKIRDFTEMKWVELGGKVIEVVAAYTSKLAYDGSGKVKRDSKNYALATFSSGKRFNAVRVAWPTANLNGAYNIGARGVFKLTNRNGSGGRSSKSPGRSPRSWACLCDLWVRDNQRLA

SEQ ID NO: 39843 - protein, 383 aa, Mycobacterium sp.
MQMRYRYRIEPTSAQQEMLARVFGCCRVVFNDALRVRDEAYGARVKLSDSEIQRCVITAAKTTTERAWLCEVPSVALVQSVNDSRRAWRNFFDSTSGKRRGRRVGRPRFKSRKDHRQSFRLTRNGFSLKANGRLFVAKVGEVRVRWSRELPSTPSSVTIIREPDGHFYASFVVDVGASPLPVVDREVGVDVGVARLATTATTDGRRADVVNPKHLGRKLRKLRRLEREKSRRQKGSASRDKSRRKVAVAHNKVARARRDYHHKQALALVRENQVIHVEDLNIVGMVRNRRLARAISDAGWGQFVRIIDEKADRYGRTVHTPCRGGWHRAKPARTVGTDSTNCHCRFGRGRARSAEWSTTATTTPPRPFSLPGGQRDETPVEPR

SEQ ID NO: 39844 - protein, 449 aa, Mycobacterium sp.
MLAGRRFRIEFTDEQAEYAERIGAVCRAVFNTGLEQRREYRRRGAWMNYGPQAHELAEAKVEHPWLKDVPGHCLQQTLMDLDRACREHGTFGVRWRSARRWSPSFRFPEGNKMAVEKLNRRHSRVKLPKLGWVKFRQTRSLDGETIRSATLSREGQHWYVSLLVEDAAEKPATHAAPRSAVGVDRGVVVAVATSDGELLDRAFVTTGEQRRTVALQRTLSRAAKGSANRNKTCAALAKVRARERRRRLDFCQKTAHQLAQNNAVVVLEKLPAKNMTRRAQPVPDPNNPGSFLPNGAAAKSGLNKAILSKGWYRFEQALRSVSRYTGTEVVKVPAAFTSQRCSACGHVDPKSRESQAVFRCTHCSRPAEHADINAAKNILAAGLAVTACRESAVPSGAAETPTQEPAGNREELLLQPGLTGWNPPGFSRGEERQETPQQGEAFQTTFACP

SEQ ID NO: 39845 - protein, 403 aa, Mycobacterium sp.
MQMRYRYRIEPTSAQQEMLARVFGCCRVVFNDALRVRDEAYGARVKLSDSEIQRCVITAAKTTTERAWLCEVPSVALVQSVNDSRRAWRNFFDSTSGKRRGRRVGRPRFKSRKDHRQSFRLTRNGFSLKANGRLFVAKVGEVRVRWSRELPSTPSSVTIIREPDGHFYASFVVDVGASPLPVVDREVGVDVGVARLATTATTDGRRADVVNPKHLGRKLRKLRRLEREKSRRQKGSASRDKSRRKVAVAHNKVARARRDYHHKQALALVRENQVIHVEDLNIVGMVRNRRLARAISDAGWGQFVRIIDEKADRYGRTVHTVSRWLASSKTCSDCGHRLDELPLQIRSWTCPKCRVVHDRDHNAAKTILAAGRAERRNAGGASVSPPTTREARGDEAGSTPTAA

SEQ ID NO: 39846 - protein, 379 aa, Mycobacterium sp.
MLAGRRFRIEFTDEQAEYAERIGAVCRAVFNTGLEQRREYRRRGAWMNYGPQAHELAEAKVEHPWLKDVPGHCLQQTLMDLDRACREHGTFGVRWRSARRWSPSFRFPEGNKMAVEKLNRRHSRVKLPKLGWVKFRQTRSLDGETIRSATLSREGQHWYVSLLVEDAAEKPATHAAPRSAVGVDRGVVVAVATSDGELLDRAFVTTGEQRRTVALQRTLSRAAKGSANRNKTCAALAKVRARERRRRLDFCQKTAHQLAQNNAVVVLEKLPAKNMTRRAQPVPDPNNPGSFLPNGAAAKSGLNKAILSKGWYRFEQALRSVSRYTGTEVVKVPAAFTSQRCSACGHVDPKSRESQAVFRCTHCSRPAEHADINAAKNIL

SEQ ID NO: 39847 - protein, 437 aa, unknown
  TnpB Polypeptide
MQLTHKIALFPTPEQADYFVRACGTARRVWNWALAEWKRQYAAGQKPSAMALKKQFNAIKYTDPQWLDENGQPWLKTIHRDAHARPFVHLDRAWNQFFNDLKSGKPAHEPRFKKKGRCRDSFYVANDKFKLSDKMIRLPKIGHVAMAEALRFEGKILGATVSRTADRWFVAIQVEVSDAQFYRSRKAHGTVGVDLGIKAAATLSSGETIDAPKPLKAALRRLKIRSRRLSRKLEAARCAPGAKFPKGTQLPVSNNHRKSAMRLARLHACIASVRADFTHKLTTRLCRENQTVVIEDLSVKGMLANDKLARAISDVGLGMFRSQIEYKAKRYRIRLVIADRRYPSSRLCSVCGWKHEALVLEDREWTCPECGTVHDRDINAARNLERLATVTALPVASPSGNGGTAASVVVGKVTPVRYDSETGSGQEENCVHLCTRF

SEQ ID NO: 39848 - protein, 366 aa, unknown
  TnpB Polypeptide
MEDDIADRFVTVVYKTYANRSVKREMRRRCDVTCRVYNELLDVAVPAMKKGGHVPDKYEMNVMITQMRADDALIRSVKVETLRDASDRLIRAIQRCRRMSTKDGKIHLPREKTPARYRSVPLPVTSFRIDDERITLDGEMIIRYRNRHRPKGGEPVAVRAVLKDDDLFIHVTYSIAPEYHVFRGGTDLDADVCEGYDFGLVDIITDTHGGKTKAPDFYARKERDIARLQRQIAALDDDSPKRRKKERQLNRIYDGIRRRRDGFLEHLADEMLEGHTFVAIENLKVRMMIEKEDNTVPRRKRYTEAALGSLTRKLERKAEKSDALVLKVNPAYTTRTCSRCGHVGDHIPLTTRMFRCPICGLEMDRD

SEQ ID NO: 39849 - protein, 386 aa, unknown
  TnpB Polypeptide
MSDTLIRTVPVKLDVGANVPALMETARRFNAAATWIARICWEEGITNTNTAHHRVYGETRADYGLGAQLAVCARAQAMEAIKAERRKGSKTCPAWRADAAVRYDARTYRLLPLDGVSLNTVQGRVTCRMVPGQRQRDMLLDAGWRVGGADLVRKGGVWYLHLTQHRPAPSPDEPTGYIGVDLGVARIATTDDGVTYEGAQIKAVRERRFQHRQRLQVKNTRRSRARLRRVAQKEARFQHNTNHVISKHLVATAKDSCKALALEDLTGINQRVTVRHEQRRERMSWAFYQLRIFVAYKALAAGVPVVYIDPRNTSRTCAECGHCEKANRRDQSHFRCLRCGYAANADVNAAKNIAARAAVNQPIVLPLASLRRGMASTSPRALAVGR

SEQ ID NO: 39850 - protein, 196 aa, unknown
  TnpB Polypeptide
VHSSSKVNNVRHRHRRLRTKLQSKGTRSSTRKLKELSGKESRFAKDVNHCISKKIVAKAKGTKQALALEDLTGIRMRITVSRSQRAILSSWSFGQLRAFTEYKAVREGVPVIFVDPRNTSRTCPTCGHIDRNNRRNQRIFSCVVCGFAGLADHIAAINIRRAAVNPPIVARDDAKAKSSELRRSAVTNPVSLLRGS

SEQ ID NO: 39851 - protein, 244 aa, Peptoclostridium sp.
VSIENGYIKLPKLKTLVKIRQHRIFDGLIKSCTISRTPSGKYFVSVLVETETEKLQQTDVKVGIDVGLKEFAVLSDGTAYKNPKHLRKSEKRLAKLQRELSRKQKGSNNRNKARLKVAKLHEKIANQRNDFLHKTSTKIISENQAIVIEDLKVKNLMQNHKLAKAISEVSWSMFRAMLEYKASWYGRELIIAPSNYASSQLCSACGNKSSQTKDLSCRVYVCPECGLEIDRDYNASLNLLKLAM

SEQ ID NO: 39852 - protein, 474 aa, Waddliaceae sp.
MRDHEKTAVIKIPLNVSLESEEILDGQSRICNWLYNQLLDRANALRDEYRNTQNPEVVKVLYTERGLRNLIPPLKKEKPFLKVVHSSPLKNAALRLSNAIQTYQKSRKGKRKNKDTGWPRFRSWSEGWFSLLYDEPNKGYRLKGSSLILSLGRGIDKKQRYVSTFLEETKPLKGKEIRNLRIVKQLGKFYAVFTVRLSLPAPKKVTKAIALDPNHKNLAYGVATDQQSIEISSPSWLKRTDRRLDELIAKRDRCKRKSQKRITDYNSYWIPSRRWKKFNEKIENLRRKRRDQTKTFLFTIAQALYKQYDLVAIGDYAPDGTGETKAMRRSMNNQSLIGRFKEVLSWVSLKSGKQFHEFDEKGTTRTCHSCGYVVEGGLSPEIRHWDCPGCYSYHIRDENAAKNGLIRVLRDLNIENLVPCSGLASQERWAWRALPSGVVATLRGQCRNTVAASRNSNDDVIVVDQNLSIKFAQL

SEQ ID NO: 39853 - protein, 402 aa, Escherichia sp.
VKRLQAFKFQLRPGGQQECEMRRFAGACRFVFNRALARQNENHEAGNKYIPYGKMASWLVEWKNATETQWLKDSPSQPLQQSLKDLERAYKNFFRKRAAFPRFKKRGQNDAFRYPQGVKLDQENSRIFLPKLGWIRYRNSRQVTGVVKNVTVSQSCGKWYISIQTESEVSTPVHPSASMIGLDAGVAKLATLSDGTVFGPVNSFQKNQKTLARLQRQLSRKVKFSNNWQKQKRKIQRLHSRIANIRRDYLHKVTTTVSKNHAMIVIEDLKVSNMSKSAAGTVSQPGRNVRAKSGLNRSILDQGWYEMRRQLEYKQLWSGGQVLAVPPAYTSQRCACCGHTAKENRLSQSQFRCQVCGYTANADVNGARNILAAGHAVLACGEMVQSGRPLKQEPTEMIQATA

SEQ ID NO: 39854 - protein, 381 aa, unknown
  TnpB Polypeptide
MMLKTYCFKLYNRKQNKYLIDLINLSAEIYNHCIALHKRYYRLYGAHLNKVRLQAHIAKLKKQNRYSHWSNLNSQAIQNITDRIENAYTLFFRNLKRKVKTAPPSFKKRRKYKSFTLKQCGYKLLDGNKIKIGDGIYKYFKSREICGTIKTVTVKRDSIGDLYIYFACETENSFIPVRTGTGKIVGFDFGLKTYLKASDGNDVISPLFFKESQAKIKKLNRSLSRKQKGSNHRKQAKYNLAKQHIKIANQRKDFQFKLSNQLCSEYDVICLEDLNIKAMQRMWGKKISDLSHSNFVNILKNKAVEYGVNVVEIPRFYPSSKTCSNCGCVLDDLPLKVRSWVCPACGVEHDRDFNAAVNILRVGTSTLGRDIVSPTLVGVCR

SEQ ID NO: 39855 - protein, 389 aa, Methanosarcinaceae sp.
MESTKTIQLKILNPDHDLVETMQKYAKGMNYVSGVVFRNGKTIAARKLQPMVYSHLRENIGLKSQVSCNIPRQVAGTYKTILELIKIGKSRWQQVTYSPSSMTLSYKRDYTITENSVSITTFSSGRKPYKIQNYAYAKQYFEKPWKFGASKVVMHDDGEYYFHLTVSQEIPDVKITEASTLIGVDVGINYLAVASTTDRKSKFFAGGEIKNLRNTYKKMRARLQSKGTLSAKRVMKRLSGKEKRLMKDVNHCISKKIVEFALENNVSVIGLEDLTGIRDRTQYKVRKKQRYTHSSWAFRQLQTFIEYKAKQAGVLVEYINPEYTSQTCSRCNHISKNNRNGLRFRCRACGFEMNADLNAARNIEHRTRDFRYSVESQGCLSTTHTNEMI

SEQ ID NO: 39856 - protein, 395 aa, Lactobacillus sp.
VIKTLRTYKVELKPTDYQAWLIDKHIGGSRWAYNLFLDINKQRYEDGYHYMGAYEFSKWFNHEYLKYNPNDNWVKELYAKSVKQAFIDADTSMKRFFKHQSHFPHFRSFKRGQGSYYFVKNSKKQIIHVERHRIKLPKLGWVRLKEYGYIPTDTEHFVVKQGRIKYHAGRYYLTCLVEQAEPVKLKLTGEPIGIDLGIKEFAIMSNGTIYPNKNKSYKVRRCRKRLKRLQRRASRQYLAFKCRKQKEGKSATDLNLAKTSRRMQRLYQRLQNIQNDYQNKIIANVVRTKPCWVSLEDLNVKGMIKNRHLAKAVMYQGFYNFRVKLINKCQQLGIPVHLIKRFEPTSKCCHNCGYKKIDLTLADRIFKCPKCHYIEDRDINASLNIRDTENFVLAY

SEQ ID NO: 39857 - protein, 373 aa, unknown
  TnpB Polypeptide
MLKQKAFRCRIYPTEEQKIYFAKTFGCVRFIYNAMLHDKIEHYKVNGEMLNSTPAKYKTQYPFLKEVDSLALANAQLNLESAYKNFFREVKKGNKDQGFPKFKKKTYNQKFKTNNQNGTVGIIDNKFLKIPKLKSLVKIKLHRQLPTDGVIKSVVIERTSSGKFYASILVETSIEPMAKRMNTIGIDLGIKTFAVNSNGDEISSPKALLKHEQRLVFLQRALARKEKCSNNYYKNKRQIALLHEKIANVRRNFLHKVSTQLINENQVIKVESLKVRNMVKNSKLAKHISDASWSMFVEMLSYKADWYGRELVKINTFYPSSQLCHVCGHKNSEVKNLAIRKWRCSSCGTEHDRDINASINILNYRTVGTTGIA

SEQ ID NO: 39858 - protein, 457 aa, unknown
  TnpB Polypeptide
MRLTHKIALVSNSAQRDYFCRAAGTNRFTWNWGLAEWNRQHESGRKPSAMRLKKQFNAIKYAQFPWFVDMHRDSHAQAFEHLARAWNKFFADLKAGARRAPDSKEERRRLKKMGVRLAYRPCFKRKGQCEDSFYVANDKFKLDGKSIRLPKIGLVEMTEALRYEGKILGATVSRTADRWFVAIQVDVPDAKAMRRRTADVIEGVDLGVKAAATLSSGETIEAPKPLKAALRRLKIRGRRLSRRLEAAKVRAGIKRGGRIPKGTRLPVSNNRMKDSRALARLHARIANVRTDFTHKLSTRLCRESQAVVIEDLNVKGMLANEKLARAISDVGFGMFRRQIEYKAKLFDTRLVLADRWYPSSKFCSACGTKNEALALSDRTWTCAACGTHHDRDHNAAINLQRLATVTALPAAKLASNGDTATGKVPAVDGKVTPARHEFGQQDGSGQEKNRAHLCAPS

SEQ ID NO: 39859 - protein, 418 aa, Campylobacter sp.
MRNITLLSAVKYRIYPTKTQKELIHKHFGCARVVYNYFLDYRQKQFSKGIKETYFTMQKELTTLKKQEKYKYLNECASQSLQMSLRQLVTAFDNFFAKRAKYPNFKSKKNTKQSYAISQNIKLNNNKVFILKFTEGIKAKIHRKLDENCTIKQAFVSKVANECYISISYENNKLLLKPKIIESAVGLDMGLANLIIRSDGVVYKNHKFLQDKENKLIKLQRQLSKKQKGSNNRAKAKLKVAKAHQKITRARNDYLHKISNEITSMYDFIAVENLNIKGLIKNKYLSKSIANANWSKFINLLSYKAEDKGKTLMQIDKFFPSSQICSHCGSNTGKKPLHIRSFTCPYCHTKHDRDLNASINIRNYALGIIDDRYKIKLDKSRVGITQSYACGDSNGRVSKYGYILDTSYPSMKQEAHLL

SEQ ID NO: 39860 - protein, 368 aa, Herbidospora sp.
MAQIVKRSYKYRFHPTPGQAFELARTFGCVRLVYNKALDERTRAYTMEGRRVSYAESSARLTEWKKTPALAFLGEVSSVPLQQTLRHLQVGFANFFAKRAKYPTFKSRKKSRVSAEYTRSAFRWRDGQLTLAKMDAPLTIVWSRPLPEGAEPSMVTVSKDAAGRWFVSILVEEKIAPLVPVGQSVGVDAGITALATLSTGEKIVNPKHEKADRKKLAKAQRSLARKEKGSANRDKARQKVARLHARIADRRRDFLHKLTTRLVRENQAVVIEDLAVRNMVQNGKLARAISDASWRELRSMLEYKAAWYGRGLVVIDRWFPSSRLCSACGTIQQSMPLGVRTWECSCGVLHDRDVNAARNILAAGLADR

SEQ ID NO: 39861 - protein, 449 aa, unknown
  TnpB Polypeptide
MLKQKYTTVTQLHKKNNKDIIEYFENASVYFCKLQRIAFHRFKNENRTGNITKYKKFRQDFMKEHSISRRTADSILRDIQGKMKALEELKKYEISQKERKIKKLREEIERLDNNILRFQERMKNKIKVSHLKYWNLKKSRAFKKMKLNEFQLTLEQLKWQVETGNYKLCFGTKDLLKNNKVEFVSQRDSQMSYIGSQDENRRNAMFQLSYNNKNNQFKIKLRKDFGLDVNSKCVSGKCYFNHHKNKLIEVLSNKNSTPLTYSIIRKNGKYYLHCTFEYRIEDESDLLTRKTHGTIGVDFNKGFLAISEIDKSGNLVKTDILKYRFGKGNKTQSDLENCISKIIKRALETGKDVCFEDLDFKGKKSKVMKGVTDRGRKYNNMLHSLAYSLYIKLITNIAFRNKVNIIKVNPAWTSWIAKNKFCDRMKLNIHIGASFVIARRGFGIKDTVK

SEQ ID NO: 39862 - protein, 396 aa, unknown
  TnpB Polypeptide
MIKSVKVRLLPTKEQEGLMFKSVGTARYAYNWGLAKSQELYKEGVKPNSYAIKKEFNNTIKTQDKFKWLYEVSAKITAQAFDDLQDAFNNFFEGTAKYPKFKSRKKSKQSFYVRYDRMNIKNNTANIEKIGRVRFTTNYNIPKLRAYVNPRCSYDGKYWYLTFGFEQGENQVELNSNLSVGIDLGIKDLAVVNCLDEPIKNINKSKEVKRLKKKIKRLKRKCSRKYEMNKINLSENETNKDKTNNKNKTNKDGARFIKTKNIIKLENEIRLIHRKLTNIRNNHIHQATNKIIKLRPKRVVIENLNISGMMKNKYLAEKIQEQKLYEFIRQMEYKCKFNGIELVKADRWFPSSKMCSNCGNIKKDLKLEDRVYVCRCGLEIDRDKNASINLGNYKVS

SEQ ID NO: 39863 - protein, 374 aa, Microcystis sp.
MLVAERHIIKKGHRFWAEIDNLSWQSKNLYNSANYLIRQNFIYGHGYLTYNQMASLMKKTEQYQALPAKVSQQVLRGLDRNWQSFFAAASEFKSHPDKFLGKPKIPGYKEPKKGRNLLVYTIQAISKVGLRQGLVKLSGTSIALPTRVAERIAEVRIVPKCDCYVIEVIYEKTEQFLAPNEKIAAIDLGIDNLMASLLKGNRQSSQRIRRLTRCRNQKVDDYLHQASRYLVNLLVEQEITTLVIGKNHGWKQEVNLGKVNNQKFVTIPHARLIEMISYKCQLEGISVILQEESYTSASNFLNDDPLPVYGKITEKPVFSGKRISRGLYRTDKGILVQSDVMGSYNILRKAFPNAFNRYGIERCVVHPRRINLSK

SEQ ID NO: 39864 - protein, 376 aa, Kibdelosporangium sp.
LSPTLEQETGLLEQHSWWWPGRAAAPEYVEQARQLTETRAEFAWLRAGSVTVQQQALRDFAQAMRNFFTGRHRRPSWRKAGRDEGFRQVAVKPEHIQRLNRKHGQVWVPKVGWVRFRWSRTVPNGVKSYRVIRDRAGRWHIAFAAVPDPIPAPGNNQVMGVDRGVVVSAALSTGELLSVPGLTPGERQRLGRLHRTLARRQRGSNRRGRIRRALARLTARITDRRKDWVEKTSTNLARECDVIRVEDLPIRGMTRSAKGTIEKPGRNVQQKAGLNRGILANGWSLLVTRLEHKAFGRVEKVNATFTSQQCSACGHIAPENRKSQAVFQCIACGFACHADVNAARNIAAGRAVTARGALQPLGGAVNREPQLAASVP

SEQ ID NO: 39865 - protein, 395 aa, unknown
  TnpB Polypeptide
MLTTHRFRLYPSKKQEEKLLWTLDQCRQTYNTLLSELQEQKVIDKAQIQGLLPDMKICDPELNKVYSKTLQYECYRLFSNLRALSQSKKNKRKVGRLRFKGKGWFKTFTYNQSGFKLINIGKRCQTLHLSKIGKIPIRCHRNVKGKIKQITIKKEVSGKWFASIIEEKNEEIKKAQIKKVIGIDLGLTDFIFDSDGMKVPNPRHLKKHTEKLVRLQRKLSKKKIGSENRNKWRIRLARQYEKLVNTRDDFLHKASRYYVNNYDAIAMEDMPIINMVHNKYLSKSILDASWGKLRQMISYKAERAGKRFMPVNYRGTTQRCSNCCKVIKKDLSMRTHKCNYCGLITSRDHNSALEIKNLMLIEIGQELSESTLVEIEALPLTRQLPSMKQEAPCES

SEQ ID NO: 39866 - protein, 368 aa, Blautia sp.
VRKINRAVKIRIYPNKEQITQIEKTIGCSRFLYNRMLADKIRYYQEEKKMLKNTPAGYKKEYPWLKEVDSLALANVQLNLEGAFRKFFREPGVRFPHYKSKKHSRRSYTTNMVNGNICLQDRFLKLPKMQPVKIKLHRMIPEGWKLKSVTVSREPSGKYFASLLFDCENQTAEKRQAEKFLGMDFAMHGMCVFSTGERAGYPMFYRNAEKKLAREQRKLSRCEKGSRNYQKQKKKVALYHEKIKNQRKDFQHKLSHSLAEDYDAVCVEDLNLKGIAGGLHFGKGIQDNGYGQFLSMLGYKLEERGKYLIKVDRYFASSKICSVCGHKKKELALSERIYLCECGNRMDRDVNAAVNILKEGKRIYKKCA

SEQ ID NO: 39867 - protein, 249 aa, Blautia sp.
MVKAIKVMLIPNNVQKTKLFQYAGASRFAYNWALAREIENYEKGGKFLSDAELRKEFTKLRHSDEYTWLLNISNNVTKQAIKDACTAYKNFFRGLQKFPRFKSKKRSMPKFYQDNVKIRFSNTHVKFEGFSSSRKANKQKMNWVRLAEHGRIPTNAKYMNPRISFDGLNWWISVCVEFPDCRETLNDDGVGIDLGIKDLAVCSDGTKYKNINKSQKIKKLEKQKRRLQRSISRSYEKIKKEKVTVKQIM

SEQ ID NO: 39868 - protein, 442 aa, Blautia sp.
MQIISSYGVELRKQNIPIRQTLEIYRSAVSYLIGIYVQVWEKLAEIPDAKRRFNAAEHLVHTTKKNHACFDFDIRFPKMPSYLRRSAIRHALGTVSSYKTRLDLWEKTDGKSGKPRLVYENHAMPVFYRDVMYREGAEGKDEAYLKLYDGHDWKWFCVRLEHTDMEYLRKYWSGKKASAPTLEKRHRKYFLRFSYTEEVTLTKTPVKEQIICCVDLGINTDAVCTIMRADGTVLGRKFIDHPSEKDRMYRTLGRIRRFQREHGSAQTQRRWAYTKRLNTELGKKIAGAIVRYAEENHADVIVFEYLEMQGKISGKKKQKLHLWRKRDIQRCCGYQAHRKGMRVSRICAWNTSRLAYDGSGAVTRDWENYSLCTFQTGKRYNCDLSASYNIGARYFIRELLKPLPATERSLLEAKVPPVKRRTSCVYADLRKLHSEMELLKAA

SEQ ID NO: 39869 - protein, 185 aa, Blautia sp.
MALFMSISEGIPEIKLAKVKMKMEFQSESDTPSSRRRLKAIGQRENRWMQDINHQVSKALATGNPKHTLFVLEDLTGIRNATERVKTKDRYVSVSWSFYDLEQKLIYKAKQNQSSVIKVDPRYTSQSCPACGHTEKSNRNKKIHLFTCKNCGYTSNDDRIGAMNLYRMGINYLADSQVPNTVVTE

SEQ ID NO: 39870 - protein, 293 aa, Paenibacillus sp.
VDSLALANAQLNLQKAYSHFFRDKSVGFPKFKRKKDNHRSYTTNNQKGTVYIENGYIKLPKLKTLVRIKQHRPFFGLIKSVTIAKTPTNKYFVSILAEENEQLFSKLDSKVGIDVGLKDFAVLSNGTKYENPKWLRKSEKRLAFLQRSLSCKKKGSKNRDKARLQVARLHEKITNQRNDFLHKISHEITIENQVIVIEDLKEKTMQKNRKLSKAIGEVSWFKFREYLEYKAVWKGRDLIIAPKNCASSQLCSNCGYQNKEVKNLNLREWDCSECNSHHDRDLNASINLLKLAI

SEQ ID NO: 39871 - protein, 461 aa, Sulfobacillus sp.
VSTPHLQRQSARRSLFSPISAADGRDCGRKHSCRPTVQPLHYGKDRIPPPSALPSVAQWRGALRQAYQRFFQKLSGRPKMKRKSGRQSVWLTSELFEFRPIVDDTPGAVCGYHLHVGTDKFPVGIIPYVAHRPHAVPASIYLAIEGGQWWLSFAAEDLTVTIPGKEGDAATERIAEDLRHLSADQLAERTLGGDRGIAKPLMTSDGHVFDLLPVQQTRIQKARRQHRRWQRRAARRKKGSQNQKKAYRKVAHYPQYEKNVRHEYAHQTSHALVVHAAYDLYVFENLPIQQMTKRPKAKKDAQGHFLPNGRAAKAGLNRAILASAWGQVVMFTRYKARRRGKLVITVPPQHSSQECAECTFTAPDNRPSQAAFVCQRCGHRDNADHNAARVIKKRGIQKLLSGEPLTTSRKTTRIFRTLGPERSEVTPGETHIRRAPSKTDMHRSQNQELRGVIRETPTSTR

SEQ ID NO: 39872 - protein, 408 aa, unknown
  TnpB Polypeptide
VRNERDHERLRKLFGTVRFTYNQCVDYLRQNKDVRATKKLLRSLFVNNDSELVKKNEWLLETGYDIRDDAISEFMTGMKGNFTKLKQKTQKFFKMNFKSKKRQRSETFYLRHRWIEQRDNTITLNLPKMSPIVLWTSKDINRAPILIDCKFQRAWTGDYYLCVPHAYGVESQDSIKHENLRVCSLDPGLRTFQTIFDASDSCAYEIAPRDIQRIVRLCVGLDKLSSKRDTASDARRRYNYKRAFRRLAEKVRNLINEVHKQLAKFLATNYDLVMIPKFDTFQMIRKSTRKIHSSSVRQMTTWAHYRFRERLIFKCRQYNCRVAVVDEAWTSKTCSSCGHINYALGANKTFACPACHVIMDRDVNGAKNIFLKNYEALGLCLTLGPTPSVSATEQCTEAAMPLLNDNWF

SEQ ID NO: 39873 - protein, 396 aa, unknown
  TnpB Polypeptide
MIKAFKYRIYPTQEEQLILAKQFGSARFVYNNALAFKKEIYEKEAKCIGKYDLVKRLVQLKQEYCWLAESDSQVLQQSIGYLDTAFKNFFTKKAGFPKFKNKHSNQAIHYPQRVKVNQESKRIYLPKVGWVKIVLHRPFEGKIKRVTISKVSSGKYYASFLCEIEDQTPKLLQNIEHVVGLDLGLIDVVVSSEGLITGNPRFIARAQANLSRKQQKLARKKKGSKKRNKARLLVAKAYEKVTASRCHFQHVLTKQLVSESQAIIVEDLAVKCMVKNRKLSKSISDVSWHSLLRKLEYKLAWEGKHLVKVDRFYASTKLCHSCGKKQEMALNQRIYSCTCGWQETRDMNAALNIRKKGIEKLKAGGYTVSARGGFCKTSLSLDLEAWPMKREASSFR

SEQ ID NO: 39874 - protein, 317 aa, unknown
  TnpB Polypeptide
MQRLQAFRFELMPNGQQERQMRRFAGACRFVYNKALALQKERYERSEKKLGYAGLCKLLTDWRNSAETAWLADAPIHPLQQKLKDLERAYSNFFAKRADFPRFKKKGRSDSFRYPDPKQIKLDQANSRIFLPKLGWVRYRNSRKVLGAVKNVTVSQSCGKWFVSIQTEREVEQTIPQGGAVGIDMGIARFATLSDGTFYAPLNSFKRHEVALRKAQQAMSRTCPCCGHVSADNRQTQAKFECVACGYQNHADVVGAINILSRGMQLWRDEGRDTTDASVGMRAGSLPASARMACGSNRTGGRKQEPTETTTHGAIYA

SEQ ID NO: 39875 - protein, 359 aa, unknown
  TnpB Polypeptide
MLRESAFVWNHALALQKRYYALYKTFIPSAKLQKHFAKRIKRNLLHSQTVQEIIQRLDTAYQRFFKRIAKRPPKFKKAKDFVSFAFKQGGFALNGNELIINRIRKRFRFSYSREYKGNIKMLRIKRSHLGEYYVYVITDCQPTAYGKSHNGASIGIDFGLKTYMTLSDGERIDNPQFLKRSIKEIRKANQCLSRCQKGSNHRERARLSYCRLQEKLVNKRTDFMWKLAHNLCRNYDYIFIEDLNLNGMMKMWGRKVSDLSHGTFINILEQVANKYNVVVYKIDRWYPSSKLCDCGYKNDKLTLRDREWICPHCGQIHDRDINAAKNIRRKGISELVSNGKTNISLGMRQLRLSQESHVL

SEQ ID NO: 39876 - protein, 433 aa, unknown
  TnpB Polypeptide
MYLVEQHVINRSDPRYPIIDEAAFKAKNLYNAALYETRQAWIHQGLVLTYEALDKRMQPHEAYRALPAKVSQQVIKQVTKAWESYFAACRKYEADPATFLGHPKLPGYQHKTEGRNLLVYTLQALSGGQTLHKPGGKNALRQGMIKPSMLPIEVRTRQDPSTIDQVRIVPHTGFYVVEVIYTKAVHPAEVNPAYCAGIDMGITNLVALTSNKPGFRPVLVSGRPLKSINQYYNKRKAALQSTLGHPGTSKRIERLTTRRNRRIEHYLHTASKRIVDLLVQEGIGVLVIGKNDGWKQGASLGKRNNQHFEHIPHARFIAMLTYKAELVGIIVRTTEESYTSQASLPDLDPLPVRDSNTGHEKPIFSGKRIARGLYRAADGRTINADVNGSGNILRKVAPDAFAEGVEDGKAVLASLVVHPVRMVIPLTKPQSRR

SEQ ID NO: 39877 - protein, 556 aa, Streptomyces sp.
MADPAGKLRAIAPSFVALGPSGVAIRDRLKNLSVEDERVLRLVGAHQGALASRDLKQRCADGRDHSTETWATRKRGLTRESSSRIAGAITKASHDQWALARRCQAAHIKTLAAGIHALRHRLGLPVGEKGSKRAAGGYRSRSEWFRKSRRLVTLEERHAAVVADWRAGRVRVARGGKRLANTRHHLDRAQLTEEQWRARWEAERWFLAADGESGKRFGNETIRVTPDGEVSIKLPTPLAHLADAKHGRYVLTCRIAFAHRGAEWADRMEENRAVAYRIHLDVTRGRWYLTAAWQRPVVQTVPLATARAKGMVGVDTNAGHFAAYRLDPHGNPIGEPHRFPYDLSGSAAHRDAQIRHAITRLLHWTKSTGVKAIAIEDLDFTAEKTREKHGRRKRFRQLISGIPTGKLKARLVSMATEHGLAIVAADPAYTSQWGGQYWQKPLATPRRKMSRHDAAGIAIGRRALGHPIRHGVSPARRAWGGTAPPPHDQSDRAGHRTVQAGPGTQGRDGIRPPTTDRLYGEPTPSGKRKRGPSASKTVRDAPSTHQWVQDSLLHTG

SEQ ID NO: 39878 - protein, 403 aa, Streptomyces sp.
VRHFLSHPGCWHKVDLIRRRKAGAPGGWVYEAHLMILAPGYTAPSVRAMRDRAVQLDRIGGVDGNVSNLSVVSFPAALTDGKPVSTEITLTDTEQALLERQAKKRRDRARALERSRRATNAAQYGLSKKQAKHAARRKAHGLKPKTVNVPGGARVARSDGVPKQAFRRDRLSANYREQRARQVEHAVGIAEHRRHRARLVAREIIAAHGPVLVVEDCDIRTWYRLWGKRLSQTTPGMLISALKVECEAAGGRLVRASTWSTALSQHCLCGERVRKSLRDREHKCTACGLTGKRDLVSAALAAFVRFTDVDDPTTAYLDTAMSRHAQITYAQALEEALRESTTPSPKPLRRPGRVAVPRQQRRETPAPRTAGQRHRATPDESRSRGHAGKPGPRTACSPQLTLW

SEQ ID NO: 39879 - protein, 300 aa, Streptomyces sp.
MTSPHVKRAFKYRFNPTDAQAAELSRTFGCVRKVYNLALRARTEAWARQERVNYNATSAMLAGWKKTKELSYLSEVSSVPLQQTLRHLQVAYTNFFAKRSQYPRFKSRKKSRKSAEPTASAFRFRDGRLTLAKMAEPLDIVWSRPLPEGVTPSTVTVSQDAAGRWFVSMLCDDPTVQPLPALETAVGIDAGISALLTLSTGEKVTNPKFGQADRARLAKAHKTLARKARGDGANWRKARVRAAKVYARIADRRRDHLHKLTTRPVRENQTLVIEDLTVRNMVKNHSLARAISDAACARCA

SEQ ID NO: 39880 - protein, 426 aa, Streptomyces sp.
VSQDALTKRQFGHRARLALSPAGVRKADDQAHAARTMWNLLHAWWQMMPKEERTLGHADAAIRQAREDIDFLAVLPAQAAQAVLKTYFQAWRNCWDGRADAPNFKGRLRTVMSVDVPQGRDLNITRVHRRWGMANLPKIGRVRFRWTKDLPVGKRANAENRITGARLIRDALGWHIAFRVQTLEGKPQPHQGPDVGIDVGITVPIALSDGETYGHGEWLTGKEQVKLLRLEQRAARRKQHRKPGERTSGRLHRTYDQIAGLRAKAKRRALNWQHLTTTVIARAYGTVVVEALTITNMVKSAKGTVEAPGRNVAQKSGLNRSISGEAWGRTVAMLAYKTAQYGGALHKVPAPGTSLRCSACGFTTPGSRESQAVFVCKNPDCGWSGNADWNAARNVLYLYRMGLALIPAAGRAVVRRAKRVKPAAAR

SEQ ID NO: 39881 - protein, 400 aa, Streptomyces sp.
MLVHLDRKGVGRVIRAYKFLLRPTFRQEIALGEMLRDHCGVYNGALQERRDAYRHASKTSIKYGMQSAQLKDIRAFDPERHGRWSFSSRQATLRRLDKAFAAFFRRVKSGDTPGYPRFRGVNWFDTVDFPKDGDGCRWDSLPDHAARVRFQGVGHVKVHRHRSVVGKVKTVSVKREGKRWYVVLTAVQPRPEPLPATGSAYEGQSSHRPPFGAAPPPLPCPASPPSRTHTASALVCRAARPPAHEAYPETHPHALHHHQRPSHGPPRRRRYQLARPSRLQRSRPRHRRRAVLPHAQRRLRHRGGEGDLQLVPGPPRMLQLRPGQRGQGGHLGRPDRGRATDLARPGREPAGLQPGEGRDRGPGHPAEPTGAQDPHPLRERPGLEPEPPRPHPSNRCRVGP

SEQ ID NO: 39882 - protein, 456 aa, Streptomyces sp.
VKAPAFRPGRKRIIGPETRRSGVSPCDALTRACVRIMTVPSFQAVGSSPVKRAFKFRVHPTDAQARELSRTFGCVRKVYNLALAARADAWTRSRPMSYSQTSALLTTWKRMPELSYLAEVSCVPLQQALRHLQSAFAGFWAKRARYPRFKSKRRSRASAEYTRSAFRYRDGRLTLAKVPGPLDVVWFTPSAAGHRADHGHSVPRPRRPLVRVAPLRGHPVTASPHDTSRGNRSRNRRTRDAVDGREDPRPPVRACGQGPPRPCAAIPVPEGERQRQPGRGPDPRRQDPRRIADRRRDHLHKLTTRLVRENQTLVIEDLGVRNMLKNHRLARAISDAAWRELRRMLEYKAAWYGRTLIVVDRWFPSSKLCSACGALAAAMPLNVRAWTCEGCGAVHDRDGNAAVNLLAAGLAVSACGADGRPSRGPSRRAVRGEAGSPPTRTGRDPLRGTVRPSKPD

SEQ ID NO: 39883 - protein, 548 aa, Streptomyces sp.
MSEPEKKQLRTIAPPFVALGPCGVAIRDRLKHLTPEDEKALRLVGEHLGRLASRDLAARCADGNDHSTDTWAARKQGLTASSSSRWAGSITKATHDQWALSRRCQLARIQGLEAGVRALMHRLSLPIGEKGTKKAAGGYRSKGEWFHKTRRLYVLEHRLDVARAKREAGTVRVVRGGRRLLNTRHNLAVAQITEAQWRERWESERWFIAADGESGKRFGNETIRVTPDGEVSIKLPAPLKDLANAKHGRYVLASRIAFAHRGQKWTDRIEANRAVAYRIHLDVTRGRWYLTASWQRPIVRSVPLETARANGMVGVDTNADHFAAYQLDRHGNPVGDPKRFFYDLSGTADHRDAQIRHAVTQVLHWAKACGVAAIAIEDLDFTAEKTREKHGRKKRFRQLISGIPTGKLKARLISMAAEMDMSIVAVDPAYTSMWGDQHWRKPLTTPRRKMSRHDAAGIAIGRRALGHPIRRRTAPPHDDQSDRRGHRTVQAGPGDQGREEARPPVTERAHDARTRTGTQRTRETSAPKTVRDARSDQEWVQDSLLLTE

SEQ ID NO: 39884 - protein, 385 aa, Streptomyces sp.
VKIVVQVKLMPTPEVASALECTLRTANEAANWLSAQAYERGETSRRALQGFAYHDLKARGLSAQPALHVLRKVADAYTTLRANIRAGNLGKPGSKRRAKAESKPIVFREDAAQPYDDRCLSWQVDEQIVSIWTTTGRLRGVQFVCSEQARKLLVEHRKGESDLVHRDGMWFLIATCEVPEAEPIEPTDFLGVDLGIVNIATTSDGKIHAGHRLNRYRKCQLALRAKLQKKGTKSAKRVLKRQSRKEQRKATEANHIISKNIVTEAERTGRGIGMEDLAGIRQRVRLRKPQRVALHSWAFAQLGQFVEYKARRAGVPVLFVDPAYTSRMCAECGHTDKLNRVSQGRFACRSCGFVDHADRNASRNIRARAWDLWRSGAESHAPAPA

SEQ ID NO: 39885 - protein, 519 aa, Streptomyces sp.
VRGPPALPAPRRGRRRRPRRRSPQPLPRLLGPGPAGGLVPVVGLPEAPGAGGAAVAGVHVVQAPLDLGGGVGLPVRAGGGHLRGREGLDEAVGAGGGVRGGVVPAAFAGNDVVERRELGRVLDHLLGDRLGVHRGGLRGDRGKHGTGDAQGEDGAREGLLGSGDAADDGVGHGLTFRRGQGRSRHAWGMREPLTRRRGVRRRDQETGGEPGGSASALRLIQFYGGSRPLATTALTSGPRSRGGTAPRRPGGYRCRSGLVCGGGYGTLVHRHRSVVGKVKTVSVKREGKRWYVVLTAVQPRPEPLPATGSVVGIDVGIANFLADSNGEFVPNPRHGRANAEALAEAQRRVAVFPRVRRDKRTKKHRAAVAKVAALHGKVRRQRLDHAHKAALRLVRVHDAIAHEKLSIANMVRAPKPKPDPDEAGSFLPNGAAAKAGLNRSIHDAGWGVFLAILTSKAESAGRRIIAVDPRNTSRECPECGHTAKENRPTQDTFHCQACGRRHRGHHGAVAGDERGRGLR

SEQ ID NO: 39886 - protein, 528 aa, Streptomyces sp.
MVGRHLGRYARADLAERVRIGRVPVKENRRTDRKRALTTVSSSRWAGAITRTSEDQYQLSVRCLFNERTSLRRSISEIAKRLDVPCGQRVHGVRGYPYRAERAQKQARLQVLIARLAEVERRIEAGHPTVVMGGRQLAKVRHNLAAAGLAEAEWRERWDAQRMFLTADGESGAPYGNYTITVDPGDGTLTIVLPEPLRHLANAPRGRYRLACTVTFHHRQGEWLDRVTANRAVRYDIVCDPERGRWYLDASWSTPATPFPTPAELAATGTRLLAVDLNAGHLAACVIDAHGNPVGQPITIPTDLTGPTSQRDGRLRQAISELIHLAELHGCTGLAIENLGFTDARATGRETMGRGTRGRTFRRTVAGLPTAKFRDRLSGMAHHAGLIVVAVDPAYTSRWGAQHWKAPFQQQSKTTTTTGHHAAAVAIGRRALGHGTRRRPGVTAHDQRIVARRATGQTVTAPRARGTASPPRTTGTPHQGPKTCRARSDQLALFPVSQNRSGRQPASPVHSDLAGIGQPRQERLTSAP

SEQ ID NO: 39887 - protein, 275 aa, unknown
  TnpB Polypeptide
MEMSEVIISYKYHVYPDKGAERKLGKALDTCRWLYNHILEEISKSKENGVQFKIYDTQNMIPSLKLEDPDLRDVYSKVLQMVNYTLGSNIKGLYALKENGRKVGKFRFKGKGWYKTLNYNQSGFKIDQDQSILKLSKTGDVKIKLHRPIDVKGLKEKGNCKGLHRNIHDASWSKFLFMLSYKAESAGKKLIKVDPRGTSQKCSCCGSVVKKDLSDRTHEYPFCGFVCDRDYNASRNILISGMGLPLEPAEPEPLHCISVMQVLVMNQEVPPFRAG

SEQ ID NO: 39888 - protein, 435 aa, unknown
  TnpB Polypeptide
MIKLQRESFIKSYRIRLIPTVEQERLLWLHVDAMRFVWNWGLALNMERFKQGENRLTKAKSGVLLTELKKTDDSFRWLNEVSVHTIAMGLIDLDNAYTRFFSIQKKEKKYTESKIKKFKRKNKKLTPYDMNGHPKFKNRHKVEPKFYVRHENMYLLKDAVNIEKIGKVMYQTNYELHVVSRYKENTTKFINPRVKYVNGKWLLSFGIECILNKFSFLNKFSFSTKQELNDFSVGIDLGVKDLAVISYNGGKEKKTFKNINKTKRVKRLKKRLKQKQRNVSRKYKSFASKTNNGSYDKTKNILKEENKVKRLHRKLANIRHNYTHHVTSEIINLNPSKIVLEDLNVSGMMKNKHLSEAIQEQTLYEFRRQIEYKSEWAGIAVITADRFYPSSKKCSVCGNIKQDLKLKNRVYKCDECGLEINRDLNAAKNLEKLAI

SEQ ID NO: 39889 - protein, 415 aa, Hydrogenobacter sp.
VSNLLNSFVDIVLNSTLEEKTKKVLLYLASRQEIFCVKSQTAKWKDQELEITEYERLLARKIFKHLLSKYKKPSFRKNTLILDSKCALIERPTKARSYDLWVKISTLEKGKPVWIPINLHDYFHQREGVLTPVVQIVEEDGELKLRLVKEVHQREMQRHGVVALDFGMNSLFATDRGDLFGRSFYQKVKEYAEKIDKLQRNLQRQGIKPKESKRYRRLQERLSAFVKSEIRRLLNRIIKLYSPEVIVIENLNGFLNEVINNFPKSVKRVLIRFGLGEIRKKLRELQEEYGIRVVEVNQAYSSQACCQCGYVDRENRKDRDTFECKCCGIKLHADVNASRNLRERFLGSLHLRRMEQALRWQVERFLQNLSSERFKCLRGKARSLLTQNPYFKKVLGDSSKPEVWINNLKGDICPC

SEQ ID NO: 39890 - protein, 403 aa, unknown
  TnpB Polypeptide
MQLTQKIRIFPNKEQTETLWGLSNICRKLYNQCLSKRLECWFNDYNINYYDQQNALPQKKKDNPELKSVYSKVLQMVVRQLDKDFKASIVSQRKNNKTSFPKFKGKKYFTTMYYNQTGFKIDKSTVKLSHKLNETNLNFKIPTKFNITNIAQISIFIKDNKYFLSIIYNKKPIEYVDNGLYQAFDLGVTKHVAVNMKGKFVEFTNQRPDRYWKSKLEQIQSRRDHCKKFSKRWWILNNNYNKIRQKSANQLKDTQHKLTRHIIDNTKANTIIVGDLSVKQMCKINKHQKTLHSSLHNTGIIGRFVSILTYKAELKGKKVVKRNEYKTSKRCCCCRKEHYMPLSKRMMVCDCGNKIDRDQNSSVNIMSEFLIANAKCTGYQHFVDNLRNTGLPIQVMHSQEATS

SEQ ID NO: 39891 - protein, 242 aa, Streptomyces sp.
VPEAPLNSDLVDFLGIDLGIVNIATTSDGEIMAGRELNRTRLRERGLRTKLQRKNTPSAKRRLKKRRRKEARRARDINHKIAKHVVAEAERTGRGIALEDLTGIRERVRLRKPQRATHSSWAFAQLGAFIAYKARRAGVAVVYVDPAYTSRTCAECGHIDRANRVSQAWFACRNCGFVDHADRNSSRNIRARAQELWRRGARSTAPAPPRTPRSGAGRKRSITPSSARCAGPSFSAALAPGS

SEQ ID NO: 39892 - protein, 396 aa, Methanomassiliicoccaceae sp.
MQDFRLMVNRGIRYALENDLTAKGSMVKFGQSLAKEYHVNGAHAQTAMGVALSLAKGHRRRLSKGKKSKVPYVFRPFLRADDVTFHITPETGLVRLSLRYGEWTSFHVRLSTYHLEFIDRGRVKQLVLNDKRAVFIVEKEVPERYMPTSILALDTNERSLDGVSLTSEYALPVSVPYPDVSVVQHRHFVRRRKLAKKKSKDRRVWRKLAAKEGRREHNRVSQRLHLISEGLVEFALNEQAAIALEDLSLPKGGGGGRRMRRRLSSWPQHEVHRQIECKAEERGVPIIKVDPRYTSKTCPRCGDIKRRSRVGQVFECAKCGWRLDRQINAGLNICRTALAQLPREAEMRGLGGLRLDPDALANDAMILLYAPGNAGAHEVSGGQRAQGEEMSRNGLL

SEQ ID NO: 39893 - protein, 218 aa, unknown
  TnpB Polypeptide
VPARGQRAGLSLAVADHAGHDQVRVVERRPVGVHQRVAELAALVDRPGRLRRHVGRDAAREGKLPEQPGHPRGVLCDPRVHLAVGPLQVRVRARAISDCGWGEFRRQLTYKCQWYGRRLVVIDRWYPSSKTCSACGHRLAGLSLSTRQWTCPCCGARHDRDLNAAQNILAAGRAVARGCPGDACGAEVRHSGSSRVRSAAKQEPRPARAGIPVLQGGE

SEQ ID NO: 39894 - protein, 369 aa, Planococcus sp.
LANKAYKFRLYPTNEQEQLLLKTFGCVRFVYNKMLTERKEIYEQFEEDKEVLRQQKLPTPAKYKKEFEWLKEVDSLALANAQLNLQKAYANFFAGRAKFPKFKSRKAKQSYTTNRVNGNIQLLASQIKLPKLGIVKLKLHREIPAHAVIKSCTISRSAAGKYHISILTEVEFTPVKKEIKEIIGLDFAMNGLYVESEQGETANYPRFYRQTQQQLANAQRILSRRTKGSSRYETQRIKVASLHEQVANQRKDFLHKTSRRLVTRYDCVVIEDLNMKGMSQALRFGKSVADNGWGMFTTFLHYKLGEQGKRLVKINKWFPSTKTCSSCGHIKEMPLSERTFSCACGFVSDRDWNAAINIKNEGCLMLGLS

SEQ ID NO: 39895 - protein, 294 aa, Acinetobacter sp.
MKTLKLRIKDKHCKVLDQLASEVNFVWNYVNDLCFKHLQRKQQFFSAYDIAKYTKGASKECNLHSQTIQAVTEELVTRRKQFKKSKLRWRVSNKKSARRSLGWIPFKKVAIKYADGYVQYGKHQFKLWDSYGLSKYSIKTGSFVEDSRGRWYVCLVVDSPKQDKPTATKAVGIDLGLKDIATCSDGTIISNPKFYHQYEQKLGIAQRARNKKRVRALHAKIANCRKDHSHKASTQLVKDNALIVVGDLRANKLVKTKMAKSVLDTGFSALTTMLKYKCENAGVMFEEVNERFTT

SEQ ID NO: 39896 - protein, 219 aa, Solobacterium sp.
VQLADHLGDGFTDYAYTVLKDSLSNALHRVSVFQSLHGSHDSGRLWNIAKRRNRNLAHQIAREIVNFAIANECDAIVMEHLDTKGKKRGSKKQKLAMWKHADIQKTVESLAHHYGIRISRINARGTSRLAYDGTGRVRRGREVSEDTPYDVCVFKSGKIYNCDLSASYNIGARYFIRGLLMESPDLMTKVSGIGSGTQRTLADLWKINRVLYPLLPAAV

SEQ ID NO: 39897 - protein, 368 aa, Limnoraphis sp.
  misc_feature (67)..(70): Xaa can be any naturally occurring amino acid
MQADSPTRLDRAGQRNSGGIFRCLQPHIASGKRKQLLEHHQTAPSGLQASQRSDGTESQSRLSGNQXXXXTKQIHKFRPTSISLDIRTFKYIESEQKVGVTLKSGRVNFDLKIGGYQIALLRGQSPTSATLSKSRNGNYYINIVVEVPTQPKNQTPKVLGVDLGIRDIATTSTGKSWDGEKLRETRSRFVRVRASIQSKRTKSSKRLLRRLSGKESRFQKWVNHNISKQLIEVAQQLNSAIAFEDLSGIRLRTKVRKKTLTEINRWAFYQLRLFTEYKARIAGVDVILVDPRYTSQTCSICHHVHPEKGKSYRNGKHFKCGFCGFEHDADVNGALNIAQLGAVVNQPEISTYSCQLEGQLLLFPDGVG

SEQ ID NO: 39898 - protein, 359 aa, Campylobacter sp.
MLITYKYRLYPNREQRKAIDFTVERCRLLYNRLLDERIHAYRNKGKSLTYYDQAYTFNKRKAAIPALKQVYSQVLQDVAKRLDKAFQAFFRRVKAGEKPGFPRFKPATQYDSFTYPQSGYKLERNKLKLSKIGDVRIKLHRPVEGKIKTCTIIQKNGKYYACLSAEVEPKQLPPCMDAVGVDLGVKTLAVTSDGAYFESPKYLRKSENYLKRLQRSVSRKKKGSNRRKKAVRVIAGLHEHVANQRKDNAHKVSRQLVNRYGLIAFEDLNVLGMTQNHHLAKSIIDSGWSQLVAFTSYKAESAGRIVKQVDPRHTSQLCSNCGEVVKKQLKDREHRCPYCRFVGNRDENAAVNILKRATS

SEQ ID NO: 39899 - protein, 383 aa, unknown
  TnpB Polypeptide
MNTVHIYPLKNLSQTQFQRLHDAQMETAQVWNLCMQMHKTARLQHETWPGCNELQKATKGRFALHSQSVQMVVHAFLANIDTTQQLRQTHPQMHMRYPYKDKRFYPVHWPAQAVSREQGRVVLPMGKGRKSLVLPLALPENSGACTLVWNNGFELHVCVEIPQAENPHGNNHATVDLGEIHLAAVTTNTGKAMIVTGRGIRSLKRQRTMQVRSITKKQSKCTKYSRRWKKLQRAKNKQCRRAERRIRNQHHQATRKVINFCIERKVGTLFIGNPHGVRNQNRGRHHNQRMSLWEYGRDIDYLTHKSKQAHMVCFTGSERGTSSQCPTCGHKHKPRNRQWHCKKCGFTGHRDLVGSVNMYPLAFGERVKFPRSFTYLRPSVLAC

SEQ ID NO: 39900 - protein, 384 aa, Streptomyces sp.
  misc_feature (325)..(325): Xaa can be any naturally occurring amino acid
VAANHVKRAFKYRFHPTDAQAAELSRTFGCVRKVYNLALAARTQAWTRQERVNYNATSAMLTAWKKTEELAYLNEVSSVPLQQTLRHLQVAFAKFFGKRAKYPRFKSRKKSRKSAEYTTSGFRFRDGRITLAKMAEPLDIVWSRPLPEGAKPSTVTVFQDAAGRWFVSMLCEDPTVIPLPAAHTEIGIDAGLDHLVTLSTGEKITNPRNERKDRARLAKAQRELSRKAKGDGTNRAKARRKVAKIHARITDRRRDGLHKLTTRLVRENQTLVIEDLTVRNMVKNHSLARAISDAAWRELRSMLEYKTAWYGRNLVVVDRWFPSSXLEYKTAWYGRNLVVVDRWFPSSNRRRTPCRPWRSAGSRRTPSAWPRAACGTPSAQLLRG

SEQ ID NO: 39901 - protein, 398 aa, unknown
  TnpB Polypeptide
MIRGYKVKLHPNNKQKSKLNQCAGLARFAYNWALQRQQENYKNGGKFIEDGELRKEFTLLKKRQGYEWLNNYSNNIPKQAIKDACIAYDKFFKGLSEFPRFKSKRKSKPSFYVDTDKIQFTATHVKLEKLTLSKRRNRQKFNLVKLAEKSRIPVDIKYNNPRVTFDGLSWWIGIGSEKEDQIVENSKEGIGVDVGVLDLAICSDEVVYKNINKTDKVKKLQKRLKRQQRQVSRKYEMNRSGNKYIKTNNIVKLENKIRKTHQRLTGIRHNYLHQTTSEIINRKPRFVVMENLNVSGMMRNRHLAKAIQEQSLFELKRQMEYKSEWNQVRFIEVGKFYPSSKLCSCCGHKKTDLKLSDRIYNCDNCGIEMDRDLNAAINLKNYGLKTMKEESVTNSMTG

SEQ ID NO: 39902 - protein, 413 aa, Synechococcales sp.
MIVRETKLKHGTTEQYLALDEAIRTAQFIRNKAVGFWMDNQGTSKADLYSLCKDLAKKFPFAKKLNSAARQACAERAWAAISGFYARCKKGLGKKGFPKFKKHCRSVEYKVSGWKLSSDCKSITFTDGFNIGTLSIFCNNETQEDLHRLKINRVRVVRRADGYYAQFCFDADRKEEGEYTGNVVGLDLGLKFFTKDQNDNAVIYPQFLRKSEKRLKKAQKRLSKKFVKGAKPQSNNYHKARKRLGRVHLKIQRQRKDWAIKQARCVVHSNDVVVYEDLKIANMVKNHNLAKSIFDAGWYQYTQWLDYYGKIWDKAVVAVSPNYTSQDCSNCGQRVKKSLSTRTHACPSCKIEICRDTNAALNILHKGMNILGAEWNKHNSTSGQEGSAEQSGKHGERCTSTVDEQSKTASNSL

SEQ ID NO: 39903 - protein, 387 aa, unknown
  TnpB Polypeptide
MIKTIKIRLKPNNKQQTKMFQFANAKRFAYNWALAKQQENYINGGKFIQDNELRKQFTLFKKQEENKWLYSISNNVTKQAIKDACISYKRFFKGYSKFPKFKSKKHDRPSFYVDNIKIKITDNHVKLENIATSKKKNKAKLNWVRLYEKNKIPTNCKYINPHIVYDGEHWYLCVGIEYQNNINLPVNEGIGVDLGIKDLAICSDKHTYKNINKTNRIKKLLKKRRRLQRQISKKYFINKRGGRYYKTSNIVKSEKRLLKVNHRLTNIRNNYLHQVTSEIVKRKPSFITIEDLNVSGIMKNKHLSKAIQEQSFHKFRRQLEYKCKWNNIELRIVDRFYPSSKLCHNCGCIKSDLKLSDRVYKCDCGYIEDRDYNASLNLRDAKIYKTA

SEQ ID NO: 39904 - protein, 419 aa, Microcystis sp.
VITLTYQYKLKVNRQQEREIVHILDVCKSVYNYALSERKDWLNSRKCLPDRCSLVSEYIIPADEPYPNYFVQAKNLTEAKKVYPILKTVNAQVLQQVLKTVDKAFDHMKSKSFGFPRFKKKMRSFVFPALSKNFLGDGCLNFPQLGKIRIRKSRKYPSGFEPKQARIIQKASGFYVSVSFQSTELVPDMTVGKTCLGIDAGIESFVATSRGDLIKAPRFLLKVQSKLKLLQRRLKRKTKGSSNWLKLQEKIARLHEKVSNTRRDWHFKLAHYLCDLADNIFVEDINFVSWSRGIVRKQSLDSGIGSFINEILPFVIWKRGKYYLKVDKNGTSQDCPNCGAITGKKSLSERVHRCDSCGHIEPRDTASAKVIENRGKNAVGLTVLENARGGDLTGIDRLNQVDLVKSLRTENPPLHRASG

SEQ ID NO: 39905 - protein, 201 aa, Microcystis sp.
  misc_feature (52)..(85): Xaa can be any naturally occurring amino acid
MEKAYSFRFYPTPTQESLLRRTLGCVRLVYNKALHERTQAWYERQERVGYAXXXXXXXXXXXXXXXXXXXXXXXXXXXXXXXXXXKLSQAISDVSWGEITRQLAYKCRWYGRNYIEIDRWFPSSKRCSNCGYIAEKMPLNVREWDCPDCGTHHDRDINASKNILAAGLAVSVCRATIRPEQSKSVKAGAEPRKGKKQKPKS

SEQ ID NO: 39906 - protein, 453 aa, unknown
  TnpB Polypeptide
MQQIITAKLKLLTTPEQFAHLRQTQLAYRDALNAVSVYAFEHGKTSSAERLQKGMYAELRMRYQLPAQMACNVPRQVGATYKGLWTKLKQNIEHRRSKRTKKRFKGLDQPPKYVSPTLTYNYGRDYSLKTEQRVSILTLQGRVIVSYRGYNPHVALLQHGATIGAAKLWYDKPHKQFYLLVSLAVEIAEPAPETQLHIVGVDVGQRYLATTATLSEKSHFFSGKAVRAKADHYARTRKRLQQKGTRSATRRMIVLSGRERRFKLNTNHIIAKTIVNAHPHTLIGREELSGIRERTKRPKRRKKGKQVLPLTPKQRRANRHASKWAFAELHDIIAYKAALSGSSFVVKVDADYTSKACPLCGYTDKRNRPGNGLMFVCQNKECGYQVRTGHAYHLHADLIGARNIAMRTRLIRQDWVRTGHLSVAPDVSDYEAKAVRLKRYAELRWSPDASPLP

SEQ ID NO: 39907 - protein, 561 aa, unknown
  TnpB Polypeptide
MPKKQGKDKFSFTVCGEFFPEAYPAFRSQKWSRGEEDPLETEMRLFCACMRWAFNRLLEGASRNKIKKQGQELFGLNSRYADDARLKAQGVQDSQKELLELEIEETERKLGRARKKLGLAMRKLAKAEGKGADPEAVEKLRLTVKGRNNRVVSLEKKLAELKTHRENGTIPKVVFGGRKLWRRVCRRKASVDEWRTVRKNRLYSRGDETKGGNPNIKISYRNGEFRLAVTISHLSKKLGEDALGRPKMSRAPRVEGRLWLPEKHANLVRIWLAMRLPYSVELIRTPDGRCLVHLTFDLGETPEPDFTEGCLGVDTNPDGVALCNVGPTGQPEPWPEGFSIPYPRGLGKYEGEFQVRLYPNGFLYIRVPDLAYTSGFRRSYLIGVLAKVVVDIAFFLGKPIVLEDLDFGKDRLDTNKKFNRMASNFPFARIAEAVCRRAVKEGVPFKLTPARHTSTIGCWKYMRRYAVPVHCAAALVIGRRAMGLKEKVTKELKHLIAQLKQNLTQKVNSLPREGRGMTRRVKAVLKRLDEKIPLHNGLSPEQQTRFYSVWHDFKRLALILR

SEQ ID NO: 39908 - protein, 469 aa, Lachnospiraceae sp.
MNKLFIPPDDIHGRKEVTAVKQMSLYSVRISRSADISRIVSATADIYRKAVDFFIHVCMKEWGSISTCKGQTGKVNAVEAFTIKTSRRASVPYDFGKDFYKFPSYLRRAAIAEAAGKVSSWKSNLKNWKEADPQTRGRCPGTPSAGYVYPAMYRDNMFVRTGTYTASIKVFTRGTWDWLEVSLRKGDVDYILRHCKNRRECVPTLQKRGKLWYLDFAFEETVELPEIEASARRILAVDLGINSACTCCVMGPDGTVAGRTFLKLPAENDRLGRAIGRIKKAQRQGTHRMPRLWARAKGISDDIAVKTAEFIVKTAVLYDVDVIVMEHLDVRGKKRGSGRQRLHHWKVMYVQQMVEQKAHREGIRISTVCAWKTSRLAFDGTGRVKRGRESERTANNYSICEFSTGKIYNCDLNASYNIGARYFIRELIKSLPVTVKQRLEAKVPSVSKRSTCTLSTLISLSAVLAAAAA

SEQ ID NO: 39909 - protein, 455 aa, Dolichospermum sp.
LLTNYVYKLRPNISQSDKMDGWLDMLRSTYNWSLADRIAQYNQQFIQGDYCDIRTKAEACPLTCFVSKNGASGEPWKDVKTDKNGNIKNPRRSAGDIQITALPYLKKARPWFAEIDSTVLQQNVKRLDTAYKNFFEGRGFPKFKNRSNFTSFTYQMGVKAQGNKIYLPKLGWLRFFNSRSIPTGFTIKAATLRKRQDGWYVSIRIEDKTIPDYVKKPLNEVKASTPLGFNPERSRRVNSILGCDLGITKLVHFSDRHQIDNPKFSTNKKARRTLKIRQRRVNRKVKGSKNRKKAANKVGRFHKKITDKRTAYQWSVANTIVSRKVDAIALEDLNISGMLRRCQVKTDEKTGRFLKNGQSRKKGLNRSISDASWSDLILKIEYLAVKQGKVVIKINPKYSSQECRNCGHTDKSNRDGEKFICTECGYHEHADIGAAKTIRDRGFKIVRGDSAKLAV

SEQ ID NO: 39910 - protein, 493 aa, Dolichospermum sp.
MKLKVKNQLTVTRIAILGTEKLNTWKSNELDLIALRLGQLRSDLWNEFGSLKAWGVSKFEIDKQLRTSKDKYQLPAKLWDSTLYDVIDDIHLVQAACVEKVMKYLGQSFQSFPSRKGVLQLTLESREWLEHPKLCTLMRKFWDRGHTKVCNQIILRAFDTKLDSKGLVWLRFGGLTPCKTLKLPTTLPTEVKCQLRLIKRNCRWEIHYTTDIEKAEKKTQGKIIGCDRGYTEVYATSSNDGARFLGNNFGKIQTEETDYRTAKQVKRNKIRSVFNKSIAKGNSAKADRIKRNNLGKIKWNNRETSFKGRIKTIVFTATHDLMLNAIKVAFEDLTEAIKSKKPMRKRMKRNVSSWCKGIIADALKQVSTRVGCTVVSVNCAYTSQLDSRFATLTGSRNGDKFTGHDGVVMHSDTNAADNILARMSDVEITRYMKHSDVKVILLERTQKFRDSIVMESEAKTGKDKPQTLEPKSKLRSKVNQRANYKQLTLFDLG

SEQ ID NO: 39911 - protein, 427 aa, Dolichospermum sp.
MLRVVKVRLYPDAQQQQSLARAFGSCRWLWNYFLNLMNETYKETGKGLSGYEVKKTIPQLKKEHEWLSLTYSQCLQQVCLNLGVAFNNFFEKRARYPKFKSRHGKQSIQYPQNVKIADNQLILPKIGKVSAIIHREIEGKIKTVTITKNCSEQYFAAILLEDSKEKPESIVEGKAIGIDLGLTHFAITSDGSKFDNPRILNKHEKNLKIKQQQLSRKQKGSNNRNKARKKVARVHRKITNCREDFLHKLSRRIVNESQVIVVENLHVKGMMQNHCLAKSIQQVGWGMFCTMLKYKAENEGKIYQEVDRFFPSSKTCHVCLNQVSSLPLDIRFWTCEKCQTKHDRDVNAAINLRDEGLRILRLRSVQVLTSGTGDKAMKCGLGGFPHEQLHQEACRPEVSRSNRGRKKSTTVLSVGQEAHTVPSGQCG

SEQ ID NO: 39912 - protein, 395 aa, Dolichospermum sp.
MKARYQYRFYPTIQQQQSLAQLFGCVRVVWNDALAICKQAEKLPSNNDLQKLVITQAKKTVEREWLSEVSNIPLQQSVADLGVAYKNFFDSLKGKRKGKKVEKPKFKKKTNQQSARFRIGGFLIKNDGVYLAKIGSVKPIWSRELPSIPSSVTVIKDCANRYFISFVVEVEPVNIDAKNQSIGIDLGIKTFAVMSDGEKAQSPDYSQLDKKIRKLQKKLARQAKDSKRRNKTRIKIAKLHNQITDIRKDFLHKLSTKIISENQVIVLEDLNVSGMVKNRKLARSISLQGWRQFRALCEGKSQKFNRDFRVISRWEATSQICSECGYKWGKLDLKIRSVKCLNCGTEHDRDENAAKNINKVGIGHCHDSKRAQRQSKTTSVASVGEASRITAPLGR

SEQ ID NO: 39913 - protein, 498 aa, Allocatelliglobosispora sp.
VRFVARFTAFRFTVDPTPGQDALLRRYAGASRFGYNQCLRLVKDALDAKSRGVVVKVPWTGFDLINAFNGWKRSAAAGRVMVAAADGTVTVEVTGLVWRAEVRQQVFEEAAVDLGRALAAYTSSKAGARAGKRVGFPRYRSKKRTLPGFRVRCKTSRSGRVDVRVGDDGGPRSVTLPGIGVLAVREDTRRLRRMLTKGRAKVISAAVSFRAGRWSVSLTCEAADLHDAHRHQADVPDTAEHGWVGVDRGLTAFVVAARADGTPVLRVDDPPRPARAGMPRQRRLARAVSRKKPGSANRRQAAARLAAHHAHMRAVRQRFLHHVSHQLVKTHDRLVLETLNITGMLGNHRLAAAIADAAWTELARQTTYKQAWRGGRLVLADRWYPSTKTCSACRTITPAMPLNQRVFTCGTCGYQADRDHNAAVNLAVWAEQHHARTRDPHAGGPDTNARRGEGTGPRTRADETSPDDAGTAPTPTGVRRGRPRRALPQDPNGLRDRP

SEQ ID NO: 39914 - protein, 457 aa, Crocosphaera sp.
MFFKSHGVEVEWVEESLPKTYEDELVEDLISIMSSFSAKIYGRRSAQRRKRDAASREHLIKKTHKYWKECDNLAFKAKNLYNLCNYYMRQSFFNTGKVLTNSKLYHAVSSSDAYKLMPSTKIACSLIRQVCQVWKGYFQAHEDWNINPHKYLGEPKIPKYKDKLKGRYSLIYKGSEAIYKKSLSKGICHLSQSNIKLKMYKAKKTVQARIVPKKDSYLVEIVYEVEEPLNQKPSNNIAGIDLGVDNLIALSCNVQGVKPLLINGKPLKSINRLYNKTRSRIQSKIGENKSSKRLNGITLKRNNQVDDYLHKASSIVVNYLKANQITTLVVGKNDNWKQKVKIGKRNNQNFVQIPHSRLIEMLDYKCQLAGINMVTVNEAYTSKCSALDLEPICKHNKYLGRRIKRGLFRTANKKVINSDINGSLNIIRMYSPETFTVEEIASCGVQPLKVNPLERVK

SEQ ID NO: 39915 - protein, 371 aa, unknown
  TnpB Polypeptide
MYMLKTYKYRVFPTKKQITIMNQWLFECRWLYNHFLEERKNSYEQENKSLNYYSQAISIVKLKKGRPELNNIHSQVLQNVAIRIDLAFKAFFRRVKAKEKPGYPRFKGFDRYDSFTFPQTGFRIINNMIKLSKIGSIKVKFHRPIEGTIKTCTIRKQADKWYICISVDYEPKPLRKSNKAVGIDVGLETFATLSTKEKVANPRFFKTDEKALTKAQRKLSKEEKGSLKRKNVKKVVIRIYERISNRRHNFTHQEARKIINKFGIICIEKLKVKNMMSNHTKVFGHKLNKSIADVAWSQFAQQLFFKAEDAGRKIIAIDPRGTSQRCSQCGIMVKKDLSTRWHKCPVCGLHIHRDLNASYNILALGMQSLAH

SEQ ID NO: 39916 - protein, 411 aa, unknown
  TnpB Polypeptide
MDNMTIHERAYKFRFYPDATQEELLRRTVGCTRLVWNKSLERIMNRAENEKVNLNANLTSMKKDEDYAFLREVSSVPLQQSIRHLNAAFKNMRKTGAGYPRFKRKANGGSATFMSNAFTYDNRKHTLKLAKMSEPLVIRWSRTLRRNAVVNSVTITLTPSGKWFISLLTVEDIPELPKTDKVIGIDLGVKDYAITSDGEKVENPKWYRANEDKLAREQRKLSRRKPKGRNYEKQRVKIARLHEHTRNQRTDWLQKLTTRLIHDNQVICLETLTVRNMVKRVEPVMSDDGSFTRNGQAAHSGLAKSILDASWYEFNRMLLYKASWYGREVIHVSRFYPSSQLCSHCGYQNHDLTLADRSWVCPRCRAHLDRDVNAAVNILTAGLAVSHTMPIAWYDAPEIINLPHCTPAVRA

SEQ ID NO: 39917 - protein, 423 aa, unknown
  TnpB Polypeptide
MQLTERHLIKPNHALYGTLDDLTFKAKNLYNHGLYLYRQSYFEHKKNPDKPVLSWADIDKTLRKQGHDDIRALPSKVAGAVLKNLGENISSFWKLVRLKREGGLAQKPKLPGYLHKTDGRYAVSFNYQTFGAKRGANNELFLCPKGINLPIPTKVADPKQVRIIPSRNNFVIEVIYNVEESAPKSTSKYAGIDLGVDNFATVTFSTQNRPLIIKGLELKSINQGYNRLITKAQELLPETCKTSKSIHRLWSRRSWILRTKIHQMTAFLTALFDEMQIEKVFIGKNTGWKQALPFGKKVKQRFAYLPYETFIEQLQYKCKLRGIAVITQEESYTSKASFLDNDNIPVYGETDNPKFSGRRVKRGLYKTGKGQLINADVNGAYNILRKGLMNNHQSLQVGNPLIHPLVVKGIGQEPNDKLVRLYM

SEQ ID NO: 39918 - protein, 493 aa, unknown
  TnpB Polypeptide
MSQLASEIRGISSYATYIVRNDTQLEAGLARVGAVQPAVAGRWAGVTMPDFLANGRTGKSRKEWLVRYNVVASFRSWQERIKATEGTSSKYVSQGWKRTMNANPPSYGEDYINLGTVDKQYAVIENDDPFGDGEIILKMVIQGKWYRLFFPFDNSRFTEGKVTLPVVKVEGSKPVFIFSVVTDNPIVQFSSDYVIGVDVGINNYATVAVRNTETGKIVHQTTLSQRVHSLWNSVKASEKQVRQLREKAVSLSLYDRQGRMAALDEADLHRKAASRKKRELAIVAAQEIAYLSHFYGNAVVAVEDLSWIRNTMRNGYWNRGAFVQWLTHYVSQNGGWVVSVSAANTSQVCHKCGSEVEHPTYEVSKCAQCGVMDRDVNAAANIAARAVPKVDKARKKRSKNSKLQPQAPLKTPVARGSLKYPGRDRTKHIPTPKRKNHPRNVKGVTLPISPARAQAKCLEASVLADCLTSGVAGTSQAAIKQGTMTKYRLCSPI

SEQ ID NO: 39919 - protein, 264 aa, unknown
  TnpB Polypeptide
MTKDTLHLLRCSQPTLIQNSQPRVPFGAFLASPKKQQVSDNSIGHLVSLDPGSNPFMTYYSPTKMITGSFGTTEDLNNLRMFQQRYDATCSLLSADSSPWLPPKDRKRVVTKKLRLHEKVRNRVNECVNKVTKFLVDGFQFIHGSIFEVAQIVERPTFINPEGEQRKGKGRLRSQTRRDILTWRHAPFKKALLNKMELYGGSLVVELSDEAYTTKTCGRCGHQNDVGGSKSYCCKNCGYRVHRDVQGARNHSLKNCVGKYVWVT

SEQ ID NO: 39920 - protein, 546 aa, Geobacillus sp.
  misc_feature (266)..(275): Xaa can be any naturally occurring amino acid
MKKAYFSRRLYKSEMDILHVTETSYALELFNQAKRFAFQTLVREKRWGRKLHKESLHIVVKKKYGLNDYFANSAVREANALFSSLMELNKMHLQQTEEKIKDVKKKLKTERTKLTKLGKIKESCIKGNLRFPKNTNFVLHKSGIISLELKNRSLVWMNSYLFEHRYLDVEWKRTKAKIGRLTHRLYRLEQKKMKLKEHIPSAVFGGKKLFKQQFTKEEFIKDHEAWRKLFLAARNKEIIISGRKDAGSGNFVFHYNPMTKELHMNXXXXXXXXXXNKTVTDQIQCKNKKEYGKPISWSIEDHGEYYIIKCLVDVESNPYINFSTSDGVIGVDCNYNHIAWTNVSKDGNFLESGKLTFSIEGKTSGQITKIMEAEAITLVDIAVRKKKPIVLEKLDTTLSKTGNRYGNKKANRMKSMFAYRKMIQAIKRRADKMGVAVIEVNPAFTSVSGKLKYMRKFGISIHQAAAFTIGRRGLGYKEKSPKVLKKHVPKDASHHWKHWSILNKKFSVRTHTLYHLFNVNQPHQGIDVFHPSLLEEEKRQLIKTLA

SEQ ID NO: 39921 - protein, 344 aa, Leptolyngbya sp.
VAIFLTISCKLQLDLAQHQKVENTLAAFSIACTYINEQVDPAVRNKLKLQSLIYHDVRKHVPELPADLVVAVMGRVAESRKSAHERKCRVRRFRPTSASINTKAFRIREADWTVSINLVGGREKTIPLVLGEYQREQLRGRKPVSAVLVCRSDGGVYLQVQVEYPVPEVVPRGQVLGVALGMDTIVVMSTGEEIVREEVGSVRSRYQRVRSSLQKKASKGTRTTRRNCRRVLKRLSGRERRFATWVNHTVSKQVVTKAKDIGAAIALEDLTGVRERKNKRVKVQTERAHINTWAFHQLRSFIEYKAAVCGVGVVVVPSDKKTEGTADSRKAVKIKFRGAACKPA

SEQ ID NO: 39922 - protein, 684 aa, unknown
  TnpB Polypeptide
MRTVKHQLKPLSTATEQKTKLLEVMYAYQFEKNYFSDQLLHHSHEIFNLESSYIQIRDKLVKNGYQSKYNLPARLWKMALKEAYDLHIRTHESQVALIKRKLNNNLYQYCHFELIKQVKLEESELSVLQCFENFLYFATNSWFFNFKTFCQFEAEYFSKKFNKARIYQRAKTLLMDLLKPSNAVKKEVLTKKEAKQLKQLLESSSDPFSLCNQLFQHYCHSLVKAIQKFRSFKQIQSQINPTITLDGDCYDLYSKYDEEAKKNRWFLNIMSMESGKRIKGLELTGFHHAKQIMKHKKSANLILSFDPNNLANGVAAHFTFAIRRIRRIKTKPKVTKSPSAKQHHSVANKSSKQTTDNKQNITADMLMTMMIIGGDFGLTECFTFSDGWVAGVNQGEMLREITTYTTQAVRNIQKHSKKGYFGVEKKNSNNSQNPKDTKSKKDTKNPKDAKSKKSKRAKGKRNHQNNCFNHNSELKNVNRHYNKQQERYNRRLENYKHQFMNEIIDHFTSDNIYGQYATLLKTQPIQLVFEDLDFVSLGKNKEQKRQINLIKGVLTLLEEKIKLHNLPIEIIYVNPAYTSQTCPNCGFVARKNRDYQARQFRCQHCGFTANDDVRYRLVNEIVQSARSAGAEAAPAADDYIASQNIAMRPSVLRDSQRLRVRKVKDLLLARHEQIKGSCKMFDAS

SEQ ID NO: 39923 - protein, 421 aa, Methanolobus sp.
MKKGYRYRIYPNKEQCSLLEKHFGGSRFMYNRSLFIKNLMYKKFKINVSEINLNTNLTLLKEHHSWLKDLNSQSLQQANRNLLTGFKNFFEGRGSYPTKKRKKNNNYSFQVPQNYQINLTSSKIYLPKIGWIKIVLHRDFLDKEFIENNLVTKGVNGEVILDQKLNRKFNILKTLTVSRTSAGRYHISLLIDDHVPEPKLVEFDSETTVGIDVGIKSFAVLSTGEVIENPKFLKKSLMKLKKLQRNVSKKQKGSKNRKKAIVKLAKQHQLINNQRNDFQHKVTIRIIRENQAVAVENLNVKGLIKNHKLAQAISDVGWSEFIRKLIYKAEWYGKTILRIGRFDASSKICNVCGYKKDDLTLKIREWECPDCKTFHDRDLNASINIKKIALNNLSTAGTAGRACGLMNISSGNEARSLSVFS

SEQ ID NO: 39924 - protein, 441 aa, unknown
  TnpB Polypeptide
MEVSTTYRSYRSGLREKPEDISHYKRLAGVSRWTFNWALKHQTERLANEQPLLTVKELYGAFKELKQEQGYEWLKACPCDVPYEAIRNCVRAFQLYENQDRNASNKGYERSLPKRKSRKDGLRYTHSFTAMDNLHERITDKGNHRYTITSNGFTYHLQRKTPFADHGQRELIRIVVQEDHGRWYLTTEFKDVICVGKPRGETVGVDWGFHTMAVSSDGDFYAFKGLTPAEDKRLHTLRVLRLKETPNTPAYSRLQKQIDTLEAKKKNRINDLHHKVANAILKTNLPISERPKRLVIDHLNFTQIADYGGEMRQRIQDEELYQLFLKLRYKADQQGTVFQEVKWYPSSKTCHECGHKNDNLKVSDRTFICPTCGYTQDRDLNAAMNLQEIPEDGKWEALIAKKKEAYRESVADRLAIDQSISKTEEPLGDGFDDWENFDFKQ

SEQ ID NO: 39925 - protein, 165 aa, unknown
  TnpB Polypeptide
MPEIKSELQQGEGIGIDLGIKELAVMSDGAVKPNINKTPRVKKLDKKLRREQKRLSRKYEFKKKRGEKTATYSANIEKQVVKIQRLYQTLTNIRVDYENKIIAAIMRRKPRFIVLEDLNVLGMMKNRHLSKAIAAQRFSYFRIKLTTKAKQIGIEVRIVDGFYPK

SEQ ID NO: 39926 - protein, 128 aa, unknown
  TnpB Polypeptide
MGCWSPADASFAEIRRQLTYKTAWHGGTLIVADRWFASSKTCSGCGAVKAKLALSERTYVCTACGLVLDRDVNAAVNLAGLAGSAPDSNGRGAQVRPGPAGHSAVKRQPGTAAAGQTGSAFRQRKAVA

SEQ ID NO: 39927 - protein, 398 aa, unknown
  TnpB Polypeptide
MYLTERHIIKPKNPLFKELDNVCFLSKNLYNKALYLVRQHYFNTKEYLNYYGVNRLMIDSKDADYYALNSKVSNNILMLVDRNFKSFFSLIKKRKNKDYNKPIRIPRYLDKQGRYVATFEKRAVSKTFLRKGLIKLANISNVIKTKVELEALKEVRVLPRTNHYIIEVVYVKAEKPLLEDNKRYAAIDLGLNNLATVCSNVEKPFIINGRPLKSINQRWNKHKAKLQSCLTKDSKSSKQLALITEKRNNRVKDYLHKSSRKIVNFLVSNKISTLVIGYNEEWKQNISIGKVNNQSFTYVSFNIFVTQLQYKCKLEGINVILTEESYTSKCSFLDNEPLQKKDSYLGKRITRGLFKTSTNKLINADLNGSLNILRKVFGEFQYPIGACCTPVRVTPSFN

SEQ ID NO: 39928 - protein, 418 aa, unknown
  TnpB Polypeptide
VAELLTTRTITASLSNDREGVVSDLDSLADSASKLWNVARWTIDRIWNATGEIPDESTLKAYLKTKPVWKDLNAQSSQAIVEELSGAFQSWFEQNDPDANPPGYRKYGDHRPHSTVTFKEDGFKLDTDHQQVRLSKGENLKDGWADFILCEYETGPETDLTDVERVQQVRAVWNDDHWELHFVCKVEIDATDTTGEKTAGIDLGISNTAAVSFGDETLLYPGNALKEDAHYFRHVEYETEGEDGPSNHAEWARQKKSRRQKHFLHALSKDIVEQCSRREVGTIAVGHPKHIRDDQDWGRHGNKRLHDWAFETLIAHIEYKAEERGISVERVDEAELKTSKTCCQCGVEDDSNRVERGLYVCDECELVANSDLNAAENMRAAVTPSPSQDRSNGCLAQPSVRLFEKSTGRVARREQVVS

SEQ ID NO: 39929 - protein, 601 aa, Rhodococcus sp.
MTGPGSPAPRQFAFTTRAHVAVDDATGESIGLDEVDIRVGWLLDLIVAAGTELVSRLWQPVTFDVLAAGLDGQDRRLPAQGHVAAARLGWHPHYPDGIYVPSRVSRVVTAQVMATLRTLAYRDTAITALFERFDPATGRIAPPTAAADRVPLGFARGVRRQLIAHARREGAAPSTRLRITDVQEPPQTSAMARLSAADRQLAQITATDRELVLTVKLPTCPAPAGRAQWRSVRVTAAIPGHLHGRAITDWHLPTLVLDRKGLLWQCAATELVPAGDLGSATVAVGVDWSPSTLGAAAITTENPDGLSSDYRGVTYDDRGLGTKLTRLQTEGQMLHRKAARLTRLAATAPPEVRAQLEEKIAVLDGHRTAVGVKRGKINRELAFHFGRQVTDYAEAAGATVIAVEDLTTLETRGHGRVNNNRAAQSARRKAVTSLAHTAAGIGVTVVTVPARGSSAQCPGCDEPLARPGGYHTAWCPDCRVGGNRDHIAGVNLAKRALLGRGKATRRRGQLPAIRVAEHAPVRKSRDKTSPTPPRPRHRRVRRSQPTTTPRSGVTPNRHVPAPEASVWDTVQPTPPHDDAGSRDTRTSPTNATPVARSMRYT

SEQ ID NO: 39930 - protein, 441 aa, Halomonas sp.
MFVNRVERIIIRPGHANHAACRRLCVATRKVANATLYHIRQALFAEAPISASQADKILKREHKDVYSLLPSAGAQRTTQLVGDSWKSWVKAKADYARHPEKYRAPPKIPGYGKGARTYVVNRNGYKIVNGMIHLSGAKAFGFQPVKTTVCEHQPFNAKADETVVTDIHIVPLGTSFCIEIGYIKETASPPLLDMSRVLSLDIGIDNLVAITSNQPDYRPVLVKGKVIKSINAKYNKDKAALAKEGKKRHIRSKVGKRHARIHDYFHKVSHWIVSECVRTRTGKLVIGKNPGWKQGVNVGRVNNQKFTAIPHAKLIDMIQYKAEEQGIEVVLMNEAYTSKASALDLDPIPDYDEARKQKPTFSGRRVKRGLYRTASRQRINADVNGSANIMRKEIGNEWISNHLRAGKGVVDTPMTITHIDARLSLEACQRASETTSNCKAA

SEQ ID NO: 39931 - protein, 440 aa, Halobacteriales sp.
MSVVVRRTNTFAVRPLSAEDEQLLRDLLDASASLWNELNYERRQQFFDGESVWGTADYRKRYVDVLSSSTAQQVIRKNSAGWRSFFAARKEWENGERDERPSPPGYWGNEDEDRELRTYIRNDQYTLETGERSRLEIPVGSELKNRYDHTGRLRLEVCGAPKWDGEQGRLEIQYDEMDDTFRAFQPVTVPDSQQDSPLASEAAALDVGANNLVACTTTTGQQYLYKGRDLFDRFRETTDKIARLQSKLREGRYSSHRIRRLYRKRTRRRDHAQDALARDLMQRLYAEGVATVYVGDLTDVLSTHWCAEVNAKTHQFWAFRTFIERLSYTAEEYGVTIEVKSEADTTRTCPACGEQDNTDRDGDLFRCPCGHEAHADLCASQTFLEQQAGEEVGSMARPVRLKWDDHNWSELPDSPERASPNEKRTNRSTSDGKLASVGAT

SEQ ID NO: 39932 - protein, 400 aa, Halobacteriales sp.
VEHRRTAVVKLDVTDTDDTLLHRTVQRFKQAAQVAVEKGWNDNGRLITAKTELHHRSYERARQTTDGLHADLVQAARNRAADALNTCVTKREQGENPSKPLFTSDFVHYNTNAVTYYDDYVTLATVDGRVEAQFVRPDTPDAPQYEYLSEPWERNEATLHHRGGDWYLHISVVKEDDVEPEEAENETVLGVDLGVENIAVTSTGQFWSGGYLNHRRREYERVRGGLQQTGTESAHRTIAQLGDREGRWAEDYLHRISKALVQEALANECDTIAFEDLTDIRDRMPNVKKFHIWAFRRLYEYTEYKAVERGIHVKQVDPAYTSRRCSKCGMTLEENRNGEEFACQKCGYEAHADYNAAKNIGYKRLSAGQKSLSRGATRQLALKSGTLNANGEFSPASSEV

SEQ ID NO: 39933 - protein, 223 aa, Salmonella sp.
LILRPPWHYDAWPSPPDPSWPRATRAPAQPGPADQVRDFFFRQADFPRFRKKGQSDNFCYPDPKQIKPDQGNCRIFLPKPGWIRCRNSRQVTGIVKNVTVSQSCGKWYISIQTESEVSTPVHSSASMVGLDVGVAKLATLSDGTVFEPVNSFQKNQKKLAVLQRQLSRRVKFSNNWQKQKHKIQRLHSRIANIRRDYLHKVTTTISKNHAMIVIEDLKVSNMS

SEQ ID NO: 39934 - protein, 226 aa, unknown
  TnpB Polypeptide
MEVEKINHVIIEHTPAGKYFAVLNVDFEPEPRSNAGGTIGIDVGIKAFYSDSNGNTVSNPRYLERSMRKLIREQRRLSRKQKDSHNREKQRIRVARVYEKVTNQRNDFLQKQSTMLVRENQTICIEDLNVKGMIRNHKLSKSIASVSWAKFFEMLEYKAGWYGNEIHRVPTMYPSSQTCSCCGYRNPRIKNLGIRIWECPKCHAVHDRDTNASINILKKGLQMQSA

SEQ ID NO: 39935 - protein, 489 aa, unknown
  TnpB Polypeptide
MGPSEVYPVAKQTDTNGRFIAEFELRVNPHQAAVIRKRLEAGRLIYNALLREGLKRLNLFRQSRLYQRALRIPGRTEEQKQARRAAFKAAREAFGWSEVGLTAHLQRFGQQFTRSWLNEHVNSQIVKKLAERAARVVHDHSLGRKGRPRFKKRGELIALEAINNLQGIIVKARDDGSLYVDWGAGRGAEHLHLPLIVDPDDPYHRHALATMQPEAGFPGLKFTRIVRKVIRGKDRFYAQLVLVGRPYQRDRIQRHGVVGLDIGPSTLAIVAEALVDDPLAAGKEGPFRRFCDELADKEKAIRRLQRRLDRQLRANNPDCFDEQGRWIKGRRARNVSNRMRRTLAKLRTIRRQQAEHRKSLHGHLVRQLLALGSEIRLEKLRYKSFQRAFGRSVLSRAPGMFVAHLKRKASEIGVVMTELPTHRTRLSQTCHCGRIRKKSLSERIHRCECGIRAHRDLYSAYLARYVDGDQVDLARAAADWPRFQALVSA

SEQ ID NO: 39936 - protein, 489 aa, unknown; identical to SEQ ID NO: 39935
  TnpB Polypeptide

SEQ ID NO: 39937 - protein, 546 aa, unknown
  TnpB Polypeptide
MTRVLRAHSFVLELSVRQTEHLEILARGRRDAYNFALALDRDCYAADLPPADWADLEPGYESPGWNPTRRLSPWDLNKLWPKAAPALYPEHPAPGQPAQLTFADMDLARSAAVRRRGGFPRFRSRYDAHQTVSFAQGIEIRGETIKLPSIKAPLRIKGSTSRLRWFLEHANGAIQKATLVRDGVYAPWRCVLVIEIDIPDVLAPDNRPVVGLDLGIKSFLSLSDGKVIENPRILESMLARLRAAQKSVVRSERDRQKREIEARAAGLLTQSQRLPKGRRHLAKELVITRLHARVVALRNEFHHNTANLLISRYRAIGIEDLNIAGMMRNHKLARVIADVGWASFLSILTYKAAAAGVEIVKAGRWFASSRRCSACGENNPALKDLKIRAWTCPACGVMHDRDINAAANLSPSETQIANARASRLAARKVAAAKRQRQKDRAAKAALTKAVKAEINRLAKHTEKQARHAKRMTQPKPSTLAVTPTDSNARRGSVRPKGTTTVVLPVARTKTLRKQTEARTEQAHAQSTPAQVVSRGALDPPLVDSSV

SEQ ID NO: 39938 - protein, 546 aa, unknown; identical to SEQ ID NO: 39937
  TnpB Polypeptide

SEQ ID NO: 39939 - protein, 179 aa, unknown
  TnpB Polypeptide
MKELFVSSDGVTAAYPRYYRQSMEQLRKEQSRLSKCQIGSNNRNKQRIKVARLYEKVSHQRKDFLHKLSRQITNVYDAVCIEDLNMQGMSQSLNFGKSVHDNGWGIFTSLLDYKLSEQGKKLIKIDKWYPSSKTCSCCGKVKEELSLSERMYQCECGFKCDRDVNAARNIKKQGILVLA

SEQ ID NO: 39940 - protein, 376 aa, unknown
  TnpB Polypeptide
MISRATAKIRINATPKIIKTIAVYKKALQFCVNQAWKLKIKNNVKLHPFVYYKLMKKGLQSQLAVACIKQACGIVKKAKSKPIINRCSIRYNFPRSASFKNNILSIATIKGRVKIPFIIPDCYKEYFSWKVCESLLRIDKKGRCFFLFTFSKEVDVKSSTNHKVLGIDFGINNLAVTSNGKFFKSSKVKQIKRKFKFLRSKLQAKGTRSSKRLLKKLSGREKRFMAWVNHNISKQIVSNFDGNKIVMENLKGIRKQKRGKIMNYWISNWSYYQLQKFIEYKAMRKGIITKYRNPFMTSQLHYKCGKLGIRSKGLFSCLHCGLSSYSADLNSARNLAHPKLVERQALVTKPNIQMDDFKGVLPNIIANDIMDKSPRL

SEQ ID NO: 39941 - protein, 375 aa, unknown
  TnpB Polypeptide
MRMTYKFKAISSEITIQKAEHWLHLCQQLYNTALDQRIQAYKRCGITLTTYSQSNELPELKAAFPEFKQVGSQVLQDVVERVGKAFQGFFSRLKRIGVKAGFPRFRSRARYNSFTLKQAGWKLEGRHLKIKGIGIFKLFLSREIQGRIKTVTVRRDACGDWWVCFSCDEVPSRVYPEPQFEGVGLDVGLNAFCTDTEGMQIANQKYYRKAQADLRRRQRKVARRKKGSHRRKKALKELARVHRQIKNMRLDFLHKTANYYINKFKTLCVEKLNIRNMVKNKYLSKSISDASWGTFVELLLCKAAEAGREVIQVDPKGTSQNCSSCGEPVKKSLAVRIHRCPHCGLEMDRDENAARNIAAKANIKIGVGLTPQALT

SEQ ID NO: 39942 - protein, 423 aa, unknown
  TnpB Polypeptide
MGKSVWKDLFREIKRTFGRFIAIFAIVAIGVAFFAGVTASSNDMKNSTDHYYDEYNMSDLRLLSSIGFNEDDIKAIRAVDGVNGVYPAYSQDAVIRKDSIETAVHIMSVPDNTDRNNENYINQLRIKEGRLPEKSGECVVRYEDTKDNFSIGDTIKLSSGTQDDINDSLKDSEYTVVGTVYTPYYVSYDLGTTNVGSGRINYLMYITEDEFMSDYFNEVFATVDGAKELDTYGTEYKDLVKETADRIDNISQSRINVRKDDIQDVYEDSVNEAKEAAKAAIYDHVVESLTEQYSNYFVGMDVSAIIEPYIQPAYEKALADYDFNSIETQAKEDFESKYGDSDDWKWYELTRQLEYKAKWNGREYIKIDTFYASSQLCSVCGYQNTETKNLSVREWICPVCGTNHDRDINAAKNILEEGLRQIA

SEQ ID NO: 39943 - protein, 277 aa, unknown
  TnpB Polypeptide
VSIWTLDGRIHLRYSKPDHFPAVATVKQTDPVYRDGAFWLYATVETPDVEIEPPTEYLGVDLGVVNIATTSDGEIFSSAATEKVRRRYGRLRGILQKMGTKSAKRKLRQISGRERRFKTNTNHVISKRIVCATQGTKRGIALEELKGILLRTTVKKFQRERHHKWAFYQLRSFIEYKARRAGVAVKVIGGAYTSQQCSVCGFVHPDNRSSQAAFRCLACGYTENADQNAAKNIAARAAVNRPIAVRSPGDGGEVESQACKEHGATYSIMPPTSVGGS

SEQ ID NO: 39944 - protein, 128 aa, Okeania sp.
MVKNHKLAKAISDANWGELVRQLEYKAEWYGRQLIKIDRYFPSSKRCSNCGHVVEKLPLNIREWDCPECGNHHDRDINASINILRMGTRGVRQTQGNAHQEGCGRSSVSLWSAPLDPRGVNHRLRSIP

SEQ ID NO: 39945 - protein, 409 aa, unknown
  TnpB Polypeptide
MSKLETKPKPQYAVRRVQIGKSAQLDELAHACGQIYSRTPIFFWRTVRHKGIWLKPRHLMRLIPTDPDHLLHAHTVDAAVQAFFAGLSSWRERHTMDPTAKPPRHRKWYFKVEYKSSAIRLHESLLILSNGRENAPLVLFWEWDLPKTVVIHWTGSQYEAIATYQIGKDLPQEEEVSLEERRAEHVVGIDLGEVHPAVSSDGQRSHLLNGRLLRSKRQYRNKFLAKMDTKISHSKKGGKRRRKLIRAKKKGLSRLKHQIQEIEHKQTSYLVNTLHQESAEKLVIGDVRTIRQNLDVGSKTNQKLHQWSFGSIRHKLTYKAERLGMRVVVQEESYTSRTCPVRGHRRKSAPSGRVFGCTNRTCRWQGHRDGVGAVNIRAKYRGEFGGRHVVGAMAPPTGCGYVPQLRVSL

SEQ ID NO: 39946 - protein, 398 aa, Beggiatoa sp.
MKQVENLEGQINYRLLKSKVAQQILRRVDKNFKSFFNANTDFKKNPNKYKGKPRPPHFKRNLHDNLVYDYQAFSIKGDIVTLEKDLEIKLPQQLVGQFIKQIEIIPKPRAFHAVFVYEEDLNHFKQVPQNDKVMSIDLGLNNLATCVTNGIVKPFIIDGRRLKSANAYYNKRKAKMQSKLEKQRGKKWSKKLQSLTNWRNAFVNDYMHRASHVVVKTCVDNGISKVVVGDVAKSLDHISLGKKTNQNFVNLSLGQFVDKLGYKLGSHGIELIVANESYTSKASFVDGDKMPKRYYNPDTKKKHTFSGKRIKRGLYKTGNGTLLNADANGAYNILRKTDASFSFSMLAKKVGSKVKEWLHPTKRFSFLNKKNPQKSNFRRIKKQTDSTSPVLDQQLSLF

SEQ ID NO: 39947 - protein, 406 aa, Lactobacillus sp.
LVKLGRTIKLRLYPDNNQSADFLTMSREYQRLANIVSQWIFDHDFPLSWLKINHQLYQVLRQKSQLNSQMVQSVFRTVAARYKAVQEQMKQHPYRYKNEGNKWVQVPRDLTWLVKPIHFRRPQADLVRQRNYSFVDEMKRISITTLGKRTKLYFTDKGFEDYFHGNWKLGTAKLVHNCGKWFLHIGVTREVSDFNAKDSPKIVGIDRGLRFLATTFDSAGKTLFFDGQKVLYKRKKFLETRRQLQRKSTKSAKKKLKQLAQRENRWMTDVNHWLAKTLVTAYGSHTLFVLEDLTNVTFNTDDLPKSLRNSHRSWSFFQLGSFLTYKAQAIQSIVVKVNPAFTSQRCPKCGMVEKTNRHHEAHEYWCEQCQYRCNDDRLGAMNIKMLGQDWLSGVKHPKITKLTTIR

SEQ ID NO: 39948 - protein, 387 aa, unknown
  TnpB Polypeptide
MIRAHKIRLNPTAEQGNYFTRAAGTARFVWYWALAEWNRQFEAGEKPTALKLKKQFNEIRREQFPWTWDVTKNASDQPFLDLGKAFTAFFEGKHGRPTFKSKKKSKPSFYLANDQFELGDHRIWIPKLGWVNLAENLRLQGKVMGARVTKTAAWWFVSIQVEIPDEQPDPHGCAIGMDVGLNRLATLSTSEGFENQAFLKATLKKLRTANKRLHRRVKGSKNREKARRKVARLHYRITCLRDDVLHKLTTTLADCYGIVGIEDLNLKGFLKNRKLARSFSDAALGKLLNLLTSKVEQRGGQIIKVGRFFPSSKTCHACSWKWEDMQLSDRAFLCQNTHCAYYQVAQDRDHNAALNILREALRLIGLVDQAVSGTGSDADANSAVDLT

SEQ ID NO: 39949 - protein, 334 aa, unknown
  TnpB Polypeptide
MSAWVDMLRSHYNWCLNDRIVHYNQQFIQGDYCDIKTRGEASPLTCFVSKSGATGNPWKDSKSDKDGNTKNPRRSAADIQSTALPELKKARPWYSEIDSTVLQQNVKRLDTAYNNFFAGRGFPKFKNRSNFTSFTCVMGVKIQGNKIYLPKLGWMRFYNSRPIPNGFTIKACTARKRQDGWHISLRIEDKSVPEYRARPLEQVTKVIGCDLGITKLVHLSDGYQIENPKFSTTKKARRTLKIRQRRVSRQVKGSKKRQKAIKQVGRFHQKVSDQRQAHQWKVANKIVARNIDAIALEDLNISGMMRRCQVKTDEKTGRFLKNGQSRKKGLNRAI

SEQ ID NO: 39950 - protein, 422 aa, Sphaerisporangium sp.
VPGARDLLVSLTDLCAVQQNTNMRTAYKVRVYPTPEQAAVLNRTFGCVRLVWNRVLAWRQARYQADGAKTSYAQTDRYLTELKRDPQFAFLSDVSCVPLQQTLRHQYTAFVNFFAGRARHPRFKSRHGKQSVTYTRSAFRWKDGQLHLAKMDSPVEFVWSWPGIDPAMPAPSTVTVSREADGRWYASFAIQTAVEPERAPATCSAAGVDLGVKDFAVLSSGEKIANPRHLERRARNLARYQRRMARKRRGSANRAKAKAKVARAHTKVRHARADFLHKTSARLVADHDLIVIEDLAVKNMVRNHCLARVISDCGWAEFRRQLEYKTAKHGRHLVVIDRWYPSSKTCSACGHLLAGLSLNTRTWQCPSCGTRHDRDTNAAKNILAAGRAVSACGADVRHSGTSRVRSATKQETSPARVGIPLH

SEQ ID NO: 39951 - protein, 412 aa, Microcystis sp.
MKLVQRHLIKFNKNEFLAFDKLAFLSKNLYNCAVYLNRQAFFSHQPFLTMTELHHALKTSADYQALPAKVSQLVLKQVEKTFKSYQKAQEQFKKSPNKFTGEPKLPRYKDKKKGRNVLTYNYQAISKKALKQGLIKLSGTNLEFKTNLKEVLEVRIIPKSGAYCLEIVYEQPSPASQEGERYAFVDLGLNNLAAVTSNIPEFQPTLLCGKALKSCNQKYNKTLAKLKSELPSLQKTSKKIQGLTLKRNCKVDYYLHTASKYIIDKLLAHQINLLVIGQNQGWKQNLNIGDRNNQAFVNIPHSRFIEQLTYKAILVGIKVITTNESYTSKCSFLDLEPIGKQEKYLGKRVKRGLFRSSSGYLYGADINGSLNIGRKVVGEVAFSKNPIERLVVSPVRVKAYKADSKCDVCVQN

SEQ ID NO: 39952 - protein, 459 aa, Allochromatium sp.
MKVTRTLQADAPPELAPICRAMGYLRGDIWRRYGALGTLGRSALDIRKDIIARNLYGTLPVDGTIRNETTKDVVNDLLTYKAAAKLNVRQAVAKRTTDPTERKRLYALLKNDQWQHDPFLHRQMRKHFRHGVSHTANQFIVRSDRHASVIVDGRLVITIRIAKQSGGNIRLVTTSSGKHVNLTGCNLRICVKDGFTKIHYAADKGAGRPHGEQALGVDKGYTEAFTDSDGNAHGTAFGAVLTDYSDAAAKTGQQRNQLHALEKKHREAGRLAKAERIRQCNLGRKKIAARKQRTKQRLRTIAFQSAHSIVDKAALVVSEDLTSPIANKAQWKRYNRRMSGWAKGVLAEALDSVCEQRHAEHVLVNGAYTSQMDSTTGLLQGKPVGDKFYRITGDVLQADHNAALNVLARLADPDITRFTPYRDVKRLLLARSPAQLSVKRLELGESSRQPSADKSIEQV

SEQ ID NO: 39953 - protein, 497 aa, Acidithiobacillus sp.
MSRKSGPSFVLELPLVVSPHESRVLSVRFEAGRQLYNAALGEALRRLDLMKQSKACQLARKMPQGAPKSPEQKARAEAFALIAKSIGFTDYDIQSYATQCKNACWIGAHLDAHTTQKIATRAFLAAQRYQFRAGGRPRFKPKWKVLESMEAKSNAAAIRWRGDHIEWRKLNLKVRFDRKDKHGVQTFALQKTVRFCRIVRRTIRGTVRWFVQLVIAGFPKWKEKNPVCQGKSAIDIGPSTIAAISETDAFLEKFCANVPDIQKAIRRIQRAMDRSKRRSNPDNYQKNGTVKKAAPGHRLQWVFTHGYLRLRARLKELHRILAAYRRTEHGKLANRIVAMGNTVMAEKLSYKAFQRMFGKSARDRAPGEFMDHLRHKAASAGGEVIEFPTRTTKLSQSCHCEVVVKKPLSQRWHNCSCGVHAQRDLYSAYLALHVRSYVKGENQVWRLDTESARKGWCAAEPLLGKAMSDVVQTAKGGPLPASFGLNSKKARDRAVLS

SEQ ID NO: 39954 - protein, 390 aa, unknown
  TnpB Polypeptide
MLKHKAYKFRIYPTKEQEILIAKTIGCSRFVFNHFLAKWNETFKATGKGLSYGSCSKELPLLKQEFDWLKEVDSTSVQTSVRHLADAYDRFFKKQNERPRFKSKRNPVQSYKTNIQGRSQLPEVSIVGNNLKLPKMKWVRFAKSKQVEGRILNATIRRTVSGKYFVSLLVEQEVNELPKTGSSVGVDVGLKHFAILSDGTVYKNDRYFRMLEKKLAREQRKLSRRQLIALNKKIKLSEAKNYQKQKRKVAYIHEKIANKRTDFLHKVSTEIVKNHDVIGIETLQVKNMQKNRKLSKSISEVSWSEFFRMLEYKADWYGKTVVKVGKTFASSQLCSSCGHQHKDVKHLALREWTCPSCWVHHDRDVNAGLNLKQEAERILASSTVGTTGLA

SEQ ID NO: 39955 - protein, 432 aa, unknown
  TnpB Polypeptide
LNIRVNFVKEEKNMLLSHKTDIQLNTTESNIVGHMCYAASKLWNVCNYERRNFKELGMVHYPDWYDQKARLKGNMWFKSLPSQTAQEVCKLVDKSWKSFYALIKSKGIQNPKPPRFKQSGMTITYMQNAIVHVSGSKRVRLSLPKQLKEYLKHTYDICDNYLYLENKIFQNTDVIKQIKIYPPDQKNVCQVIVIYDVKDVEKMQDNGHYLSIDLGLHNLMTCYDSGNGRTFILGRKYLSLERYFHKEIARVQSVWYAQQSERGIKYPKSSKHIQRLYRKKQNAVKDYLHKTTRWIAEYCRKEDIRCVVVGDIRNIRKEKDMGHKTNQKFHGLPYNRLYIMLEYKLKLYGIQLIKQGESYTSQCSPLSPEVSNRYAEASNRKERGIYITDGVRYNADAVGSFNILRKYLSVSGKQKELSVTGLKTPEIIKVAA

SEQ ID NO: 39956 - protein, 446 aa, unknown
  TnpB Polypeptide
MWKVRESQMQLTEKIRIYPTIEQEYVLWHLSEQCRLIYNFALAERKRQWELNNLRFGFQVFPWGKPEWIGYTKQQNDLPSIKEKYPQYACVNSKVLQMVLRTLDADYRSFMTLRTKGDKDAHPPGFKSKNNFTTMVYNQSGFRLQDGRIALAQYYRKDVSLVFDILADYIAKNLGRIYQVVVSYDRGKYYLSIVHEVPEKPYEDNGLYQAIDLGITKTVTAVNMQGKFFEATNPRPDKFWNPQTDAIQSRRDHCKKGSNKWKHLHKTMNKKKRKCSNQIKDHQHKLSRKMVDNTRANTFIVGDLDVKEMPKSKKASSGLNRSTQNNGYLSQFVRFLTYKAALAGKKVIEIDERNTSKRCCVCEKKHDMPLWKRIMDCDCGNLIDRDRNSTISIMLRFLSQNAMWTGYQQFVGNLRNTGLLVPWSYSTGASGTLEVHSQEAPCESMG

SEQ ID NO: 39957 - protein, 287 aa, Escherichia sp.
VKRLQAFKFQLRPGGQQEREMRRFAGACRFVFNRALALQNENHEAGNKYIPYGKMASWLVEWKNATETQWLKDSPSQPLQQSLKDLERAYKNFFQKRAAFPRFKKRGQNDAFRYPQGVKLDQENSRIFLPKLGWMRYRNSRQVTGVVKNVTVSQSCGKWHISIQTESEVSTPVHPSASMIGLDAGVAKLATLSDGTVFDPVNSFQKNQKKLARLQRQFSRKVKFSNNWQKQKRKIQRLHSCIANIRRDYLHKVTTTVSKNHAMIVIEDLKVSNMSKSAAGTVSQPGR

SEQ ID NO: 39958 - protein, 459 aa, Anoxybacillus sp.
MKMVRVMKIVSNDESQLRLLDELMRVFCSAKRYAFNRLLEGRNTKEIIKHLPHQFPLNKRYAEDAVLLAQSLITSQRELLPMRLEDVQAKIEKTVKKIDEYQYGRKTPKNIDLQTCLDGLHRRLEKLKSKEDELQRHLDQGTVPSVIFGGKQHFYKRLKGNITNEEWKDLRTNQLYARGDKSKKGNLNIRLVYDDNTYECYVEIANPLGQPKGKHAPRLRLPVSVPEKYEDEIINLVMGEQVGVNAKGKPMIQYQPYTVEIKRKNGEYYVHLIYEEEVYGRELTYDEPIQGERIAGIDINIDRIAVSIISKQGNFLQSKVFYCHELEYVRANKRNNIVGETVRDVYNWLLQENVGAVVIENIQLRQQHDTDKKFNRFTHHFKKKKLTDTIIRRGLRLGFRIKKVNPAYTSVIGRFKYMKKYGLSVHESAAFVIGRRGLGYNERLPKELIDTIKKKVKHH

SEQ ID NO: 39959 - protein, 622 aa, Shigella sp.
  misc_feature (281)..(281): Xaa can be any naturally occurring amino acid
MRRFAGACRFVFNRALARQNENHEAGNKYIPYGKMASWLVEWKNATETQWLKDSPSQPLQQSLKDLERAYKNFFRKRAAFPRFKKRGQNDVFRYPQGVKLDQENSRIFLPKLGWMRYRNSRQVTGVVKNVTVSQSCGKWYISIQTESEVSTPVHPSASMVGLDAGVAKLATLSDGTVFEPVNSFQKNQKKLARLQRQLSRKVKFSNNWQKQKRKIQRLHSCIANIRRDYLHKVTTTVSKNHAMIVIEDLKVSNMSKSAAGTVSLPGRNVRAKSGLNRSILXWKNATETQWLKDSPSQPLQQSLKDLERAYKNFFRKRAAFPRFKKRGQNDVFRYPQGVKLDQENSRIFLPKLGWMRYRNSRQVTGVVKNVTVSQSCGTWYISIQTESEVSTPVHPSASMVGLDAGVAKLATLSDGTVFEPVNSFQKNQKTLARLQRQLSRKVKFSNNWQKQKRKIQRLHSCIANIRRDYLHKVTTAVSKNHAMIVIEDLKVSNMSKSAAGTVSQPGRNVRAKSGLNRSILDQGWYEMHRQLEYKQLWRGGQVLAVPPAYTSQRCAYCGHTAKENRLSQSKFRCQVCGYTANADVNGARNILAAGHAVLACGEMVQSGRPLKQEPTEMIQATA

SEQ ID NO: 39960 - protein, 436 aa, Clostridiaceae sp.
MLRGILKTKKERSKNALYLTKKIIYKPTEQELNILNAFAFSSAKLWNIANYEKKNYIELGFSSFPNWYDQKKRLKDEFWYKNLPSQTAQDVLDRLQKSWKSFFELQKSKGIKNPKPPRFKEKNSLFNFTFLSNGFNKISKDTINFSIPKQQKEYLEENFSFDSKYLSLKIKEFSAVTEKIKTIEFKPLKDKTYQINVVYEIEGAQLNKDNQHYLSIDIGIKNLFTCYDNEGKSFIVSGTKYLEISHYFNKKIAHFQSIASKQQIASGKKYASTTKRIKNLQNKKRLQLHHFFHCATKEIASYCEKNDISKVVIGDIKNIREDNNLGKVTNQKLHALPYEKLYSYLQYKLRTKGIELIKVKENYSSQVSPFAPKVSKTYATKAKRKHRGLFIDNHVKFNADSVGAYNILRLYEEKQNKGLLMPIKGLSSPIRIKVAV

SEQ ID NO: 39961 - protein, 569 aa, Oscillatoria sp.
MNKDVTPKKRQPITESKSALLENGTTRESLSGSEPQGINGAFASTTPDPKGSPLSLMLESLPIPKQMTSTEKLSLYAQNIPMLNSFQKLAADSILDGESPSKYWNEYVQTISQHLSPLKPALKCDRDSQLLNGSVSKMELNSWFSAKETALQKQNSLKIYCPSSTVLVRGFTDAKNTKKKSTKRFKTHPRNPTKKLTPNSVRKCRVFPSKELHRIWKRWIAAYRWIYNWTIAELRDGRKASAYELQKLARNPERPDWVKELPGHQLQEAVADAVDAHKRATANGGIAKFKSCRQPSQVVNFKAGDYKKSNWYPTLVKGLTYRSPEAFPTECIYGTKLVLQRGKWYGIFPEYVETNPTEQSKVIALDPGVRTFLTGFDGENIVEFGGGDIGKIQRLCKHLDRLRSRIDLSVNKRQRRAMRQAASRITEKIQNLIKDLHNKVARFLIDEYKIIFLPTFCTSKMVVKSGRKLNHKTARNLLTWSHYQFQKHLQQMAKKHQVLVILCNESYTSKTCPECGHIHDKLGGNKRFRCPNCGYNAHRDWNGARNIMVRALQATAITIIGDAIQIQGA

SEQ ID NO: 39962 - protein, 381 aa, unknown
  TnpB Polypeptide
MIKSYKVRLEPTKEQMELMFRTAGCTRFVYNWCLAFQKERREQGEKFVSAMGMSKHLTALKKQDEYSWLKEVDSIALVGAYTDACTSFKNFFRGCKKGQKIGYPKFKSKKHSTPSFMPNYQAIRFNENQVKLPKIGIVKLSRKNYVPIVKKYSNPRVTFDGLNWYISVGVDEEDYTSSELNGTIGIDLGLKDTAILSTGKKYKNINKTAHVKRIEKRLKKLQRQVSRKYEQNRQGKIYNKTNNIVKLEKEINKLHKRLANIRNNYNHNITADIVNMNPAKIVIEDLNIKGMMKNKHLSQAVAEQCLYNFKVIIKYKCELYGIEFVEADRYYPSSKTCSSCGSIKKDLKLKDRIFNCDCGYVEDRDYNASLNLRDAKIYKTA

SEQ ID NO: 39963 - protein, 369 aa, Erysipelotrichaceae sp.
MQKTRQYQYLLKPDLKQKEEIVQLFGATRFVYNRFLDDRNSGKLKSALAKEVVADYLRRYPFLNHVNSSALIHTIFQAQDQIRSLKRYRRRSDSCCSFTVGNLIRKPIRILDDHRILIPDLGPVEMIYHRPIPTDGEIKKATVIRRADGKYYVSVTVTTKTVSRRRDLDPAKSIGIDYSSTYFYVDDKGDRIRMPHFYKEKESAIAALDQMMSQCIKGSNNYYKLKTKRAEIFAGIKNRRKDFLHKLSTQLAEAYDVVCIEDIDMKEISQNPHLGKRTYDNAFGEFTEMLKYKLEERGKILLKAERSFPSSKICSKCGSINRKMTIEDRVWKCPDCGTVHDRDVNAAINIKNRCLMIYFGRRAFGSGLS

SEQ ID NO: 39964 - protein, 289 aa, unknown
  TnpB Polypeptide
LGRIKLHERADLGDAQVLSASVRFERGRWFVAFAVEQDVTRPAPSRPDVAVGVDLGIKTLAVVATDTGETSEVPNPRHLTRALRKVRRLSRAVSRRRGPDRRTRQEPSNRWRRASAALAKAQGRVADQRKDGLHKLTTTLASTYGTVVVEDLHVAGMVRNRCLARHVADASFAEIRRQLTYKTAWHGGTLIVADRWFASSKTCSECGAVKAELALSERTWTCTTCGTVLDRDVNAAVNLARLAASGPDSDGRGADRKTPPGVQVAVKRQPGTRQRGQTGALPPQGESAA

SEQ ID NO: 39965 - protein, 289 aa, unknown; identical to SEQ ID NO: 39964
  TnpB Polypeptide

SEQ ID NO: 39966 - protein, 272 aa, unknown
  TnpB Polypeptide
MLVREAKLLNGTAEQYQALDEAIRTAQFVQNKCLRYWMDNRGATKAVLYSLCKDLAKEFPFARQLNSAARQASAERAWSAISNFYRRCKEKAARKGYPQFKKNCRSVEYKLSGWKLSPDGMSITFTDGFNAGTFALYCNGEARRLILESKISRVRVIRRADGYYAQFCLDVERKEPGRYTGGVIGIDLGLASFYTDQHGNKLECPKFLRRSERRLKQHQRRLSRKFRKGAKSQSQNYHRQRKRLGKVHLKVQRQRRDRAIKQARCVVASHDG

SEQ ID NO: 39967 - protein, 380 aa, Streptomyces sp.
MLPKERRKPAAADSAIRQGRKDLPWLGILPAQAAQAVLKTYYRAWVNCWEGRTAAPDFKGRIRSRVAIDIPQGRDLQIVRLNRRWGRMWVPKIGHILFRWTRYLPVGKHADRENRVTGARLVKEADGWHVVFRVQSQASEPAPHAGPAVGIDRGIARPLALSDGTFRDHGPWLSHGEAERLRRLVKTQERRRRARKPGEKNSRRLTRTYNQIAQLRATAKRRAVDWQHKTTTEIAETFSRIGMEDLAITNMVRSARGTKETPGRNVRQKAGLNRAIAAEAWGRTVKMLECKSADRGGGVVKVPAPNTSRRSSACGLTAPGNRETQVRFVCKNPGCGFEGNADTNAGRNIDHAAGQAVSGRGDFGATRSAKRQPPTRPHAA

SEQ ID NO: 39968 - protein, 367 aa, unknown
  TnpB Polypeptide
LYNAALEEWKYAYRHKGHSLSVALSKFEQIKEFTGVRNDDPEFWGGISVQIGRGVLTRLDRARQSFYRRVKNGEIPGFPRFKSASRWNTIEIPEQCKTMIKKRGRGHVLQIKGLPTLRLKKGLNLPPAQDMKSLTITKRGRRLWVNLIYAVEQEPMPLSNKVVGLDMGVSDRVTLSTGESIRRRAKPNAKLRRAQQRMARCRKGSRRWKQRRAILSNLQDRERIKNRNECHRITTDIVRRFGLIVIEDLKIDNMTASAKGTTEVPGKNVKWKSGLNRSINEQTWGIIKQQLTYKAEWAGRRLVDVDPKHTSQTCSGCGVVDAGNRNGKRYECAFCGLLMDADVNAAINILHRGLAGGTVPAAALDAA

SEQ ID NO: 39969 - protein, 420 aa, Clostridia sp.
MLLAQKSEIRGLPKKQYSMLLEMCRYANSLANVAEYHIRHYRSRTGAYLSYEKNCRISKYNLNYKMLQAQVAQQTLKRQDKKHQAYFGLLKAKKNGSFSGPVRPPHFRKKGGYDNLYISGKYVIMRGEHIALPMSRAFREKYGGEEILIRIPPVVHGKKIHEVQIIPERDGSFIDAVFVYEEPENAKLKLHKNNILSLDPGLDNFVTGVCTDGTTFIVDGRRIKSINQWYNKLRAEKQSKLPKGVSWSRFLTRITRRREHRIRDFIHKAANEVIRQAREHNCGTIIIGANRGLKQNICLGAVTNQNFVQIPHARFRAVLEEKCTRAGIRFVCQEESYTSKASALDRDPIPTFDPLQQQICTFSGRRISRGLYRSKDGTLLNADVNGALNIARKSKQDGSIPKCARLCRGVLDTPARIRIV

SEQ ID NO: 39970 - protein, 466 aa, Bacillus sp.
MYLFSFSFFGKIGRWSRWKGVNDVKAQLETPHRKGTKKTLPEGWVTFGYQYAISPTDEQKERLNRAFGCERKVYNEYVAHLYTELEASGFAGGFIRHKVPNYTEFTRRFAFLDRSNDSFVYNDAKRRFQAAVQKYNETFARKPIQYKKKARNRMNTEGYIPSIRDIKGLPQFHQKKNAKHSYTTNQTNQNIRVIHENGAVFLRVPKFPEGISLQLHRPLPAEGLLKKATIRREGERYLVSLSIDFPSEKVEKKHNVSANKVIGLDYSQADLYVDSEGRKANYGRYYRLIEKRQRRMNKSLARKKNAAPLDENGTIQYSRTYQKQMNAYRALLAKSKNQRKDFLHKRSYQITNEYDAIVVEDLDLTNLAQMRKLGKNVHDNGFGMFRTMLQYKAERNGKHYIVADRYFPSSKQCSQCGHLHDNLSLSDRVYVCQNDTCCTKIDRDYNAGLNLKHYGIRVLKEQGMTL

SEQ ID NO: 39971 - protein, 263 aa, unknown
  TnpB Polypeptide
MKGWSKHFEYLKSGKIGDPILTYDKSSKTFFLLVPVTLEVQEHQPKEILGVDVGERHIAAATSTKGTRYLIDLPEEFKQRKQHYQRLRSELMSKGTRSAKRKLARISRREKRFTENVLHIIAKKLITSHPGARFVLEDLTQIRANRITYRGKDKEARRQSEQWPFASLQQKIEYKAKLYYGVQSEKVDPSYTSQTCPRCGHVSKENRPDHGERFVCQNCGYEEHADIVGAINIALRVLVKDQQGNLEKLLGADVSRPDAPRLG

SEQ ID NO: 39972 - protein, 517 aa, Methanosarcinales sp.
MSKKLFLTLNTRIITNAPLDNLVPLAIGIPNGLINQYWKEETLNSIFEYNYAYKFFSESDFNINGLYLPSRFKRALFEKVGRTLKSQYQNMIIFNKIISKCPDLDWDLKEYSDISWYSVSMLLTRLSKYKELPNNFFEFQKVPQFNNFSLDYSVTDIQLIKIDYTTGNLKIKAPIPEIPEKATHWIWADGKIVKHNKLREYLNSYKVHIPELQLKYTKSGIPYYVLSIPFEPKTKKFSKKIKRVLGVDLGLKKIATLCILDKYLGQISTPFFIKSKYIQKLFKLKQESKALNNKLQKLRGKKQFKECHAYYKRVNRKFRDLLKQIAHLMSKIIVDYAIANKCDTIALEQIINKKKGDLIWQISNWLHSRIMDYVRYKAKLHGIRVKIINPNNTSRTCPRCGFKGFTCKSSESEEEIKDGSWFKCKNCNFNGDRDYIGALNIARVCLYKKLNKAKAVSYKESATLANPSVRAISQVDKNNLISAWSLLFKFSSLRCVIKCLKGNFGKNEGLKSYNFIY

SEQ ID NO: 39973 - protein, 352 aa, unknown
  TnpB Polypeptide
MLLSKKTSIKVSQEYANVIGHMCYAASKLWNVCNYERQHYKEMGMEKYPDWYYQKKSHREDLWYKQLPSQTAQEVCKLLDKAWKSFYALKRSGGIENPRPPRFKQESIPITYMQMGIVHEWDTEKVRLSLPKALKRYMEETYQIHENFLYLENKIFRGMDQIKQLRIYPPEKGECKVIVVYEISEREELSQNGHYLSVDLGLHNLMTCYDSGNGNTFILGRRYLALERYFHKEIARVQAQWYGQQSVKEIKHPVTSKHIRRLYQKKQNSVTDYLHKITRYFAKYCREQGITCVVAGDIRNIRKGKDLGHRTNQKFHNLPYNRLYSMTRGGKKICTAMQPKTKGTVQGQKPEV

SEQ ID NO: 39974 - protein, 468 aa, Streptomyces sp.
VVESAGEDGRLSVTGAEARRVKREALGVPDRAKHQQRVAVPVQRRRPEADTRRRAYRYRCYPSPTQAEQLVKTFGACRWTYNEGLALRVKAWHEHHVALGFAESCRALTGWRNAQGTRWLQEVSSTVLQQALRHLDAAFGRFFTGSGKPPKAKKKGRSRDSATYVRTGFRWVEDPDRPGTGLITLAKQTGPLRVRWSRPLPAGVRPVKLTVSRDRAGRYFVSVLVEERIEPLPPLFLRHGGAPKAVGLDLGLAALVTLDDGEKVDHPRLLKRYGAKLADRQRSLHRKERGSRNREKARLEIARLYARVADVRRDALDRLTTRLVRENQVLVVEDLAVASLVRSPRGRGRRRKAGLNRAIMDASWGELLRQLRYKCAWYGRTLVVVDRFFPSTRRCSACGLTGPKLDLAVRGWSCDGCGAVHERDVNAARNLRAEGLRLYGLVASALPPGRPMPSLIRASEVPDVVPAG

SEQ ID NO: 39975 - protein, 393 aa, Paenibacillus sp.
MWGGYSRLKHPIKKRTFVPVSVVFYIQEVNVLLRTYKFRLYPTSEQQEKIRCTLERCRLLYNRLLAERIHAYKTEGKALTYSQQANTFRERKQYIPALKEVHSQVLQDVARRLDKAYQAFYRRVKNGEKAGFPRFKPQSRYDSFTYPQSGFALEGTRLELSKIGLVRIQLHRQLRGTIKTCTITEKNGRYYACLSCEFEAEPLPLTNRQVGVDLGVRQLAATSDGSIFEAPKPLRKSEAKLKRQQKAVSRKQRGSNRRRKAVLTLARQHERVANQRKDYAHQVSRTLVNRYDLIAFEELNVRGMVKNHHLAKTIADAGWSGLVQFVTYKAESAGRQVVRVDPRYTSQCCSTCHHIVKKTLAERIHRCKQCGTTLDRDVNAAINILARAKRQVS

SEQ ID NO: 39976 - protein, 381 aa, unknown
  TnpB Polypeptide
MKLVRTAKLVLEASPEVFLPTIAAYTKAFNFVCLTGWEGKDSNGVSLHHKTYKAVREYLPSQLAISARMKATEAIKSAKARLSKNLKTSCPKSKSCPVRYDANSYSLWLDRGEVSIKTVEGRIKVKVGMPEYFKRYADWKWTTADLFVKDGKVFLHVVFTKEIADIPFSGEFVGIDRGINNIAVTSANKFYGGKRIKHISGRYERLRSELQSKQHSGKRHLRKIKAKERRFRRDVNHCVSKALVDSVGVGGTIVFEKLTGIRQNVRMRKTQRRQVHKWNFFQLEQFTSYKADAKGIRIEHVPARYTSQKCSKCGYISRSNRKCQSVFKCTQCGFSLHADLNASRNIVQNYLDAIGHPSRADVNQPSRCSRPERAGRASPSL

SEQ ID NO: 39977 - protein, 420 aa, Tolypothrix sp.
MFNLSYEFKLKPTKNQIAMFEEWLETHRRVYNYALAERKDWYKSRSCQVNACNLHSCYIIPASTPRPTFASQCKSLTAARKDNAYLKSVNAQSLQQTLRRLEKAFVSMWEQNHGFPRFKKLGKMRSFSFPQLGVNPVAKGFVKLPVIGAVKMRQSREIPDGGVVKQARVVKRVSGWYVMLTVQWDVSTPQPTPRGEVVGIDVGLTNFIATSNGLLIKRPKFFVDAERKLKLLQQRVSRKKLGSNNWKKAQKKVALLHEYVANCRKDWQRKLSHQICNDVGMVFVEDLNLIGLSRGMLGKHCLDAGFGQFFNILEQTCFKRDVYFQKVDPRKTSQICPSCGVETGKKELSERIHACSNCGYTTDRDVAAAQVVAIRGLAAVGHTVKMLAEGKFIGIPLKQESPRLKAVGNVNSTLAIGYES

SEQ ID NO: 39978 - protein, 402 aa, Escherichia sp.
MKRLQAFKFQLRPGGQQERQMRLFAGACRFVFNRALALQNENYEAGNKYIPYTKMASWLVEWKKDTETEWLKDSPSQPLQQSLKDLERAYKNFFQKRAAFPRFKKRGQNDAFRYPQGVKLDQENSRIFLPKLGWMRYRNSRQVTGIVKNVTVSQSCGKWYISIQTESEVSTPVHPSASMVGLDAGVARLATLSDGTVFEPVNSFQKNQKKLARLQRQLSRKVRFSNNWQKQKRKIQQLHSRIANIRRDYLHKVTTIISKNHAMIVIEDLKVKHMSKSAAGTISQPGRNVRAKSGLNRSILDQGWYEMRRQLEYKQLWHGGQVLAVPPAYTSQRCACCGHTAKENRLSQSKFRCQVCGYTANADVNGARNILAAGHAVLACGGMVQSGRPLKQEPTEMIQATA

SEQ ID NO: 39979 - protein, 274 aa, unknown
  TnpB Polypeptide
VKRNRRYALCFAFEETVAYDTKPLTDQTILAVDLGINTDAVCSVMRPDGTVLARKFIDFPSEKDRLNTQLGRARRGQRENGHRGGNRHMKKAVRINEDLSKKIAPAIVRYAVSVGADIIVMEHLDFTGQKPKHKKQRLHMWRNRDIQKIVMHQAHRNGIRVRFVNARNTSRLAFDGSGEVARNSTNMALCRFRNGKQYNCDLNASYNIGARYFIREYLKPIPETEWSLIVAKVPELERRTNCTLSTLFSLYAVLNCQSVSVSESWPHGGNESGA

SEQ ID NO: 39980 - protein, 395 aa, Oscillatoriales sp.
MLRIHANRKVYNNAIAYLNQNQGKFTYYTVDKKTNQPVLKTSGQQAFRSFCKTLGCEIIPEWCKELGIAHGLDNALFEAYKAWKKTDKHPAQLGKGKNAKPNPLVELKLARFRSIRAQKQTIQFDPGDYKSGHLMANASKNLEKPLWTGQDYCLINYDKAVEVTYNKGRWFVNMPVEMDIPEPKNGGKIIALDPGLRCFLTGFDGNSFAEFGKYDFGKIARLCQYLDKMQSKLGRSKGGNFSRLRYRLRQAIEKARTRIKNLRSEIHKQVASYLARNYDIIYLPTFETSQMVARGSRKLNSKSARAMMTWAFYQFSQTLEHLCNRYGSRLVRVTEEYTSKTCTKCGHIQRKLGGSKTFRCPNCGYEIPRDFNGALGIFLKALWDTTILSDVRPGV

SEQ ID NO: 39981 - protein, 364 aa, Oscillatoriales sp.
MFAVKRALKLNNREATLMAKHAGFRRVVFNMGLSLRTQMYSEGKLTDSKVINEIKKVFTNYVKKHPEFAWMNQLSSRVYQNALIDLKDAFSRYRSGSSGHPKFASRGDGQSFTVDSSNGKVLLNAGNTIKIPTLGTFRLYEALDCSFISQTFTISKEGNRWFVSICVDAERIPVQQSESSVGIDVGIKSFATLSKGQFFDAPKPLIARAKTKLATLQRQASKQVKGSRNQRKTYNKISQIHAKIARIRLDFLHKLTTYLAKTFKLIKIENLNVKGMMANHKLAGAISDLGFYEFKRQLDYKCQMYGANLVLVDQWFPSTKTCSNCGTKKDMPLSIRTFDCPVCGRYLDRDWNASINILNWEPSA

SEQ ID NO: 39982 - protein, 247 aa, Richelia sp.
VRASYQYRLKPNKEQRQIIDNTLDMLRYQYNYQLAQRFDWYERNRCSIDRCPLVCHLPELKDKPNRFSQQASLKHLKKERPWYKEIHSQVLQEVPKRVEISFDKWLAGDSNGKKSGRPRFKGVGQYKTFTYPQFKQHHFVNNKITLSKIGDVKVIVHRPIPNGFVIKTVSVTKKANGYYVTLSLDNKEVPTIKPDFNIDNIVGIDVGLIDFYVTSDNTRIAAPKYLRKAERKLKSVQRKVSRRKKRF

SEQ ID NO: 39983 - protein, 366 aa, Gloeocapsopsis sp.
MHSQASQQSLMSVAESFVSYKGLLAAYNAGKLADRPKLPNYRTKRGLAVVSYPKQALKLKDGLIRIPLGKKVKACFGIDSFSLKMPSNLAFSDIKELRILPRNQCFYAEFVYELETQATKLDVSRVLGIDPGLNNWLTCISNIGTSFIVDGLHIKSLNRWYNKQISTLNLGKPQGFWSKRLASITEKCNRQVRDAINKAARLVINYCIENKIGQVVFGWNKRQKQEIRLGAKTNQKFVQIPTARLKERIAQLCEQYGIRFVETEESYTSQASFLDDDFLPTYGERPDSWKSSGKRVKRGLFRTAHNCYINADCNGAANILKKVATKLGFDLSRVGRASLTAPQRVFLWSAKQKRSNVVLTRCGVSV

SEQ ID NO: 39984 - protein, 368 aa, unknown
  TnpB Polypeptide
MVSRAHKIKLKPNKAQAVLLSKTAGTTRYAYNWGLAKWEELYKAGEKCDAYKLGKLWTQERPEWSREVFSGSPRKALLNLGGAYKAFFQGLRKHPTFHKKGRRDSFYVDNQHARLYGLKIRLPMIGRVRMTECLRYEDAEVVSYNVKREADGWYVTISVEIDDERRTESDTFVGVDVGCHALAVASDGTRCEKPGRLKDLERQLKRRRRILARKAKGSKNRQKARHKLSRTYQRIQNIKQDTVHKFTAAVAKNHGTVCLETLDVKGMKEGDNKYVRKGVQNSCMSEIQRQLKYKCNNFIEVDKYFPSSKTCSNCHSPKADLALSDRVYTCQSCGLKIDRDLNAALNLRQEGFRIYTLGHRGSACGENR

SEQ ID NO: 39985 - protein, 406 aa, Microbispora sp.
VRTAYKVRVYPTTAQAAVLNRTFGCARLVWNTVLAWRKARYAEGVKTSYAQTDRYLTELKRDGVHDFLYEVSSVPLQQVLRHQYTAFVNYFAGHAKHPRFKSRHGRQSATYTRSAFRWRDGRLYLAKMDGPLEFLWSWPGIDPATIDPATVIVSRDPDGRWYASLTVESTAETGAGPLPATGGHAGIDLGVTDFAVLSTGEKIPNPRHLERKVENLARYQRRMARKQRGSANRAKARAKVARAHAKVRDARTDFLHKTSTRLVREHELIVIEDLNVRGMVRNRSLARAISDAGWGEFRRQLEYKSVRYGRQLIVIDRWYPSSKTCSVCGHLLTALSLSTRHWTCPGCGTRHDRDVNAAKNILAAGRAVSACGADVSHSGSSRMRSAVKQEARPVRVGVPSPVLRRG

SEQ ID NO: 39986 - protein, 424 aa, Lachnospiraceae sp.
LKGEWLMLLSHRTKISLNNDYSNIIGHMCYAAYKLWNVGNYERLNYKELGLSEYPDWYYQKKYHKDDMWYKQLPSQTAQEVLKLLDKSWKSFYVLQKTHGIENPRPPRFKQAPIVITYMQNAIVHEKGSDVVRLSLPKQLKIFMSETYGISDNYIYLKNKVFKDTDTIKQIKIYPPEGDKCDIIVVYEVEDIMPLPDNGRYLSIDLGLHNLMTCYDSTNGDTFIVGRKYLSICNYFNKEIARVQSQWSSLQSGKGIKYPKSSKHIQRIHKKKNNSINDYLHKVTRYIVSYCVENHINTVVIGDITNIRKDNDLGNVTNQKLHSLPFAKIYMMLQYKLKMKGIILIKQNEAYTSQTSPLSREVSKESAQKSNRIKRGLYKDGDKSWNADCVGAYNILKLHLSAKKINVELNPNEVKNPIVAKVAV

SEQ ID NO: 39987 - protein, 365 aa, unknown
  TnpB Polypeptide
MNRAVKIRIYPNKEQRVQIEQTIGCSRFIYNQMLADKISYYQKEKKMLRNTPAGYKKEYPWLKEVDSLALANAQLHLESAFRKFFREPACGFPRYKSKKHARNSYTTNALNGNILLQDTHLKLPKMSVIKIKLHRQIPSDWKLKSVTVSREPSGKYFASLLFCCENQTVEKRPAERFLGIDFAMQGMCVFSTGERAGYPMFYRKAEKKLAREQRKLSHCEKGSRNYQKQKKRVALCHEKIKNQRKDFQHKLSRELAERYDAVCVEDLNLKGMSGGLHLGKGVQDNGYGQFLFMLGYKLEECGKHLIKVDRYFASSKICSVCGHKKKELALSDRMYVCECGNRMDRDVNAAVNIREEGKRIYKECA

SEQ ID NO: 39988 - protein, 395 aa, unknown
  TnpB Polypeptide
MLRAYKYQLFPNKSQSEMIEKTLGVCRLLYNLGLETKIRAWQSAQKRLSAIDLCYQLPELKEAYPWMNDVDSQAVQASVKKLDNAFEGFFKGKGFPKFKNKRGRQSFQCPNNTRRVDFEKGTVTVPKIQNIKAAISRTFEGQIKTITISRTPTGKYFASVLVDNKSQLPPKPIVKPQTAIGIDIGIKSFAVTSNGKFFEPNRFLKNSLRRLQCLQRRASRKKKGSNNRKKANLCVAILHEKIANQRADYINKITIALCRDSQADTLVIEDLNVSGMLKNHKLAQAISDVSFGELVRQMRYKCEWYGKNLIQIGRFEPSSKTCSACGHIKQDLTLADREWTCEACGSTHDRDLNAAKNIKQMGLEKYTRRGTPEGPAESRRLRRTKKQELSGLITI

SEQ ID NO: 39989 - protein, 486 aa, Catenuloplanes sp.
VRPAVRPSRCREPCPPRCRGRYRKPAGMKTMQAYRFALDLTPGQEREVLAHAGAARVAHNWALARVKAVMDQRSAERSYGVPQERLTPPLSWSLAALRKAWNQAKCDVAPWWGEVSKEAFNTGLDALARGLKNWADSRKGLRAGRPVGFPRFKSRRRTTPSVRFTTGAIRVEPDRTHVVLPRIGRLKLHESARKLARRLEAGTARIMSATVRRDGGRWHVSFTVEVERAARSPARPQSVVGVDVGITHLAVLSTGELVGNPRHLAAAQQRMRTLGRALSRKTGPDRRTGRRPSKRWEQAAARLGRAHARVANLRRDGLHKITTRLTRAHGTIVVEDLNVAGMLANRRLARHVADAGFAEIRRQLTYKTSWSNGRLLVADRWYPSSKTCSACGTVKTKLALHERQYRCEVCGLVIDRDLNASHNLAALAAEYDTAGSGPVAARGADQKTRVRGQVAMKREPGTTSVGQTGTVLPQGRTTNRALVKAY

SEQ ID NO: 39990 - protein, 278 aa, unknown
  TnpB Polypeptide
VDEDNGRIFLPKIGYVRYRNSRKIEGIPKNVTVREEADGWYVSIQCEFELKPEISIPDIDAAVGIDMGVKRFLTLSDGNFINNLEEKLKPLENKIALLQKRIKHKVKGSNNIKKAYLKLTLLHKRKADIRNDFLHQVSTLLVKNHDVIVIEDLKVSNMSKSAQGSIANPGTKVKAKSGLNRSILNEAWHKFFTYLEYKLKLKGGILIKVNPKHTSQTCIKCGHISKDNRKEQEIFKCVKCRYEANADYNAAQNILRRAGLARMACQANLNRGRQQEPA

SEQ ID NO: 39991 - protein, 458 aa, unknown
  TnpB Polypeptide
MTEQNLALVTYFDRFKPAEAGRRMGLFLPSEVKRQFKSGASRLEKMFQEQAVTALRSWAARTGVVNRAYSGYVSTGWRRTVSDSKPSSMKPRLALSATDKGYHKNFRVTPERISLEMVVQGQWVTLHFPTPPQLLNPGCEPGVPDIWIDDQNRVMFGFHGKTNPGRPEFSNRYVVGVDVGVTNPTAYVVWDVEKRKIVEQSLLGQRARSLSNKIKRGSRQVAALRRKGRDEEAALHRERLSNRRKELSILIAQEITDAAWKYDNALVVFENLSHIKNTMRFGRWFRGEVYRRTHDMVEADGGRVLKVNAAHTSRKCHICQSDLDMQDYSNPMCHSCDITHHRDLNAAANIAQRANHAKACQTRKRHATKTKRIRRSKCRVKPLRHPGTKNRPTPKAPQNQKETRTPATPSREVSKRMCPAESRVSAVDHMEWFQTTSGTTNPKENQFTNTVNVAYLKE

SEQ ID NO: 39992 - protein, 366 aa, Methanosarcina sp.
MNVDRTIKLKLGVSEEDKPTLKKTIILFNTVFNEVAVYGFEHKTNSKVSIHHATYNDIRERHPELPSSLVQGARDVACEALKGVKLKNLPTAKPFAAIRYNQRVITYHLKHGRVSIATINGRIKATFNIPKYYQEYVNWEVRSSTLKYDNRKDAFFLHIIFRKESPERSGNKVLGIDRGIVNIAVCSNNVFFNGKQIKNVRAKYAFLRHKLQSKGTKSAKRLLRKISRKERRFVTDVNHCISKTIVNMSHDVFALEDLTSIRVQSRKGKEFTRKLNNWSFYQLAQFLEYKAEALGKAVIYIDPRYSSQKCSKCGDLRKSNRKGSSYHCKACGFDMHSDLNASRNIAQAGISCLSRLHVNQPNVETV

SEQ ID NO: 39993 - protein, 441 aa, Lactobacillus sp.
MATKRTHVYRLYPDATMAHVLDQWCDYRRYCYNKALELWNATYSEYRMLVSPEILTEFKKPKEERQFTEEQELFISNHYPTAALIQKKLTASKQSWEKQISSRILQQACADLGKSFKKFAKDKALKVKRGAGRPDFQSKKAKRQGFKLNQGVVLAREGNHGKLTLPVPAPYKGEWHSIRFSEIPKNAEFGTISFYREHGHYYMAVPYKYETPPYIHKHTGKKTGIDVNVSHFNDAEGEHYFLHKGNNGAVNLGRVYENIKHQQQILARKLEENGQIAGKRSKSYQKARIKLQKLYERAHRMQDDAMHRYTTHLVREYDAICIEDLDVKGMLMSHVASKGVHRALFGRFRSYLEYKCKSAGVKLVIANRFYPSTQRCAACGNVKKDDEKITLSGNKKHGTKHNEYVCYNKKCPNYNKVVDRDMNAMMNLTFLIDHPRYNKAL

SEQ ID NO: 39994 - protein, 406 aa, Moorea sp.
MNGKWWKIFSPLFMSSVGESTANESTFLLSKKIRVYPETQLKLKWRTWVNAARWCYNKTIAILKTTKIGKYDLRKKVMSDVPEWVSNTPYNPRQLAVFQAFEAHKAAKKSGGLPKFRKYSDPVQSIRFQKDNFKKGTFYPRETKGLSFKSSEPLPDKMTHEPILSIDRGRWFISFAVEASVDKPAVSHKAIALDPGVRTFLTGFDGQRFIDIGMGDIGRIYRLCSHLDRLISRAALAKGAANKRERFKLRKAAQRIRVKIRNLIDEAHKKIAAFLTCEYQIIYLPTFETSQMVDKAKRKIRSKTARAMMNWAHYRFKMTLKHQATKRGCFVVDVTEEYTSKTCTKCGQIHRKLGGSKKFVCPECGHRIGRDHNGAFGIFLKALRDTSASITDVLYTDSGECRELPG

SEQ ID NO: 39995 - protein, 421 aa, unknown
  TnpB Polypeptide
VKNECILGVEVAEANWLSCLGDPSKDTSLEKEDVQDFKSRGRGLHSLENKSNHANIIWHPKEKAFAWNRRRIPVEISSSEYLREALSDPADPSKPRKFKYCRVCRRRIRGRRRYFLQLILEGHPPVRYIPGPKEKWVGIDPGPAKIACVSEDGVFLIPSSPASLNDHSIEKRRLAQLMHRSLKATNPDNFEASGAIKKGAVWNCSNRFKKLVNQRNEIFRIETAARKTDHRRIANIIIQMGGTIKCEKNSYQSFQENFGKSVRKHGTGDLIQCLRRKAESADNADFIELNAYRCRLSQFNHVDGSYIKKTLKQRWTRISNTVVQRDAYSAFLAMCVIENRHDPRLLREKWPSVETLLRRAGLARDYNPAKDFDLSRSAIEPVFAAAFRQSGMHARIICAFGDSRSENVLGHPRRTNRKQIK

SEQ ID NO: 39996 - protein, 426 aa, Okeania sp.
MVEKAYKFRFYPTPEQENLLRRTLGCVRLIYNKALAARTQAWYERKERVGYKQTSAMLTNWKKQEDLDFLAQVSSVPLQQSLRHLQTAFTNFFSGRSNYPNFKKKRNGGSAEFTKSAFKWRNGQVYLAKCAEPLPIRWSRQLPQNCLLTSITIKLDPSGRWSVSLRFNDTRDLKLKPTQKQVGIDLGIASLLTTSDGEKVANPKNLQKLHKKLRLAQKSLSRKTKGSNNYQKARLKVARIHAKIKDSRVDYTHKLTTQLIRENQTIVVEDLAVKNMVKNHKLARAISDANWGELVRQLEYKAQWYGRELIKIDRYFPSSKRCSNCGHIVEKLPLNIREWDCPECATHHDRDVNASINILRMGTRVGVSEAPLEEVRRKGTPTKKAAGLAVSVCGVTVRPEESKSRKAGAMKQKAPNSDVRESRAVS

SEQ ID NO: 39997 - protein, 321 aa, unknown
  TnpB Polypeptide
VTQAAITEKEEPDELVTLVEQHVIKASDPRFAQIDAAAFAAKNLYNLGNYTIRQSWLAGDGYIPYTRLDRLLQAHEAYRALPSKVSQLVLKQLDHNWQSFFAALRAWREHPDRFLGQPRPPGYKPKQTGRFLLTYNNQAFSKRWLRKGFVKPSQLDVFIRTQQTDVKQVRIVPRRDHYVVEIVYQQAPEQHNLDRHLIAGIDLGTDNLITLTSNQPGFTPVVVNGRGLKSNNQYYNKERAAGQAEVGTQSTRRQRRLTEKRNRRIKHLMHIASRMVIDHLVMRGIGTLVIGYNPNWKQRVRLGRVTRRSSSRSRMPCWWRC

SEQ ID NO: 39998 - protein, 391 aa, unknown
  TnpB Polypeptide
MLLCKKIKIEVSERDVQTLEFMQDKCRGLYNWWVGKLRRGERWNLEQAKKSLKESKAYDPELRFVYGKLLAEVYFHLDKAMHAFFKRVAEGTKKAGFPRFKPRHQFFTLCYPAMYLEVQGNTLILPTGGGGSWGPKRYSNIVAHLTEEPPEQFREVAVSRDARGNYFCSFVYEQQEQQVAHDGIVTFDLGIKTLATGYTDQGRFYHIGGFKGYRWYNKQLDKIRSKRDRCKKKSRRYIHLSRVYKRVSEQKRNKQHDCLHKASHLIAGTLAERAVVIGDLSQQQMVMHKHENETPKERRKRHIRNRMVYNDWGLYSFVQMLTYKCLLYGKELYLISERDTSKTCHVCKQKQAMPLWKRTYRCENCGLVMDRDDNSAVNIYQRFVAGLPPHA

SEQ ID NO: 39999 - protein, 402 aa, unknown
  TnpB Polypeptide
MNITRGYKTELDLNNAQLTACKKHAGCARFAYNWGLKRKQEVYKATGRTITAIDLHREINALKQTEFPWLYEVSKCVPQEAFRDLDNAFKHFFRRWRLKKEGKYKGKLGYPKLKSKKKGLGSFRLTGQIHIFEKGIQLPRLGRLRLKEHGYLPTDGVRILSATVSEHAGHWFVSVQVEESVPDLTPATGVPIGVDLGIKTLAMCSDGTAIANPKALRKNIKKLIRAHRRLSRRKKGGKNRAKARKQLARMYYHVGNIRRDALHKATTLITVKPKREKKQRKPKQRVNEQSKQQATRRERPHTIVLEDLNVAGMKKNRKLAQAISDVGMGEFKRQMKYKTAWTNETLLLADRFYPSTKRCSRCGQVKEKISLAERVYICENEACRLVLGRDLNAALNLAALAQ

SEQ ID NO: 40000 - protein, 544 aa, Planktothrix sp.
MNEPCVDGKKMARLKPSEPHQDKDATTSSLIPLKLATTITTELSSFTPELVVAPNKQTLTDKSQHSATSTRKRKSSRKSEGDLTSSEKNYFPYWNEFCREMSEWLSLPIKTDWQDLDLTCLDGCANKTGVNSWFSMKQVSVQNEKSLRTSSPSFTASVPASTDSENTKLRSKKIRIYPSPDLNKVWRKWLAACRYCYNQAIALQRSGKRLSKLKLRNEVMQSDLPQWVKETPCHIRQNAIFDAYLAFKASSDAKFRNCRDVCQAIKFNECNFSNGTWYSKLTKGLTFVAAEPIPQSCDQGTQLVFLKGKWFAIFPLAVQPKSIDSLGLIALDPGVRTFLTGFDGCKFVEFGSCDIGRITRLCQHLDDLMSRIAKEQSRNRRRRMKQAAHRMRTSIRNLIDEAHKQIAHFLTHHYRMIFLPTFETSDMVAKAKRKIRSKTARAMLTWAHYRFKLTLKHQAELTLSIVVDVTEEYTSKTCTRCGQVHPKLGGSQLFHCPECGLTLPRDWNGAFGILLKALRDTAAITFDRDSAIVALSGNARNDVA

SEQ ID NO: 40001 - protein, 510 aa, unknown
  TnpB Polypeptide
VKYYDTVTRHRFAPEDGVDAEQVERDLAQMVTWMAQAEREVLASQEFYNLALKALKGDRPYGALTSWGRKKLSRYPFSFQKHNMNEMLVNNVVSVLEAYAVSVGLFQVTNTHTRETKPERILSYYRNTYPDAPQPTSGMVRAHLIRYHKKGERKASLPGVSAKLNLAVCDIYFAPKTSRDDSDPLNVVVQVKIPSYGLTKIYLALPNNAERFGTGKVCRPTIRLNNKGQVVFDIAIEHETNQRDTSNVIGVDLGKIEPFVATVIDPEGKHRSAPYHTNYKRRLGSLVNKEQKRRELASHLYEKADLCERYNRSDHADVLRTEAKRVSVKATRIKHEISQCIASQIVSVAEKNDAHIAVEDLSWLDAQGCRWPHAEIQQRIENTAKRYGLKIVKVSAKDTSRTCSRCGGKVSNNTRTRVGSCTSCGFELNRDVSASREIGLRATSPSSRSREKMRCLLRQRQEKQSSAATRQSKPVTALSGNQGHTGTSSTSLEATLMMVRENLDSRESPT

SEQ ID NO: 40002 - protein, 408 aa, unknown
  TnpB Polypeptide
VVDTRRRAIKVRLYPSLEQESLLARTAAAARRVYNLGLGVRKDYWQEDQISVTTYDLMRMLPLWKEEFPWLGEVSSVALQQSLRNLDQAYANFFRACKGEGKSRFPRFKTRNSRRSFRLTKNGFRVKDGQLFIAKSKEPVEFRDKNYTLPANASSVTISRDAAGRWHASFLVEDVIEWPATTGGKAVGVDLGVKTLAVTSDGVEYANEKRLNLHLSRLRRYQRMMARRRPKPGQEASKNYRKAQAKVARTHAKIADGRRDRIHKITTELARTYDVICIEDLAVSGMMKSKRMSRSIADASFGEFRRQLDYKAAWYGKRLRVVNRYTPTSKTCSECGEKNETLALSDREWVCTVCGTLHDRDLNAAKNILTAGLADSACGGNLRPASTDAGSPGETGKRSKQRAALSAA

SEQ ID NO: 40003 - protein, 417 aa, unknown
  TnpB Polypeptide
MEVRRTVPVALDVDSDDAALLEDTVDTFRWSAQYVTDHAFQGEYVTTSKTALDDETYNDVREATDGFNGGLVQAARNKAAEACKSVVVKWEQGKKASKPHFTSPHVVYDHRTATFHGEYVSLAAVDGRIEAEYVLPDEERDTPHAEYLFSDEYETTGAELHYTNGNWMLHIHCTRDVEPDTPDEATENGTVLGVDLGVNNLAVASTGTFWTGDEFDYWRREYEKRRGDLQQCGTRWAHENIQSVGHREDGRFKMTLHRTSNELIAEARDHGCSVIAFEDLTDIRERTGASWGHTWAFNRLYEYIEYKAAEHGIEVEQVDPENTSRRCSTCGFTHPDNRESESVTCQECGHENHAGYNAAKNIGLRYLRRNRTGGDEGAPLGVRLNSGTLNVNGAFEPPAEVSARTGVHAESHPFTSG

SEQ ID NO: 40004 - protein, 466 aa, Actinoplanes sp.
VKVTRVVFSHRLNPGKYARLEEQARRLGRVRTEVWQRYGSVTGAALSDRQVRDRWLADGTHHRFGVLANAWKETLRDAMADIAAHREAAKIPVKRAVHARATDPAERKRMFTALKAGTWPADPFLARQMRQHWQRGHNRTHNQIVVRADQHNTRADDRGRLWLAVPGLKRRQLVKIPLNTTVTPTGTLRLILRNNRVEVHYQIDAATMASSQRPCGTATVGVDKGYTEALTDSDGQHHGTGLGTLLTAESDRIKERNRRRAKLRSIANSTADKAKADRIRKNNLGTVKRDRQAAKHQARVRTEIFTAVHAAVDKAAVVVAEDLTKTFAGHKPLGRNMNRRLAGWTKGVTAEALKNVSERRGSALVHVNAAYTSQACHRCGTLGRRNGDRLHCTSCRVVWQADVNAAINVLQRHGDPDITLHTPHRVVKQIVQQRADRHRSRLPLPDSSPPCKRRAESEPSECLTLL

SEQ ID NO: 40005 - protein, 346 aa, Acinetobacter sp.
MKINKAYKFRLEPNVEQEVILNNLVGSARFVWNQILAISFEMFAQNKHINAVNLVKKITALKKNPQFSFLDGNSNAVSLQQKVRDLASAWGKFFNPKEHARLKEKKRKPKKPKFFKLADGTEVQLRPLMPRFKKKSDGYDSIRLVQFDKYCWVKGNKLKLPNGVGVIKFRKSQEILGTIKNVTISKVSGRWYVSFCTETELTEMPIHPSKSAIGVDLGVKKLITTSNGQVFDPINSFKTNQIKLARLQRKQRKKVKFSQNWKKLNFKINKLHHHIANIRHDYLQKITTTLSKNHAMIAVEDLKVANMSKSASGTIENQGKNVKAKSGLNKSILDQGWGMLVTQHQK

SEQ ID NO: 40006 - protein, 533 aa, unknown
  TnpB Polypeptide
LQTAYRFKLHPYKRQIEKLSDWQRKIGYIQNRSLGDRITTYNRISVMGDYCDLHTKREISADYLYCDLETKCIISPLHCSVNKSASLGNPWKENNPNLRRGNKEFNPRRSAYEMHSSWVTEFKKRNPDYSTVNADVIQQSLRHVDSAFAKFFTKNSGFPNFKRHKDVGIEFKPGTVRIDGNHITFPVLGTMRFFKSREIPQSWEVRTTTITHEVDGWYVSVLLRDQTVPDLVIKTPEQCQTIQGADVGIKKLVALSDGTMIKNPQFLKASERRLSIRQRRVSRKQKGSNNRAKAAKQLARVHQKIRRQREDYQWKCAKKIASNADITVFEDLNVTGMNSRCKPKLDPETGKYLNNGQKAKAGLNKAISDAAWYSLRKKTEYQAAKLGNLVIEVNPKYSSQECPECHHISKDNRDKEKFICTECGHSDDADTNGALNHAHRGIQNLGIDSLRVVSPKVTTKEAVATPRTSFVKDEPSNPAKSTVKRRQLLLLKVKSTPLAPKSRTRTKRRVPDVQYTQLTLFDGLDWDAQQSTS

SEQ ID NO: 40007 - protein, 489 aa, Actinocatenispora sp.
LTSRWTWLFSPLNSTSSASKSWQTSRMICSVRVRCRSVNTLCRNFVTKTKWTCMTKMQCLPVRMSSSSAINQYGRVSIVQLRYQFRVYPTPGQQIALARAFGCARVVYNDALRARQQAREAGLPYLSDAELSKRIITEAKATPERAWLGDVSAVVLQQALADLNAAFRNFFASVTGRRNGRKLAPPRFRSRKDHRQAIRFTKNSRFRLLDNGRLRLPKIGDLAVRWSRKLPSAPSSVAVIKDPAGRYFASLVVTTADDETLPPVESQVGIDLGLTHFAVLSDGRKIASPKFLRRAERKLRKVQRALSRKAKGSNNRKKAVVRVAKAHAKVADARRDHHHKLSTTIIGDNQAVYVEDLCVAGLSRTRLAKSVHDAGWAQFTAMLEYKAARYGRSFGRVGRWFPSTRMCSTCGVVSERKPLHMRSWTCLCGAVHDRDINAAINVLAAGQADNSNDRGAQVRPASVPAQRREAVTHPGAACSMRSVEGISAL

SEQ ID NO: 40008 - protein, 369 aa, unknown
  TnpB Polypeptide
MKTYKYKIGKQSNCVRLGNLLDDLWQVHKYFHEWQRQRYKDGLPYANHAAMCEHLTDLKRTTHPHWKALPSQAMQEELKRIHLAYERFFKKLGGRPKIKKRHKFKSLTLKQAGWVLKDNRLILNFRKWEKGKWRHDKVAYTFHKHRQWHGNISRITIKRGACGNYWLYILTDFVETKPLPTTGKSVGADFGMKDAYLTLSTGEKIQHRQPLKQSLKKLRSLNKALSRKVKGSNGWWRCVGQLARLYRKISNQRKDFQWQLASKLCKKFDTIVLETLNLDGMKRLWGRKVSDLAFYQFVEILRYKCEKHKRQFLQIGQWTATTKPCSDCGFHNENITLKDRQWICPECGSHHDRDINAAINILRAGIAVT

SEQ ID NO: 40009 - protein, 369 aa, Ruminococcaceae sp.
MILRAHKIRLYPNNQQATYFAKACGVARFAYNWALARAKELYEQDNTYRFNEAALRRELNAIKAEQFPWMLEVTKCAPQLAIRDDLNSAFKNFFAKRADFPKFHKKGVDDSFALSNDQFKIKNTHVQIPKLGDVRLAEPLRLSGKIVAAAISRRADKWFIAVQVEIHKPEPTHTGESQAVGVDFGVKSLAVLSDGTVIQSSKASRKYEDQLRRLNQELSRRKGAKKGEKQSANFKKTKRKIARLYARMADLRTDETHKLTTMLTQNYAVIGIEDLNVKGMMANHKLARSIADAALSACRRQIEYKSEVSGSRVVVADRWFASSKTCSNCGAAKETLSLSERTYHCDACGFTCDRDHNAARNLENYAVNA

SEQ ID NO: 40010 - protein, 165 aa, Psychromonas sp.
FEALKTSNMVRRPKAKQDERGRFIPNKAKQKAGLNKAILNVGWHVIESYTKYKSYQAGKAVFKIPAPYTSQECAKCDYTHPSNRKSQDLLVCGSCGNTDNADNNASLVIKKRAINLILDTGTVLSEKGVLVAKSDNGCGGKRKTSRAKSSASSRQRSVKKEKLVA

SEQ ID NO: 40011 - protein, 280 aa, unknown
  TnpB Polypeptide
LFYDEQAQSFRAFQPVTINEDHSRLAQPLASEEAALDIGANNLVACTTTTGKQYLYEGRALFKRFRETTREIARLQSILEEGRYSSHRIRRLYDRRTKRRDHAQDALARDLIERLYDEGVSTVYVGALTDVLDTHWSVETNAKTHNFWAFRAFIKRLVCTAEEYGISVEVRSEAWTSQECPNCGSTDDTTRHRDTLTCPCGFEGHADLTASGTFLRRHQNSKSSGWRTRRDASRQRQTTVTRSMARPVCLKWDNHEWLESSHSHRPDEEHTNPQVASVGG

SEQ ID NO: 40012 - protein, 211 aa, unknown
  TnpB Polypeptide
LATEVRAIRTLYARIRKMIGRKKVKHGRQVIKRMGSVEQRKVTDILHKATREIVEQAKQLREEGYDVIIAYGDIKGVRKPRIKGKTRCRKNNRKVHTMPSFKVKHMLTYKALWEAILCVGINEAYTTKQCHKCGSMNTIVRKRLFKCLDCGLEYNRDLNASINIGNRLSGYMLDSRGSGGPPLTSPVSIIQKGNFLVVRQAREEAPSLVAE

SEQ ID NO: 40013 - protein, 357 aa, unknown
  TnpB Polypeptide
MPETVTKTLKVRVRDKHAKLLSKWAVSVNQVWNYCNELSFRSITERRKWLSGYDLQSYTKGASELGLNSATLQMVGHEYVTRRKQVKKTKLQWRKSFGARRSLGWIPVRKDCFSIKSGQIYHNRHHFKIWDSYGLSKYKTRAASFNEDARGRWYFNVVVEVPVEQSAGTGAVGIDLGCKDAATCSNGEKLAGRWYRAMEEKLAVAQRAGKKDRVRAIHAKIANRRKDALHKFSRNLVNQNAAIFVGNVNARAITQTKLAKSSLDAGWSQLRTMLSYKSDHAGIVYEEINEAYTTQACSRCGAISSSSPKGRAGLGIRQWICVECGTLHDRDINAAKNIAALGHGRLAGGIAFQSREA

SEQ ID NO: 40014 - protein, 309 aa, unknown
  TnpB Polypeptide
VGRHQVRLSRVGLVKTFESMRKLARRVENGTARVVTATVRRESGGWFVSFTVVVQRPDPVRPRSPVDGGNVIGLDLGLTTLVTGASPGGEVLLEAGNPRHYRKAEARLARAQRVASRRKGPARGVAPSNRWRRANKRVQGIHLHVANQRSAWQHALTRRLAKEYDVILVEDLGIANMVRNRSLAKAIHDAGWGELVRQLEYKAGWYGATIVKAGRFYPSSKTCSGCGTAKAKLSLAEREFHCSTCGTRLGRDVNAAINLARLGDPGWELRTAGTRSVAGRGGSGKTKPKLALAGLGVARACEASTVTHV

SEQ ID NO: 40015 - protein, 389 aa, Lactobacillus sp.
VVLAMVLRAIKARIYPNDSQQQQAMINFGCCRFVWNQLLNMQIERYANGGSFVREFDMNLLIKTLKNEYSWLKQADSTSLQQVSRDIQDAYQRFFKKKGSFPKFKSRRFPRQSYTSKCVSNNIKVIDDHHIKIPKIGVISYRCGRQIKGKIKRATLRLSATNKFYLAILVEVDVPLFEKTNQTVGIDRNVDNLIAMSDGTIVPTIHFDKNLAYKKHQWQKKLARRRARALKEIAWDKHNRVLEPRNIKDFRNVEKARIMVAKYSEKERNQRTDYLQKLSTKIVKEFDLIAIEKLSTKNMLKNHKLARAISNQGWYALQQMLEYKCKWYGKELELVPAKNTTQTCSACGYLLQQSEKLTLDVRAWVCPKCHTHHIRDVNAANNILNSATQ

SEQ ID NO: 40016 - protein, 403 aa, unknown
  TnpB Polypeptide
MFVSKKIKLEVSDQDAATLEFMQGKCRGLYNWWVMRLRNGEKWPGWAAAKQTLQESKRYDPELRHVYGKLLHEVYFRLDAAMQAFFRRVQNGETPGFPRVRPRHCFFTLIYPAMYLKVEGRLLTLPTGGKGKHKRYPVIVARLTEDAPSGYKEVAISRDGRGDYYASFVYEQPEQEHTGGGILALDLGIKTLATGVNEQGRFYHIGGFKGSRWYNKQLDKIRSKRAKCKKGSRRFKYLSRVYKRVSQRKRNKQQDCLHKASHLIAHRLVERTVVIGDLSQRQMVMQAHTERNKQLHRAVYNDWGLYSFVQMLRYKCVLSGKELVTLDERDTSKICSGCGQKQSMPLWKRTYRCRECGLVMDRDDNSAVNILMRFLARLWATQGADLPAVCGRVHRNRTGGQVN

SEQ ID NO: 40017 - protein, 456 aa, Haloterrigena sp.
MPEVTKTLELRLVNPNAHKERKLCETREAYQQALQAAFDADCTSQSATNDVVVEYDLSGYAKNALKQYVPQLCSGSYDADELHDDHPVKFTNEGVQLDHKPQNALEWYVKIPHHDDYHLWIPAHVNPDQRDWVEAVYAGDAVMGESRLFERDGTWYLHVTATRDVEEQPVASANERTPIGVDIGEASLVTVCHRDESGSPVRPKLWADNSKAVRRLRKTYFTATRRLQKRGSERIAESYGDALWDQIDDVFHCVTREVVEYAESVDNPVLVLEDLTYIRQNMDYSVYMNRRLHGWGFAKLYAQIRYKAAEKGIPVETVNPQNTSKACHACGEHGYRPRQATFRCSNDDCWVTEYQADVNGAINIADRYRSGESHRQNDRAPRQKAGDDDSATDGVVRETKSLVITKIFDFRTTSLTGSQDSHAVDESRSDSFAHQKSSISGDDAEPQQVTHGTNAS

SEQ ID NO: 40018 - protein, 455 aa, unknown
  TnpB Polypeptide
VYRVSAVKLAVDEGADERPRGVNEVTRTVIVRSAPLPRRTFRAFVELEGMYRNIVEQLVLYAVNNNITKFTRLKAERYREVRSLYPRLPSHYAYTACQDAAERAHSFLRLKKMGRARKPYPEVRSVSIWLDDHLWRAEGLTSISMATHKGRVRVSVELNKHYLRYVNRGWRLASEARVKLDHKERKLTLYLTFKKEVNEYRPKSYITVDVNENAEAVLIDGVVYLFETGLSRVTLGYYYRRKSVQERYDKVYGPGSRPARRVLRRLGNNERALKRDIRWKLATLIVRQAARRQAAIVLERLGKEPASHMIERIKNPQLRHRIYQAALKGVQRAIEEKAREYGVPVIYIDPRNTSRVCPIHGAEIVYGRNRHGTCSKGGETWHRDVAACYNLLLRALGGDGGDAPSRVRAFVAVDGGPVPLGPTAAHEPMPIARGAWARWKSLGATSDRKLMRVST

SEQ ID NO: 40019 - protein, 371 aa, Bacillus sp.
MILAKKVRLKPTKEQEIQLWKSVGTARWAYNWALAKQKENFKTGGKFISDSMLRKELTRLKQTEEFSWLYKVSNNITKQAIKDLCNAYKKFFKGLADKPKFKSRRKSKPSFYNDNVKLKVKGKKVLIEKVGWVVTSEIISDEKYYNPRISNDGKYWYISIGMEELKPVVEMTEVSLGIDVGIKELAVCSDGIKKKNINKTSTVRRLEKRLRRLHRQVSRKYKMNKEGDRYVKTSNIIKIEKKIQLLYRRLSNIRIDHLHQSTSEIVKTKPFHIVMETLNIKGMMKNKHLSKAIAKQCLCKFKRQIQYKCEKYGIEFVEADKWYPSSKTCSSCGNKKNDLKLSDRYFKCECGHGIDRDLNAAINLSRYKLVI

SEQ ID NO: 40020 - protein, 379 aa, Vibrio sp.
MLKATKVRLYPTSEQQVFLNAQFGAVRFAYNQALRIKTHFYKKKGVSLHPIKDIKPLLSVAKRSRKYAWLNQYDSIALQQAVINLNVAFSNFFDKKSKSRYPNFKKKHGSQSSYHCTSIKITNDSIKIPKMKECIKAKMHRIVEGQLKSITISRSATGKYFASILVDTGEPLPEKPTHIDSNKLFAFDLGLTSFLTDSNGHKEANPRFLKNAYRNLRRKQKALSRCQKGSANRAKARLKLAKAHESVVNKRNHFQHVLSKKIADESQAVVFEKLNVTGMLKNRKLARAISDAAWGSFVNKVKYKIDWQGKHFTQTSQWLASSKTCHVCKHKVKDMSLSVRHWVCPNCQTHHDRDGNATKVLKIEGAISFKAAGLTVSAL

SEQ ID NO: 40021 - protein, 452 aa, unknown
  TnpB Polypeptide
VSQKVRIDGVKHAGASVFLGVDHCGNPCWTCNSERIMVWLCDGWRTRFNQRREQRTHNVPIKDEATGEIVDWVKEPLGGPDVAELLSDKEARLQCSWMAAVPSSILATSNRLEDIEWSAGLKRKKTAGGRVPGFKSRHRGLGFVCWYRPSSHSYNAVFHKTGRKSGVVVITGMNPPRWVKPGEKAHWRVIVHVRVSRPIRPYTSVHVDWTHRTLAFVNTPLPLPRTGDGVIGLDRGCIHTLASSDGTFMDMPKPSKAELKRLKYLQRRMARQDRVDEARGGRTAKFASKRRQKTLAKFNTLQGHIIRRRNDWIEKTTTRLAKENSLVAMEDLDVQAMTRRPKPKPDPAEPGHYLPNGAKAKAGLNWSILGNNWSRLMKRLKDKMDANGGKLVIVPAAYTSQTCHQCGHVASEGRDSQAAFKCVECGHEANADVNAAMNILGRALNKTGGGTA

SEQ ID NO: 40022 - protein, 408 aa, Gloeocapsopsis sp.
VQKAFKVTLIPNHSQEVLINKTIGCARFVYNRFLARRKELYESDKKTLNYSGCSQELTQLKKEIEWLTKVDKFALQNAIRNLETAYKNFFSDLKKPKQKRQFGFPKLKKKHEFKQSYKTNFTNGNIQIRENYLKLPKLGWLRFRKSQEIDETIVNVTVTCTKTGNYIASILCETEIEKHPSVDKNIGLDLGIKSYLVTSNLEEIENPKHYRRTLRKLRKANKKLSRSVKGSNNRVKAKTKLARIHERVTNLRDDFLHKLSTRLIRENAVICIEDLRVANMVKNHKLALSIMDASWSKFVAMLEYKALWHDRTLAKVSPFFPSSQTCSCCGFVNPEVKDLSVREWDCPRCNTHHLRDYTAAVNILCEGLRLLTVAVGAPDTQNACGESVRPGDIQERIDEAGITRLVVV

SEQ ID NO: 40023 - protein, 545 aa, unknown
  TnpB Polypeptide
MRSIADPFVVRLPAGARVRTRLRLTTADEAVLRAVGAHLGRLAGHDLAWRCRQGRSDNQWTVRKRAATSQSSSRWAGTITRVSNEQWQRGLINLANHQIGLRRAARSIRARLVVPVGGRQGRVNGYATQAERYAKQRRLQHLEAELARVEDRVRSARVSVCRGGHRLAKLRHRLAHADVELTESEWQACWQAKRWFLTADGDATKLWGNETIRVHPEQQWMELRLPTPMAGLSNTPGRACTYRLACSVTFHHRRDEWAVQAATGPVRYDISYQPSRNRWYLDASWQTKAIQTPALDELRRSRALGVDLNAEHLACWVLDSSGNPVGRPHTVPLYLDALSASTRDGRLRAAIAALLRLARMNGCRSIVVEDLDFTDARQTGRETLGRGHRARCFRRTISGMPTHRFRTFLAGMAANADLSVIAVDPGWTSKWGRRYWLAPLNRSTKSSIAITRHHAAAAVIARRGQGVGARRRQGVTGRDQRIVAGELPARPDQRLSDHQGPGPPGGRRAAARPRRTRSAERSSSGTRWPKTVRDYRAGPTSCSTP

SEQ ID NO: 40024 - protein, 380 aa, unknown
  TnpB Polypeptide
MIAYSFKLYNTDKTGYLDKMLSEAAWVWNMALAIQKRYYQLTGKYISAVDMQKHFAKRHKRIYLHSNTVQEILQRQDEGYQRFFKHLSARPPKFRKAKEFSSIVFKLSGGYRLSDNRFTINKIHKTFKFSKSREIEGNIKRVTVKRNRLGEYFIVVTTDAKSQTCVKSRKGASVGIDFGLKHYLTLSNGDVIDCPLFLRGSLNEYRRLSRNLSKCSRGSNNRERKRKQLDRLFLNIKHKRDDFQWKLSHELCRKYNEIFLEDLNLSGMCKRWGRKMSDLSFSSFVLKLEHVASKYGVVVHKIDRFYPSSKTCSCCGYIYKELRLSERTWVCPECHSVLDRDLNASINIYRKGVSDLGSDSKTPIGFPLSAVALATQESHP

SEQ ID NO: 40025 - protein, 402 aa, Escherichia sp.
VKRLQAFKFQLRPGGQQECEMRRFAGACRFVFNRALARQNENHEAGNKYIPYGKMASWLVECKNATETQWLKDSPSQPLQQSLKDLERAYKNFFRKRAAFPRFKKRGQNDAFRYPQGVKLDQENSRIFLPKLGWMRYRNSRQVTGVVKNVTVSQSCGKWYISIQTESEVSTPVHPSASMIGLDAGVAKLATLSDGTVFGPVNSFQKNQKTLARLQRQLSRKVKFSNNWQKQKRKIQRLHSRIANIRRDYLHKVTTTVSKNHAMIVIEDLKVSNMSKSAAGTVSQPGRNVRAKSGLNRSILDQGWYEMRRQLEYKQLWSGGQVLAVPPAYTSQRCACCGHTAKENRLSQSQFRCQVCGYTANADVNGARNILAAGHAVLACGEMVQSGRSLKQEPTEMIQATA

SEQ ID NO: 40026 - protein, 343 aa, unknown
  TnpB Polypeptide
MYLKEISATGFKSFADKLTIELNGKTTCIVGPNGSGKSNIVDAVRWVLGEQSVKSLRGDTNMSDVIFSGSKSRKPLNVATVSLTFDNSDNYINLPYNEVTVKRRVYRSGENEYFINNEKCRLKDITDMFLDSGIGKNSFNIISQGEVQKILSNSEYDRRFIFESAAGVLKYKKRKEEALKKLDKTNNNLERVDDIVGELQIQVEPLKEQSEKATEYLDIKEKLKNVEVSLLADEITVLNEDIKKHQKKIEELNNSLMNLNLKGTNFDTNIIELKSKLLKLETDIKDANNNLLIFTKEEETHKKITPTSIVGIDLGIKDLVVTSDGEKYPNPKEINKRENSKNT

SEQ ID NO: 40027 - protein, 392 aa, unknown
  TnpB Polypeptide
MQRVERYIIIGDKNLDSLCFLSKNLYNYVNYLIRQEFTQSGKMLSEYEVTTRLAKEKQADYIVLPSQTSQQIVKLLFKNWKSFFKLCKCKGKLKGKPKLPKYKHKTKGRNIVVFTSQQCKLKDGYIHFPKKANIQPLRTKVTNLCQVRIIPQCSCHIIEVVYEKESVETTGLEPDSYLSIDLGLNNLVTSYDSLNYKSFIVNGRPLKSINQYFNKKRALLMSYIGNRGMSNRIGKLTLKRNCKVNDYMHKASRFIVNYCIEHHIGTIVIGNNKDWKQNCNMGKRNNQNFVSIPFEKLISMIQYKSEEVGIRVVITEESYTSKVDHYAGEEMCHHDSYLGKRIKRGLYRSSTGKILNADLNGAIGILRKVSHESYMQVVSRGGVETPSRIHLV

SEQ ID NO: 40028 - protein, 353 aa, unknown
  TnpB Polypeptide
MELVMTVQVRIKDKHAKVLNTLAAEANFVWNFCNELSLRHTQRTGKFMSGYDLQKYTAGACKEGLLLNSATVQMIGHELATRRKQFKKLKLAWRKNSGVRRSLGWIPFRADCISYKGGEIRYAGFKFNVWDSYDLADYELGSGTFSEDSRGRWYFNATVKVEKKISPATKSIGIDLGLKECAVASDGQRLVGRNYRELESKLGIAQRANKKLEVKNLHAKIKNRRRDQLHKFSTMLTKEYGAIFIGNVSSSKLIKTKMAKSTLDAGWSSLKTMLEYKSDHAGVVYEVIDEAFTTQTCSCCGFIAVSSPKGRAGLGIRGWTCSDCGSVNDRDLNAAKNILARGHSRLAVGIPSL

SEQ ID NO: 40029 - protein, 382 aa, Escherichia sp.
MRRFAGACRFVFNRALARQNENHEAGNKYIPYGKMASWLVEWKNATETQWLKDAPSQPLQQSLKDLERAYKNFFRKRAAFPRFKKRGQNDAFRYPQGVKLDQENSRIFLPKLGWMRYRNSRQVTGVVKNVTVSQSCGKWYISIQTESEVSTPAHPSASMVGLDAGVAKLATLSDGTVFEPVNSFQKNQKTLARLQRQLSRKVKFSNNWQKQKRKIQRLHSCIANIRRDYLHKVTTAVSKNHAMIVIEDLKVSNMSKSAAGTVSQPGRNVRAKSGLNRSILDQGWYEMRRQLEYKQLWRGGQVLAVPPAYTSQRCACCGHTAKENRLSQSKFRCQVCGYTANADVNGARNILAAGHAVLACGEMVQSGRPLKQEPTEMIQATA

SEQ ID NO: 40030 - protein, 416 aa, Moorea sp.
MVVSITKNDSAYDVCMVVNLPLGEKEMQLVERHLIKKTHQYWSECDSLSFKAKNLYNLCNYYMRQSFFERVKALSNTELYHKFSSLDAYKQMLTTKIACSLIRQVCQSWKGDFQAHKDWKINPSKYLGEPRIPSYKHKLKGRYRLIHKGGEAIYKKSLKEGIYHLSQSQIKIKINRAIHPVLARIVPRQGCCVIEIVYEVEKTKIETNAGIAVIDLGINKPTVSPLLINGQPLKSINQQYNKVRGSIQSRMGEYPSRIRLECIILKRNNKVSNYLHKTYFILVNYLKANQIKTLVVGNNDGGKQQINIGRRNNQNFVQITHARLLEMLQDKSQLAGIKLVTVNQAYTSKCSALDLEPICKHEKYVGKRIKRSLFKTGTGIVINADLNGSLNIIRMYSPKAFIEGIESCGVQPLNKG

SEQ ID NO: 40031 - protein, 391 aa, unknown
  TnpB Polypeptide
MSKKKKYMTRTVHAFLDVDEDTYSRIISTRDAYAEIFNTHTQWAKDNHSTSSKKAHEQLYEKLRADNPNLPSAMIQCARNHAFGAMKSYNSNNPKKKWSKDLVYTASSMNYDRRTVSLNTLGVMTFSLYGGKRGKARVHIPQFFTDRYGDWEFNSATIGIDKNGKAFANLSYRKSITQKKTNGKIVGVDRGIYNVASTSSGKNFSSKKIRGRKRQLEYNESRLKAKVASGSRSAKRRLNAQKGKNARFSKNQLDIITKKLANVDDVSTYVLEDLTGLYQQRKSKNFNRLKNTWSPSRFEFMLKYKCEEKGIKVVKVDPKYTSQMCSSCGQVEKKNRKGSIYKCCHCGYTNHADINAALNIRDKYISTLPATGSVEQGASQSPNDALAFISD

SEQ ID NO: 40032 - protein, 401 aa, unknown
  TnpB Polypeptide
MQLVERHILRDKIYFDVCIKAKELYNQSLYYCRQSNFKNIDYFTEFELTTLFAEFNEPTYRALPSQTSQQVIKLLFKNIKSWQKARKEYAKNPSNFLGRPKLPNYKKETSICLFTSQQIRLKGEFIHFPKQTNLEPLKTRQNNVQQVRIIPKNTHCIVEIVYNYKEIDKKEYNDKWLGIDLGLNNLATCISNDSAFIVNGKALKSINHYYNKRKRLLQSKLRENIHSSRRIERITHKRNNKVNDYLHKASKIIVYNSIKENVTKIIIGKNENWKQKINIGKKSNRQFTSIPHATLIEKITYKAQMVGIETIVTQEAYTSKCSAIDLEPIQKHETYLGKRKKRGLFVTSSGKLINADGNGALNIARLGLKRASCNEIIISERVLSCVSQPKKISVLHKMQIN

SEQ ID NO: 40033 - protein, 353 aa, unknown
  TnpB Polypeptide
MANEVKPLLKTLRYRVKDRVARKHLSAAARAVNLVWNHCNGAQRHALKHNTKWPTEGQLKRLTAGAGKLIGIPAQTIQGVCEEYIDRRRGSRKGKLRWRGKRSLGWVPFKNQTVRVCGSIVHFNGHKIRLWLHRGVEGRIKSGSFSQDARGRWYCNLAVEYLPKPHGQDAAVGIDLGLKDGMTLSTGAKVENSRVFARYEAELAVAQRANKARRVQALHAKIANTRKDFLHKETTSIADAFGLICVGNVSGRWLQASNGKSAADASTGMSRNMLRYKAMARAATFVDVSEYLTTQTCSDCGEVGGPKGTKGLEVREWTCMSCGVVHDRDVTAARNILRLGRQALAEGSSTLSA

SEQ ID NO: 40034 - protein, 404 aa, unknown
  TnpB Polypeptide
MLVNRIESQNIKQTNPIWKVVDDYCFRSKNVYNYVNYIIRQEFIHNDKWIRSNDLDKMCQSEDCYKELGSQAAQKIIQLLDKNWKSFFVAIKDWKKHPNKYLGRPKLPKYKDKNGRQIFMLKNIQCSLNNGLFRISFKPFKGYTVPTHIPQTAKLMQCRFVPHSNYYTMEIVYQIDVPETNTDSEHIASIDLGVDNFATITNNIGLTPIAIKGGVIKSMNQYYNMKKAKMQSELMTLNKKHISKNIIKLANKRNNKIKDWMHKASKYVVDCCVMYGIDTLVCGYNAGWKQESDMSKKTNQKFVSIPFDMFVNQLAYKCQNNGIRFITTDESYTSGTSFLDGEKPVKDNYNKSRRIHRGMFKSNNGTLINADVNGSYQIMKKVFPNAFADGIEGVGLHPLSMKIA

SEQ ID NO: 40035 - protein, 396 aa, unknown
  TnpB Polypeptide
MIVVEFKLAVASSQYAALDEAIRTTQFVRNKCVRKWCDERGVKPYDLNRYCAVLAKEYDFAGKLNSQARQAAAERAAAAINRFYDKCRHKRPGKKGYPHFQKDCRSIEYKTTGWKLDEARRAITFTDGFKAGTFKLRGTRDLLGYALNQIKRVRVVKKADGYYSQFCLDAARRVASVATGKAVGIDVGLAHFYTDSEGVTVENPRHLRRSERALKRLHQRVSSKAKGSRNRAKARGRLGRKHLKVSRQRKDFAVKTARALVMSNDVIAYEDLRVRNMVKNRRLAKSISDAGWRAFVTWLGYLAHVYGKVIVAVPPAYTSQDCSGCGERVKKSLSERTHICLRCKTVLDRDHNAARNILALGLRALEETTAGHAESNAWGQSALYPSEATGTDTAAG

SEQ ID NO: 40036 - protein, 422 aa, unknown
  TnpB Polypeptide
VPDPIAIKVRLYPTKDQQAQLDRPFGCCRFLWNQMLNERREAYKHFKIDGIKRKYRTEKDYKILFPFLREVDAKALQNVNWHLQDAYSRFFQNIKDRKAKKTKWHVGYPRFKHKHDKQSFTTNEINGNIKIDFTCKGLKLPKIGSWIRYSDNRVFDERIRSVTVSKTKSGRYFASILLDREISAVPMAEVHEEKVAAFDMSMKDFVVTEAYKLSNPRFFRQSLNRIKKAHRHVSRNTKGSCNRDKACHHLAKIYEHYVNQKKDWTHKLTRQLVDQHDAVIVEDLNIEGMKRFNTGYAKSMTKDFSWGEFVRMLEYKMARLGKHLVKVDRFFPSSQLCSSCGYQYKELTLDEREWNCPGCGTRHDRDINASLNLRREGARVLDERGITLMRATVGTTGSHACGDRVRLPEMEAAVKETRIHAL

SEQ ID NO: 40037 - protein, 544 aa, Moorea sp.
MQTMGHSDAKGHQEGLDSLTQQIFSVLEKLQSLTNCAVTPSVIAESVVQNSETILPAKSLTSTLSSRKQTSSLTSVPVSITTGKGLEPYWNESCLEISSRLLLPVETDLPVSGLNSLSTWSVSTVEKSWFSTNLKVVFDQNLPQILSPSFTSYPAGFTDSESTVKKSKKIHLFLNPEQRAIIRKWFGVSRYVFNKTIKILQDGETKANWKAIKTGILNDLPEWCKEVPYQIKSIAIKDACTAVREAKKKYKKTFQIQRVRFRSRKNPIQSCYIPKSAVSTLGIYHTKLGEIGYTESLPDQVCDSRLTSNNGNYYLVVPYKETKKKTENQGRVVALDPGVRTFITFFSETSVGKIGNGDFSRIQRLCQHLDNLLSKISKSSGGQKRRMRKAARRMIVKVQNLINELHHKTARFLVDNFDVILLPTFETSQMSKRKNRKIRSKTVRNMLSFAHYRFQEFLKHKAIEAGKIVVDVCEAYTSKTVSWTGELVNIGGGRIIRSKVDGRSMDRDINGARGIFLRALVDTPWLRNQLALVSQNFPLRDSGS

SEQ ID NO: 40038 - protein, 380 aa, Limnoraphis sp.
MNQAITVKCKLIVPPKLTERVNETLAGFSDACNRILQTAKENNCWNTTKLHHLTYKRVREATGLKANHVCQAIRRVVNQRKATKQIHKFRPTSISLDARTFKYIESEQKVGVTLKSGRVNFDLKIGGYQIALLRGQSPTSTTLSQSRNGNYYINVVVQVPTQPKRKTPKVLGVDLGLRDIATTSTGKSWDGTQLRQVRNRFVKVRASIQSKRTKSAKRLLRRLSGKESRFQKWVNHNISKQLIEVAQKLNSAIAFEDLSGIRLRTKVRRKTRTEINRWAFYQLRLFTEYKARIAGIEVIWVDPRYTSQTCSRCHHIHPEPGKSYRQGKVFKCGFCGFEHDADLNGALNIAQLGAVVNLPEISTYFCQLEDGNGLGIEPLP

SEQ ID NO: 40039 - protein, 402 aa, Shigella sp.
VKRLQAFKFQLRLGGQQEREMRRFAGACRFVFNRALALQNENHEAGNKYIPYGKMASWLVEWKNATETQWLKDSPSQPLQQSLKDLERAYKNFFQKRAAFPRFKKRGQNAAFRYPQDVKLDQENSRIFLPKLGWMRYRNSRQVTGVVKNVTVSQSCGTWYISIQTESEVSTPVHPSASMIGLDAGVAKLATLSDGTVFEPVNSFQKNQKTLARLQRQLSRKVKFSNNWQKQKRKIQRLHSCIANIRRDYLHKVTTTVSKNHAMIVIEDLKVSNMSKSAAGTVSQPGRNVRAKSGLNRSILDQGWYEMRRQLEYKQLWSGGQVLAVPPAYTSQRCACCGHTAKENRLSQSKFRCQVCGYTANADVNGARNILAAGHAVLACGEMVQSGRSLKQEPTEMIQATA

SEQ ID NO: 40040 - protein, 480 aa, Caloranaerobacter sp.
MNKSIAGNKNIRTYKMRIKDKKFKSKVIDYIYKYRHFENMYIILLNQDYKQNIGDFRLLTNYEIMRALFRGTTPKKLKEKLTYIRNKYKNHQIMNDLINLSKELKIHNIVEIIKRVKSQYKGFFTRVKNGDYKAKPPKSKKLSKLTNYTIPLDSYKGFSLKRKNQIGINLNNKMIRTYINHKELEKVVGNLKNIKAVHLNFSNSELYLLFIYEKEEKEIKEKPYKSAGIDIGINNLLSIYVDDKDAPSLIIDGKKFKTYNANFNRFIAKLNREIMTTKDKNRKRYLEKYRTYIYEKRNRYFYDQFHKISKRVLEYLEKHDVTEIILSDNLNNIKNNGKCKLNKAIKQNFIQIPFGKLIRYIEYKAKEYGIEVKYVDESYTSKVSSLTEDIKIMQKLLQYNLDLTNALNGKRVKRGLFKDKVVNKIVNADLNGARNICILGSKKAQQKYKAGGENRWLNFKLCNPIKVESDFELCRIIKSA

SEQ ID NO: 40041 - protein, 350 aa, Caloranaerobacter sp.
MSKSIAGNKNIRTYKMRIKDKKFKSKVIDYIYKYRHFENMYIILLNQDYKQNIGDFRLLTNYEIMRALFRGTAPRKLEEKLTYIRNKYKNHQIMNDLINLSKELKIHNIVEIIKRVKSQYKGFSLKRKNQLGINLNNNRFIAKLNREIMTTKDKNRKRHLEKYRTYLYEKRNRYFYDQFHKISKRVLEYLEKHDVTEIILSDNLNNLKNNGKCKLNKAIKQNFIQIPFGKLLRYIEYKAEGYGIEVKFVDESYTSKVSSLTEDIKIMKKLLQYNLDLTNALNGKRVKRGLFKDKVINKIINADLNGARNICILGSKKAQQKYKAGGENRWLNLKLCNPIKVESDVKFVGL

SEQ ID NO: 40042 - protein, 381 aa, unknown
  TnpB Polypeptide
MYFNHPTKGGSNMNTKFETVFRTYSYRLYPTKMQQLELKALFDLQDHAFNDWADLANRGVAQGKNYETIQKEIESHEILTERREDRYALSVTRSHVLILARRLYDHQIERIRFRLPDRQQRSFTYKTVGISEHYLVIPSIGTIAMRGYRPFPDHAELRYAKVLVDCYGAEYRVDLVLAVLLPIAEEQPVHYEKVVGLDYTQNGLYVTSTGENAGYPGYRRIAQEQLRRHHRAAARFRPGSRRWYKQKQRAAKLERHIVHQRRNWQYQQAHKLCKEHDAVCVESLDLAGMKQANPSLASKLNDNACAAFFRKLEQILHQNGKKLIRVDQHYPSSQICSCCGAYLGKQPLSVKSITCPHCGVTIRRDHNAARNIRDEGFRHLE

SEQ ID NO: 40043 - protein, 380 aa, unknown
  TnpB Polypeptide
LSDGILRCAKLTLALELGPSAGQHTALLRTVERCNDACNWIAEVAFRERCANKIRLQKIVYLEARERFELPGQMATRPIPKVVEADKCDRTVQPHFRAHGAVPYDQRNISWKAPDRVGLLTLNGREAVPYLFGEYQNARRDRTRGQADLVLRRNVFSLYATADAPEPPQGRYTEYLGIDLGIVDLATDSDGIISTGEAGRRLCRVSAHRRRNLSREGTKACRRKLRRISGRQRRFQADTNHRNSKHVVAVARRTKRGLAREDLQGIRERGTVRRRQRARHANWGFSRLRSPIGYKVRQLGVPAVLVDPRNTSRTCPDRACIDQVNRPTRDRFECVSCGLAGPADAIAARNIAFRARAAVMQPKVSDAGSVPEAPETSHLL

SEQ ID NO: 40044 - protein, 465 aa, unknown
  TnpB Polypeptide
MTILSGVKLKLYPNKEQKQIIEQTFGNSRFVWNQFRNMQENRYNAMIDDYNSYKEQAKENGEKIINPVYIDAYGMQKMLTPLKKDHPWLYSSDATVLQKTLSNLDQAYKNFFTKPDQFEKPKFKSRKHRSQAFTGKSNKQKSGKTSVYVAGPRYVYVPKLGFIKTSKTTRINGQIKEYTIIRESFGDYYISFQIEEPDRELLVKTKQLIGGDLGLTHLLTLSNGLKFPKFSPGQTLALSLKAQSKASKSMDRNSKILNTKELIYLIETGIFDEDKYDASDLFDFKNHEKRMKKSAKTQRKVANKHHDYLHKLTTALVKAYDVIVLEDLKVKNMLKNHKLAKAISNASWATFIRFLRYKCNWYGKLFILVPPHYTSRICHQCGWDSGKKPLGIREWTCPHCHESHDRDINAAINILYRGLETYLQSQLMLLNEQAKNGYFATVFFQVALQWLKQTITYFNQALEIT

SEQ ID NO: 40045 - protein, 459 aa, Moorea sp.
LYRTIPVRASFTDEEKAFWIFQCEQANSLINSAIYYTRQAHYSRLEQLEDAFTTYWRGDELRYGWKIYNCNMTYPELCKALKESLNYKAMAAQSAQQTLKTVAESVNSYNKLVNLYYKGKGNRPKLIRYRKKGGLAAVTFPRQALNYKDGCFYPSISRETKPHLLTEITLQIPDFIDSDWVKEVTIRPYLGELWIDWVIDDNKEPISNNRNLDYNQAWSFDHGGTNWLTGVSTRGKSLIIDGRKLKSMNQGYCRDCAKYKQGKPDFYWDYNLERVQRKRNNQMRDAINKACRFIINQCLNDRVGNLIIGWNYGQKNRSSMGKRGNQNFVVIPTGRLIERLKQLCYEYGIKLTITEEAYTSKASYLDGDSLYKYGEKPKGWFPSGKRVKRGLYKTSAGWLINADCNGAANIARKVATQLGLDLAEVGRGALTLPQRYDLFTSLNRSYRKRSEVMRFQPIM

SEQ ID NO: 40046 - protein, 281 aa, Microcoleus sp.
MPLDEVKTAVGIDVGLKEFLTTSEGKTVPIQQTYRKTQAHLARAQRQLARKEKGSNRANKQKNKIARIHQRIGRIRENFHYNTAHNLVKKYDLIAVEDLNIKGLARTKLSKSILDAAWGKFINILESVAVKCSVRVVKVNPHGTSQNCSNCGTKVPKTLSMRLHECPKCGLAMDRDENAALNILDRALNEVGLILSRQCVAGGTPVEATAAARGGLVDGQPRAARNFRWFFRWKPPSYCLQLTGENVTRALVCVSDLLSLAIEFPKCLRLLYSHKNTYLAR

SEQ ID NO: 40047 - protein, 222 aa, Geobacillus sp.
VHWYVSVGYDIQKPLIALNSHTLGIDVGIQNLAVCSDGRAFQNINKTKEIKKLEKRLRRLQRQCSRKYEMNKIQEKGGAVRYVKTRNIAKLERQMQKMRIRLEHKRVDYENKVVNELVRTKPSRMVMEDLNIQGMMKNRHLSKAIQQQRLYMLKQKIKHKCEWHGIEWVEADRWHPSSKTCSSCGDVKQSFKLSERVFRCEDCGLEMDRDLNASINLSGYPA

SEQ ID NO: 40048 - protein, 461 aa, Streptomyces sp.
MAERQYRGHRARLTVSSGLEARLDAQAHATRALWNLLHEWWEMLPRDKRTLEAADAAIRLARKEIDWLAVLPAQAAQTVLKAYVQAWKNCWEGRADAPKFKARCRSVMSVDIPQGRDLQVERVHRRWGLVNIPKAGRVRFRWTKDLPIGKQAHADNRITGARLVKDSLGWHIVFRVQTVESKVEPHAGPEVGIDLGVAVPLALSDGETRTHREWLTDKEQATLLLLEQRAACKESFRKRGEPVSNRLRATYDQIAVIRARAKRRALDWQHQTTTQIARTYGVIVVEDLAIPNMVKSAKGTVETPGKNVARKSSLNRSIGQEAWGRTVTMLAYKSARYGGSLYKVPSRGTSRRCSMCGLTTSGSRESQAMFVCKNPLCGWVGNADHNAARNILHLYRMGHALVPAAGRAVVRRACTSNPSAQARRKSSMPVSESTPKPRLPASSLPQSHTMRESGARVTLVP

SEQ ID NO: 40049 - protein, 244 aa, Oscillatoriales sp.
VGKIKAKLHRNIEGTIKTVTISREPSGKYFASILTESEGENPAVSTEGKVIGIDLGLTHFAIVSNGSKISKYDNPRHLAKHEKNLKRKQQKLAKKQKASNSRIKAKKTVAKVYERVANSRQDFLHKLSRKLVNENQVVVVENLNVKGMVRNQNLAKAISDVSWGTFTNFLGYKLEKKGGKLVEIDRWFPSSKLCSNCYCQIDKLPLNMRQWTCPHCGTRHDRDGNAATNIRAVSTEAHTIIASI

SEQ ID NO: 40050 - protein, 428 aa, unknown
  TnpB Polypeptide
VKVELFHPTIIQTTIDNHKIITIFSSGMRKINRTYRFRLYPNKTQTELLAKHFGCSRFVYNYFLNQRKEQYKLTGKSDNFYAQCKTLTALKKQEETSWLKEVNSQTLQFAIRSLETAYTNFFKKRAKFPNFKSKHSKNSFTVPQFASVAGSRLFIRKFKEGIKCRVHREIKGKIGKVTITKTPSGKYFVSVFTEEEYITPIKKTGKPIGLDMGLKDLLVTSEGETFKNNRYTKRYECKLAKAQQHLSRKKKGSRGFENQRLKVARLHEKIANSRADYLHKCSISLVRRYDTICIEDLNIKGMTKNHHLSKSISDASWCKFVAMLTYKAEWNDKKIVKIDRFFPSSQTCNVCGYVNKDVKDLSVREWECPECHTHHDRDINAAINILHFGINNISAGTVDYTGGEEVRAVLLESRSSAKPETNEHLVQK

SEQ ID NO: 40051 - protein, 209 aa, unknown
  TnpB Polypeptide
MKYNLAFKYRIYPNKEQELLINKTFGCVRFVYNTILYTANKIYEETGKNKIITPASLKSENQFLKEVDSLALSNAQLNVKRSFTNFFQKRAKFPRFKSKKNNVKSYTTNCVNNSIRIEENKYLVLPKLKKVKLKYHREIPKDYRIKSVTLTNSNGNYYVSILTEFEKEIQEELKLSERSYKCECCGIEIDRDYNAALNIRGVGKEMLKY

SEQ ID NO: 40052 - protein, 461 aa, Actinoplanes sp.
VKTIQAYRFALDLTFRQHRNVLAHAGAARVAHNWALAQVKAVIGQRAAERSYGVAEESLTPAVSWSLAGLRKAWNAAKRDVAPWWGEVSKEAFNTGLDALARGLKNWADSRKGKRAGRAAGFPRFKSRRRTTPSVRFTTGAIRVEPDRRHVVLPRLGRLKLHESARKLARRLEAGTARILSATVRRDGGRWHVSFTVEVDRAERTPARPDAVIGVDVGIKHLAVLSTGDLVPNPRHLATAQTRLRALGRALSRKAGPDRRTRPRPSKRWQRAAARLGRAHARVSHLRRDTLHKLTSWLATTYGTVVVEDLNVAGMLTNRRLARHIADAGFGELRRQLAYKTSWNGGRLVVADRWYPSSKTCSGCGAVKTKLTLSERNYRCAACGLVVDRDHNAALNLAALAAEFDTAGSGSVAVRGADQKTRVGGRVAVKRKPGTTPVGQTGTVLPQGRTTNRVLTKHTDR

SEQ ID NO: 40053 - protein, 282 aa, Actinoplanes sp.
MADPLDIVWSRPLPENASPSTVTVSQDAAGRWFVSLLCDDRIEQTPAVHAAIGIDAGLNSLLTLSTGEKVVNPKYERADRQALARAQRAMARKERGSANRAKARLKVARIHARITDRRRDLLHKLTTRLVRENQTIVIEDLTVRNMVTNHSLARAISDAAWRQLRTMLEYKAEWHGRNLVVVDRWFPSSKLCSTCGALAERMPLSVRSWMCRCGTTHDRDVNAARNILAEGLSVTACGGGVRPQRESSRSGQPTVKQENPRATKGIPVLQGGEDVKSATTQQ

SEQ ID NO: 40054 - protein, 619 aa, unknown
  TnpB Polypeptide
VNDQQNRFLEKAFEFGRTLYNATLGTALGRLQRMRETQEWRVARDMPKGKARTKAFSAVHKAFGLTEFGLTIIANNHRKASGRKDIGAHEAQSIGKAVWRGLQRHMFQKAGRPRFKSFRRGLNSIEGTNNQEIMYKPERGAIVWRKHVMPYMKPDTDYMKEALAFDRRVKYCRIVRRTLNDVRRWFVQLVVEGLPPVRKVYAPKCEVVGIDPGPSRIAYFHECHAAIVEVAPHVDLKEPKIRLLQRRIDRSRRANNPDNYNPDGTVKKGSSTWNTSNRGRRTAAKLAEHHRCLAATRKRDHGELVNDLLQIGGTIKIEKNNYRSFQRCFGRSTNRRGMGEFVEHLKRKAESAGCEVIELNAYKLKMSQYDPQTDAYRKKPLKDRWPRWGNTGTLVQRDAMSAFLACHATEKGHDRALLLEKWTTAEALLSGSGLCRHEPCSDPEVSKDASGLTKPNCGSKAEREVCRAHFVRTVTFRRLCHLKELSDGQSEYSVFRQGSFNGSHDTGKAAMTVDSSCGTAAEKERGEERSPDRWMVVFLNDDYTPFDWVIDVLIRIFERTPVDAMTVTRSVHQQGRGIAGVYPRVKALRLVAKCMSEARRDGYPFTCIAVPAEGGGLSL

SEQ ID NO: 40055 - protein, 391 aa, Syntrophothermus sp.
VETVRIYRLNNIPQSVKARIREAQMEAARVWNDCCQIHREARQSGSRWPNRDDLQKAAKGRYALHSQTIQMICHAFLANVDTTRQVKKNNPKMRYPYKTKRFYPLYWPEQAVSIQAGRVVLPMGRGRKSIVLKVDLPKNAGACKIVWNNGYELHVAIPVEIEKTIGEAKATVDLGQIHQAAVVTNTGHAVVVSGRGIRSIKRYRDKELGKLARMQARCQKGSRRWRKLQKAKNELAVKTSRQIRDLRHKGTRKVIDFCKEQGVTTLYIGNPDGVRTNRCGRKHNQRMSQWEYGKDISYLKHKAKAAGIESFTGTERGTSSRCPVCGHHQKPKGRTWQCRKCGFVGHRDVVGATNMHRIAYGEKIEFPSKITYLRPGKTRNVVVAATRAKVV

SEQ ID NO: 40056 - protein, 449 aa, Solobacterium sp.
MQVVGSYGIRIRDSHDALKRTADLFSDAVAHLVRPALENWDALCEAGGAQMRQRMLERMIHSAKGFSSSDAFDQKFPKFPSYYRRAAIMQALGIVSAYQSSLKNWKANGCTGEPPKLDSCKHRMPALYRGNTYKPVIDEQTGKVLPYAAKIKVLRKNDWVWDTVRLSKTDVDYLDKRGRNGDISAPVLEKKHGCWKLRFAVTETVELSAKPVSEQKICAVDLGIRTDAVCSIMDSKGTVLARKFIMRGREDSLSNALHRVSVFQSLHGSHDSGRLWNIAKRRNRNLAHQIAREIVNFAIANECDAIVMEHLDTKGRKCGSKKQKLAMWKHADIQKTVESLAHHYGIRISRVNAWGTSRLAYDGTGRVRRGREVSEDTPYDVCVFKSGKIYNCDLSASYNIGARYFIRGLLMESPDLMTKVSGIGSGTQRTLADLWKINRVLYPLLPAAV

SEQ ID NO: 40057 - protein, 397 aa, Solobacterium sp.
MSNGTNAKKRKPGQCASANVDRIALRFCGMPTSAQKDSLNQTLGACRWLYNRMLDDRSACYKQTGESLNLTPAWYKRLSCCPWLKEADSLALANVHLHLNRAFDNFFNGKSAYPKFKRKADHYDSYTTNIASKGATNLRFRMGKRKAGFLTLPKIGGEIKVRAHRAVPADGILKSVTVTHEPDGKYYFSLLYEVPHEEIHHDIDPDNAIGLDMSMHNFYVDSNGKHIDYGKPYHDMQDRIAKEQRKLSHMKKGSSNYHKQRVKVAKLCAKAKHQRSDALHKLSRQLVDTYDIVGIEDLNMKAMSQSLNFGKSVGDKGWGMFANMLAYKAQRAGKRVIKVGKFFPSSQMCHECGTLHKLTKDLSVREWTCPNCGHPHDRDENAALNIRDEAVRIYCTC

SEQ ID NO: 40058 - protein, 419 aa, Solobacterium sp.
MYLTQTNYIRHLPKDQYEAILEMCSYANNLYNVGLYQIRQYFFATNKYLRYEENYHLCKDNENYKLLQAGISQQILRTCDHAFRSFFALLNKKKSGSYDKKVRIPHYRTKGGKYLLVLSTNAINIKNGNLSVPMSRTFSKQHPDLDSIRIPVPERISGRHIAEVRIVPVLNGKALKIQYCYEQEEEPQNLNADNVLAIDVGLDNLASCVTTTGTSFIVDGRKLKSINQWYNRQIAHYASIKDHQNIKGFTARMSRITDKRNRQVTDYMHKAARHIVDYCIANDIGTLIVGHSVDQKQSVNMGKANNQKFVQIPFDQLRTYLKTLCERYGIAYIETEESYTSKASFLDGDEIPVYDTKHPYAGTFSGKRIKRGLYSTKENTLVNADINGACNIAKKGKQNLSFEGLCRGLLASPLRIRIA

SEQ ID NO: 40059 - protein, 493 aa, Solobacterium sp.
MKKCKTPSYIAEYELKPAKTGGFAVLHHAENAAVSVYNLCLKEGLKRMHKVINDPEYTALCREYKYRKQRTEKTDDRRKQFAAVYDWHSYSEYSMHAYVASLHPKYCTLGIDECQKLATRAFRAIEKVRTHQAGKVRFLSHAKGTSFEGKSYKSVLHFNRSKMVVCLGRGNEYEIIIPRDDPYRMQCLKDRVKYVRILKRIIRGKERWYAQLVMEGTPPMKNLKFGEGTQGLDEGTSTIASVTDDSALLVELAPECKPNEAKMKRMQRAMDRSRRAMNPENYNPCGTIKKGRHEWKASRRYRKLKQKYAELSRKQQVYRKQSHCILAKLLIARGSDIRVERMSVKGLARRSKKQAINSKNGRIRSKKRYGKTIQRRAPALLISIIDQKLHQTGKSILYVDTWKVKASQYNPLDGTYKQKDLKDRMILLGKDASGQDIIVQRDLLSAYLIQHTNADGMHINERSAYDDFQNFKSNQDAEVDRLHKTGQLSWYIN

SEQ ID NO: 40060 - protein, 367 aa, Actinomadura sp.
VTHSFRRSFRYRFYPTADQAEHLSRTFGCVRLVYNMALEARVQARRGGRPMTYKESSAMLTGWKRDRELALLNEVSCVPLQQALRHLQTAFGNHLAKRAGHPKFKSRKRSRASAEYTRSAFAYTEGRLTLAKMKEPLHIVWSRPLPDGVTPSTVTVSRDAAGRWFVCLLCQVTIRPMEPTEQAVGLDAGITALVTTSAGEKVFNPRHERCDRRRLRKAQRALSRKQPGSANHAKARLRLAHIHAKVADRRRDFLHKLTTRLVRENQAVVIEDLNVKGMVRNHRLARAITDAAWREMRSMLEYKCSWYGRELVVIDRWFPSSKRCSECGAVQEAMPLGVRTWACLCGAVHDRDVNAARNLLAVGLAER

SEQ ID NO: 40061 - protein, 378 aa, unknown
  TnpB Polypeptide
MMVSEKIRLFPTPDQETKFKQFAGAARFVYNYALGLKIEYYREYNESLTTQNLIDFVKSLKYETERYAWLLDVPEAITKQAIKDLDTAYKNFFKRGNIGFPKFKKKGKCTESFYQRTDKFRQVDSEHIKLTGIKEFVRIRPNNIVFPAYNPRVSFDGKYWYLSYSFEAEEHKPNLGGATIGVDLGIKKLAVRSDGVEVKNINNSPRVKTLEKRLKHLQRQVSRKYEQNKNKGGDCKWDKSKNIIKLEKQIKLLHRKLKNIRNTHIHQATYDIVKTKPYRVVVEDLNIRGMMKNKHLSEKIAKQGLNKFVTYLEYKCKFYGVEFIKADRWYPSSKLCSCCGNKKINLSLSERVYVCDSCGLKIDRDFNASLNLAKYKIS

SEQ ID NO: 40062 - protein, 369 aa, Mycobacteroides sp.
VAEKVVKRAYKYRFYPTDEQAAELSRTFGCVRLVWNKALAERTRAYAVERRKTTYVQASAALTEWKRSKELAFLNEVSSVPLQQTLRHQQTAYANFFSKRAKYPRFKSRKKSRASAEYTRSGFRWRNGQLTLAKMTTPLDMRWSRPLPDGAEPSTVTVSCDSAGRWHVSILVETTIGALPKTGSMVGVDVGLTSLAALSHGEKIVNPRHERRDRRKLAKAQRELSRKEKGSNNRDKARRKVARTYARIADRRTDFLHKLSTRLIRENQAMAIEDLTVRNMLANHNLARAISDGAWRQLRTMLEYKADWYGRDILVVDRWFPSSKLCSECGALVEQLPLNIRQWTCRCGAVHDRDINAAKNILAAGLAER

SEQ ID NO: 40063 - protein, 407 aa, unknown
  TnpB Polypeptide
MAQQPGNGMAGRCTGAPLAAIAQEFGASLCQFFSQRAACPRFKKKGQSERFRYPDTKQIKLEQGNSRLFLPKLGWLRYRNSREVLGTVKNVTVSQLCGKWFVSIQTEREVEPPLPNGDAVGIDMGIARFATFSTGSYLAPLNSFTQHETRLRKAQRAMSRKTRFSNNWKKAKARIQRIHARIGNVRRDYLHKATTAISHNHALVIVEDLQVRNMSASAGASLEAPGRRVRAKSGLNKRILDQGWFEFRRQLQCKLAWNGGWLLAVPPRNTSRSCPDCGHVSRHNRQTQAEFRYVECGFEGHADVVGAINILRAGHAQLAYGEDVSHATPAKVKRAASAKQEPTEATLARFDHSPERRKNLRSSGRGGCQNPKSFAHMPDRILHPREIPCDKIARHILHNRITLPLDR

SEQ ID NO: 40064 - protein, 423 aa, unknown
  TnpB Polypeptide
MHRGYKFRLKPTALQAGLLRRAGGCCRFVWNWFLTQKDAVYRASEGRVHNGYHDHAAQLKPMKLQFPWLKTDCLSQALQQTLLDLDKAYTAFFEGRSSHPKKHRLEDGDSFRLPQGFERNGQAVFLPKIGWVRCIITRPVLGTICHATISRDGDQWFISFCAEVSAPADTKRERTLQQEAAEFEAERLAVAAGGVIGIDWGIAQPLTLSDGTVIVLPRVTVAEQARLAVLQQRVSSKKLRSANRRKAVAKLNRFLQRIRRRRLDALHKVTTDLAKNHRLIVIEDLQVDNMTASARGTVEAPGSKVAQKAGLNRSILDLSPALFRRLLTDKCERFGTRLVVVPAHHTSQECSCCHCVSSLNRQTRAQFSCVACGHTENADSNAAKSILARGIALISPEAGHASVIWHASGYGSGSAAGTTLIAA

SEQ ID NO: 40065 - protein, 402 aa, Anabaena sp.
MLVFEAKLEGLDEQYRKLDEAIRTARFVRNACLRYWMDNKGVGRYDLNKFCAVLAADESFPWVSKLNSMARQSSAERAWSAIARFFDNCKKSKPGKKGYPKFKKEQTHGSVEYKTCGWKLSEDRRYITFSDGFKAGTFKLWGTRDLHFYQLKQFKRVRVVRRADGYYAQFCIDQDRVEKRKPTGKTIGLDVGLNHFYTDSEGNQVENPRHLLKREKSLKRLQRRLSKAKKGSKNRAKARNRLSRKHLKVSRQRKDFAVKLARCVVQSNDLVAYEDLHLANMVKNRHLAKSISDAAWTQFRQWVEYFGKVFGVVTVAVPPHHTSQNCSNCGEVVQKSLSTRTHVCPHCVHTQDRDWNAARNILELGLRTVGHTGSQVSGDIDLCLGEATPPNKPSRGKRKPKE

SEQ ID NO: 40066 - protein, 418 aa, Anabaena sp.
VKTSYQYKIKPNREQAEKIDKTLEMLCCQYNYLLAQRFDWYEQNRCPVDRCPLICHLPELKEQPNYYNQKASLVQLKVGRPWYKEIHSQVLQEVPKKVELAFDRWLKGDVNGKKSGKPRFKGKEQYKTFTYTQFKQHHFVNNKITLSKIGEVKVIVHRPIPDGFDIKTVSVTKKADGYYVTLSLDDKTVPTVKPDFHPDNIVGIDVGLIDFYVASDGARIAAPKYLRKAERKLKSAQRRVSRRKKGSNRRRKAIQKLGKQHKKVADTRRDFHWKTAKSLLDKYDVVAVEKLNIKGLAKTRLAKSINDAGWRQFVNILSIKAENAGLKVISVNPNGTSQECSRCGHKVKKPLSQRIHNCSVCHTIICRDLNAAINIKNRGTHGLKAQLMSGVGVIEKPTLTLKGECVEYITDIHEKQRE

SEQ ID NO: 40067 - protein, 178 aa, Bacillus sp.
MPFMVNGRSTRLKVRALLTDKYNRNFELLKHKLGTLRITKKSAKWIAQISVTIPINEKMGTKILGVGLGLKVPAVAITNDDKVRFFGNGRQNKYMKRKFRSIRKKLGEAKKLNALRQLDNKEQRWMQDQDHKVSREIVDFATNNNISVIRLEQLTNIRQTARTSRKNEKIYTLGHSFV

SEQ ID NO: 40068 - protein, 272 aa, unknown
  TnpB Polypeptide
LRTATSPFRAGRKSDAIFQVEVEKKPLERTGKVVGIDLGVEKLVTTSDGVVIENPKVFDKVEKRIKILQKSLSRKKKGSRNYEKVRKKLAKIHEHVKNLMNDYIHKLMLWLVEQYDEIYVEDLNVKEMVEDSKSKTLRKHILQSNFSTFMIHLSYKASSASRRVVKVDPRNTSKTCAKCGHVKNDLTLADRVFSCPNCGWTVDSDYNASLNILRAGSGLPLEPVYRKPLYTFPSQRGCIVGFLEEAGILTARWGCPVFEDGVVHLKNPNKLL

SEQ ID NO: 40069 - protein, 379 aa, unknown
  TnpB Polypeptide
LETLLEQHREVYNAALEQCRNAYEATGQHQSALSQWPYFRDWRNAFPDLLLNASSLQHTLRRVDKAYAAFFRRVKAGQTPGHPRFKGAPRFHSVEYTYGDGVKLEYDDYYDRFVLKVQNVGSIKVKLHRFLPDAAKIKHVVITRKALGWYVGLQLEWPDPLPVEPNGLPAVGADMGLLRLLTLSDGTLIDNPRWLRQSLDDLRRAQRRLARALKGSQNRKDRRQIVARLHEHVANVRRDFWHKLTHWLVHRYGLIVLEDLNLAFMTRHEHLALSAHDAGLGRFRQLLDYKAAEAGSHVTTVNAAYTSQACSGCGARVEKDLSVRVHRCPECSLELDRDLNAARNILNLAFSPPGLGGQALNVARRGERSLRSPQIDRGE

SEQ ID NO: 40070 - protein, 238 aa, Bifidobacterium sp.
MGADGMVRRAYKYRFYSTPGQENLLRRTIGCCRLVYNKALAARTEAWTARRESVSYNQTSTMLTGWKKTEELAFLREVSSVALQQSLRHLQAAFSNFFDGTADYPRFKKKSRGGAATFVRSAFTWDGRTLRLAKMDKPLDIHWSRPLPDGAYPVNVTISLDSAGRWHVSILVEEHVTALPKPKARSASTWAWNPSPRSPPARKSTTRGCARGTPSAWGKRNAIWRANGKEATITAGPC

SEQ ID NO: 40071 - protein, 278 aa, Bifidobacterium sp.
MGRPHSQARQDGQAARHPLEPSVAGRRIPGQRDHILGFGWPLACEHPRGGTRHRVAKAEGKVGVDMGVESFATLSTGEKIDNPGLRKRNAKRLGKAQRDLARKRKGSNNHRRAMLKAARIQARIADRRKDFLHKLSTRIVRENQTVVIEDLAVKNMSRRCKPETDPANPGHYLSNGQTAKRALNRGITDAGWRMFRTMLEYKAAWYGRDIVVIDRWYPSSQICSTCGKNTGRKPLNVRAWTCPHCHTTHDRDVNAAKNILAAGLAVNVCGDQRKHHNN

SEQ ID NO: 40072 - protein, 393 aa, unknown
  TnpB Polypeptide
LYPNREAEQKMSRTLEICRRTYNELLSIRQTTYEVTREGLSKFDMNNCIRYGIDADISQVHSQVLQNINDRIDKAYANFFRRLKEKRSGKNIKVGYPRFKKRYKSFTYPQSGFNLENNTLFLSKIGKLQIRIGKKQNRPKGKVMIKTLTIKREPTGKWFVVFSCIEKAVKKHRVNDKKIGIDVGLEYFAMLSDGRKIDNPRFMVTSERRLRKLQRRLSRRKLHGKNYDKAKQEVALLHEHIANQRYDFQHQFSHRIIERYGIIAIEKLNIKGMIRHPYLAKHISDASWGSFVKMLGYKASSAGNRVIEVDPKGTSQICSICGNKVPKTLAQRWHRCPHCGAVIQRDLNSANAIITLGTRGKYACGDRSSVLVAQKRLEHSLSAKQEATQLVGW

SEQ ID NO: 40073 - protein, 482 aa, Planktothrix sp.
VPASSLAEIYSLNAQQLISHNSMKVTYQYQFYPDTNQKISLNQWLRICRYWYNRQLGDRFDWWEMNRTAINACPLKTSIAAPREKPNYYHQKQQLPILKKDLVKVFHSGELLDFKQVDSTVLQDVSKRIDKAFERFIVGDGKGTKSGRPRFKTEGDYRTMTFSTAGNDWIKLIRKNWVYIRLPKLGIVKVRMHRPIPSGFVVKQVSVTRKADGWFIQLILEDISVPQFTPDQVIPNWDNSIGLDAVLHEDVYLATSEGEKLPSLKPLRKNQSKLDRISTKRNKQKRGSKSRRKSAKKEARQHQKIARSRKDFHYKTAHKLARSGAKFFFHEDLNLKGLTKRNKVKQDEYGKYLPNGQSAKSGLNKSWLDAAFGQFFTTLNYIVEKTGAVVISQKPAYTSMVLSYRNEMIFTDCSIRDYWDEQNSLMVDRDINAAINLKRLGLGIFPSIKRRSGNLSVVGSMDNSTIKEILHTLHRAAKKPTS

SEQ ID NO: 40074 - protein, 215 aa, Planktothrix sp.
VSLSPRISLTSNPCNPFLLKLSPEPISRTISASSNLHIQKLCFKLDKLVSQLSKAKCKQKKNLKKAASRLRCKIKNLVKELHHKTAKFLVENFDVILLPTFETSQMVSKSRRKLRNKSVRQMLTLSHYEFKQFLKWKSWENHKVVIDCNEAYTSKTVSWTGEIINNLGGAKTIKSNSTQLKMDRDLNGARGIFLRALVDTPWLRQFLTYVFVSKR

SEQ ID NO: 40075 - protein, 411 aa, Hapalosiphonaceae sp.
QFVRNKVLRYWMDNRGVGKTEMFRYNTLLRKEFKFVEDLNSHACQTAVERVLKAVNRFYDNCKKQIPGKKGYPKFKKNTRSVEYKVSGWKLSLNRKHITFTDKKGIGTLKLIGTRDLNFNQLEQIKRVRIVRRADGYYVQFSVQLDPRDTIKPLIPSQKAVGIDVGIKYFLADSQGNTEPNPQFYRKGEKQLNRINRKKSKKYNKGNEANKRKRGEASIGDPIGPQINHFALSLPSFSQAKCGKPQSRNYHKARVRYARKHLRVSRQREEFVKRVALRLIKSNDLVAYEDLNVKGMVKNRHLAKSISDAGWSKFRQWLDYFGYKYGKITIAVAPHNTSQNCSNCGEKVQKSLSTRTHVCNYCGFVEDRDINAAINILQKGLSTVGHTGSYKLGEFDPLAPLEKSCGVTIGL

SEQ ID NO: 40076 - protein, 398 aa, Crassaminicella sp.
MIRTYKVMLKPNNKQRTKLFECAGVSRWTYNWTLGRQKENYKNGGKFLNDSVLRKELTQLKKTEEYKWLNEYSNNITKQAIKDACNSYKRFFNGYSEFPKFKSKKRTKPSFYQDIEKIKFTDTHVKLEKLTTSKKKNRQKLNWIKLGEKDRIPTGENIKYINPRVTFDGLNWWISVGIEEEIEIEDKETEPIGIDLGVKDLAIISSGDKYKNINKSLKMKKLIKKYKRLQRQISRKYEMNKTKIEGGENRYKYQKTKNIIKAENKLRKLYRKIKGLRDNYIHHITTSLVKAKPKYIVIEDLNVSGMLKNKKLSRAIQEQSLREFRRQLEYKCNWYNVELIIADRYFPSSKLCSKCGQINEDLKLSDRIYKCDCGNAIDRDYNASLNLRDYPKYDKSVA

SEQ ID NO: 40077 - protein, 396 aa, Crassaminicella sp.
MGFKKNKDSVILCKKVKIYPTKEQIANIERDSFLCKMLYNTYLTQRKEYYNCYNKSMKMTEQRSQIKLLREQNTEYAKVYAKHLHAVCMDLDEDYKGCIKKRSKGEKAKLPRYKDKNYFYPLKTPKQYIKIKEDKIKLGFYELKVDVNEIPTNYGEVWISKVRNKYIISITYEANKKENNNNNVLAIDLGISKLVTGINQNGKVIEIINPRYDKYWNKKIDKVRAMRDTKKKGSKRYKKLTRTLKRLYENRRKQQEHFIHTITKYLVLNNKELILGDLSQEQMIKKSNLAKLNRSIKENWALGKFKTFLTYKAKLHDVNIVYINEAYTSKTCSNCGNQQDMRLSKRTYTCECGMTLDRDINSSINIFNKYKENSMLNYKNINRVTTLHFHYGKLVA

SEQ ID NO: 40078 - protein, 352 aa, Proteobacteria sp.
MAFGAARWTYNKCLERIIKAECKVNVKDLRKLCVNNANINDKWLLDTPYDVRDEALRDLYKSYQVDFKSGKAFKKQFRSKKDGFQTIVIHKKHWNHKKGWYGALKTGLKSAEPLPKTLYTDSRLQMTSLNEFFLVIQTPPQYDNQVREDIVALDPGVRTFQTCYSPSGKVTEWGNGDMKNVMRLLKAHDKLQSLCTKVNHSKRYKLQKAMKRILKRVRNRIDDIHRKCIKWLLDNHGLILIPVFGVKKMASSKCLQKGTRRALYAWSHFLFRQRLLDKAKSYQKARVLVVDESYTSRTCTRCGCVNSKYSSKSFLCAKCGLDLDRDINGSRNVLLKFLTEQGLTASALWPTT

SEQ ID NO: 40079 - protein, 531 aa, Streptomyces sp.
VVPGPSGVSVRDRLKHLTAEDEAVLRLVGDHLGTLASRDLRERCAAGLEHDGEQWAGRKRALTQVSSSRWAGSITKATHDQWALARRGQLAHMQSLEAGVRTITHRLSLPVGEAGGKRAPGGYRSKREWFAKGRRLQVLTDRLQAARADWEAGVVHVVRGGKRLLNTRHHLESAQLTAEQWRTRWRTGRRFLQADGESGKRFGNETIRVSPGGEVSIKLPAPLAHVANAPNGRYVLACRVAFAHRGEQWADRVQASRAVAYRIHEDTARGRWYLTASWTTPAVETVPLSAARTNGLVGVDTNADHLAAWRLDAHGNPVGAPHRFDYDLSGTAAHRDAQIRHALIRLLHWAGRHHLAIAIENLDFTAETTREKHGRRKRFRKLIAGMPVARLRARLVSMAAELGITIVAVDPAYTSRWGAQHWHKALTSKNKKPTRHDAAAVAIGRRALGHPIRRRTAPPPAHRSDEQGHRTVQAGSGIPGREEPRPRVPGPRTRSLRAGREAKAGDQDAQHRSGRPAEHEPWQQDSLPLRL

SEQ ID NO: 40080 - protein, 397 aa, Nocardia sp.
VRIGLLVGANGYVRVVQLRYNFRLYPTPGQQIALTRAFGCARVVFNDGLRLRQQARESGSPYIKDSALQTMVITEAKKTPERVWLAEVSSVVLVQALADLHAAYRNFFASANGKRKGPKVAPPRFRSRKDNRQSIRLTRNGFGLRPNGKLYVAKVGEVRVSWSRALPSVPSSVTVTVDSAGRYFASFVVKTSTEPLVPVTSEVGIDLGLTTFAVLSNGKRIESPRFFRRAERRLRKAQKVLSRKEKGSANRAKARLGVARAHAGVADTRRDWAHKQSTAIIRENQAVFVEDLCIKGLARTRLAKSIHDAGWGVFTRMLQEKAVRYGRIFGKVDRFFPSSQQCSACGWVDGAKPLGVREWTCSCGVSHDRDLNAARNILAAGRADKFNACGGTVSLSA

SEQ ID NO: 40081 - protein, 382 aa, unknown
  TnpB Polypeptide
MRAVIKAVKQNYSPTREVLSVLESFRMMLNECIRIGLETNVTSMKALSSKTYEHLSSYRIMSYYKPCASSVAAGILRQYRKTKRKNPHTKIPYCRRERLTLSYGFKIRGHNLLLPFHVHEQIQIALTSHTLAVLAGFNVRSVTLTARTLSISFSKETAEIEPHGLIGIDRNLNNVTIADSNGRIKQLDLSEATRIKAQCRETKRYMTRNDVRLRRQVYGKYGRIQKNKVQQILHHASKLIVEQAKRNQHGIVMENLKNIRRLYRKGNGQGKKYRATMNSWSFAELQRQIDYKARWEGIPVNYLPPGGTSSKCSKCGSRMTRIPEENRMLQCPSCGYTIDRDMNAARNILARGLRFSPVASPVEAMVTEPVHQQVIPQSMETS

SEQ ID NO: 40082 - protein, 491 aa, Microcoleus sp.
MATLTYVKGLPTPAEELNSLGLTEFEMFLSAYSPVFHKAACETANHLLSGQMFNKSSWNTYLQKTFGISKRHANGVISHAQGAVDASKEHRKRHIKTLEGKLKSINSWITKSEKKIADSTKFYAKKNWQKSQTGCLFPLSCSAKHRDTNWQNLKFQIHHKKRRAYQLTKQIEHLKVAPIQTVIPKDQAFVVGSKDESFGNQVCQWDGDILKFRVPACLESKFGKHVQTKLGNFDRNINRLPQDGAKTWHFYRKNGKWNAAVQFTPAPVKRVSRHSAYGCIGIDMNPGSIGWAYVDGDGNLQAHGQIPLQMGLPSGKQDAQIVDACLQLATLADTFSCPVVCEELDFSTKKEQLSERGRKYARMLSGWAYSRFYELLESILSNRGIYLMQVNPAYTSVIGLVKYARQYGLASDEAAAMAVARRGMRLTENIPGFITAYLDVKSGKHVWSLWNQLNTLIKKSRIRRHSFYAISNWESLVKQWTEQSVQSKRKC

SEQ ID NO: 40083 - protein, 195 aa, Caldalkalibacillus sp.
LPACDSKVGIDLGVKDFATLSTGEVIPNPKYLKKYEAKLIRWQRKLSRRKKGGSNWHKARLKVARLHEKVANCRKDFQHKLSTRLIRENQVICLEDLSVQNMQKNHRLAKSIADVSWSTFCTMLEYKARWYGRTVVRVDKTFPSSQICSVCNYCHKEVKKLGLREWTCPSCGTHHDRDINAAKNILQEGLRLLAS

SEQ ID NO: 40084 - protein, 168 aa, Caldalkalibacillus sp.
MQKAYRFRLYPNQKQQTLIHKTFGCCRFVFNHFLARRKEVYETERKTLGYNACSSLLTQLKTELDWLKEPDATALQTALRHLDDAFKRFFREKKGYPRFKSRKNPVQSYTSKNNNGSIAIQGNRIRLPKLGWVKFAKSRDVEGRILSATIRKNSSGKYFVSVLVETEI

SEQ ID NO: 40085 - protein, 394 aa, Thermoanaerobacterium sp.
MIKTYKVMLLPNNKQKTKLFECAGVARWAYNWALEQEQISYKNSGKFINDRELRKRLTELKQTEEYKWLNNYSNNITKQAIKDACTAYKNFFEGRNNFPKFKSKKRSKQSFYQDTVKIVITETQIKLEKLTTSKKKNKQKLNWIKLAEKGRIPTGKNIKYSNPRATFDGLNWWLSIGVEIQQEVNESLTEGIGIDLGIKDLAVVSTGQKFKNINKSKKVKKLEKRLKRLQRKLSKKYELNKIQIEGGEARYRKTKNIKKLESLVLKIRRRLKNIRHNYIHQITTSLVRTKPKYVVMESLNTCGMLKNRKLSKSIQEQLFYEFKKQMEYKCAWNNIKFILADRFYPSSKTCSNCGYIKDNISLSERVFVCDECGYEIDRDLNASINLKNYGKSIA

SEQ ID NO: 40086 - protein, 451 aa, Aulosira sp.
VIVLVKTKKEKKTKPLMGIQQNLIYCDTDTKAILKFLCEQSNSLYNCGVYWARQIFFKTGRIISKFDPVYEVGNNIHAQVMPSVPAQQTLLSVSEAFKSFKGLRELFFKGELDQKPKPPNYRTPGGLFKVAYPNVGAGKPTLLENGLIRFPLGLQINRWFKVKEFFLPLPINLDFNKVKEFTILPKNGKFYLECSYEVERVNIKPDINQALSIDLGTSANLMACVDTLGNSFLVDSRHAKSMNQLYNKRVANYKEGKPQSYWDNFLDKITRKRNHQMRDMVNKAARIAINHCLVNGIGTIVIGWNAEIKDGADMGRKSNQQFVQMPLAKLKERIKQLCGIYSIRYVETEEANTSCASYLDGDSLPKYGEKPDGWKASGKRIKRGLYRSKDGSLINSDLNGSSNILRKVARNLGIDLSRLGRRCLTSVRRIRLWATKSNLTLNNPRAFTPGS

SEQ ID NO: 40087 - protein, 392 aa, unknown
  TnpB Polypeptide
MQEWSIETMFKSFSVMLHPNNKQRTKLFQCFSVSRFAYNWALNREQENYKNGGKFISAFDLEKEFGLLKKLPEYNWLNDYSSVIPLMAIIDACTSFKNFFKGNSRFPKFKSKRDLRQSFYVHSGKIEFTDTHVKLMKLSDSTRKNRRKLNWVRLAEIGRVPIHCKYSNPRVTFDGINFWLSVAIEVDEGNEIPTNEGIGIDLGIKDLAICSNGITYPNINKTKEVKRLEKKKRRLQRKLSKKYITNKYEKTKNTLKLEKELLKLNHRLTNIRHNYIHQVTTEIVSRKPMFISLEELNVLGMMKNRHLAKAIQEQSFYSFKTTLSYKAKSKNIQIIEVPRFYPSSKTCSVCGTVKSDLKLSDRVFICPECGNKMDRDFNASMNLKNYGLSTLK

SEQ ID NO: 40088 - protein, 384 aa, unknown
  TnpB Polypeptide
MSKQAYKFRLYPTTKQAQALAWTVDRCRELYNAALQERRDAYRMAGKSITYYDQANQLPEIKTIKQEYQDIHSQVLQDVLRRVKRAFDNFFRRCKNGEEPGYPRFQGKNRYDSFCYPQGGYSLTADHRVCLSKIGSIKVKLHREIKGTIKTCTIKCEGECWYVVFACEVSVEPLPENTQAVGIDLGLLHFATLSDGRTIENPRHFRQAEKKLARLQQSLARKKRGSHRRKKTVKLVAKAHRKISSQRRDFLHKHSHKLVNAYGTIVFEELQPATMSKRPKPKQGEDGTYLPNGAAAKGGLNKSIFDAGWGQFQQFCTYKAARAGRAVLFVNPKYTSQVCSGCGTVKKKELRERWHRCECGTELDRDHNAAINILRLGRSHQARA

SEQ ID NO: 40089 - protein, 390 aa, Actinomadura sp.
VQLRYQFRLYPTPGQQQLLARAFGCARVVFNDALRARQQAHAAGLPYVSDGDLSKQVITQAKKTGERAWLGEVSAVVLQQALADLNTAYRNFFASVSGKRNGRKVSPPRYRSRKDRRQAIRFTRNARFTVTAGGRLRLPKIGDVRVRWSRDLPSAPSSVTVIKDATGRYFASFVVETAGEPLPEVAAEVGIDLGLARFAVLSDGRKITSPRFLRRAERRLRKAQQALSRKQRGSANRRKAVAKVARLHARVADARRDHHHKLSTRLIRDNQAVYVEDLAVNGLARTRLAKSLHDAGWSTFVAMLEYKAKRHGRTFAKVDRWFPSSKLCSACGAVAESMPLSVREWACPCGTVHDRDINAANNILAAGRAERQNACGGTVSPGRLAEGRTR

SEQ ID NO: 40090 - protein, 516 aa, unknown
  TnpB Polypeptide
MSSVTRTIPLRPFSCRDKKTGTGIELHNVLEEIRDDATLCATEAFKHITVENLEQVSQYDGLKPAVAGRRMGIRFSTSGRGTGRSRFECMVQEYTVSQLRSWRERRKAHIGKTDKYVSTGFKRTANPNKPDFLKPRLALSATDKNYHTIRLNNSIVELDMVVNQRWVTFKFASPQRFRETGVRVIAPTISIDDKNRVMFNWHFEVPVERAPFSDQYVIGVDVGIANHTTAVVLNNKTGEVVEASFMNRRVRSLENKIKRAKTQIAVLKKRGRDKEADPHRQALSNRRKELAILIGQEIADFSYRYDNALVAVEDLSHMVNTMKHGRWVRGLIVKRITDMVESNGGRVMTVPAAYTSKKCHQCGESLDMTDYHTPVCTICKVGWDRDENAAANIAGKLKDKHKKACTTRKRHASKKRRKNSKGSLRPLKHPLKNMGPTPKAPQNRPKPNNNHCVHHKHTVIKKREGGVFPVLCAAGQSSLCGVSVPAVASRNEVSDKKPHDYPINRYKLMGCVYTKE

SEQ ID NO: 40091 - protein, 225 aa, unknown
  TnpB Polypeptide
MGMYLTVKQQVKHLSKSDYNILKELSHVAKNLYNQGLYNVRQHYFENKEFLRYESNYHMLKASDNYKLLNSNMAQQILKEVDGAFKSFFGLIRLTQKGEYSFKDIKLPGYLKKDGFATLVIGFVRTNDNKLKIPYSNAYRKTHGPITISMPPILVGKKIKEIRIIPKANAKFFEIQYTYEVAVEERKLNIDNALAIDLGVNNLATCVTSTGKSFIVDGRRLKSIN

SEQ ID NO: 40092 - protein, 391 aa, Azotobacter sp.
MLKATKVRLYPTSEQAEFLHRQFGAVRFVYNSALRILSHRYKHHGQSLSARHDIKKLLPVAKTSRKYGWLKEADSMALQQACLNLDKAFQNFFNPRLKARYPRFKSKRGKQSSYHCVGVKVGDDWIKVPKLGPIKARIHRPQGGKLKSITLTRTVTGQYYASLLVDTGEAAPAPLTTLDAGKVLGLDVGLTHLLIDSNGAKIDNPRFLRRARANLRRKQKALSRCRKGSSNRAKARLKLARAHERVANARNDFQHKLSHTIVGDNQAVIVETLQVKNMLKNGKLAKHIADAAWHSLLIKLEYKAKAQGRHLAKIDQWFASSKTCHVCGYKAESMPLGVRAWQCADCGSHHDRDVNAALNIKRQGILKLKAEGLSVSAHRGLHKSGVSPVAA

SEQ ID NO: 40093 - protein, 374 aa, unknown
  TnpB Polypeptide
MMMTRTIKARVENALDDLLPTVEASTNAYNYVCKTGWDDKDHNSVSLHHKTYQYCKQTLPSALAAVVRVQAAESLKSAHELSKKGKKVTCPQSDRISIRYNATCHNVMFDKGLVSLLTISGRKKFKVTVPKYFEKYLDWRRRSATLLVRRGKVFLNIVFEKDVPDVKPTTFIIGVDRGIKKVAVTSNGLFLGGGELKQKILKIGKIRKALQEKGTKSAKRHLRKLSKKENRFRRDQSHCMAKKIVNSVPKGTTIVLEDLTNIRSSGKKFRKEQRYWLNSWNFFQLESFLKYKSENKECVVEHVDSRYTSQKCSKCGHIERGNRTKQSRFKCKHCGYSLNADYNASINISKNHQDAIRHLGGASVNKPIVASLTA

SEQ ID NO: 40094 - protein, 396 aa, unknown
  TnpB Polypeptide
MCRYRLLPTPAQQAVLRGHCAHARFTWNLAVEQNQHWRLGRPGAPGYLEQCRQLTAARAEHPWLAAGSQMVQQQALRDFARALKAFIDPGNPARRPTWRKAGRDEGFRIVGKRGRQWDVRRLSRKTGEVWVPKLGWVRFRWSRPVPPGVKSYRVTMDRAGRWHIAFAVLPEPVPAPGNGQAVGIDRGVAVSAALSTGDLLHVPGLTAAERTRLRRLERKLARARRGSSRRRQVRLAMARLRARETDRRKDWAEQASTSIARRFDLIRVEDLQITNMIRSARRTPADPGRRVRQKAGLNRQILRAGWGLLVRRLQDKAPGRVEKINPAFTSQRCSACGHAAAESRKSQALFSCVACNFTLNADVNAARNIAAGHVVTARGGDRAAGPVNREPQLLAS

SEQ ID NO: 40095 - protein, 368 aa, Gemmatimonadetes sp.
MIKAHKIRLHPTPEQANYFARAAGTARFVFNWALAEWKTQYEAGGKPNAMALKKQFNAIRREQFPWSYEVTKCAVEGAFRDVAVAFKNFFEGRKAARRTGYPKFKSKKRSRQAFYLANDKFTVGDHWIDVPKLGRVNMAEKLRFAGKILSARISKTADWWFVSITVEMSDVVPENHCPPVGLDVGLNRLATLSDGRRYENQRPLRHLLKRLRRLNKELARRTKGGKNWQKTKSKLARLHYRIACLRADLLHKLTTEVAKTSGLVAVEDLHVKGLLQNRCLSRSFFDAALGTLLDLLESKVPRAGGTLVKVGRFYPSSQLCHCCGLRRADLTLKERIYLCTNPACGYTGDRDENASLNILQEALRLVGP

SEQ ID NO: 40096 - protein, 361 aa, unknown
  TnpB Polypeptide
MLGECCFVWNHALSLQKRYYRMSGKYISIGRMQKHFAKRIKRNLLHSQTVQEILERLDESYSRFFKKRSKRPPKFKRFDRFNSFVFKQGGFMLNGNIFTINKGKKRFKFSYSRHYEGNIKQIRIIRETCHRFSLIIVTDHNPVNSYRKTHDGASVGLDFGLKTYLTKSDGSEIASPLFFKRYQDKIKKCGKRVSNAKKGSNNRSRRLFELQQVHRKINNLKSDFQWKLAHQLCKQYDFIFLETLNIEAMKHLWGKKVSDLSHSMFIDKLKYVASKYGVTVHQIDKWYPSSKVCKCGYIYKDLSLKERSWECPACGSKNERDLLASQNILRKGISELESMDKSNGRKTEVPYVIIQESHSLQ

SEQ ID NO: 40097 - protein, 404 aa, unknown
  TnpB Polypeptide
MIKAFKYRLYPTRKQAAVLQFTLDLNRELYNAALQERRDAWRMNKVSITYQMQSAQLPEIKEDRPEYNEIYSQILQDTLKRVDKAFKAFFRRVKKGEKAGYPRFQGRERYDSFCYPQIEKLKGNPTVRIENGKVILPKIGHVKVKQHRPLKGKVKTATIKREGDCWYAVFTCELDAQKKLPYTDLAIGIDMGLKHFYTSSNGDVVDNPRFFRKSHGRLKKQQQRLAKKKKWSNRRKRAADRVAKAHKKIRNQRRDFQQKHSRLLVDTFEIIVFEDLSLHHMVKRPKAVVSENGKYLPNGAAAKAGLNKSIVDAGWASFIELVKHKAEYAGVTVMQVDPKKTSQMCSACGKEGEHKDLSVRTHSCVHCGIVLDRDHNAAINILDRGLGRSPREPVDTGTFRVAIA

SEQ ID NO: 40098 - protein, 384 aa, unknown
  TnpB Polypeptide
MISYKFLMYPNQEQRDKLELSLDVCRRTYNNLLEGLDEGFTKNELANYLLDLKVANPEMNEVYSKVIQVENDKLFSNLSGLSACKKKGNKVGRLRFKGKGWKKTFTFNQSGFKLIDNKKLHLSKIGEINIKVHREVIGKIKQVIIKREINKWYAIIQTDASIQITKGDKEIGLDFGLINFYTDNEGNKVSIPNNIQQIQKRLKKSHRNFSRKKKGSNRRRKALNRLQNTYQKQTNMKNDFFHKLSHNLVINNKLIAIEDLDLKGLMMNSHNAKNYQISSWKTFITKYLAYKAESAGCKILVVDRFEPTTQKCSNCGSLKKLELSERTYNCSNCGLSLDRDTNSARNIIKYFKSGTDFLGEDSSLLEIAKESSVKREAKTLTSQS

SEQ ID NO: 40099 - protein, 297 aa, unknown
  TnpB Polypeptide
VDFKKGTLTIPKAKDIPAVLHRSFKETVKTVTVSMTPSGKYFASLLVDTSVQELPATPIQDDTALGIDLGIKSLAVCSDGRTFDNPKNLQRSLDRLKLLQKRLSCKQKGSANRNKARIRVARLQEHIANSRKDNLHKITHALTHDSQVRTICLEDLNVKGMQRNRHLAQAVGDASFGMFLTLLEYKCSWYGVNLIRIDRFAPSSKTCGKCGYVYKGLKLSERGWTCQECGTQHDRDFNAACNIKEFGLKALPTERGKVKPVDCPLVDDRPRVLKSNGRKKQEKRGDIGISEAVKSLV

SEQ ID NO: 40100 - protein, 374 aa, Sphingobacterium sp.
MKTIFRTYRFELQPTQEQQELLDKHFGCVRYVYNHFLNEKQAQYQADKKSDNYHTQAATLIALKNTEKTIWLKEVNSQSLQSALKSLEAAYVNFYRGHAKFPRFKSKRKKNSFTIPQFAKLEDGLFYAPKFKKAIKVNSHREVKGKIGKCTVSKMPTGKYFVSILSEEHYQPKEKTGAACGIDLGLKDFAITSDGVKFKNHKYTKKYEKALAKAQKHLSRKTKGSNSFERQRRKIARIHEKISHSRNDHLHKLSHQLVSEYDIIALENLNVEGMVKNHKLAKHIADASWGTFVRFIEYKADWNDKQIVKIDRFYPSSKTCSVCGWINQRLTLSVREWTCQNGHVLDRDLNAAKNILKEGLKIISSGTGDYTDGD

SEQ ID NO: 40101 - protein, 405 aa, unknown
  TnpB Polypeptide
MSRYIVRTYKVPVPRELDSLCSELNRTAARIYNKTMSKVQKIKSKKGFWLSPGAAQKYILRWADTVNIHTHSKQAMVQQYFQALSSYFNAVRTKSDLKPPYKKKNFMPFIWKDTAIKLSPDGVLKLSMGSSQEPILIQTTLPADTKIRQAKLVYEDEKYYLHLAIEVKNKHKKNQTKKVMSVDPGILRPITCFDGFEVISYHGGILNSVIRYRNKKLAEFQQMLSRCKKGSRRYRKLLKAKKRMLRRIRYQIKDILHKITSNFLKICLHKGIGTIVIGDVTNIRERVEGNDNFNQKIHQWCFRKMVEMITYKAQLLGIEVELVPEEYTSQVCPVCGSKNHPVGRNYECRSCGFRYHRDGVGAINIWWRYLGRESQVVAGLAPVRGVRFKPHLCGHGVSNAPWKVA

SEQ ID NO: 40102 - protein, 278 aa, unknown
  TnpB Polypeptide
LLTNGTVCFLDNSHVKVPKIGRLRVAGSQARLLKRMCETRIGTVTLTKDSTDRFFLSMQLASDVSFVKVSKSIHGHVGIDLNTDNFLTDSEGNIVPNPRYYRTIKGKLAKEQRILSRRQQRAKKEHRSLRDSKNYQKQRLLVAKLHAKVMNQRLNFLQQISTALIKNHDLVVAEELRSKNMLKNHALALSISDVGWRSFLDMLTYKADLYGHQFITISPRNTTQTCHDCGFVMGTDNTKKLTLADREWICPQCHVHHIRDYNAALNILEKGLQKQQKA

SEQ ID NO: 40103 - protein, 370 aa, Lactobacillus sp.
MKKVLDKLCDYRRYCWNQGLALWNDMYDVSLILNDKRLKPSERKVRDELVANKEDWQYQLSARCLQLAVSDLGKAWSNFFNKSIPDWGKPKFKSKKAPRQGFKTDRAKIVNGKLRLDKPQGITEWFDIKFKGAKSLEGDLKVVSIYRENSQYWACLPFEVEIAKKAKTGNKTAIDVNVGHFNYTKGKVNTLPDHLKKLYKRIKHYQRQLAKKRVVNGRQAATSNNYVKTRAKLQRYYRKAVNIQHDLIQKFTTQLVDDCDKIAIEDLDVKSMQMTHVASKGLQRSLFGYFRQVLAYKCSWYGKELILADRLYPSTQRYANCGYIKKGGEKVGLMGNIKHGTKHNEYVCYECGYQADRDENAVANLLALIE

SEQ ID NO: 40104 - protein, 524 aa, unknown
  TnpB Polypeptide
MHGRQTRNKPRPFLSWVVFIFGCYFFLWMLCRAVAVELEVAKELNRLLCSVESAYLNIVREVTEYAVANNVTSATQLQRLFYSKYRGEYPDLHAHLIIQAIRQASQIAKSFMERRRKGFVNKPYPEVRNVSIRFTEFTWSYDQFIKSIAPVRLELSLLGVRRVVWLRPHKRFWQYWWRVLNGEAELASTLIIKRKANKWYAIFIFELKPRVEEPESIVAFDINENTVAVGRIDIKTTVGKVADWNRQYVTPELYMIRTDFGRLARRYGRVRNTIIERLKPGFALPSGKYVNITNTREFRKRVKHLRERVRKVGRVRHVANELTRIPAIIITEDLGDNPQESMIEDVMKDELRHRIKQTPFKSIERAVGDKALERGSRIFRVSAYRNSRVCPIHFTRLEKTDDWHTLYCPKGHYVHRDYASVMNMLWKTTPEAWTKAFWWNMKKDMNWREYEDESNPLVPHEIVKHIHTALKTFTASEQSPAMPARAKPMNPAGGANEGWARKPMNRPKGTHALQGGKEVGRVLN

SEQ ID NO: 40105 - protein, 592 aa, unknown
  TnpB Polypeptide
MTKRQRTRLERITARDTRVIKAYLGVIEHHKKALVVGGKYKNIDFRLLDRLTLTALRARDPSKRRLSVPHDFKARFHYISVNELQECRDVAIGMWNSYLRRGGSRPLKSTSGKLKKIPRNIFPNLFKLVHTPDLKIKYWLEIRDSLDSKRIGRTIHAKLTFPLKISPYHTNQIDRGEVKSCRIVKDGSRKWWVVFAVKVKSKSFLVPAKKPLAVMGVDLGISRAACAVVITQNGVHHTRYFHQEGKEKSLAKSERRIASLQREMRTRQNMSVPCDKVTKKLRDMNHKRTAVREEWDRVLVREIIDYALELSAKYDLYVAVGNPKGIRNIATRAYSRGRKYRGMIHSWAFARIISKIEHAFSQIGWTTGRFTSRFLAVYEGRTSITCSKCGHRGVRPKQSLFICHTCGCRVNADKNGAINIARRFIRLNPKLRIGHSGLGRWLFPKWKKPSSKAARRGKHASKRKSRLSQRSPASPEGESAVVRFVQQDLLSFGDEAGLSDEDPTVGNAAEMPSVMESLDSPRSGGFHVSKQRKEVTFRERNQVPMTSDKARANLEYSDTTEVSDDSHGSDGTQELQDECELYSPSSERNHTP

SEQ ID NO: 40106 - protein, 402 aa, unknown
  TnpB Polypeptide
VKRLQAFKFQLRPGGQQEREMRRFAGACRFVFNRALARQNENHEAGNKYIPYGKMASWLVEWKNATETQWLKDSPSQPLQQSLKGLERAYKNFFQKRAAFPRFKKRGQNDAFRYPQGVKLDQENSRIFLPKLGWMRYRNSRQVTGVVKNVTVSQSCGKWYISIQTESEVSTPVHPSASMIGLDAGVAKLATLSDGTVFEPVNSFQKNQKTLARLQRQLSRKVKFSNNWQKQKRKIQRLHSCIANIRRDYLHKVTTTVSKNHAMIVIEDLKVSNMSKSAAGTVSLPGRNVRAKSGLNRSILDQGWYEIRRQLEYKQLWSGGQVLAVPPAYTSQRCAYCGHTAKENRLSQSKFRCQVCGYTANADVNGARNILAAGHAVLACGEMVQSGRPLKQEPTEMIQATA

SEQ ID NO: 40107 - protein, 373 aa, unknown
  TnpB Polypeptide
MQIFKAFKFELIPNSEQIRKMKQFCGCSRFVFNRALAWQNEQYDADETFKFSYTQVANFLPEWKRELVWLKECHSQVLQQSLKDLESAFKNFFTQRANFPRFKRKGEKDSFRFPQSCKLEQHNSRLYLPKIGWVRYRNSRHVSGSIKNVTISRQCGKWYASIQTECEQEIPQPKGGEVGISMGIARFATLSTGQSFEPLPSVKALKGKLGKLKKQLKRKTKFSQNWQKLKAKINKLHYKITNICQNYLHQISSAISKNHAIVYVEEAGNRAKSAKNNVKQHGNNRKQKARLDHSSLNQSWIDFQRQLSYKLLWHGGHLITVSHPALCCPACKHTAQENTQTKFKCTQCGFTENTDIVSAISILKRGQAILAAQ

SEQ ID NO: 40108 - protein, 352 aa, unknown
  TnpB Polypeptide
VKPDLATNRGARFLPYKARGYLTTLRKWQHSGKKKGKPGIPTASNHPTLYAGTYTLDLDELDLRKSFVRLKVYTGSTWAWVQYPTRYNRYFEQRRAEEGWEQESPKLVLGKRSAAIHFLQSKTIKARKIVESKRDPDLVTVAVDLNVKQLAVITVRQHGKITQTRFVSDRGLDQARFRHLGRIAKKQWQSGQAVKGERSNQQLWRHIRRQNTDAAHKTARAIVEVCERYPGCVLLFERLRTIKAAGGSKSRRRNRKQANQLKGKINQLAKEKAYAKGVVSVEVNPHGTSQYCSRCGAKGMRFSLMAGQRVTGKGGKLFYCPSCHYECHADFNASCNVHRSFFREFHWEIRAP

SEQ ID NO: 40109 - protein, 172 aa, Scytonema sp.
MIVYEAKLEGIDSQYRKLDEALPTGLFVRNACLRYWIDGHAKTRNDLSAYCKVLSDNPDFPWVRKLNSMARQAMSERTWAAISRFFDNCTAKKPGKKGYPKFKRLQTNVSVEYKTTGWKLSEDRRFITFTDGFDAGQFKLWGTRDLHFYQISHPFASQSCSPRRWILCSILH

SEQ ID NO: 40110 - protein, 402 aa, Methanolobus sp.
VVDQPEAEPIDSEEFLGVDLGIVNIATTSDGKMYSGDKSQEVREKYTRIKTKLQSAGTYSAKKHLRKVSGRERRFKKDTNHCIAKDIVKAAKDTNRSIALEELTGIRERTTVRKTDRDKKSKWAFNELRNFIEYKARIHGVIVRFVNPAYTSKQCSVCGHISDKNRKKQDTFSCQKCGHTENADFNASKNIASRAAINQPIVLCSDSEEFLGVDLGIVNIATTSDGKMYSGDKSQEVREKYTRIKTKLQSAGTYSAKKHLRKVSGRERRFKKDTNHCIAKDIVKAAKDTNRSIALEELTGIRERTTVRKTDRDKKSKWAFNELRNFIEYKARIHGVIVRFVNPAYTSKQCSVCGHISDKNRKKQDTFSCQKCGHTENADFNASKNIASRAAINQPIVLCSVN

SEQ ID NO: 40111 - protein, 370 aa, Methanolobus sp.
MLRAYKYRLYPNKSQIDSFEKQFGTCRFVYNWALDLKSTVYKDENRSISKNELKKMLPGLKVQYNWLKDVNSQSLQGSIDNLDNAFQKFFRKEADYPNFKSKYNPVQSFQVPQHYVVDLDNGTVKLPKLKEPIKAKFHRRFDGETRTATVSRTPTGKYFISILVDDGQEIPEKIETGTTIGVDVGISHFAILSTGEKIENPRHLKTSLKKLQHEQRALSRKKKGSSNRKKQKLVVAKLHEKIANQRNDFHHKISKRLIDKNQAICLEDLNISGMVKNHCLAQAISDVAWNSFIEKLRYKADWYGKTIMQIGRFVPSSKLCSICGYKNAGLKLNDRSWECPSCHTKHDRDVNAAINILNIALNNIAAGTAV

SEQ ID NO: 40112 - protein, 370 aa, Methanolobus sp.
MLKACKYRMYPTKEQEESFFQHFGACRFVYNWALENKIKSYEQSGKAISRFSLNKMLTGLKEEHEWLKDVNSQSLQGATLNLENAYTKFFREKTGFPNFKSKKNPVQSFSVPQFYDVDFENNKVKLPKIGWVKTKLHRKYCGDGKTATVSRTPTGKYYISILVDDGLETPSAFLFDEKTTVGVDVGIKDFAVLSNGERIENPKYLKTSIPRLVVLQKRLIRKQKGSKNRAKARSAVSKAHERISNQRNDFQHRLSSKLISENQAVAMETLNVRGMLKNHCLAQSIADASWSSFVTMLEYKAKWLGKTILRIGQFEPSTKICNVCGFHNGKLTLTDREWQCPDCKTNHDRDIKAAINIKKFALDKQNLIGI

SEQ ID NO: 40113 - protein, 419 aa, Methanolobus sp.
MKKGNVYRIYPNREQRALLEQHFGAARFVCNHSLSIKNLMYGKFRVNVTEIDLNNHLISLKETFPWLKDINSQSLQQANRNLLTGFKNFFEGNGSYPTWKSKKDKHFSFQIPQNYQINLTSSQIYLPKIGWMKIILHRDFLSKEFIENNLVTKEVNGEIILDQKLNKEFKVLKTLTVSRTSAGRYHVSILIEDHAPYPEPELFTEETTVGIDVGIKTFAVLSTGEEIENPKFLKRSLKKLVKLQRSVSRKPKGSKNRKKAIVKLAKHHHLIANQRNDFQHKVSAMIIRESQAIVLEDLNVKGMVRNHCLAQSISDVGWSGFVDKLIYKAEWLGKTILKIGRFDASSKLCNVCGYKFKELTLDIREWKCPACKTLHDRDINASINIKKIALSNLNTAGTAGRAYGLTGTSQGNEVGSHRF

SEQ ID NO: 40114 - protein, 382 aa, Methanolobus sp.
MQKSYKFRLYPTKQQEVTLNKTLDVCRYIYNEFLADRRNAYDRCNQGLSTMEQLYQVQYLEFDIDVHSQVKQDVIRRLGKSFDNFFRRCKNGGAKAGYPRFKGKKRYNSFTYPQSGFNISGKKLKLSKIGEIKIVQHREIEGKIKTCTIHRDGKQWYVTFSVVIENNTTPVEPVTFVGIDVGLNSLVTLSDGTQIDSPNYYRNTEDELKKQQRNLSKKRKFSNNWKKQCDKVNRLHRKIRNQRNDFNHKISRELINAYDFIAFEDLNVMNMVKNSRLSKSIHDASWSNLIQITKYKAEEAGKFVELVNPYNTSQLCSKCGQKVEKPLAVRVHNCPYCGLVLDRDHNAAINILNRAVGTTVQACGIESLDSMMKQEATLFIGW

SEQ ID NO: 40115 - protein, 356 aa, Methanolobus sp.
MLLTIKSKLVTTPEQHDQLLRTMESFNKACNYISKFAHNKRVFSKFKLQKHLYYEIREKFSLSSQLAVRAFAKVAESYKVDKKIIHQFKPHGAVVYDPRILSISKDIVSILTLDGRIKTQIKYRKDKNIDNKKGQIDLIYKNRKFYLQIVIDQPEATPINSEEFLGVDLGIVNIAATSDGKIYSGEKCQKVREKYARIKAKLQSVGTYSAKRHLRKISKKERRFKKDTNHCISKDIVQTAKDTNRSIALEELTGIRERTTVRKVDRDKYVKWAFNELRQFIEYKAKINGVIVRFVDPAYTSKQCSGCGHISDKNRKKQDAFSCQKCGHTENADWNASKNIASRAAINQPIVLCSAN

SEQ ID NO: 40116 - protein, 350 aa, Methanolobus sp.
MLANTLELCRWTYNETLALRKNAWEFEQENIGYYESKKMLPGWKLIKPELKDVHSQVLQDVVKRVNLAFQAFFRRCKNGEDPGYPRFKGKNRYDSITYTQSGFELQDNKLWLSKIGAIKIKLHRPVTGDIKRLTIRKTSSGKWFVSFLVNTDVQETIPSTGHSVGVDVGIKSFLTLSNGQDIPNPRYFVSEEENLAKAQRKLSKAIKGSPEWRKALKVVGHIYERITNKRHDFVHKVSLVLVRAYDLIVFENLNIKGMIRNHYLAKHIADVSWNKLISITTYKAEWAGKRVELVNPRNTSQMCSGCGQIVRKELSERIHSCPFCSLILDRDQNAAINILRLGLQSVAQKA

SEQ ID NO: 40117 - protein, 356 aa, Methanolobus sp.
MLLTIKSKLVTTQEQHDQLLRTMESFNEACNYISDFVYHKQIFSKVKLQNHLYYEIREKFSLSSQLAVRALAKVAESYKVDKKVPHQFQPRGAVVYDQRILSINNDMASILTLDGRIKTGIKYRKGQTIDRINGQTDLIYKNKKFYLQVLINQKEAELTNSEEFLGVDLGIVNIAATSDGKIYSGEKCQEVREKYAGIKSKLQSFGTYSAKKHLRKVSGRERRFKKDTNHVISKDIVKAAKDTNRSIALEELTGIRERTMVRKADRDKHVKWAFNELRNFIEYKARIHGVIVRFVNPAYTSKQCSVCTHISDMNRKKQGIFSCQKCGHTENADFNASKNLALRAVINQPIAFCSGS

SEQ ID NO: 40118 - protein, 239 aa, Methanolobus sp.
MGIKYGEYCQLTSRRVRGQADLVYHNNTFYLMVVVDVPEEEKIDPNGVVGVDMGIVNIATTSDGKMYSGKKCTEIRQRYSAIKSKLQQAGTWSAKKHLKRISGRERRFKRDINHQTAKDIVQTAKDTDRAIAIEDLTGIRSRSTVSKAIRESIGKWAFSELGMFIKYKAALKGIPVYDVDPRNTSRMCSVCGNIDKKNRKNQSEFKCTKCNHTENADVNASKNIASRGICQLSQRPLPV

SEQ ID NO: 40119 - protein, 342 aa, Methanolobus sp.
MLGDKIEHYQVTKTMLNNTPAQYKEEYPWLKEVDSLALANEQLTLQQAFRNFFRDQKIGFPKFKSKKHSRRTYTTNNQKGTVAVVDNRHAKLPKIGIVRCRVHRQIPEDHKIKSATISQTGSGKFYISFLVEFEEEEVVVPLDKKNSIGLDYSSPNFYVDDQGREANYPRFYRKGQKKLAAEQQKLARMKLNSNNYRKQKRKVAKVHEMVANQRLDWIRKEALSLSKKYDYVFVENIHLRGLAGSLNLGKSTNDNGFGMFRTIMEQKMNEIGKKLVKIPRFYPSSMTCSVCNTVYRGLTLDDRTWTCTCGTFHDRDINAAVNIRNYGMTMIQQTAGTAGIAC

SEQ ID NO: 40120 - protein, 370 aa, Methanolobus sp.
MLKAYKYRMYPTKEQQEQFLQHFGACRFVYNWALEQKIKSYEQDSKSVSRFTLNTRIIELKEEHEWLKDINSQSLQGATLNLENAFTKFFREKKGFPHFKSRKNPVQSFSVPQFYKVDFDANKVKLPKIGWVKVKLHRGYIGVGKTATVSRTPTGKFYISILVDDEHEPPIKSIFNEKVTVGIDVGIKDFAVLSSGEKIENPKYLKNSMKRLAVIQRRLSRKQKGSKNKAKARLAVSKIHEKISNQMHDFQHKVSSKLISENQAVALETLNVSGMLKNHCLAQSIADASWSSFVSKLEYKAEWYGKTILRIGQFEPSTKICNVCGYHNGKLTLVDREWKCPECETNNDRDINAAINIKKFALDKQNLIGI

SEQ ID NO: 40121 - protein, 370 aa, Methanolobus sp.
MLKAYKYRIYPTKEQEELFYQHFGACRFVYNWALEHKIKSYQQDSKSVSRFTLNKMITGLKVEHEWLKDVNSQSLQGATLNLENAFTKFFREKKGFPTFKSKKNQVQSFSVPQFYEVDFDNNKIKLPKIGWIKTKLHRKFKGIEKTATVSGTSTGRYYISILVDDKQETPVKSLFNEKVTVGIDVGIKDFAVLSNGEKIDNPKYLKTSLERLNALQRRMSRKQNGSKNRAKARLEVSKLHEKISNQRNDFQHKLSSKLIGENQALALETLNVSGMLKNHCLALHIADASWSSFVSKLEYKAEWFGKTILRIGQFEPSTKICNMCGYHNGKLTLANRKWQCPDCKTNHDRDINAAINIKKFALDKQNLIRI

SEQ ID NO: 40122 - protein, 374 aa, Methanolobus sp.
MRKTYKFRIYPNRSQQKQMERSLEICRQVYNRTLSERKVAYEMSGEILSKYTLNKLLPEWKKENPEYKEVFSQTLQEVQERVDIAFKHFFRRVRNGEKPGYPRFKGKGWYDSFTYPQMGFKLEGNLLYLSKIGKVRVKVHREVEGDIKRIIVRRSACKKWYVSITTEAEDIPILNKYIEHVVGIDVGLSNFATLSDGTTIPNPRFFRLEEKELAKAQRKLSKAAKGSPERKKAIKVVQRVHERIANKRYDFIHQLSRQLVDDYSFIAFEDLNIKNMLKNHCLAKSISDAAWNMLISTTKYKAESAGSLVVSVNPANTSKMCSRCGLLVDKTLADRTHKCNSCGLILGRDHNAAINILRLGLQSVGIETVEVRAL

SEQ ID NO: 40123 - protein, 343 aa, Methanolobus sp.
LPWNATRWNNHCNQVLKDQHTWLKEVDKFAITNALIHLAAAYKNCYVDHNSNPPSFKSKHSHYQSYTTNMTNYNIKVDHENRTIQLPKLGKVKAHLHRDFNGSIKSITISRTPDNRYFVSLLINVEPLPGKPEENNNIIAFDVGIKDYLVDSNGNKVSNPKHYKKNEKKLAQRQHDLSKKQKGSKNYEKQRIHVAEMHSRTANCRTDFLHKLSYGIVKENQFIISEDLSILSMSNGQKNSKGIYDASWGKFFRMLEYKARKFGKIYHQIEKYFPSSQICSVCGHKNVKVKDTSVREFDCDCCGQHHDRDVNASINILNKGLQELGITLKYATGTSGIGVCCSP

SEQ ID NO: 40124 - protein, 350 aa, Methanolobus sp.
MLLTVKLKLYPSEEQHVRLLNTMEQFNKACNYISEVAWSNRVFGKIRIQKLVYRDVRNTFGLSAQMVVRAIGKVSESYKIDKSKTHEFDSHGAIVYDQRILTFKTADEISILTLDGRERMSIKYGEYCQLTSSRVRGQADLVYHNNTFYLMVVVDVPEEEKIDPNGVVGVDMGIVNIATTSDGKMYSGKKCTEIRQRYSAIKSKLQQAGTWSAKKHLKRISGRERRFKRDINHQTAKDIVQTAKDTDRAIAIEDLTGIRSRSTVSKAVRESIGKWAFSELGMFIKYKAALKGIPVYDVDPRNTSRMCSVCGNIDKKNRKTAVRPRRMYGTAEKISLSSNVQNVTILKMPM

SEQ ID NO: 40125 - protein, 465 aa, unknown
  TnpB Polypeptide
MLCCSMYWRMMFSGAPPQDAVKQDAEVPVHDVPCRSCVTKTRCGCGARKQRACRGGTPADCHRPVACSGAVQVRYRYRLYPAPGQRQALARAFGCARVVYNDCLRLRDACYASGEKISDTEVQRRVITLAKQAPERAWLGEVASVALVQACQDARPAYRNWFDSLSGQRKGRKVGHPVFRRKHGRQSIRLTRNGFAVRGLRLYVAKVGDITVEWSRDLLSVPSSVTVIREPDGRYYASFVVERAATPLPVCDREIGVDVGLSSLAVTSDGEVIGNPRFLRAKERKLARAQRALSRKQKGSANRAKARHRVAVVHRKVRESRLDHAHKTALRLIRDNQAVYAEDLCVSGLARTKLARSVHDAGWSQLVRLVEEKAVQYGRTFARIGRFEPTSQVCSACGIKDGLKPLHVRQWTCAACGTTHDRDVNAAKNILAAGRADKSNACGGSVRPGLALAVPGEAGTHRSTA

SEQ ID NO: 40126 - protein, 357 aa, unknown
  TnpB Polypeptide
MLNNMYRTLKIKLDKSNELVQTAKIWNAACQDVIDYGFAAHDYNKTRLNKATYKDLRDKYPTLPSALIQTARDQASNMLKRLRFEKKPFKHSLGAVRFDIRTMKVFLESGYCKLTTVFGRLRYDFSLPEYYQKYATWKVMNAQLKIAKNACYLNIQVEQPDPEPMTGDRRLGVDLGINNIAVCSDNTFWESGPIKAVKGKYQYLRSKLQSIGTRSAKRKLQKLSGRERRFQRDVNHNIANWIVSKMYDVIVLEDLTNIRNGKTNKKLGKWSFAELRSIVEYKATAIGKKAVAIDPKYTSRTCSRCGFQKKENRNGRTFKCKSCGFQIDADLNASRNIATFSRSDRSRLPVNQPIVAG

SEQ ID NO: 40127 - protein, 397 aa, unknown
  TnpB Polypeptide
VAVQVRYRYRIYPRPGQQEGLARVFGCARVVFNDCLRVRDACHAAGEQISDTEVQRRVITLAKRTPERAWLAEVASVALVQACQDARRAYRNWFDSLSGQRKGRRIGHPRFRSKRGRQSIRLTRNGFALHGTRLYLAKIGDIQVRWSRPLPSEPSSVTVIKDPDGRYYASFVVEREASPLSACGHEIGVDVGLDRLAVTSDGEIIANPRFLQAKQRHLARAQRALCRKQKGSMNRARARRRVAVLHRKVRETRLDHAHKTALRLVRDNQAVYAEDLAITGLARTRLARSVHDAAWAQFLRLLGEKAEHYGRTFARIGRFEPTSQVCSACGHKDGPKPLSVRAWKCPVCDAVHDRDVNAARNILAAGRADRLNACGGQVRPALPLAPAGETGTHRGAA

SEQ ID NO: 40128 - protein, 398 aa, Leptolyngbya sp.
MSQKAFRYRFYPTPEQENLLRRTMGCARLVYNRALAARSDAWYKHQKRVGYKETSAMLTLWKKEDSLNFLNEVSCVPLQQCLRHLQKAFTNFFAGRAKYPNFKKKHNGGSAEFTKSAFKFRDNQIYLAKCSEPLPIRWSRPLPEGAKPSTVTVKLDPSGRWFVSLLVDVGIETLPKSPNKIGVDLGVTSLIADSNGGKVANPKTFRKKHKRLALAQKRLAKKQKGSNNRHKARLKVARIQAEIADTRRDFLHKLTTRLIRENQVIAVEDLAVKNMKKNHKLALSISDASWGELVRQLEYKADWYGRTVVKIDRWFPSSKRCSNCGHISPKMLLNVRDWVCPECGHSHDRDINAAINILAAGLAVEVCGATVRPEQSKSVKASATKQKTLKREPGNPPL

SEQ ID NO: 40129 - protein, 382 aa, unknown
  TnpB Polypeptide
MNIALTNPLLDFSKKYLEGIRYVLYWLKEKRINPNKRNILSIVHKELYDKLKKEFNLPSRIAQDCNRNAISIYKGWYNNPKKGRFPRVYKPTVWLTPKLSYTVNFEKMLVKISKIGEFKILGYPRNYKEYLSWNMKESRLVFRNGKAFLKIVFEKFMQKIEPKGSIAVDINMKSTVVGKDDNNYVKIPTRINEIHRYKSLAEMLQRKYSKRWKENKNIKRRIIAFHLKAKNIAEDFARKVGKRVVDEAIKMNANVIILENLKNLIKHVKNLHKQLRDKLYLMQYRKIQYWIDWQAKKHGLLVKYVYSAYSSIKCPKCNRKMKEIYHRWFKCKCGYENDRDIIAIMNLNGRGSLSLSTAPQMRDVAPNQLRGTLALYGGGSQY

SEQ ID NO: 40130 - protein, 629 aa, unknown
  TnpB Polypeptide
MRVIKCGLNSVARGDASKAFFRDVVRRAHDAKTAAHLLCKAWILERHQNGRSLPEGKGALVSLFADAVYAVGGNASSTRRARLVALRDAIFPVGFEVDCQRFFNWHVQMGKAYAAQVIEHLSRCYPQCLERYIASRLGLGGREHRQERMTIVRAVMRKEATPRVPAAEALLLVPARALQKGYAMYDIKIKDTALDYLPCMLHMAAHLEREGQRGYAVLPLVSSQVPASVFIDTDTLLYLLPEELLPPGRTKDSYLQAWRTPNPRGGPGRPRESDFDDDDWASKQERLYQGQARLWDLVLDLSKLPVRGSSLRFDNRIQTDGVSIAVYAEHRHEQRAKGKAEYAAYPDERYAHHIDDRAERAELQGRRTLVAIDPGKQNIIFATDAASVRRVGPQNRLEATTLRYTAKQREAETRQRRARAHAAAFRAIAPLAQGHSIDEWEAWLSKQPSGRTLDPAAFRAHILAFYAYADATRDFWDERFHREQRLDAHRRKQRSEARLVNAFKAKFGKPQDVVIAFGDGARNNLCGRAPGPSTAIRRLLQRSHYDVLDVHEPYTSKRCFACKRPDAENGPCRLDKAKGRDAWGVRRCCRCGTAWARDFHACLNIDRLAREHLAGLERPDYLTAGAAGG

SEQ ID NO: 40131 - protein, 466 aa, Scytonema sp.
VLLNYQYRAYPNTNQKQQLNSWLRIGQYWYNKQLGERFSWYENNRCSIDSCPLICSLPELRENSGFYSQKKQLPAIKEDLVIVQHSGELLDFTSVPSQTLQDVSKRVDLGFKRFLQGDSNGKRSGKPRFKNSARYRTLRIEGQAIAIERIEKDWLFLSISKLKGWFKVRLHRSLPDGFALKNMLLTKKSDGWYATICLEDSTVPVFNPDEIIPTWENTLGMDAVLHENDYLATSDGTKLPSLKSFRKSEKRLSEVQRRKEKKRKGSKARRKLAKSQGREHQRIARARIDHAYKTAHALIRTGRKVFVHEDLNLKALSKRNKTKLDEDGKYLPNGQSAKSGLNKSWSDAAFGQFFTILGYIAGKAGSRVIAVRTAYTSQLLAYRDEIVFTDCDMREFWDTELSLNVDRDINAGINIKRMGLGLFPTLKRRKGNLVVGDSTTNSTLKEVLAVLKNAPEAYTITVLSLV

SEQ ID NO: 40132 - protein, 413 aa, Blautia sp.
MASNQGYSITTRRLKLCCRHPEWLKLTEEFYNQIVQFYYDLLLENPAFWELSSQKVLRELEVLSIPGRDKQPVMAPLPWEKVPLYFRRAAANAGIAAAKSYLARREEFPGRRAQAFHSSTVYYKGMYRGFTSTEITLKVWDGSCWQWMRCRLYGKEFPDDAQLMSPSVVFEHKFIMLHVPIKEFGGDTATVKQRMEQNRNLCSVQFTNSNAFAVGSILNAQGDEQAVKFWNGGKEYSHHCCEILEKIGKSERSLGKEQSGNSEELEYLSQFDKPNQKYWMHLKHLADFYAHQVSAQIVRFCQEQKAGIIVFPKYNDNYKKYVMKSTGNWSPLHLSTRIRQYTTYKAWKAGIITIEVHAVGISSVCAVCGKPVSFTDKKTNEFFCEDGHRGNRYLNSARNLGRKCLIQFGKHVG

SEQ ID NO: 40133 - protein, 560 aa, unknown
  TnpB Polypeptide
MRTWKMIINPKKNKEDAAFCQYFKTNTADFKCMYNVANFYIRNTMTGIKKSPEERTRLETEVLHYVFTGIQKANEAIGQKRMKKKFEDLKLAQVGGMNCAVIAYSLASQEPFQYPTTKKWFLSYNTLDAIFKFTDNPVYKRMNSQVNQNAIRKVIAAWEGYFESLKQYRINPAGYTGKPKIPGYKNTEESTAWFSKQVAKLKEEDGKSYLQFVNQKERFCIGKASIYKGLQYVKTEIKPVYGRYCLLVTFDDKVKAVEPPANPERILGLDPGVSNFLGVANNFGAVPFVIKGGAVKSVNQRFNKRRSALLSVLTKGSDSQHSVKYSEQLNTLSKKRDSFMCDYFYKCAWYICRYAQAAGVEVIVMGHNEGQKQEVTLGDKNNQHFVAIPYLKFITVLKTVAAKCGIAVVIREESYTSRASLLDMDDIPTYKQGDDTKYQFSGKRIHRGLYKSRNGTVMNADINGASNILRKEYTHAFDNVKDFTYLYETTFAIGYKDLYNNAKAMDERPDGYRYHKAGFGSKVRRKYRKQSRMEYCKLFGKSKFVWMTDKRDKTQAEHAA

SEQ ID NO: 40134 - protein, 381 aa, Nocardia sp.
VQLRYNFRIYPTPGQRIALAQAFGCARVVYNDNLRAREHAHAAGVKLSDTEVQRQVVTKAKRTPERAWLAEVSSVVLVQACQDARAAYRNWFDSLSGKRKGPKLGKPRFRSRKDNRQAIRCTRNGFSLRANRKLYVAKVGELKVAWSRELPSEPSSVTVVKDSAGRYFASFVVAVGDDPLPVVDAEVGIDLGLATFAVLSDGRRIDSPRFLRQAERRLKKAQRCLSRKEKGSRNRVKARIRVAKAHARVADMRRDFVHKHSTRIVRENQAIFVEDLCVRGLARTNLAKSVHDAGWGMFTRMLEEKAARRGRRFARVDRWFPSTRMCSACGVVGDSKPLHVREWTCTCGVVHDRDVNAARNVLAAGLAESRNACGEAVSPAA

SEQ ID NO: 40135 - protein, 409 aa, unknown
  TnpB Polypeptide
MRLNIQVRLYPNQTMKTVMDSLCDYRRYCWNQGLELWNTLYEARLTGLPIELRAKIKASLTDKTITFSEEEQALRVRFPSPSHNVVRDGLVAQKANWQFEFSARVLQQAIKDLARAWNLFFKNPKTAGKPGFKSRKKPKQGFKTDRARIIDGRLVLDKPHAYKGEWSGIRFRGAFIPDGKLKFCVVTRTKGKYIATITMDVETVALPKTGKKTAVDANVDHFDTTEGQTSVNPRMLDPLYAKVRTYQRQLARKRKVNKNYRHSKSYQATRAKLQATYERIRNIQNDLLHKFTTDLYREFDTIVIEDLDVKGMQMKKKAKNLHRSLFGRFRQFMEYKAEKFGKTLILADRFYPSTQRCSACGYVKTGDEKITLSGNAKHGTKHHEYVCYHCGYEDDRDHNAVLNLLALAK

SEQ ID NO: 40136 - protein, 436 aa, unknown
  TnpB Polypeptide
MKLTGNSKALETSINIYCDALRMLIPIINDNWETLSEYEFTNQKYHRIEKWIHNTKEHQAQYTFDEQFPKFPSYLRRSVIAQALGIVSSYRSNLANWEKEPKGQAPQLSLTHYAYPAYYKKNLFRHFDPVKQTVELKVFKNGDWVFEVYKLKTSDCTYYQTHLTSKKQNVPIIQKKGRCFYATFSYEEEVSLVKEESISKICAVDLGLNTDATCTIMGQDGTVYARTFISFSKEHDRLHTQLGRIKRNQKRGSRHNKKLWRSVAGISQDIADKTVKAILDFGNEHGVDVFVLEYLDFKGKNIVKRAHFWRYKRIYKVLAQRAHQYGLRIARVNARYTSRLAFDGSGWSKRGREITPETPYALMEFPNGKTYNADLNASYNIGARYFIRHLLKTVTVTQRLALEAKVPQVAKRSTCTLSDLINLRSELAVLTAGTQA

SEQ ID NO: 40137 - protein, 223 aa, unknown
  TnpB Polypeptide
  misc_feature (206)..(220): Xaa can be any naturally occurring amino acid
LLSPIYARFGGCGGVRTYKVRLYPSTEDGRKLEETLERCRRLYNHFLQELNERDEVLPRYELQKEFSRFKEKHPEYKHVYSNVLQMVLHRLYSNLTSLSTRKEHGYRVGRLRYKGKGWYKSFTYNQSGFTIIKTDTRLDTLHLSKIGVIPMRMHREVQGTIKQVVIKRYASGTWYACIQTDYERGRQFGSGVVAIDVNTSNYLTDXXXXXXXXXXXXXXXLSA

SEQ ID NO: 40138 - protein, 200 aa, Burkholderia sp.
VIEMPEVPARPIRSGVGINLGLKDFATLSTGEKLPNDQFGRRAADKLAKAQRARKHKRHIAKLHAKVANARADFQHKLALDLVRRFDYIAVGNVSAAKLARTRMAKSVYDAAWSSFRDKLRYKAMAHGVTFEEVDESGSTQSCSACGSQDSTTRPKGIAGLRIREWTCSDCGVVHDRDTNAALNILRCGRASPVAGIAPL

SEQ ID NO: 40139 - protein, 408 aa, Filamentous sp.
MYKAYKYRIYPTSDQEVLLAKSFGCARWFWNYALNLCQETYKNTSKALSRGYIQGLLPALKKEHEWLKEPYSQCLQVVALNLSTAYKNFFDKRAMPPNFKAKHGRQSISYPQNVKFDGEYINLPKIGLVFCRRHRDFEGAIKTVTVSRNPDGKHFVSVLIDDGKEKPESAPAGKAIGIDVGLTHFAIISDGSKFANPKHFVKRQRNLKRKQQKLSRKKKGSQNRKKARLAVAKVHSKIARCREDFRNLLSRKIVNENQVIAVENLNIKGMVKNHNLAKAISDVGWGMFCTMLKYKTESEGKQYVEIDRWFPSSKTCHVCLNQVEKLPLDVRTWTCKHCGTHHDRDVNAAINIRDEALRILALGTSASACGGDVSRQEQNFGFVRRPAPLNQEASAVPLKWSASGSSLD

SEQ ID NO: 40140 - protein, 461 aa, unknown
  TnpB Polypeptide
MYRAYKYRLYPTVDQQQKLNQFFAAVRWVYNAALEQRNIYGRKQGSDPFERDSSFTAPRQSKELHYKVRNGVEGLRTDEDLKWITETPKDCLDAALRDLDQSFSRFFDNLKKGIPGGYPSWRSADRNNSLSFKAFSRKIINGVSVAKPMVVFGQDCVTIPKLGRIRYKRHRKFYGDPKTVEVIREGTEYYVILATQHKVKEVKHTGGDIAVDLGVSLPVCLSNGEHIGPDHGLEVLDAKARMAQKKLSRAKKGSIRRHKAKLHLGALKRKQARRRTARTHRITTELTRRFRFIGLEDLKVKNMTASAKGDADNPGKKVKQKSGLNRVILNVSFHKIREQIVYKAEKTGTQVVFVDPKYTSQRCNVCGHVDKENRRSQAEFNCTNCPHVDHADRNGARNVLQGAYISAGVSARRKSPSKSTVLKPAFRKPADLATIKASGSCFQPASSLKMPLVSERLRDVW

SEQ ID NO: 40141 - protein, 367 aa, unknown
  TnpB Polypeptide
MLGVAFTKNDIYNRNKSGINMILTYKIRHNRDFSDELRKAFAVAEFAVNNPKCRSSAAVKEIGLKSVISNQILKKYGNQKKIKQVRNVNLIVPGKVIRYFEETNSIWIPCLKLHLENTIPYRFTKINQIELDKEFAYISCTVPEQPEMIPRQFIGVDRNTTGHVAVTANPDTGKIEKLGKSALHVHQKYSAIRKRLQKRGKFRKLKKIKDRESRIVKDLNHKISRKIVDMAKVQHAALVFEDLSGIRNTSKQHRSFKYALHSWSFFQLQTFVEYKAKLLGVPVLYVDPAYTSQDCSRCGMRGKRNGKSFKCPTCGHVDHADVNAAFNIALRQKSMIDRIQKEMYTMGALIPHDAMPECTATSEFPRL

SEQ ID NO: 40142 - protein, 487 aa, Thermofilum sp.
VSRGNGEDGGKRKEPIDAYRVWEVKASRELRLRLRKLYSDITLAVERASEELERMYGDAFRKKPERFGRELIEEASKTSGLPKGLFWYAAEWCKILAEAREKSKLRSRFTPPPVPLIVKVVKDGEVLHGNTAAVAVLDASRGRLRISSAGVAIRLKPSLIRAVLEDIQCFEDVKLTLQLTAKGRLRLVAHRKVKQAWWDGEGRLAVIAVDVNSSHGLYLMVFAFDSEAKLVAQRVFKPPNTTMLRLLAAIMTSYSEVKSWERAVERFKLRRNVRRLQREGRGSAVEKALRLAERLRVKMNLTPERAERVAGQASRKVRKLNNDWVRGVLRELRELVRKLRDWGYTVVLVADVPRAESLRGTKLQRTLLRVAERLENMAWYEGAKWFQPENNVSGKQCPLCGSRGVELRKRYYRCPKCGLEWTRDWAASYNAAKFFLKACRAEKHLQALSAWLSQHPRASTHGTRERPAGLSSRHGHTAARRVPRAAR

SEQ ID NO: 40143 - protein, 482 aa, Thermofilum sp.
VSWEGRGNGKGRVDAYRVWEVKTNREKRLRLQQLYVRLSSAIRQACRALEEKHVDTFRKDPERFGEELIEEASKTAGLPKGLFCYAAEWCKMLAEARGKSKRRSRFTPPPVPLLVRVVSGGERLYGNANAAAVLDAYRGEFRISSAGVAVRLKPSLVRAVLGDIQRFGDVKLTLQLTAKGRLRLVAHRVVKQVWWGGGKLAIVAVDVNSSYGLYLAAFAFDSEVRLVAQRVFKPPNATMLRLLVAIMRSYSKVKSWDEAVQRFEERKGVEKLRREGRGSAVEDALRLAERLRAELNLTPERADRIAGQASRKVKKLNEDWVRGVLKELRSLIRKLRDQGYTVIIVADVPQAESLRGSQLQRTLLRISKRLENMAWYEEARWFQLENNVSGRRCPLCGKEGVEIQRRYYKCPKCGLVYGRDWAAVFNTAKLFLKACKAEKHVEALQSWLQSHPRVLAKSYYMSRLTELEKGQQAPAPVPSHPL

SEQ ID NO: 40144 - protein, 591 aa, unknown
  TnpB Polypeptide
MEKDIFTIKRNTLSYGRGYVYSLQYHLVWCTKYRKQVLKNGIDAECKKMLYGLAEEYKFKILAMEVMPDHIHLLLDCKPQFFISDMIKIMKGNLARQLFLSHPELKQELWGGHLWNPSYCAVTVSDRSRDQVVAYIEGQKEKGKKKVGNFMQIVSSYGVEIKKKNIPLRSTLDIFRKAVSYLIPVYAETWEELSEIRNPQKRFNEAEHLVHETKKNHARFPFDRHFPKMPSYLRRAAIQHALGAVSSYQTRLGLWEKGELKGKPKLVCENHAMPVFYRDVMYKEAEPGEDVAHLKLFDGREWKWFQVKLLHTDMEYLRKKWSRKKASAPTLERKHHKYFLRFSYTEEVSLSKTDVKEQVICSVDLGINTDAVCNIMRADGTILGRKFINFSSDKDHLYHVLGRIRRFQREHSSRQVQSRWDYAKRLNMELSRKIAAEITKYAAEYQADVIVFEYLEMQGKISGNKKQKLHLWRKRDIQKLCEHQAHRKGIRVSRVSARNTSRLACDGSGAVVRNQENHSLCTFRTGKQYNCDLSASYNIGARYFIRELLKPLPETERSSLEAKVPAVKRRTSCVYADLRKLYVEVNNLKAA

SEQ ID NO: 40145 - protein, 569 aa, unknown
  TnpB Polypeptide
MTRSGDGFEKRRSKRFGPQEIGPTTATISPASSNRNLSGKSSTPVSLAMDSVPSSVTSSSSSKRATPSTKSSGTSGAASTSNERDFLPFWSPLCNTISPKLWLPTATDCVVSGSSWWNPSSNEEEVRSPSYVRTSTVPRKSWSKTSSLLLRSSLRASTDSAAITEPSKLNSKVQVPLLTRTLRLRPGNGSLLPLAMDQFRWYYNLCVDLYENCRKEMGRVSYIGLRGFLGHVRLVKEKGGVPYYRISKRRTLWPRSSEWESTPHNRIVRGAIKQFVGAYRSSRAQHAENKFELGYREKKNFQLLFFDDKNYPKWIDRLPGFYREGRKKTPWRELPEAGARGLTIDKKWGRYYLHLPMTVPPITQPKPTERVIALDPGVRNFLVGYSPNGLATKIGAGFAQRYLASLEEEDYLRARLTHLENLEKKEGQQPLRRRIRNMQKRHYFLLRNFHYQVARYLVGTARVILLPTFPTSKLVRHKSTGRKTHRALSRMAHYRFQQRLLFSAQQRGVQVHLVSEAFTSKTCSRCGFLHRKLGSADTFACPACSHTIDRDLNASRNILIRFLVSTREE

SEQ ID NO: 40146 - protein, 394 aa, Anaerolineales sp.
MSYKAYQFKLQPTNDQLDKLRQFGGATRFIYNYFLALAVDTYREESRHIGFSEMCRLLTQLKKTNEYSWLKDIHSQVLQQSLKDLGEAYKNFFRKLKQGDIPKNPDGTYQRRKNGQIKCSPNFKKKSHFADSFRYPASIKVDENYVWLPKIGWVKFRKSRDTVGTIKSATVSQRPSGLYVSIVCETPDTKTPPTIEPTLENSVGIDVGVSSLLVESNGHKVPALKAYRKLERKLKREQRKLSRKKKGSNNKFKQQYNVARLHERIANMRGDYAHQHSTRLVRENQAIFAETLNVKGMMQNRNLAKSIADASMGMLLTLIEQKAKQHGKTFHKIDRWYPSSKTCHCCGYKLDKLALHVRMWQCPECGETHDRDINASINILLEGLRQVGAGHSQT

SEQ ID NO: 40147 - protein, 289 aa, Halobacterium sp.
LSTVDGRVTVEYVLPDETRDTPHSEYLRSDGWETTGATLHYRRGDFYLHVRIKADVDDPKPAENGTVLGVDLGIKNIAVTSTGAFWSAGELNHWRTEYVERRTSLQECGSRWAHENVQVVGRKETGRFEQYLHRIANDLVAEATESGCTVIAFEDLTDIRDRMPDARMFHQWAFRRLYEYVSYKAEECGIRVEQVNPKNTSKRCSSCGFTHAENRPSQDTFCCQSCGYENHADYNAAKNIGYRLLRNQTGDEGGAPVGVRLNSGMLNANGVKPVPDSVRAGVHAESSQS

SEQ ID NO: 40148 - protein, 408 aa, unknown
  TnpB Polypeptide
MLLTKKHVFKNDTTNMNILKHMGYSAYKLWNVGNYEKRNYKKLGMEKYPNWYDQKKRLKDNFFYKNLPSQTAQDVLQRLEEGWKSFFKLQKTGGVINPKPPRFKKDVIDITFLKDAIKQDGSTTRLTISKQLKLYLKSIDLDATFIYLETSRFSDIKIKELQIKFINETTFLAIAVYETEVVEQKEDNGRYLSIDLGIKNTFTCYDSTGNSFILKGFLEATHYCDKKISYYQRISASEQIAQGIQYPKPTRRVLSLYKKRKNKVNDYLHKATRYIAEYCHANEINTVVIGDIKGIRKGKNIGRNNQQLHALPYDKVYALLTYKLRRYGITIKKQNEAYSSKCAPNSKDVTKKCASGANRKRRGLYVDGKDIYNADSVGAYNILRLYLKRMKKDPLGYGNLNSPIKVTV

SEQ ID NO: 40149 - protein, 393 aa, unknown
  TnpB Polypeptide
MLSKFPIDVSKLTTRRRVKIVTKESTLTTCRKIQLYPSRTQRVLLNRWRLGYNRIYNYTLGYIRWNKQVGYRFFTVLSIIMKEPRYKRLIALYDLPLVFGHEAVKECCKAFKIAFANLRKRNITHFKIRYKRTTSKTIVVQGNCFSKRKNGFCIRKLGEMRSSTPIVGSKESKLTVEGGRTYLYVPVQTPTFEVVGSRKECALDPGVRTFQTMYCTRGTKEYGKRVSDKIAKVHKKLKTLDSRKGTSNSRDRVRWYEKARNKVYATLKSSIKQLHWSTALHLVKQFDTIYIGSFCTNSKRCVSRKGKLAKVTRFATNALSHFTFLQRLRYKAEQYGKKVVVVDESYTSKTCGRCFELNDVGSSKIYNCSNCNLTIDRDVNGARNIMLRAKGLW

SEQ ID NO: 40150 - protein, 369 aa, unknown
  TnpB Polypeptide
MSVYVHIAKQPTGIKREMLVRILKLKLTRKQEKTLEQWLWHLTAVYNWGLKKIELNAKDKIYFSEKTFQNLLADHGKKIGIPSHTIQGTLLQVYNAWQRCFRKQAKKPHLKGQHNKFNSIAFPDPIKPPKGNKIGIPGLKKVRFIKQKLPDAEIKCGRIVKRASGWYLCLWLDTERSFPVKDTDEAVGIDPGFDTLLTLSDGTKIENPRELHKGAKRLAQAQRGHKKQLVARLQERQANRRQDRNHKVSRKLVENYKTICYSDDNFKGMASNFGKSVSEAGLGQLVKYITYKGSICGRQVIPVSSKYTTMTCSVCGALTGPTGLDGLKVRHWICSACGADHDRDINSAVIVLNAGLGISHERKAIQCVA

SEQ ID NO: 40151 - protein, 494 aa, Moorea sp.
MMPKKSRSNKKISTQIVPVIGMTKLVEIELLSTMKKLGVVRSESYNKLGSISHWSLDWKKAYPEVRSFRTPESLRMPSKLMEWTVSDVAKAITAQQAACTETVVKKIYKRFPGKENQNKRKEYTTQLKTLAFLDNSFLHRLVRKEFQRGHSWVKNQIVYQQGGYKCKRLSRNTYQLELAGLRKGKRNRIVVRSNRKIKGQIRLIHNQLLQRFEIHFLVDYGTVEIPSERQSVGVDKGYTEAFYDSKGQAHGKGLGKAATKKSDRICAKNRKRGKLWALHRKLEKSNPAKSSRILKNNLTRKTENRRYRQDRAEIDAIIGAASKSLFNGEALKVFAVRVAWPTASDLTQPIRSKRQSKAVSRKLNSWIKGAMRDSLQKWANWTGSVVTEVQPSYTSQVDSRTGTLLGKRFGDNFTGFDGVVLQADHNAAKNILVRGTDKEITRYTSKTEVQAVLLRRTARYLEGMGLSLVDAVELGWLDCKHTKTQAFKQLLNGI

SEQ ID NO: 40152 - protein, 370 aa, Methanoculleus sp.
  misc_feature (370)..(370): Xaa can be any naturally occurring amino acid
MQSVTKLRLFASPDERRMLFATMERYNAACNAVSPVAFSERQFSNIGLQKRLYSHVRETFGLSAQMAQLAIRKVAGSYRSTKEAIKEQNKVLAALGKPLKTLTELSFREHGAIGYDARVLSLGQNRVSIWTLEGRIKLRYSKPAYFPAVTTVKQTDLVYRDGAFWLYATVETPDTEPAEPTEYLGVDLGVVNIATTSDGEAFSSAATEKVRQRYGRLRGALQKTGTRSAKRKLRKIAGREHRFKTDTNHVISKQIVCAAEGTKRGIALEDLNGILLRTTVRHDQRERHHKWAFRQLRSFIEYKAQRAGVTVQVIDGAYTSQQCSVCGFVHPDNRLTQTAFRCLACGHTENADLNASLETSLPGPPSTGLX

SEQ ID NO: 40153 - protein, 383 aa, unknown
  TnpB Polypeptide
MRAYKFRIYPSKKQEEKMQRHLWVSKELWNEMLAFTKEIYNNYQRFPTKRTLREMVKQSGLFSQVNQELVDRLIDALHRKIEMKKRGEKGGFPRFKSIDRMKSLNYPQYECGFWLDKKLRVTPFGEIAIKKHREMKGRIKTLTLKKEASGKWFAVFCVDTPKEIPKENRGVTVGIDLGLKTFATLSNGKTIKNPRHLKQYANRLGFIQRKFSRKNKGSSNRKRAKIIIAKLHEKIADTRKDFLHKISIELVNEYSLIALEKLASQDMAEENYGKQINDAGWNMFANMLAYKAEGAGCRVVFVNPKYTTQECSSCHQIVQKDLIERMHNCPFCGLIVNRDINAARNILTRATVGQTGSNTCNSLQKERDVALATSMKQEARTYL

SEQ ID NO: 40154 - protein, 390 aa, Exiguobacterium sp.
MLKHRAYKFRLYPTKEQKILITKTIGCSRFVFNYFLSKWEETYKETGKGLSCGSCSKELPLLKQEFDWLKEVDSTSLQTSIKHLADAYDRFFKKQNERPRFKSKRNPVQSYKTNIQGKSQLPEVSIVGNMLKLPKLKWVRFANSKQVAGRILNATIRRTASGKYFVSLLVEQEIVELPKTGMSVGVDVGLKHFATLSDGTVYQNDRHFRTLEKRLVREQSKLSRRQLIARNKNVKLSEARNYQKQKRKVARIHEKIVNKRNDFLHKVSTEIVKNHDVIGIETLQIKHMQKNRRLSKSISDVSWSTFFRMLEYKADWYGKTIVKVGKTFASSQLCSSCGHQHKDVKHLGLRAWTCPSCGVHHDRDVNAGLNLKQEAERILASSTVGTTGLA

SEQ ID NO: 40155 - protein, 422 aa, Haloferax sp.
MLETTRTYRAKIVNHQQVSDDLDQCGFSASKLWNVARYYTQGRWDEDGEIPDDGELKSELKEHERYSDLHSQSSQRVLEELAESFTSWYKARQRGDEDANPPGYRKHGDEHPRSTVTWKQKGIRHDAKHNQLRLSKGFNLKTHRSDFILCEYETRPDVTVENIQQVRAVWNGDHWELHLVCKVEIPVEDAPGDNTAGIDLGIKNYLAIAYDDGDAELYPGNVLKQDKHYFTLDEYDTEGENGPSRRALRARQKLSRRKDHFLHALAKHIVERCIDHEVGHIAIGDLSEIREDENGESRNWGKRGNKKLHGWEFDRFTTLLEYKAEEHGILVDRTSERDTSKTCSCCGRKRDANRVERGLYVCESCGTTMNADVNGAVNIRRKITQNPPTRDMSNGRLARPVAYLFNQTSGSFHPREQVGCEP

SEQ ID NO: 40156 - protein, 389 aa, unknown
  TnpB Polypeptide
MIAYKFRMYPNKEQEEKLEFALEICRQTYNNLLSDLQEQTEINRSKIQHRIVELKRENPEITQVYSKTLQYECYRLFSNLSALSHLKRNGKRVGRMRFKGKGWFKTINYNQSGFELITTEKRFSFLELSKIGKIKIMKHREITGKIKQIAIKKSCNKWYAIIITDFTRIIQNGNKILGIDLGINHFIADSEGNFIAHPKNVERFSLRLKKAQRKLSKKIKGSHNRWKARQRVERIHNKIENCRNDFLHKTTTQLVKNCRIIIVEDLKIKEMMMNFYNAKNMADASWGKFLQMLEQKVESTTAQVVRINPKNTTKTCSKCGSIQDMPIWKRVYSCKCGLEMDRDINSAINIKNKFISQELAIVENKSSTDCQDNQQDLSMKQEALPFRVV

SEQ ID NO: 40157 - protein, 276 aa, Halogeometricum sp.
MLETTRTYVARITNHEQVRDDLDQCGFSASKLWNVGRYYIQQRWDEDDEIPGEAELKSELKDHKRYSDLHSQSSQRVLEELAEAFTGWYNSDDGNNPPGYRKRGDDHPRSTITWKKRAIKHDDKHGQLRLSKGFNLKESRSDFILAEYETRPDVEVENIQQVRAVWNGDEWELHLVCKKEIPVEDAPGDNTAGIDLGISNYLAIDYEDGESELYPGSVLKQDKHYFTRDEYDTEGEDGPSRRALRARQKLSHRKDHVLHALANTSLSGVWKKAWRR

SEQ ID NO: 40158 - protein, 595 aa, Halogeometricum sp.
MEYSHRYHAYPTQAVAERLEYHIDVHRQAYNYTRYEYENVDADNIGSAYKHHYRLPDWKDEFSVFSDVNSKALQRTVTRFYQNLSNLSKKKQNGNKVGKLKWKSPTEYQSMTYSQSGFELKNTSGRHATLELSKVGDIRIRYHREIHDQAEIKEVTIKKETTGEWFVSFGLETDDADLPEKPDVDSLNTSNSVGIDLGILNYIHTSDGKTVDWLDLEDDYERLRREQRKLSRKEKGSNNYEKQRVEVAKVKRHIRRKVLDYQHKLTTWLVKEYDAVFVEDLNVQCMLQDDGNARNKQDVAWRQFITLLEYKGDLHGTHVVQVDARGTTKECASCGVETAKPIWVREHSCPACGFETDRDANASLNVLQRGFSALGLGWPESTPVETGRGRRSLPASDVVDGSLGSDKLQFYIVPSAKPFNLGSFTLGDIQSLSYHTKKVGAPVDGSHAPNIYVNIYTEPDNEDDTASWYGYRLNWEPYLSNNLDAPADTWVEWSTDPGTNQLTFFDAANLGFFGFYGQPTLQDLQSGTINWNDHFGSATDKEIDYATETVKFIVFDTGSGWADDHEGYLDAIELVVNSGRGKSGKPTALRIELEA

SEQ ID NO: 40159 - protein, 244 aa, unknown
  TnpB Polypeptide
VKAVIHRQPEADWVIKSVTISQEGDGTYYASVLFEYEKSVVKVRKSDNAIGLDYASNGLYVDDKGNIGNNHNYYRESQKKLAKAQRKLSRMQGAKKGEKKSNNYLKQLRKVNKIHRHIANQRLDKLHKLSTEIANQYDVVCVESLDMKAMSNKGFGIGLATMDNGYGLFINMLAYKLDDRGKYLVKVDKWFPSSQICHCCGKVHKEMKDLRIRTMSCDCGLTMSRDQNAAINIKLEGLRILKSV

SEQ ID NO: 40160 - protein, 222 aa, unknown
  TnpB Polypeptide
VRKINRAVKIRIYPNKEQITQIEKTIGCSRFLYNRMLADKIRHYQEEKKMLKNTPAGYKKEYPWLKEVDSLALANVQLNLEGAFRKFFREPGVGFPHYKSKKHSRKSYTTNMVNGNICLQDRFLKLPKMQPVKIKLHRMIPEGWKLKSVTVSREPSGKYFASLLFDCENQTAEKRQAEKFLGMDFAMHGMCVFSTGERAGYPMFYRNAEKKLAREQRIAFQM

SEQ ID NO: 40161 - protein, 383 aa, unknown
  TnpB Polypeptide
METKTVIKGYKYRIYPTKEQEIQISKTFGCCRFVYNQLLAKKIELYKTEQKSLSKTDCNNYCNQVLKKQEEYKWLKEVDKFALTNSIYNLDSAYQNFFRRVKQGSDKAGFPKFKSKKDNRQSYRTNFTNDNIKVDFENNKIQLPKLKWIECRLHREFKGKILFATISKTPSEKYFVSFNVEVEHIVSSKNDYAIGIDLGIKDLLITSDGEVINNEKTTYKYEKRLAKLQRKLAKKKKGNKNRNKQRVKVARLHEKITNIRKDNLHQTSKQIINENKVVICEDLNIKGMVKNHNLAKSIHDCGWGELTRQLKYKTNWNNKIYYEVNRYFPSSQLCNKCGYKNTDTKNLNIRFWICPECNTEHDRDENAAINILNQGLKDLGLVS

SEQ ID NO: 40162 - protein, 380 aa, unknown
  TnpB Polypeptide
MKVYKFRLYPTIEQCAVLYKQFDLCRFTYNKLLEELDKNKDRKHIQHYILKLKKQNSVLKEVYSKTLQYECYRLFSNLKGLSQLKKNGRKVGRLRFKGRDWFKTIVYNQSGFKLIERQQRYNLLQLSKIGKIRLLQHREIEGKIKGIIIKRKVGSWEAHIITDAINTVQKGDSVIGIDLGVMSFLTDNNGNKVSNPLYLKESLGLLKQKQQELSKKKKGSHNRYKARIQLAKLHEHITQQRTDFLHKLTTQLVKQNSFIAVENLNIKSMQTSAYNSRNINDSSWGRFLQLLDYKAESAGCQVVKVDPKNTTKMCSHCGELQDMPLNIRQYECQNCGMSMDRDKNSAINILKRALEQGTAEKNKVSSLKQEAITSTQGVRL

SEQ ID NO: 40163 - protein, 410 aa, Bifidobacterium sp.
VYEAVKVALDPTPRQERLLEGHAGAARFAYNTMLARIQSQLARNEKADWTMYAQRRWWNEWKNEIAPWWAEYSKEAYNSAFESLAAALKNHFDSKTGRRKGKRMGWPRFKSKRRSMLKFAYTTGSFGLIDNDPKALKLPRIGRVHCMENIARRVGDAKVARMSVSRHAGRWYASLTVERGDPPNPCAPKGGAVGVDLGVKTLAALSDGTVFGNPRHLKRGLRALGHAQHALGRRQEGSRRWSKAKARVQRAQARIAAQRHDGLHKLTDWLTRTYADISIEDLNVSGMVRNHRLAQAISDCGFRELRRQLEYKTARTGAKLHVVNRWYPSSKTCSNCGTVEAKLSLDERTYVCDACGLGIDRDLNAAININVAGSAPETLNARGGDARHGRHAPAAQTPVKREPSNARQGV

SEQ ID NO: 40164 - protein, 232 aa, Microbispora sp.
MLRRYRRGESDLVFRGGSWYLYATCEVPEPETFDPDGFLGVDLGIANIATTSDGVRYAGRQLNQVRHRNRRLRSRLQSKGTTSAKRLLGKLSGREARFAADSNHRIAKQIVTEAERTSRGVALEDLGGIGARVRLRKPQRVTLHSWAFHQLGRFVSYKAARAGVPVVYVDPAYTSQGCSACGHISKKNRPDQATFACTSCGFAEHADVNAARNIAVRGVAGWAVSHAADDAA

SEQ ID NO: 40165 - protein, 427 aa, unknown
  TnpB Polypeptide
MTLQGAFAPYSTAYQALNRVCVGEARRVRFKSRGRGLGSIENKRNDTGLRFVLQPPEEGNQGFLVWKDDQLPALIEWSDPVVKYGLDHRIKYARLVQRRASSSKAEGADALSFRYVVQLALEGVSFQKPKHTVGRDTIGADLGPSIIALVAREGEASLSLLCEELAPDEKELRRLQRKMDRQRRAANSGNYDEKGRIKKAGSAKLHWKESRNYEKTRRRKAATERKLAAHRKSVHGKKVHDIVSVGNTVILEKISYQGWQKQYGRSVGLRAPGMFVDILRRTVASTGGTLIEVKTRTSKLSQYCHGCGAFVKKPLSQRWHTCGCGIGPVQRDLYAAFLAAYLDPDHPTPSCAQYVIGWEGAEARLRAAYERVQERAKEGQNLPRSFGIPRAGARLPTSPSEPTQEPAFLLTHGRLEAWKGRSEPPRL

SEQ ID NO: 40166 - protein, 332 aa, unknown
  TnpB Polypeptide
MLYSCGDRTKKGNSNIRIMRDKLLVNDPSGRGLWIEGQLHIPAKFRKEFDSSCYDVRLKLKPDGSMQVTATWETPTPRIGTGNPTRGTIGIDTNPDGCGLVETSPDGNLLHHQYERAERIQFASANKRDHDVRELAIRVVDHAISTGKPLVVEHLSFKKGKPRGYKKFRRMRHNFLHKKILDAVRSRATRAGVEVIEVEPAFTSILGKLKYQAMYSLNRHTAAALVIARRGAGFKERQDFTDTLKGKRGEGPTLEGRGHSHTLSRKAWSWLQDCFLKPKPVSLTGTPLVPGLKLGIEGSVGENPADESCPTTGRTRRQNPIKDPSLTGMKGP

SEQ ID NO: 40167 - protein, 402 aa, Escherichia sp.
VKRLQAFKFQLRPGGQQECEMRRFAGACRFVFNRALALQNENHEAGNKYIPYGKMASWLVEWKNATETQWLKDSPSQPLQQSLKDLERAYKNFFQNRAAFPRFKKRGQNDAFRYPQGVKLDQENSRIFLPKLGWMRYRNSRQVTGVVKNVTVSQSCGKWYISIQTESEVSTPVHPSASMVGLDAGVAKLATLSDGTVFEPVNSFQKNQKKLARLQRQFSRRVKFSNNWQKQKRKIQRLHSRIANIRRDYLHKVTTTVSKNHAMIVIEDLKVSNMSKSAAGTLSQPGRNVRAKSGLNRSILDQGWYEMRRQLEYKQLWSGGQLLAVPPAYTSQRCACCGHTAKENRLSQSQFRCQVCGYTANADVNGARNILAAGHAVLACGEMVQSGRSLKQEPTEMIQATA

SEQ ID NO: 40168 - protein, 569 aa, unknown
  TnpB Polypeptide
MKWGWGRIKKRKKKNPNGSINYTVCGEWFPETYPTFRAQKWSRGNEDPLTTEMRLFCSCQRWAFNRLLEKSTREDLKKQGQQIFGINSRITDDAVLKAKSILTSRQELLHLEIKETETKLVRTSKKLSWAQKDMDKAIKRNDPAKIEKTKRIVHGRKARVKKITNKLNELKTHQENGTIPKVIFGGRFLWKRVCKGRASNEEWRQVRQNRLYSRGDETKGGNPNLKISYHNGEFTLSVTISHLSEQTGIDSKERPIMTKAPRVTGKLWLSEKHRLKVWELLLSGAPYTVELIKGKDSRYRAHIAFITQIPEIATNPNRGCLGMDTNPDGVALANVSYFGQPEPWPEGFTIPYPKALHKFDREFRVTVHPNGFLYIKIPELSYSSSYRRTYLIGVLSKVVTDIAKSLGKPIALENLNFNKDRLDTNKGFNRMASSFPFKKMIEAVIRKAIKEGVGVKPVWPAHTSTIGYHKYMQRYGILVHHAAALVIARRAIGYKECITKELKQKIQAIKEKLKVNSLPGEGKGMTQTAKRLFKQLDRKIPIHNGLTRFKQESFYSVWHDLKQLVLLSR

SEQ ID NO: 40169 - protein, 404 aa, Cupriavidus sp.
MQRLQAFKYELMPTGDQERDMRRFAGSCRFVFNKALALQKARFEAGNKKLGYAGLCKLLTGWRNGPETPWLRDAPAHPLQQTLKDLERAYTNFFAKRASFPRFKKKGQSDSFRYPDPKQIKLDQPNSRLFLPKLGWLRYRNSRDVLGVVKNVTVSQSGGKWYVAIQTEREVEQPVPQGDAVGIDMGIARFATLSDGMVYAPLNSFKKHEQRLARYQRAMSRKQKFSNNWKRAKARIARIHARIGNARRDYLHKTTTTISQNHAMVCIEDLQVRNMVRSAAGTTETPGKHVRAKSGLNKSILDQGWFEFRRQLNYKVHWRGGWLIVVPPQNTSRTCPRCGHVSADNRQTQARFACVDCGFKENADLVGAINILARGHRVAACGEPVQLGRLVKQEPAEASTQNIA

SEQ ID NO: 40170 - protein, 395 aa, Microcoleus sp.
MEKAYSYRFYPNSEQENLLRRTLGCVRLVYNRALAARTEAWYERQERIDYVQSSTLLTGWKKQDDLQFLNEISCVPLQQGLRHLQTAFSNFFTGRAKYPNFKKKNYGGSAEFTKSAFKWKDDKVFLAKSQEPLNIRWSRRLPEGVEPSTVTVRLNRSGQWYVSLRFDDPRDLTLKPAQQSVGLDAGISSLVTLSTGEKVANPKHFDKRKKQLRRAQKALSRKQKGSHNRDKARVKVARIQQQISNSRKDHLHKLTTRLIRENQTIAVESLAVKNMVTNHKLARSISDAGWGEMVRQLEYKAKWYGRDLVKIDQWFPSSKRCGNCGHVIERLPLNIRQWACPECAAHHDRDINAAQNILAAGLAVIVCGANVRPDGHKSKGQLRKTSNGKKQKTKS

SEQ ID NO: 40171 - protein, 412 aa, Microcoleus sp.
MLVYEAKLEGQKDQYERLDEAIRTGLFIRNSCLRYWLDGHGKSRNDLNRYCKVLADNPEFPWAKKLNSMARQAMAERAWAAVARFYDNCAKKTPGKKGFPKFKRLQTRASVEYKTSGWTLSEDRRFIAFTDGFKAGTFKLWGTRDLHFYQINQIKRIRVVRRSDGYYAQFCLDVERVETHEFKNRMVGLDVGLTHFLTDSDGNQIENPRYLRKSEKALKRIQRRVSRKKKGSKNRRASINRLGRKHLKVERQRKDFEVKTARHVIQSADLVAIEVLKVHNMVKNRHLAKSISDAAWSMFRQWLEYFGKLYGVPVIAIAPQYTSQNCSNCNQTVKKSLNVRTHICPHCGYIADRDWNAALNILAKALNTVGHTGIYACGENDLCTEEETIQCKPTRGSRKPKEQSLESPPSTK

SEQ ID NO: 40172 - protein, 411 aa, Microcoleus sp.
VLVLEYKVKAKPNQYKAIDEAIRTVQFVRNKSIRYWMDAPKDTKINRFALNRYSTELRNEFPFVKDLNSMAVQAAAERGWLAISQFYDNCKSKKAGKKGFPRFQKDNRSVEYKTTGWALHKSKRRITITDKKGIGELKLLGKWDIHSYPVKSIKRVRLVRRADGYYCQFAVDVECIDIQPPTGQAVGLDVGIESFYTDSNGHKEPNPKFLRKAETDIKRVQRQIYKKQKGSSGRRRARAKYSRKHLRVSRQRNEHASRLARNVCRSNDLVAYEDLRVANLLKNHCLAKSVADASWYQFRQWIEHFATKFGRLAVAVSPQYTSQQCSQCFRVVKKSLSTRTHVCSCGLILHRDTNAAINILLKATTGGHPGSNAKGVGASTLLGATLVEQVLTMNLESPSLDSRRVSIADSK

SEQ ID NO: 40173 - protein, 409 aa, Microcoleus sp.
MIIYEFKVKAKPAQCRAIDEAIRTSQFIQNKCLRYWMDNKGVNKYELNKHCAVLAAEFSFASELNSMARQASAERAWSAISRFYDNGKRKVKGKKGFPRFKRNCRSVEYKTSGWRLDDNRKAITFTDKKGIGRLKLKGTRDLNFYSLEQIKRVRLVRRADGYYAQFAISVDVRIQSEPTHKVIGLDLGLKYFIAGSDGSVEPVPQFYRKSERQLSRANRKKSKKYSPEKKKEKIPQSKNYHKSRNRYARKHLRVSRQRKEYCKRIAYSVIQSNDLIAYEDLNVKGLVRNRHLSKSISDAGWSIFRQWLEYFGHKYGKATVAVPPHYTSSDCSNCGTRVKKALSTRTHVCPACNYVADRDTNASRNILERGLFTVGHTGNYACGDLPSWSIGVSLLANGESVNQESPLLD

SEQ ID NO: 40174 - protein, 362 aa, Paenibacillus sp.
MLRHKAFKFRLYPNPEQAMQMRRTLGCSRFVFNHFLAKWNETYAATGKGLSYQTCATALPTLKQELPWLKEVDSIALQSAVRQLADGFQRFFKQQNGAPRFKSRKHPVQSYTTRYTNGNIAVKCNTLQLPKLGAVRFAKSREVEGRLLSATIRLASSGKWFVSLVCEVDIKPLPVCERTIGIDVGLKYLAVTSDDEVVANPRHTRRYEQQLAKWQRRMSRRMRGGSNWQRAKIKVARIHEKIRNSRQDVLQKQTTKWIRENQTICLEDLRIVEMMTKGKLAKHIADAAWGEMRRQLQYKAEWYGRQIKEVPSFVPTSQTCHVCGAIHSEVRDLGVRAWECSACQTRHDRDGNAAKNIKVMAV

SEQ ID NO: 40175 - protein, 303 aa, Salmonella sp.
MLRATKIRIYPTPEQAAFLNAQFGAVRFAYNKALHIKKHAYQRHGVNLSPRKDLKPLLSVAKKSRRYAWLKEFDSMALQQAVINLDVAFSNFFNPKLKARFPTFKRKHGKQSSYHCVGIKVQDNAIKIPKLAPIEARLHRELHGKLKSINVTRSATGKYYASILCDDGASAPEKPTYLKEEKITGLDMGLEHYAITSDAVKVPNPRHLINAGRNLRRKQKALSRKQKGSANRKKARIRLAALHERVANARADFQHKLSRAIVDENQAVIVETLKRSPGKTRPVVCQFENVPLLWLQNAGNATS

SEQ ID NO: 40176 - protein, 411 aa, unknown
  TnpB Polypeptide
VRIIAGKETKAKLKALGKAFVDCWNEVNKLRLEQYKKHEHVDFNKTEKIVYEKYKAVLHGANVQQVTRKNASAWKSFFELSKKKKEGELPKWMKPKPPHKKKDDLFLLIRHDRYKIEGNEIFLMDFKMRLKFNGKLKWVGKQGTLEIFYDNVRKKWYARIPMVVKVDKKPKGEKKASIDLGIVNLATVAVQDGSWMLFKGGSVLSEFKKITKRISIEEKRLSRHGLKNSRKLEKLYKKRSLLLKNAREGLTREIVETLYDKGVGQIKIGYPKGIAQDKGNERNSNFWSYLAIIKRIKNVAEEYGIKVKLVDEENTSKTCSLCGEIHENGRIKRGLFKCPHTGKVINADLNGAINILHIPESVEDRGKWLKAQPVVYRWTNEAGWVTTSNEAMKIKAVNHEPMIRLEGTIAF

SEQ ID NO: 40177 - protein, 391 aa, unknown
  TnpB Polypeptide
MYKCKKTYLTASKKDINRLFECNRISADIWNTCLSVSKDYSLNNNGKWINKTLLQKELKGKFPIHSQSVQAVIHKYLFARDAAYKAQLEGYKNKYPYKKKKHFNTKWVDKAFSIKGNSISLSMGTLNGKRQKPIVIKVSGLPQGDIKEIELIYDRKLMVSISYDDGLSPKENTNPKNVAAIDLGEIHTIAAASQNEETIIITGRKMRSIHRLRNKKLKELQKHMSKCKKGSKQWKKYNKAKQYILSKSDAQLKDCIHKTTKQFVDWCVLNKVTEVAIGKVEGVQRKTKKKRRKITNQKLSNWSFGKIQKYLEYKLRYYSIKLNEQEESYTSQTCPVCGRRHKTFTRNYVCKNCGFKEHRDILGAKNILSKYLYGDIRYLFDTKTTKYLRIV

SEQ ID NO: 40178 - protein, 437 aa, Nostoc sp.
MLLSFKTALIPNNKQQTSFKKACGVARHAYNWANAHIKEVLELRKDDKSIKIPSAIDLHKKLIAEVKSVNNWYYETNKNVPQKALADFRQAWDRCLKKISKQPRFKKKGQRDSFYLEAGTKAKPLIKNDGKRVKLPSIGWVKLAEPLPVTAIHNCVISCQADRWFIAIKYEIEKPSVEAERPTVGVDIGIKELAVTSTGKVFSNPKAYRRIRLRLKRSQRRVSKKVKGSKNRVKAVKRLAKLHAKVANIRKDSIHKLTHYLAKNHSVIKIEDLHLKAFLKNHKLAGAIADCGMYEFRRQLEYKTEKFQSKLIFVDRMFPSSQICSNCGMHRHKMPLKNRVYVCPDCGHIEDRDLNAAKNIDRWFENIFIPDSEAVASLLPRGDAKSERASRSETVSSTGIACGVDKPLRSHPKTTMKQEVNAKTSNVQLSLDLGSFG

SEQ ID NO: 40179 - protein, 311 aa, Helicobacter sp.
VLTNKPKISKRLIIQSKEKIYLKVPNLGYVKMRESLRFNGKINSVTISQNANKFYASFSVEISQDEYNKTHKRIHQNKQGIGIDIGLKSFVCLSNGLSIKAPKPLNKLTRLMIKRSRQLSKKQHPKTKGESLKGIKKSAHYIKATMKLNKVHKRIANIRTDFLHKLSSSVVRNYKFIAIEDLNVKGMMSNRKLAKSLSDVSFYEFRRMLEYKANYNNKNIVIADKFYPSSKTCSACGNVKENLTLGDRIYICDACELRIDRDYNASLNLYALIKKTIGQALPEFTPADLTAMLNDLAINHLATSKVETGIQ

SEQ ID NO: 40180 - protein, 411 aa, Hadesarchaea sp.
LNKITARLTYGVHLWLQLIKASDISTRSGLRKAELERKVREQTGLNAAFVQCCGDTALWMWKSYHKLYREWERRVKRARRGGDERWLRKLMKRKPSEPFSNGARRKIPIWFDYRIGSLEYSKKIKISPRLIRISTLKRSERIIILLNPAKYHIDLLERGEIKSFQLVKREKKFHVHVKVEYEVQDQPVRAIRGVDLGIRRSAATVLLHPNKPLRRGNFSVIRDGEKVRRVNELNLHVAKLQRLKKWEALKRIRNKRHRVAEYHDHLTAKLIAKISDGYIVAIGYPKGLRYENYQGNGKRKLRRLMTRWAYQRVIRYVQVKCAERGIKAIQVNKRWSSMTCHHCGSRNTERVKQSILACLNCGLIYNADFNGAINIGSSILATPRSRGAVVDPALTSDELAEETSEAGSPRF

SEQ ID NO: 40181 - protein, 411 aa, Microcoleus sp.
MIVREAKLKNGTGEQYSALDEAIQTAQFIRNKAVRFWMDNEKVGKANLYTLCKDLAKEFPFAKKLNSAARQASVERAWAAISSFYTRCKEGAKKKGYPKFKKHCRSVEYKVSGWKLSEDCMSINFTDGFEIGTLSLFCNKETRSDLHTLKINRVRVVRRADGYYAQFCFDAIRKEEGVYTGDIVGLDLGLKYFTKDQNNHAVIYPQFLRKSECKLKKAARRLSKKFVKGAKPQSNNYHKARKRLGKVHLKIQRQRKDWAIKLARNVVMSNDVVVYEDLQIANMVKNHHLAKSISDASWYQFIQWLEYYGKIWDKVVVAINPAYTSQDCSNCGHRAKKSLSTRTHSCANCGLEICRDRNAALNILKKGMKMLGVEWQNGTSGQEESALKEGKHEEKTTSIIDGQLEIVSGLH

SEQ ID NO: 40182 - protein, 416 aa, unknown
  TnpB Polypeptide
MFEAVKVALDPSPTQEGLLLSHAGGARFAYNAGLAHVKAVLDKGEKPECSFYSLRKWWNSVKDELAAGEDGVIWWAENSKESYSYGLESLSRGLSNWWESRKGDRKGRRVGFPKFKLKDKAAPRFAYTTGFRLIEGDPKALRLPKIGRIHCVENVAKRVGDSRVLRVTVSRRAGRWYASLTVERDEPEVKEAPKGGAVGVDLGVKTLATLSDGAIIENPRHLRKAERKLKKTQRALSRKTRGSNRRAKARSNVARLHAHVANQRSDALHKLTTWLTEKYSEISVEDLHVAGMVKNRHLAKVVSDAAFGEFRRQLEYKAARTGARLHVVDRWFASSKTCSGCGSVKAKLSLSERTYKCDSCGLVMDRDLNAAINIQVAGSAPETLNARGEDVRRGSPSGYVALVPVKREPSRRIKAS

SEQ ID NO: 40183 - protein, 355 aa, unknown
  TnpB Polypeptide
MVIQGEWHRLIFDFDNQRFTEGKVTLPVIKVENGQPVFIFTVVTGNPVVQFSGEYTIGVDVGINNYATVVVRDVKTGRIVYETTLSQRVHSLWNGVRASEAQVRVLRKKAATLLRDQQSRMSVLDEAQLHRQAASRKKRELAILAAQEIAYFSHAWGNAVVAVEDLGWVANTMQNGRWNRGAFVQWLTHYVSQNGGWVVSVNPVNTSQQCHACGSRVAHPTHELSVCPEHGTMDRDVNAAANIAARAVPRVFKARVTRAKNRKLQQQAQLRTPPARASLKYPGRDRTKSAPTPKRKNHRPFSKGVILPVCPARAQTRCLEARVLADQGACSALGTNVAALKQGNVAYKCRLCGLI

SEQ ID NO: 40184 - protein, 445 aa, unknown
  TnpB Polypeptide
MPDFLAVGKSGRSRKEWLVQYNAVTAYRSYQERVNAANGESSKYVSRGWKRTVDASPPSYGGDYVNLGAVDKQYAAIENDPFADGEIVLKMVIQGVWHRLIFNFDNKRFTEGKVTLPLIKVEGGQPVFIFTVVTDNPVVQFSGDYTIGVDVGINAYATVVVRDTRTGRIVHQTTLSQRVHSLWNSVRMSERQVRFLKKKSDRLLSQRQKRMSVLDEAQLHREAASRKKRELAILAAQEIANLSHTFDNAVVAVEDLGWIANTMQNGRWNRGALVKWLTHYVSQNGGWVVAVNPAHTSQHCYKCGSKVTHPTHELSVCTEHGAIDRDVNAAANIAARAVPRVEKARKTRAKNRKLRPQQPLKTPVARNSLKYPGRDRTKSKPTPKRKNRRLVSREVILPLCPARAQAVCLEASVLADGGTHVVAGTSKAALKQGNVAYKSRLCSLI

SEQ ID NO: 40185 - protein, 439 aa, unknown
  TnpB Polypeptide
VGSYEAVKVRLDPTSKQERLMASHAGAARFAYNAGLAHVKEALDSGEPSDWSHYALLRWWNANKDELAVNRDTGVVWWGQNSKEAYSMGLRDLARGFSNWSKSRKGQRKGKRVGFPKFKTKNTTMRFAYSTGFTAPKDSDPYGLKLPRIGRVHCMENVYKRVAGARLIRISVARRAGRWYASLTVEREPTAPATVLASAPKRGVVGVDLGVKSLATLSDGTVIPNPRALNMGLRALRKAQKALSRKVMGSARREKAKGRVARLHARMADVRADAINKATTMIARNYSVVCVEDLNVAGMVKNHCLARSVSDAALGEFRRQLEYKTARTGAALRVVDRWYPSSKTCSNCGGVKAKLSLSERTFNCDACGLSLDRDLNAAINICVAGSAPETLNACGGGVRRNQHTVGSSVPCEARTKQAQKSAVRLGADLGNEAMQPRIN

SEQ ID NO: 40186 - protein, 400 aa, Cyanobacteria sp.
MLAIKRELKLNNKQRTLMAQHAGYSRVVYNYGLSLYSQIDHNEFKGGVSKKIGAIKKVLTNCTSKQPEFAWMKKLSSKVYQSALQDLQNAFNRFFQGLGKYPAFKRKKDKASFTVYSGNGVVVLAAGRKIKIPTLLTFTLKESLDSRYVTQTFTLSRLGDRWFVAFSVNALRIPPLFHEKTKVGIDLGVKRFATLSDGTIYDAPKPMKKAKTKLGKLQWRNRNKQLGNRRQGISKSKNAAKYYVKLGNQHAQISNQRKDFLHKTTTEISRTYATIRIEDLNISGMIANHKLSAAISDLGFYEFRRQLVYKQAHYGTKVELVDRWYPSSKTCSRCGHIQSMPLRERVFNCQECGFQIDRDLNASLNLENAPEDKVGRASSELNACGEVSADTPRKSRKRTP

SEQ ID NO: 40187 - protein, 234 aa, unknown
  TnpB Polypeptide
LLKYDTRECKLIRDGDNWYVNLTIQKEARLKRRYATMLPIDMGIRKLATTIEEGKPKFYGKDVRQTRGAYFRLRRSTGKARIVRKWKHKEQETVKHQVHAITRRIVEKAKATNAIIAVGDLEGIRRNGKGKGRVFNRRLSSQPFYLFKQLLTYKAAWERIRVLTVPEAYTRQTCHRCGVRGHRVSGRFSCQNCRLVCDADVNGAWNIAKRAHGMLSHEAGGLLTVPRTLAECEP

SEQ ID NO: 40188 - protein, 250 aa, Prochloron sp.
MEQVLTIVCKIKPTSEQAQKLEMTLRAFSDACNYINATVNPQIKNKNRIQAEVYKNVREQFGLSANLAVRACTRVASNRKTAALKKRPVKAFKPTSADYDARIFSYRQKDQTVSLSTVEGRKRMSLILGNYQIGKLVGKTPTSATLSKHRDGQLYIHIQVKDEAPQPQHSEDIIGVDLGRTDIAVTSLGQSWSGENINSVRDRFSRVRARLRYSTVSFQLHPNCGIAPSPLIPSLSLRLCVTNLGQPQYQ

SEQ ID NO: 40189 - protein, 438 aa, unknown
  TnpB Polypeptide
MSLTGMLTLNYRYRIYPDAAQEQRLIEWMEICRRAYNYALGEIKDWCNSRKCLIDRCSLEKEYIIPVDAKFPGEIQQLNNLPKAKKEFPKLKEVPSQVLQQAIKQLHKGWDYFKSRGFGFPRFKKLGQLKSLLFPQFKENPVTDFSIKLPKIGAIPVNLHRPIPSGFTVKQVRIIQKADRWYASINIQCDVSVPDHKPHGHPIGVDVGLEKFLATSDGAVVREPKFFKTMQSKLKLLQRRLSRKTKRSKNYEKQRLKVARLHHHIDNTRKDFHFKQAHALCDAGDMVFMEDLDYRITAKGFLGKQMLDGGFGQFRTITQYVCWKRGKFFAVVDARGTSQECPECKGEVKKDLSIRIHDCPHCGYKTDRDVASGQVIRNRGIERISTIGQMGKETACADDLPGIGESQSRQVSKSPKLPSKGKNQEILKVIWGSPHHNL

SEQ ID NO: 40190 - protein, 245 aa, Anabaena sp.
MLVLEYKVKGKQHQYNAIDDAIRTTQFIRNKAIRYWMDAPRELKIDKFTLNKYSTELRSYFSFAAELNSMAVQSAAERGWSAISRFYDNTSTKLSDHCKSKKSGKKGFPKFQKNCRSVEYKTSGWKLHKTKRRITFTDKKGIGELKILGKWDIQSYDLKDIKRVRLIRRADGYYPQFCVGIDVVDIQAKTGNEIGLDVGTESFYTDSNGHHEPNPQFLRKAEKSIKHSQKLKPLLCLVQAWSSKF

SEQ ID NO: 40191 - protein, 545 aa, Rhizobiales sp.
MNAGKEALVLAMLRRWRRAAVQSAAIQWRCFFEQGRFDPIFDPATAYRKAGVAVRAGLLVQIGAHYELDGGAGKPGATRRYLGMAPGLVDPLAEMKSELGASQVQMVREQVLGSLNSYVSNRGNDFKRIVFASKVDETTRHMLFVINKARAWFDLSRMLFVNGVEIPASTRRLARKIMSHVMGRHRFPRMNQINMLVDQRIAKLSEAKAATGHDIWLRMTVAKGVKIDIPLKGFEHFDRRSGTRAKSFQIIEDRSDGRIYVGVMTDVAESFEASRESYAATVKTEAVALDFGLTTMFATDQGDLFGRGFKAKLQAMDRVVSAIAKHVQRSGRNPRSSKRYCTWITKVRGFVTTEINRVINRLIEVHRPSKLYLEKLNFQSPGMSARMNRLIQNCGRSVLRTKLAAIKQEFGIEATEVASAYTTQTCSCCGYTDMRNRSAQKFQCRFCGNRMHADVNASRNVGSERFRFFGSPTPGFRQRILDTLVSQHVERYSRERGAPSDPRKSNPYFAGKTIAARLSLQEVDQPPRSEVANENEELSSTLFAA

SEQ ID NO: 40192 - protein, 395 aa, unknown
  TnpB Polypeptide
VLVRYRYRLCPSPRQRQSLARVFGCARVVYNDCLRLREECRAAGEKVSDTDVQRRVITLAKLTPEREWLAVAPSVALVQACNDARRAYRNYFDSLSGKRKSRRFGHPRFRSKRGRQSIRLTRNGFSLHGSRLYVAKVGQLKVRWSRPLPSPPSSVTVIRESDGRYYASFVVERQPVPLPPSEREVGIDVGLTRLAVTSDGEIIANPRFLRAKQRRLAKAQRALSRKQRGSANRAKAVRRVAVLHRQVRETRRDHAHKTALWLIRDSQAVYAEDLAVSGLARTRLAKSIHDASWSQLLCLLAEKAQYYGRGFYRVGRFVPTSQTCSACGASGSPKPLSVRVWTCAACGTVHDRDVNAARNILAAGRAERLNACGGDVRPPPAVAVPAEAGTHRGAA

SEQ ID NO: 40193 - protein, 612 aa, unknown
  TnpB Polypeptide
MLSKKKPKAKKKNTKIKKSTITMNHFFSSDVSKILDILGKTSKDTFNHYFFCFKFFQLYKNKVYEDTFLYVIKNNIFNKDIINDFIENKFKIYYELYQSDFAKYISNNNIIYNYIKTLKLNIDNNNFIKIYNNLIVDCLSLDKLNISTSNLHFLYEENIYSILNSFYYYKYYNVKNGLINKKPITVVFDDNFKKHVMNTEKPIKFFEIKNHKEVIANYLTKNKENKENEEHLHSEQNLISKLVYFTIKFPKTSSDIIINTITKAYQTIKSYYALKELGFKANKPRYIKTDFYSIIFCGKTIKNYIDKKEINKVVINNEKNKVDKPKLKLKLSYGKNITNNWFEYFNEELLKKPLMLINKPSILRDGSATLTQIEIIKIAKNKYKVHYKINKEKKTKEEITSVKLSETLSIDLGMTNLMTIHDPNGKQYIIKGGHLICINEYYNKKISYYQSKRDTEINTIKKEYYNNEMLLLNEMRLRKLNGKMNQIVSKLKELYSDKKIIVIGYNEGWKTKVNMGKENNRKFYEIPYSKLISKMRNVFEETTEIKEINEAYTSKCDALGNESIEKHEIYKGERIKRGLFSSSIGKLINADLNGAINILRKFCGNKYKKIKV

SEQ ID NO: 40194 - protein, 380 aa, unknown
  TnpB Polypeptide
VNRNCLKVRLYPDRVQERQLDETLETCRLVYNSLVNDRKFQYDTAKVSVGRYTQQAYLPVWKKDHAELKAVYSQVLQDVVHRVDLAFKAFFDRAARGEKPGFPRLKSEGQYDSITFTQNDSFNVGEQSIRLAKIGQVKAKIHRTPWGELKTCTVRRINGKWFACICQEVEPELLPPSDEAIGIDVGLKTFAALSNSEFIENPRFFRKEEKALAKAQRKLSKVKNEQQKRGSRERRKARKVVSRIHERIRNRRHDFCHQNARRIVNRFGIIAVEKLSVKSMLGNHCLAKSISDASWSQFRSVLTSKAESAGRKVLAVNPAYTSQDCSGCGYRPDGLEGRTKKKLSDRWHLCPMCGLSVDRDTNAAVNILALGQQSLAAVSA

SEQ ID NO: 40195 - protein, 216 aa, Microcoleus sp.
MLLGFKTELKLNSRQRILLAKHCGVARHAWNWGLWLTKNILDHNQANPKEKLKFPTAIDLHKLLVALVKSENAWYYECSKSTPQLALISLREAWKRYFKKTAGVPKFKKKGRRDSFTLEGTVKICGSNKIQVPVIGVLKTYERLPQVLTKSCTISRQADRWFISFRFDVEQQESCQTNIVGVDIGIKALATLSTGEVVIGAKSYKNMQQNSQGCNG

SEQ ID NO: 40196 - protein, 377 aa, unknown
  TnpB Polypeptide
MIRYKTEIKPNKKQIKEINKTINACKFVYNKFIEINKIRYNNGLKFLNHMKYHMKFSVWYNNEFIPNNEDKKWTKEVSTKEVSTKAIKQAMANAENSYARFWNKTSGYPNFKNKRSSGSYYLIGAIKIERHRIKLPKLKWVRLKEKGYIPNKDIKSATVIKESGRYFVSVLVDKESKPLYKKPQTEGIGIDLGLKDTLFTPSGVKITDLRKNKRLIKLNKSLKRQQRKLSRKQKKSNNWFKQLLKVQRLYRKISNLKRDIKRKNILSIVKENPQFITIENLNIKGMMKNKRLSNAFQQIGLGYIVEWLKWKCYQYGIELRQVDRFYPSSQICNQCGNRQKMPLNKRIYKCENCGTIEDRDINASINLKQAKEYTVLV

SEQ ID NO: 40197 - protein, 489 aa, unknown
  TnpB Polypeptide
MYDMANLNRKKARKLQAAKKAKAAEKDKAVKKVKPAEEKPIKYTVTAEQQADGTFKFHGGKGGFNIIVQKNKALEPYEKCIHNYGVFLELIPGDKQSAINQQIGNARVVHNDYLSKREEYYKETKKALTVSQYKKEYLPALKKEKEYLNGTDKFVYENACRNVDDAYNRFFKGLCGFPKYASRTKSNGNSFTTNFTNNNIELKMIDGIPHVKLPKVGCVRFILPKGKILTDIQPHGVTIKAATVSREPDGSYRIALRMESVIDKPVFPTAINAREIISVDLGLKDFGIFGNLEESVTVPNPRWIKIHAKRLRRFQQSLSRKQYDHKTHTGSKNWEKARAKVAKEQRKIADQRRDFHHKLSRAITDNYAAFICEDLAVKNMMKNRHLAKSIVSVGWSQFLTMVQYKMEHAGKYFRKINRWYPSSQTCGYCGYKNTDVKDLSVRKWKCQKCGAWHDRDVNAQQNIYKIGAKMLQDEGVQILGLPVTNKSVN

SEQ ID NO: 40198 - protein, 425 aa, unknown
  TnpB Polypeptide
MATKNQRIIATLKGTKERRNHMMCRVYTVKLDRSHLNHDSVARLQRLFLEAKWLYNYCVGHPDVFAIDDKLTEVPVKVKDRFELRFLRQLSSHMRQSIITRTQQNIRGLAALKVKGHKVGRLKFKSYVNSIPLKQYGNTYKLINDKYIHIQKIPQKLRVNGLEQLPATCECANATLLHQHGEYYLAITTYTPREHKIMTVAPIKSIGIDFGVKNQLTLSNGVRIRYTVPVTRRIKQLCKKLSRRKYRSKNWWKTLYKLLKAYAKTTNIKRDIRNKLVHFLATTFQVICYQNESFRAWQRLWGSRMLSTSLGGIIGILETKVQTPVEIDRFFPSTKTCSRCGHQRTIGLEERIYICHNCGLVIDRDFNSSRVLEHEGHKILLGRGPTEVTPAEIETTTAASLDYLNGIPYVAASLVAETGSLIALA

SEQ ID NO: 40199 - protein, 340 aa, Kluyvera sp.
MASEVNAIFNLTNEITCAAYSNAGEFGAQKPQWLSAFDVRKMTAGIQRKRGWIIGSSTVQEVISYHSKARQQSKRPRLRWRKSHGVRRSLGWVPFKSRAAQWRDGCVLFAGHLFKVWDSYHLENYIFRAGSFAEDSRGRWYFNIFVEISTSISPGTRALGIDLGLKATATDSEGGRLEVGHFYRSLEPVLRKAQRARKKYRIKNIHAKIKNRRKDSLHKYTTGLVNQYVAIFVGDISSKALIQTKLAKSVLDASWTMLKTQLKYKAIARSVVFDIVSERYSTQTCSCCGAISVNSPKGRAGLRIREWTCVECGAIHDRDINAAKNILAAGHCRLGAGNLT

SEQ ID NO: 40200 - protein, 432 aa, Archaeoglobus sp.
MTRIVRTVIVKSVKLPRKAFRVFIELKDIYRNMVEQLVLYAVRNNIKSFTKLKALKYHEMKSLYPQLPSHYVYTACQDANTRTKSFLRLKKLGLAKRDYPEVRKVSIWLDDHLWKPNGYTSIKIATHRGWVTVEFEPHKQYWKYINRGWKLVSEAKIKLDKRNRQLIIYLIFVKEIEKCRPRGYLPVDVNENNVTMLVDNIAYTFETGTEKLVLGYHYRRKGIQKKYDKHYGKKSRIKRKAMRKLKERKKKLDIRWKIANIIVKTAYEKQYSIVLERLGKKPANNMIARIKDKQLRHRIFQASFRSIQRAIEEKAKEHGVTVIYVNPKNTSRLCPVHDAPINYNDNSRIGKCGKGGELWHRDVVACWNLLLKALRGDGSYAPNLVGLDVDVGLVPLASNATHDSIGIPKSLWARWKSLPQTQKAIVLNKMKR

SEQ ID NO: 40201 - protein, 379 aa, Archaeoglobus sp.
MELTLKMKVREKTKWKIQALRDAMDSFRQAVNDWIDVAWKHKITDRTLHSLAYKKLREKYPNLYSNSLQDAMNWAIQIVKTELKVNPDVKPKFDSFMISFKNVDFKFENDGFVIPLNGKRVYVPVYVPKKYYKWLVNGKFGRLYFKEEDGEIYAYLTVKVEDKPAYEPKLWFGVDLGVQNLVVVADNKGREVLRFDGETVNHYKELLEKERARRQRRQMKYLNNRKFRLGSKHRNFSKYINHIIAKEIVRKAKEYQACIVLEKLRGVKRRSAKMPKWVRKLLHRWSYHDLIQKIKYKAKLEGVPVIEVSPRNTSKTCSECGYVYKRFKNQRLFHCPNCGLIIDRDLNASTNIARKGMKEFNKRAFLPALKGEASSPQRR

SEQ ID NO: 40202 - protein, 422 aa, Archaeoglobus sp.
MINNFNEIVIECNYLIINEIYKLTENFINYVCKQTHMGDEVSLTGVVEMTVRAEPLVQLIRNYTNALRFVVHEILRDPSKYGRWRYVKRSKRIKWEHDLRRIHHSFYEVLKYRFSLPPKFAIACQKEAVAIVKSVLNNENNGGKCVIKNYRARVDYQAYKIEVRNGKCYLKLRNFDEIEVTGFSRKWFTKFKDWRLGDLIMKLENGLVKLFVTFKKTVKVAEPSENAVAVDLNFEEVVLGNHEFEVRFKTPLRKIIHLKKNHIEKTQKKYNRKWRYVKGIRNAISRWWSRINGITNDFVKQVSRRIVVFVKERGYDTIVLEDLNGLKDEQAKLRKSWRERFTFFAYRKLQNWIEWQAKKEGLAVVYVNPANTSKTCPKCKSLNTEFRERILICKDCGFTMNRDSVAVINLVDRWLSIMGCAV

SEQ ID NO: 40203 - protein, 257 aa, Archaeoglobus sp.
LLKDWNYASHYVDSAIKTAYSILNSWRRNYIKGERGRNKPVVKRRFVRVKETLYRFRDWKIAITIKPRQLYLEFDLSKAWFRKRVEGCDLGELILKEGELIITFRKPISSTNTKKRIAWDLNLLSMDGFCDRGWIRVNLKPLYTLHITYENLRRKIQRLSKTKPKTAKRLMQKYSQRYRNRVKDFLHKLTTKLANEFKDYEHGFENLEKQGMFTKRKTHNRVISKQNWKQIIALMSYKANIRLLDPRNSTKLKIKEV

SEQ ID NO: 40204 - protein, 386 aa, Archaeoglobus sp.
MGDEVTLTGTVEMTVRAEPLFNLVRNYTNALRFVVHEILRDPSKYGRWRYVKKTRRIRWEQDIKKIHEFYETLKRRFNLPPKFAIGCEREASMIAKAVINNENNGENKCVIKSYRARCDYQSYSVKFDGNKCYLRLQGLGEFEIKGFNKKWIDKYKDWKFGDLIMKIQGKMIKLYVTLKKVVKIANPSEKVVAVDMNFEEVVVGNDKTEARFRTPLQRIIHIKKNHIEKTQKMYNKQWLHVRGIRKAISRWWRRINGVTNNFVKQISRKIVAFAKERGYDTIVLEDLNGLRDKQAKLKKSWSERFTFFVYRKLQSWIEWQAKKEGLAVVYVNPKNSSRTCPKCKSLNTKFENRTLVCKNCGFTMDRDSVAIINLTGKWLGVLKCGA

SEQ ID NO: 40205 - protein, 414 aa, Archaeoglobus sp.
MKRVNKFRLRPTKEQEKVLFSLCEMSAVLWNKLNYVRRQLFFEGKFDWKEGVEELYDEFKPILGSATAQQIIRKNNEAWRSFFSLLRLKNQRKLPSHIRKVSPPRYWKDRLLNKRKLMTVIRNDCYRIEEVEGKKYLVLPKGLRIRITGEIKWRGKQGRLEIFYDDLTGRWYAHQSVEVDQPRRTISPEKRAFIDLGVINIITAWIEGEKQPIAFSGKSLLADWWYWTHKIAHYQSIAKKVNGMDTTRRIRKYYRKRQLRFRHAVNTIIYRFVKLCYERGVTEIIVGDVKGIRQNNDKNTKANAIIHNFWSFRYIIDRLITTAENFGIKVKFVREDYTSSVCPRCGSTNAYKHKRLFKCLNCGLEAHRDVVGVLNIARVSLNGRDGFNGVLAHPVLLRVSPVEAQTSPQGILAL

SEQ ID NO: 40206 - protein, 379 aa, Archaeoglobus sp.
MKLTLKMKVREKTKWKIQALRRAMETFRDAVNDWIDVAWKHKIADRTLHEIAYKELRQKYRNLYSNSLQDAMNWAIQIVKTELKLNPNKKPEFKTLMISFKNVDFKFENNGFVIPLNGKRVYVPVYVPKKYYKWLVNGKFGRLYFKEEDGEIYAYLTVKVEDKPVYEPKSWFGVDLGVHNLAVVADERGRKILRFDGEIVNRYKELLEKERARRQKRQMKEFNNKEHKYGCKHRSFSRYVNHVVSKEIVRKAKEYKACIVLEKLRGVKRRGARKPKRVRKLLHRWSYHDLIQKIKYKAKLEGVPVIEISPRNTSKTCSNCGFVYKRFKDQRLFHCPKCGIIIDRDLNASINIARKGREEYKKRAFLSALKSEASSPQWL

SEQ ID NO: 40207 - protein, 348 aa, Archaeoglobus sp.
MVRESEERATIVGKLLVNDDVALAKLLTLMRMFRDSVELAHTLLFRRKFSESEVKRRLTKVLSNAWYASSAIKVAKLYKEQTKIKLRKPLLYSVGAKCEEGNRNIRLVSTDKVLIKIPHADGRHEWIEVRVRFGKNYIPLLQELNSCNYGAGVTIKLKGKRENWKTVFRKKLYLYLNVPADLYAKYFGKRVKVESENKFYAGFDFNVDRINMVIVDSYGRIRDIRNIHFPEVINYDKNKSRAIRQDALSKLVEYAVSHGVKYFVIEDLSKPNNIRGNVRKWSIRKYQQQVSMLVKKVGGTLVKVNPAYTSIDAIGISLSKGIDVHTASAYLIALRGIKRYTTIQKATV

SEQ ID NO: 40208 - protein, 370 aa, Archaeoglobus sp.
VELIKAYSIPIKAPKDLMEEFFKLRKTVLDEVFKHIKYSKSGKAHLKFNKNDRKELRDKLLRNWRFAKHYVDSAINSVIGLVKGWIQLYNRGKAKSKPEITKKTVYVKTTLFTVRNGKIKITIEPKKRYLEVDLAKFNYLPKDYDSIGGLILQKDKLIITFKKRVELVEPKDYASFDVNLTNVTGLINYRIVRFDLRELYHIHRVYEEKRKRIQKLAKTKPKTAKKLMQKYSKRERNRVRDIMHKITTTIARELVSIKHGAILEDLKNIKDGILNGSKNLNRKLSKWNCRMFQSMLEYKLMWFGLPVKYVNPANSSKTCPVCSGRLSAYRDRLMKCDRCGLVQDRDVIAVLNLRMWGLGGYPEGGRALQG

SEQ ID NO: 40209 - protein, 285 aa, Archaeoglobus sp.
VNEIKLRQWLLFQCEADKKKKGNLNVRLTSTREAEALVFNQEREPRKIKINLRTPKKYEKLLKILVERAIKSEVGYPARIVIKEYNTHLNDLRLYCSLQVMVPYDLYLEVMRKYDAPLGNHVAGIDVNVDRLNIAIVDRYGRLRDVKTFWFREITSRGYRRKRAWTKIYQAIHDMLNYAYHHGVSHVVLENPEIVGYLKYYWIKNGNRKTKNYNYRTSIFRNRIIETIAYKTPLYGLKTIYVNPKGTTRSKEHEKIMKKYGLDRHTASAYLIALKSLKKIHYATK

SEQ ID NO: 40210 - protein, 395 aa, unknown
  TnpB Polypeptide
LIRAYKFLLRPTSKQVTALEAYLEDCRELYNAALEERREAWKKCKVSISYGRQAAQLTEIRKDDPNGQGRWSCGSQQQTLRRLDKAFADFFRRVKAGAEKVGYPRFKGIGRFNTIECPAQKCGARWDSVPHPTVTRVHFVGIGHVRVHQHRAVKGRIKTISIKREVGRWYVILVCDDVPAEPLPATGAVVGIDMGVRHLLATSDGAHVVNPRPRAAAADRLADAQRSLARKKRGSRRRRKAVLKVAGIHQKMRRSRLDHAHKTSLALVRDHDVIVHEDLLIENMKRRPQPRLTGDGTYAPNGAAAKAGLNESIHDAGWGMFLRVLAAKAEWAGRTTIAVNAAYTSQTCTRCGHCEDKNRKDEKFRCLRCGHEAHADVNAAVNILRSGLVLQAQAA

SEQ ID NO: 40211 - protein, 300 aa, unknown
  TnpB Polypeptide
MVDKHGTSLVPSCRGWFLFLVATFSCGCCVGLWLLSWRSLRSSIGCSAPLSLRTSTLLGEVTEYAVANNVTSPTQLQRLFYSKYRGEYPDLHAHLIIQAIRQASQIAKSFIERRRKGFVNKPYPEVRNVSIRFTEFTWSYDQFIKSIAPVRLELSLLGVRRVVWLRLHKRFWQYWWRVLSGEAELASTLMIKRRANKWYAIFIFKLKPREEEPKSIVAFDINENTVAVGRVDIVATIDKIASWNRQYLTPELYTIRTDFGRLARRYEAIRNTIIERLKPHFTLPSGKFSNVTDQGSLGSV

SEQ ID NO: 40212 - protein, 395 aa, unknown
  TnpB Polypeptide
MKLIHKAYRFRLKVTPEQEALMAQYVGVCRLIWNLCLEQRMLIYNSSKKSTWGDQQDVEITQLRKEYDFIRQAPSQVLQSVTDNLDKAYKGFFKGNTDFPIYKKKNKSRKSFRYPQGFKIDNRRIFLPKLGWMGFFKSQPIVGKMCHVTVSKHGNYWYASICCEVLIEDQPCADTSIGGDMGVEKLCALSDGTIIENPCSLKRSMKRLANMQRQLSRKMKGGMNYIKLKIKIAILHARIADIRGDNINKSTTIIANSHVMVVLEDLKIKAMSKSAKGTVDQPGKKVKQKSGLNRGILDAGWGEFRRQTGYKLDWRNGILVLVDPKNTSRKCSACGHTAKENRLTQASFVCVKCGYKSDADVNAAVNIQRAGHARLACESSGAVIPPEAGTLELAA

SEQ ID NO: 40213 - protein, 379 aa, unknown
  TnpB Polypeptide
MKGGDFMEYSYRFRIYPTREQTVQMQRTFGCCRFVYNYYLSKRIDAYKTDKTTLGYKACSADMTALKKQLPWLCEVDATALQSSLRALDAAYQNFFRRVKHGEKPGFPCFKSKHRNRRSYQSKCVGTNIKVLDGAVRLPKLGEVKCRFSRKVEGRVLSATVSQEASGKYYVSLCCTDVDIKPLPKTGATVGIDLGIKDLAITSDGVKYDNLHSYRRNLKKLVRLQRQLSRKSKGSRNREKARIKIAQLHEHIANQRNDAIHKMTTQLVRSNDIICVEDLSSKNMMRNHKLALHISDAAWGEIRRQLGYKTDWYGKELVIIDRFFPSSQTCGCCGCRNKEVKNLGVRFWTCPQCGAFHDRDINAAQNILEEGLRKRASAA

SEQ ID NO: 40214 - protein, 416 aa, Nocardiopsis sp.
MRTAYKVRAYPDSEQAAQLGRTFGCVRLVWNKTLAERHAAYDQRGEKTSYKQTDQALTEWKRGENLAFLAEVSSVPLQQTLRHQHTAFTNFFSGHARYPRFKNRNGRQSAHYTRSAFRNKNGELFLAKHKTPLRVAWSFDDVDLASLNPTMVIVSREPDGRFYVTFAVETDDPEARPETGGEVGVDLGVKDFATLSTGEKIANPRHLERKAKNLARYQRMVARKQRGSANHRKAKKKVATAHRKIRDARRDFLHRTSTRLVDEHDVIVIEDLNVRGMTASAKGTTDEPGEQVRQKAGLNRSVLDAALGEFRRQLEYKAERAGRILVVIDRWFPSSKTCSECGYLLKKLALNTRAWTCPACRTRHDRDVNAAKNLLAAGRVAARDAGDACGAGVSRQGSSLPLSATKQETTVVRQSG

SEQ ID NO: 40215 - protein, 205 aa, unknown
  TnpB Polypeptide
MTEYEAYQEHIRYTHDSKYYLHIPVTYEVEESNISDICNVVGINFVAATYDSKHKSGFVSGKAIKQKRANYSKLRKELQMRHTPSSRRRLKAIGQRENRWMQDINHQVSKAPVENNPKHTLFVLEDLSGIRNATERVKTRDSYVFVSWSFYDLEQKIIYKAKQNQSSVIKVDPRYTSQCCPCCGHIEKSNRNKKIHLFSCKKMWL

SEQ ID NO: 40216 - protein, 312 aa, unknown
  TnpB Polypeptide
LRQLALDLRKRNPEFQALHSQVAQQAAERFYQARQRFFEGLANKPRAKKPHKFLSLVYPQSGWRLSNIREVGQGGNKKKKKARLYLSKIGFFTLVMHREFPLNRVSQVCVKLNPSGRIFVVFLVHESEGERPEEPTQEPGKTVSVDVGITKLATLSDGRFPENPGPLERSLRRIKALQRSLSRKRKPSKNWFRARRRLAKEYEYVGDLRRDLFYKLGALLTKEYDLLVLEDLNVLGLIRNGETKKRRLRLHDSVFSELRRMLEWEFRRRGRAVPAYNLSRECSQCGGNQSGFNFARQGVPLPPLRLHPGPGP

SEQ ID NO: 40217 - protein, 402 aa, unknown
  TnpB Polypeptide
MEPNLDQVVLLAKHFGCARFVYNHFLNEKRRHYKDNGTTMNYNITRSSLKDMKKEKEFSWLSEVNSQSLQASLKNLETAYGNFFRKKAKFPRFKSKKLSTKSFHCPQNVEVIGNKVFIPKFKDGIKFTKHREIKGNIRSATISQVPSGKIYVSILCELPLEKPLTKTGKKVGVDLGLKDFVITSDGKRFKNPRFLKQFLKELKIQQKYLSRKKKDSNRKERQRLKVARLHEKITNSRNSQHHQISSFLVKNYDLIALESLNVKGMMANHRLAQSISDVAWSGFVSKLEYKAKWYGKEVIRIETFFPSSKTCSCCGHQKSNLTLKEREWTCISCNATHDRDVNAAKNILQRGITIQSSGTDDYRHGAKIRPKKSVKTPKGISVEVSKKKEHYAMEAERSLVVR

SEQ ID NO: 40218 - protein, 408 aa, Microcystis sp.
MKLAERHIIKRGHAFWDEIDQLSWSSKNLYNSANYLSRQNFIYGHGYLTYNQMDKLMQKTEQYQALPAKVSQQVLRRLDQNWKSFFEANQAYKVDPSKFLGRPKIPKYKDTKKGRNLLIYNKQAISKVALKQGKIKLSGTRIEFATSVSEQIAEVRIVPRCDCYVIEVIYEQIEQTLTQNDWIASVDLGVDVLMAVTSNQPGFIPLLINGRPLKSLNQFSNKRKAILQSQLKGNQKTSKRIQRLTRCRNQKVDNYLHRASRYLVNLLLEKNITTLVIGKNDGWKQNSNMGKANNQKFIGIPYNRLIEMLTYKCQLVGIKVVVTEESYTSQSNFFNLDPLPVYGETEEIPKFTGKRIKRGLYRTQTGFLCQSDVLASYNTLRKAFPNAFSYGIARCVVHPRRINLSKPK

SEQ ID NO: 40219 - protein, 237 aa, unknown
  TnpB Polypeptide
LHVNVTNSKQTVRNKQDSRTVVGVDVNEDNVALTALSEDGVEDTLVIDFPEIKFERHRYFTMRKRVQNAGKDSIHDTLEGHEERFVRDRLHKVSRHIVEWSQQFEKPCIVFEDLKEMRDSIDYGTRMNRRLHHLPFRALQFYTSYKASFEGIPTAWINPEYTSQRCPMCGHTERTNRNKKRFKCRSCSHQDHSDRGASVNIAVKGVKKLNWNVPALNSLPVVRKVRRQASGPWTPRP

SEQ ID NO: 40220 - protein, 488 aa, Sarcina sp.
MGKCRTPSFILEKKLLTSRKDEEALGLRFSYAVKIQCQLVKHARKQIQKLREDGEYRALLAARASIPKGGKGRVALDQKLGEKRLSFGLSQYQFKQWVKPMQHRYRKHIDSRSAQSIADDVWKAAEEVLFGGGKKLHLPKWHEVRSIESNDNATGIKYRSGRIRWNGLEMQVSRDRDNAYENEALKRRVKYCRIVRRPMGKRWHYYIQLVLEGYPPKKHVPGEGRVGIDPGTMSVAVASENGCILTSLTGGVRSREKEVRRIQRAMDRSRRAMNPDRFNEDGTMKKKRGRWKESRSYRILAMRKRSLEQRQAACRKDHHDTLADRILALGDEVYTETMSYKSLQRRKKETTVNSRGRYDRRGRFGKSLENGAPAMLLSIIERKLRYEGKALHKVNTRTFRASQYNHVTDEYVKKRLSRRHNTINGRWVQRDLYSAFLLMNSDAFLEHADRDACIRTYDKFLEDHDRCINEVISSGAQILSSFGISRAA

SEQ ID NO: 40221 - protein, 408 aa, unknown
  TnpB Polypeptide
MSRTIRTFEATIPNQQQVRDDLDQLGWAASKLWNVGRYYTQEQWDETGEIPDDGELKAELKGHERYTDLHSQSSQRVLEELAEAFNGWFGKRRNGDNRARPPGYRKNGDSHPRSTVSFKAAGFKHDAQFNRVRLSKGRNLKEHRSDFILCEYQTRPDVDLTEWDIQQVRAVYKRDEWRLQFVCRTTIDPEPPGDEVAGVDLGTERSPPSRSAVNRCCIPVAHSKKTNTTFREKKAACNDSSSREATRLDRKRTGRRTHFLHALSKAIVEECVERGVGTLVVGDLGGIREDDESSEPRNWGDHGNLDLHGWAFDRFTTLLDYKAEVEGIDVELVSERDTSKSCSACGHTDDNQRVERGLYVCEECDTVANADVNGAENIRQKVLPSLATDGGDRDKRLVGTASGSPVRP

SEQ ID NO: 40222 - protein, 218 aa, unknown
  TnpB Polypeptide
MKQIEVPNMLLKHYKRHPDKLINCKVKHIQKIDNYVRRNKVNTVGIDLGKYRFLAASNSDLTFTFVDEHNTFFQLFRKYESRLEDKQVDNNKAYSKLKTGLKNHINQVINELIEQVNETNSFQTVFVLGDHGSSHLSFPSLIFDLIYFAIKQRKHEYDEILIVDESFTSIECPKCQKRTSQNRTKSNRFRCTHCGFYYPNDDVIAAANIAKKGKLLVF

SEQ ID NO: 40223 - protein, 415 aa, Halococcus sp.
MEVRRTAPVKLAVSDEQRDALHETRDQFLWCANRASEQCWNKYDRDECITNKRTAQNALYDELREETDLTANLVIGAIYRAVEAVKGCVERWKKRQRVSQPEFTSWFIDYDKRSSTIHRNEASLSTHSGRVECPFVLPSDSPTPYERYVLNEDYELRTSTVHYDNVTGEFSLHITTRRFDSDEDADGSTDTEHQNRTVLGIDLGVNSLAVASTGTFWQGDDYDHWVREFEKRRAKMQQRGGQDAHRAMARLGKRERAWRKQYLHTTANEIVTEAVENDCSTIVFEELDGIRERLPFAEWHHVWAFRRLYEYVVYKAPERGVSVEQIETAYTSQRCSKCGFTHEDNRDGEHFCCQKCEYAVNADYNAAKNIGLRYARKQYHSLRSRQKSGSGDAPVNVRINRGTMTDDGPRPIAGD

SEQ ID NO: 40224 - protein, 427 aa, unknown
  TnpB Polypeptide
MRESRSVYNFANFLVRQGYFRRGGKKFNAEFLEEFNDEPSLRAEIEAYFEEGKMFTSRLSLILCAVARRWECDINAKIVQNVVRHLQADWASFFELLKKKKDSSYDEKVSPPRYKKEAFNLVEYNPQVISKKKLRAGFIGTAKMAQGVKLRRLLPNETVQAFRVDWKNERVQLEVVFKREIVDMPRETGDGEKIASVDLGVDNLMTVAFNYERRPVVISGMEIKSLNRFFNKEKAKLQGKLPKGTYSSRKIRRLMGKRYEQIRNLFGRITNKFVAFLLREGVTKLVVDYSKGWKSNAHIGKKNNQNFVQIPLLSLVKILRYKCEEAGIWMVTQEESYTSKASFLNNDAIPTYRERKEGEAKPAYKFSGYRQKRGLYKTKDGVFINADLNGALNIMRKAGDLPPEKTFPLAYLTRYTHICPISFDLCA

SEQ ID NO: 40225 - protein, 466 aa, unknown
  TnpB Polypeptide
VIQLLLNYQYRGYPTTNQKLELNDWLRIAQYWFNRQLGERFDWWENNRCAVNACPLSCSLPILRNNPDYYSQKKQLPELKKDLVLVQHSGELLDLSRVPSQTLQDVSKRAELAFNRYIQGDSNGKRSGKPRFKNAARYRTLKIEGQAVTIERIEKDWLFISIAKLKGWLKIRLHRPLPDGFVLKNILLTKKADGWYTTIAIEDPTVPTFNPDDITPSWDNSLGLDAVLHEDDYLATSQGEKLPSLKSFRKSEKRLAQVSKRKSARRKGSNRRRKLAKREAKEHQRIARARADHAYKTAHALVRTNKKVFYHEDLNLKALSKRNKAKQDENGTYLPNGQSAKSGLNKSWLDAAFGQFFTTLKYIAAKAGAVVVKVNPAHTSQLLSYRDEIVFTGCDLRVYYDPIEWIYVDRDINAAINIKRVGLGLFPTINRRSGKIKGDSLTASTAKEVLEVLSNTRSLHRPARAV

SEQ ID NO: 40226 - protein, 275 aa, unknown
  TnpB Polypeptide
MQMGIVHEQGSGSVRLSLPKALKIYMEKTFGIHEKFLYLENKIFRSMDQIKQIRIYPPEKGTSRIIVVYEIPDPEILPDKGHYLAIDLGLHNLMTCYDSGNGKTFILGRKYLALERYFHKEVARIQSVWYGQQSAKGIKYPRSSKHIQRLYKKKQDAVTDYLHKITMYLTEYCKKQGITCVIVGDIGNIRKNKDMGHMTNQKFHGLPYNRIYIMLEYKLKMYGICFVKQKEAYTSQCSPLSPEVTKKYAAPSNRKKKRAVQRQYGNLQCGCSRGV

SEQ ID NO: 40227 - protein, 484 aa, unknown
  TnpB Polypeptide
MASFEIPQGWKIQAYRFALDPTPAQEKTLLSHAGGARFAYNTMLAAVRANLDQRHAEKSYGIADSDLIPCMSWSFQSLRNDWNRRKHSVAVDADGTPWWPQNSKEVYANACRALAEALANWGASKKGTRRGDRMGFPRFKTKNGAPKAFSFSTGVIRLGPDRHHITLPRLGTIRTHEATRKLARRVEAGNARIIKATVRFERGRWLVSFTCIVARDIGRPAHVKRGAKVVGIDAGVKDLIVVADADGNELARHRAPRELKAAQRTLRALHRKAARQVGPWDPTTGTRREPSQGWAATQRDIRRAHARVANLRTDRTHKLTTQLSQTHEVVGVETLAVKNMMAAGGTHKRGLNRALADAGLGELLTQLDYKSGWYGSRVVKAERWYPSSKLCSRCGVVKSKLHLSERTYQCDSCGLVINRDLNAAVNLAHYAHNETDPSTGVVTGGADRKPSLAGDAGGSETRTRAEVGANADDGGSASPKGEAA

SEQ ID NO: 40228 - protein, 394 aa, unknown
  TnpB Polypeptide
MRQAFVYRLYPSRVQERAMESILTTTRYFYNNLLSERTQMWEECGERVTKVQQLRRVKERKATNPYAASVHSHILQVVVDDLDKAFQAFFRRVRAGEKPGYPRFRAASRWTSFGLKELGNGFKIDGRRLKVHGIGRIPVRWHRPIEGAIKTVRISRKAGKWYAAFSCVVQDQEPLPATGTSIGIDVGLTHLLTTSDGATVDNPRWYRAEQATLRIIQRRIARRQKGGSNRKKAVAQVQRQHQRITDRRKDYLNKLVADLVQSHDLIAIEDLRITNMTRNRRLSTSILDAGWGYLADHLMRKAACAGRWVSVVDPAYTSKTCSGCGERFTQEITLSVRWVTCQACGLSLDRDHNAAINILKRAHDTLDHQPAGTPPLGANVAGLPAGVAQEAAGF

SEQ ID NO: 40229 - protein, 287 aa, Symploca sp.
MIIYEFKVKGKKEQYKVIDEAIRTYQFIQNKCLRYWMENNGKKVDKYALNKYFAVLAAEFPFAKTLNSMARQSAAERAWSAISRFYDNCKKKVKGNKGFPKFKRYSRSVEYKTSGWKLSKTRKAITFSDKKNIGTLKLKGTYDLNYYDLKQIKRVRLVRRADGYYAQFAIDINLQVETQPTKQMIGIDLGLRYFIADDKGNMEPCPQFYRKSQKQLNRANRKKSKKYDKAIRQAKQPQSNNYHKARNRYARKHLRVSRQRKEYCKRLAYCVVQSNDLIAYEDLNVKG

SEQ ID NO: 40230 - protein, 222 aa, unknown
  TnpB Polypeptide
MMSLDRVSLNTLTGRVMGQLVLGEFQRRHLYDTSWKIGGAELVQRDGQFFLHITQTKLNPTPDEPTGFLGVDFGIVNLAVDSDGETYSGEDVKRIRERRFRHRQRLQKANTRRARWRLRKNARRETRFQRDVNHCISKKLVAKAKTERKALALEELSHIRKRTDHGCRRSQRRLRTSWAFRQLRSFVTYKAQQAGVLVIAVDPRNTSRTCAVCGHCEKVQQA

SEQ ID NO: 40231 - protein, 406 aa, unknown
  TnpB Polypeptide
MTVRQGFRVELAPTLEQRALMGAHAGLSRVVENFCLELVKAALEQREAEKTYSVPEKGLTPVPWSAPALERAWRAAHPRRFPWFGEDGLSSRVPKEACRVRAVGFKNFFDSRSGKRKGKKVGFPGWRKRKHGSRFRYDADRARPMDDRVVTLPGVGKVRTLEDMSWLTDRIDDGRARVIGSTVKESAGRWWVSFQIEIDRSGINQRRAVSGDAPACGIDVGIKTFAVVVDDDGTVTEIHAPKPLKTALRKLRKANKAVSRKQRGSANRAKAVKQLGKVHLEVAHRRADFLHKTTTRLARTKGAIAVETLNVKGMMSNRRLSRAIGDLGFGEFFRQLEYKSQWYGSSVWAADRWFPSSRLCGDCGTINAGLTLADRVWTCGCGLEHDRDVNAARNLLAAMNFERHAA

SEQ ID NO: 40232 - protein, 465 aa, unknown
  TnpB Polypeptide
MARFTIPDGWTVQAFQFALDCTAEQEACLRRQFGGRRYARNWAVRILKEDITRYRETGEETEAPSLAGLRKRWNQVKDTECVDAGTGEVWWPQISKEAFGDGIKAAVDAYWNWQSSRAGTRQGRRVGFPRFAKKGRDRDRVTFTTGAIRVEPDRRHVTLPGVGTVRVHENTRRLQRLISKCRARILAATVSRRGTRLVVAFRVLIQRPIQPRVTMPGSRVGVDVGTRVLATVANSGSEVIERVPNPRPLETALRQLRHLSRERSRRTQDSRRYRQTQRKITQLQRRVANIRSHHIHALTTRLAKTHGEIVVEGLDAAGMLRQKGLTGARARRRGLSDSALGETRRQLAYKTVWYGSNLVVADRWYPSSKTCHACGHVQEIGWDEHWICTRCGTSHQRDDNAAINLARYDEPHPGDSALGPVRTTVKRGADRKTRPVRAGGNETRKGTSQQAGKQPRDGVPVGGSL

SEQ ID NO: 40233 - protein, 458 aa, Streptomyces sp.
VQAYRFALDPNAGQEGALRSHCGAARAVYNWAVSWVTASWWQRRAEASYGIGEEGLTPWRPWSLPALRKEFNRIKTTDPRFAEWWEENSKEAYSTGLANAAAAFDNYAKSKQGRRKGRRLGVPRRKPKRKARLACRFTTGTIRTHEPTRKLLVRIQAGTARLLSATVRYERGRWFVSLQVETAREITRVNRPDAAVGIDLGVKHLAVLADSSGQTRYEPNPKHLDSALKLLRFHSRRVCRRQGPDRRTGRKPSRRWEKANRERNKLHHRVANLRADALHKLTTRVRAEYGTVVVEDLNVAGMLRNKRLARHVADAGFGEIRRQLTYKGRRNACPTIVADRWYPSSKTCSNCGAVKAKLPLHVRVFTCDACGLVLDRDENSARNLAALAAACTTGTGVAGDQDTPRVSKPHGADHKTRRQRPGRNTGRGGRAGGANLPHPRRKETGDHRQDTEAQLALW

SEQ ID NO: 40234 - protein, 533 aa, unknown
  TnpB Polypeptide
MVSQSPYWEDDHVERSKEILNSIKLTLPKETKINSPTETYSWFDSSYEEFDVEKQKGLWKDFFEAHEERWGETKREKKTFVSKITRIYPTEEQKKTLVRWNNDAKLIYNTTVGTLNGTSKKSNKYQLRNDLVIAKNTKVTDPKILLSMERTPKDIRAKAVFEATAAHNLSLKKTITLNPKYVATEKLITKTELSMAKLEKERARKKNPISKEEFTEKTSDLPNLECLKEDLKWIPKFQAKNSNLKFRTKKDQYSHIFIPKTAAKIKGNNLQIYPNYKLGSIRIKPPRTKKTQVKITSDFQIRYHRKLDVWHIITSEEINLAEKREEYKTVVIDPGVRAFLTCIDSEGLIAEIGKDWALDKKIKERMFKMDRADRMSKEPLKGKRGQERFNSLIAKRNFNLHRRKLHNMINDLHKKTANILLEEYDVIVLPKLRAKTILKSDDGLGNLVNRRFSLLAHGKFHDYITWKAQTLGKTVIDQSERFTTKTCFSCGVLNDIGPSKVYICESCGNVSDRDVQSCFNILTRYMGSYTPRT

SEQ ID NO: 40235 - protein, 443 aa, Escherichia sp.
MVKNLTSVSGDKDQVNMHQENTMLPRRISVSLFIDQSIIWPVKRLQAFKFQLRPGGQQEREMRRFAGACRFVFNRALALQNENHEAGNKYIPYGKMASWLVEWKNATETQWLKDSPSQPLQQSLKGLERAYKNFFQKRAAFPRFKKRGQNDAFRYPQGVKLDQENSRIFLPKLGWMRYRNSRQVTGVVKNVTVSQSCGKWYISIQTESEVSTPVHPSASMIGLDAGVAKLATLSDGTVFEPVNSFQKNQKTLARLQRQLSRKVKFSNNWQKQKRKIQRLHSCIANIRRDYLHKVTTTVSKNHAMIVIEDLKVSNMSKSAAGTVSLPGRNVRAKSGLNRSILDQGWYEIRRQLAYKQLWRGGQVLAVPPAYTSQRCVCCGHTAKENRLSQSKFRCQVCGYTANADVNGARNILAAGHAVLACGEMVQSGRSLKQEPTEMIQATA

SEQ ID NO: 40236 - protein, 402 aa, Halobacteriales sp.
MELRRTVPVKVTVDPEQATLLHETIEQFLWAANYVVDRARQADGYVLTQSETLHERTYETVRDNTDLHANHVQAARRRACEAITATVTKWKQSKTASLPTFSSPFLEYDKRSATFHDSCASLATVNGRIEVSYLLPSNTADTPHEAYIEPEDHEITGATLHYRDHSDEWYLHLRTIAELDAPDPVENGTVLGVDLGVENIAVTSTGMFWSGTELDHWRREYEKRRAGLHRCGSRAAHEMIQSIGQKETGRFTILLHRIANGIVEEAADRACSHIAFEDLTDIRDRMAGAKRLHAWAFRQLYAFVEYKAKERGVQVEQVDPKQTSRRCSTCGHTDPRNRPTQERFRCRACGYENHADYNAAKNIGYELLRNQNGAEGGAPVGVRVNGGAMTASGADIALPISG

SEQ ID NO: 40237 - protein, 385 aa, unknown
  TnpB Polypeptide
MVMLAHQIRLEPNRREEEYFRKACGISRFAWNWGLSEWKRRHESKQKVDGLRLKKEFNTRKALEFPWTYEVTKYASQQPFLHLQAAFRRFFDKKGRYPRFKRKGVHDTFYIGGDQLEVSGKSVRIPRLGWVRMREKVRFRGKVVSATVRRIADRWFVSVHVELEEAPAPCESQAGVGVDLGVNRLATLSNGETFEGPKPLRKELSKLRRLSRALSRKEKGSKNRLRAKVMLQRLHYRIRAIRQDSLHKLTTYLTRNFGAIAIEDLNVKGMLRNRRLSRAISDMGFHEFRRQVEYKARLRQNHLEVVSRWFQSSKICSECGAVKESLSLSERRYRCTGCGFESDRDLNAALNLFRTVSSTGFQACGEEGSGFSQRWSETVLCEAGT

SEQ ID NO: 40238 - protein, 383 aa, unknown
  TnpB Polypeptide
MGKVQVIYKFRLYPKPEHEKRLSETLELCRQTYNYFLAQLNEKERIPSRFELQAQLLKLKKERPELNRVYSKVLQMVLYQLYSNLKALSQLKKNGKKVGRLRFKGKRWFKTFCYNQSGFKLIKTGKRLDILHLSKIGDIPIRAHRKVEGKIKQIIIKRHGSGKWFVHICVEKEIRVVKREPKKVVGIDVGLKHFLTDSEGRQIENPRLYGKTLERIKIEQRRLSKKKKGSKNYEKQRKKLAKKYEKLVNQRNDFLHKLSRFYVDNYDVICVENLNIRNMLRNRNLAQRILDASWGKFLQLLEYKAEKAGIRVVKVNPRGTSEGLNYKNKLRDWISANRIKMRGWDNPDSLLERRPLLKTISYKEVVSGQVFSMKQEASCESRG

SEQ ID NO: 40239 - protein, 405 aa, Scytonema sp.
VLVLEYKIKGKRQQYQAIDEAIRTTQFIRNKAIRHWMDAPRETKIDKIALNNYSTALRKEFKFVKDLNSMACQAATERAWLSIARFYDNCKANKPGKKGFPKFQKDNRSVEYKTSGWSLHQTKRRITFTDKKEIGELKLMGKWDIHTYPVKSIKRVRLVRKADGYYCQFAIDIDVKPEQRTGNDEIGLDVGLEFFYSDSKGHHEENPRFLRKAEKSIKHAQRQIYKKEKGKNQRRIARQRYAKKHLRINRQRNEHAKRIARNVCKANALVAYEALNVKGMVKNHCLAKSINDVAWSLFRRWLEYFAGKFNTQVVAVNPRMTSQKCSDCGATVKKSLSTRTHKCACGCQLQRDVNAAINILNLARQARDGQSRSNATGLVTSTLVGESLLKQVTRMNVESPGFPNK

SEQ ID NO: 40240 - protein, 388 aa, Ignavibacteria sp.
MFRAFKYRLYPTEPQKELIAKHIGSSRFVYNLALETKTTAYLGSKHNYSAFDLIKQLPELKKELPWLKEVNSQSLQQAIHNMDIAFKKFFKGAGFPKFKSKHKGKQSFSIPQNVKVENNLLIIPKFKEGIKMSLHRPIKGTIKSATISVTPTGKYFVSILCDTKEEIPTKAPITESTTIGIDLGIKDFAVTSEGEVFENPKFLRKAQSKLKYIQRKYSKHKGKRTKQKLALLHEKVTNQRKDFLHKVSTKLIRENQTIALETLAVKNMVKNHNLAQSISDVSWSTFVSMLEYKAEWYGKNILRIGQFAPSSKTCSCGVINKGLKLSDRKWTCKSCGTTHDREILAACNIKSFALNLSGEHRLKNQDELPTLVGVMTPEAQPIASGVGG

SEQ ID NO: 40241 - protein, 370 aa, Bacillus sp.
MTKQNKAYKFRLYPTEEQAHLICKTFGCVRFVYNKMLAERQEIYETYKENKEELKKQKFPTPAKYKVEYEWLKEVDSLALANAQLNLQTAYKNFFSGQSDFPTFKSRKSRKSYTTNRVNGNIMLFHGYIKLPKLKMVKLKQHREIPQNHIIKSCTISMTPTGKYYVSILTEYEKEIAQKEVESVVGLDFAMAELYVSSEDEKANYPRFYRQMLDRLAKAQRVLARRVQGSVRWNKQRICVAKLHEKVANQRKNFLHHKSKELATNFDVVAIEDLHMKGMSQALRFGKSVADNGWRMFTTFLSYKLQDQGKRLVKIDKWFPSTKMCSHCGNRKDMSLSERMYECSCGLKISRDYNAAINIKKEAIRLLALA

SEQ ID NO: 40242 - protein, 450 aa, Moorea sp.
MQLGYTYKLKPNKKQEVTMNHWLNMLLAQYNYLLRDRNDSYDQAKAPRLGNYCDLKSGGEACPLTCSVNKSHSLGYPWKKSQKNPRRTAYEAQSSSFPNLKKERPWYKSIHSTVLQQTLRQLDVAFSKFFKGETGYPKPKRRSRFKSFKYAPGQVKLDGSRIYLPGIGWMGFYNSRPIPNGFTIKSVTVRKKARGWFVSLQIEDKTIPTPSPKGQNEINPLRVKGCDLGIKKLVSVSNGELINNPANGQKFKRQERRLKLRQRSASRKKKGSKNRSKAFCRVASLHDRITNKRSAYHWDVAKKLVDEADALVFEDLNIKGMKSRCKPKPKEGGGYERNGQSAKKALNRVISNAAWGELVKKVEVVAAKSGIPLIKINPKCTSQKCPKCSHTSKDNRKKEKFICTECGHHDDADINGAVNIKMRGLKKLGIDPTQLPSVRGKVTPMESTVS

SEQ ID NO: 40243 - protein, 363 aa, Succiniclasticum sp.
MFKSVKLRIYPNKEQQQLIQRTFGCCRLVYNKFLAMRDEASVNGEFLNFYDTCYKLVELKKSDEYSFLKDVDSNALRYSLYDLDKAYRRFFRKIAKHPKYKRKKSRQTYRTGNLHNVIRIEGNFLKLPKMGFIKIKQTMPVDNIRNATVERTATGKYFVSLLVEFTPKSIVDGCNKKIGIDVGLKEFYTDSDGNIVHNPKYLENCTRKLIREQRRLARKKIGSNNREKQRLKVASIFEKVKNQRNDFLQKQTTMIVRENQTICIEDLLIKGLLRNHHLARSISSVAWRKFSNMLEYKAKWYGRTLIKVPQTYPSSQICCNCGYKNPKVKKLHVRKWECPKCHTIQDRDLNASINILNKALNQA

SEQ ID NO: 40244 - protein, 537 aa, unknown
  TnpB Polypeptide
VAKKTDFTILGNFSIQVNDRKSKKSLSFSIKEDCFHVINMVLILREQLFSLRKTNQTFENLYQSFKDIEILRETVYSRKGKAKKAQKIRELTQYFKNNSLFIALQKYAKRKLDAKTFHSILTTINANFSTYKTHIGKYYENKEAYFKEMGTKGIPKIPKPKKLKKIYHASINVDKCRWNFNTITKKVKKEKINHEVLSIRVGTKRLYISSNSKNFPIPKDCQIRNLNVVYSNDNIYLNFGYGKPNKQITAEKLVSKPTKIKKELIASGDLGLINILSVFINDKNDNSFIFSGKRFIKYNCKYNKFIAKLNKDIAKNATKWKEITIKDEETIKIPLEYNARGLYLMDFKRFLTEKRNKFFKEEFEKLSTSLVKYLDKINVTEFIISKNLSFLKNKNHEEKNKLNKKTQQKFYQIPLGSFLNMIERKCEKIGIKTTDIDEAHTSKTSCLSADVNEMVELRKEREKSLSTNDYKGNRVKRGLFKDKKYGIKIHADINGAINHIKVAYKKINFEWLLDYKRKLCNPRVFKSDIDFRQQLLC

SEQ ID NO: 40245 - protein, 428 aa, unknown
  TnpB Polypeptide
MSEEKNRKIKDTLRVTKERHSQMDCRVFSVKVQENRLSRAKEEKLNRCFLEAKWLRNAVVATDSLSLDDTSSVQVKVNGTFETREISNLSSQMKQFVVDSVKQDVFNLSKAKKAGLKVGRLQYKHECNEINLKQFGNTYKIKSHNKISVQNIGVLVVKGLEQINLDEVEFANAKLIKKPSGFYIHLTVYTKKQPQPETSKEILGLDMGIKDQLTFSNGVKVNFYLEESEQLKGLMGKLSRQTKGSNQYKQTLNRIKRIYEHLNNKKKDVVNKLNFVLKQNYIVCFQDELLNSWKRKKSKHKFSFGRKIQHGILGRVKGNLKKNTSNVMLDSSVPTTQTCPECGCLTKHSLDKRKYHCEHCGYENPDRDIHSANMMVLLSGYGTYRSLNTDAVSTNKMVSLLDNLSNLGVVVTTNSMEANRLNAVSSSH

SEQ ID NO: 40246 - protein, 600 aa, unknown
  TnpB Polypeptide
MGKKKKEDTPIKEKTTRKDVQERKETNKNTEFTCVKTSFNSLVENNYLNGGIQEIVLNINKICFLSYQLLNYHFTRLIQENKPLPEITQNLFYQACSTVSVMKERKEKIDTTDELYISFSHYKDHLGELPFRDRMGNLINNLNKQQLTMTENHLKLNFYKRFHTYLEIKTGETRKSVIYKWLKDIYANEYTGNNYFIKSMREWLKYTPTEFNIKAHSSHFVKIYYKILKTFEQYLNSKHIRTFNLLPTKNSFTLSTIEICSSCLKDIIGYFTKEPLPDDFKDNKLVYWYEFFKIEKFETKQRKFANTIFTDGKIAVIRLRKPKVEILKSKDTKKIKYEQYVGIDPGVRSLQTSCNDAGRILETTTPKYRHDCKMKYACRKREMWYKGWEHYEMWRNIPSFKTTNLEKMCKYFEYVYPNLNTIFKFHLYKNFRGLSFRSYCRGKATMHKLCKTIVENKKTLVGFGDFSQQHGLVKKHPTAPIQKFKHELRKYCDVIDIDEWGTSKTCNLCMKPIELYKNKVIRKKRDGTYTKARISQINSVIRCKLNECKLCCMDRDINASKNILYLLQLQQAGKKRPECFSPKNMNDYDTPLWEDKYVVA

SEQ ID NO: 40247 - protein, 1102 aa, Actinocorallia sp.
MAGCRVMKTTTTPDAGPSGTPAGRGGGRRTRGANKAAAWRYDGPVAVIRLPLAVDEQAAARLESLFWAMFCIKRALQRDARARVAVFWTGVHRRERDVVEWRKQLGLSRPGLERAAYAHLDASGWLRHHASKALVMHQADEVWTGVERHLFPDSSGRRAGRPRTGSWWEYKRIAGRARSHTQARKWETFRLHGSLQGHLDAYRHPALSPEVTSPAQASVLQPGTPVLAQPRRMPPPGAGGTGGAGGVRRGAWWGYDGPLMVVFNGGPDSGRGELVLPVRLPAGAGRWRWLRHFLDRPELWHKIDLVRRPHASAPGGWVYEAHLMVLDGGYTSPATRERRRRASALDRVGGVDANVSNLSVLSLPATLDPADGPVLADQNVLTEVEKAAVEREQRTARRRSRALERSRRAANKARYELSRRQLERQRRRQANGLPDRHVDLPKGPRRADAAGRPLDSYRTDRLTGGYRALRTRTRTRAEQTGRTEAKQARARAVAARLVEAHGARLTVEACHLPTWFRRWGRACAVFAPGMLTTTLATECAAAGGWLGRASTFTTALSQHCLCGQRVTKTLTQRVHDCPACGLTGDRDLVSAALSAFVVWTDETDPRTASVDYLSSRHALGVFGPGLQGALAGSTVTRPHPARQRGRGRDGSRTRTGGASARLIPERQWSRPRTGARKGPHRTDTTGHRTVSATSKQSLAPLGDAHVLGADAVGQQGDHRAGQRAQPRHRPERGGREAPGQGGGDEPPLDQELQALDGDGGGRPAALDGGQVRGRDPAPRQRLPQQVRGGHGVLDRQVDADAQHRRHRVGGVAHAQQARTVPAAQPVDLDPQGADLPHLADAPGHPRNQLRDRGPDRLPVAGRAVLGHHVAHLPVGVAVDGDHEPPPAAHPQERPGAVGRQARHPEPADVHRRAELAQRKPLAQHRPAAVRGDRQHRLQDVLLPLLVPVAQPRTGEAEDLAVHPQREVRVPARLVGQQVQEIPLRDEGDVAVPSPQPRQVGDEQLLLVGDGRHPLRPALGQPGEPVAEAQLVQDLQGRRVDGVAAEVPQEVAVFLQHDDLHPRPGQQQPQHQPRRAASRDGAGRLLHARIHALPRAVLTPKPA

SEQ ID NO: 40248 - protein, 471 aa, unknown
  TnpB Polypeptide
MTKVTKEVVRGTHFFIPKQHAEMLHEQAELYIQHANQIMYRLLPHYQQILTTYPDAIIDSKGILFKSNTKDDFVTGMDGERYELAVNTNYKKGRQVWWTPSQLNNKSQDIAKVLGKTRLEIYPEQGKKLKDTQMKDMLRNIFPELSDSYTFDVMDYCSNRITSRKRNATNKKPFNQIILETVRPPLLRNLTIHSKRKRFKLDRTNQRVLYKDHNDEIISIPYEFHTPLNDVINPDGLFDKWCGGNYVVNFKDRNIYNQFTVLCKKLQTFDYMPIGWNGVDINVARDHALTFYDLLKQCAFVWERSDYAQQMIDERAEITKQIDDKNKGVCGAKVRGRLRKKRDIISVRQQRYCRKIFIPLLNKLKHNRTGLAIDYVSFGASSGNSGLQESICKVLPDLCHEIGVPYHLVNPAFTSRDCSECGHRHTEKQKAKMKETFVCKSCGWTLPMHQDAARTIATRAQNGHDLKYHSL

SEQ ID NO: 40249 - protein, 472 aa, unknown
  TnpB Polypeptide
MPMVPKDVRQHSQSISNLEELRLIALRYATVRNYVFSRYSGINSLNIIEKHRKEIRDVWVDTGFADQWHLPARYWKNALDEAIANIKSEWSNTKRRIKESVKNNPNLTDTEKHFIYYALRDKVMFYAILTHKTFTRPKKIENLVIREKYVLNLIRRYVRKYKGTIPVSRKKRSFFIDDPMYAYKTVDNTNVIEITGLTRNKRVDIALRDKNIHSGGLRVVIEDDNSVIIHRLKQVEAEPSADSGNIIGIDKGYTSLFAVSSNRFYGEKLSELLTTETERLNAVNAKRNQLWALMNQYTDEGNLEKAERIRVNNFGKVKYNSQRHRFDATVKSYINHEIKVMLDTEKPTGLVLENLNFHSWVKKLPKKIKRKLSRWIKGYIQERLEYIASLRQIAITVVNPAYTSQVCHRCGAFGKRLEKTFTCPTCGTMDADYNASRNILIRKDDPEISINTPYKSVKEILLNRYNSSLVVA

SEQ ID NO: 40250 - protein, 339 aa, unknown
  TnpB Polypeptide
MILTFKIRHGRDFSNELKKAFEVAEFTVRNKIKSPNTTFVKDIRGTLPSTIACQVMKKYGHQRTIKEVHKVNMIVPGQGVRYFKETNSIWIPCLKIHLENTIPYTFTKINQVELDREFAYIAVTVPEQPEMIPRAFIGVDRNTTGHVAVTANPDTGKVEKLGKKALHVHRKYSAIRKRLQEQERFKELKAVKDRESRIVKDLNHKISRKVVEMAKVQHAALVFEDLGGIRKTRNQNRSFKYALHSWSFYQLQQFVEYKAKLLGVPVLYVDPAYTSQDCSRCGAWGQRNGKDFKCPVCGHVDHVDANAAFNIALRQVSMVDRAVSESCTMGALIPHWSSG

SEQ ID NO: 40251 - protein, 411 aa, unknown
  TnpB Polypeptide
MNIQQVEKHIIKKSHPYYSMFCEFTHQSKNLYNHANYLVRKDFIETGKWLRYHALDKILRKDIEYPDYKNMPTAQSAQQTLRLLDDNWRSFFKSIKDWSKNKGKYSGKPKLPKYKSKDGRLVLTLTNQQIKQNENLISFPKSFCGFTIKSRCVTLSNFEKLNQIRIILQNQVFCIEIVYSIFIEDTVIQDNWQYMSIDLGLDNLAAIVTNTGLKPILINGKGLKSNNQYYNKKKAYYQSIAKQMNEKNYTARLHRLTLKRNFKIQDSLHKVSKLIIDTALSNQITKIVIGNNKCWKHSISLGKRVNQAFVNIPHQKLIDKISYKAQKCGIQVILTKESYTSGTSFIDSEPPRKEFYNKQRRIHRGLFVSNKGISVNADVNGAYQIMKKVFPNEFSNGIEGVVLHPVKVNIV

SEQ ID NO: 40252 - protein, 400 aa, unknown
  TnpB Polypeptide
MLREFCHRSKNLYNHGNYLIRQTFIEDGKWLRYGEVDRLLKADKDYLDYREMPTAQTAQQTLRLLDKNWTSFFAAIKDWKAHPEKYKGRPNLPKYKPKDGYFPLVLTNQNCKLKDGVIRFPRTFQGFTVKAIFASRPEAVFKQARIIPHGGEIDLELVYELPEVEEKGDNGKYAAIDIGVDNLAALAWNTGKRPVLLKGTPLKSFNQYYNKQIAKCRSICELMNGRHSSKRIARLTAKRNRKVEDYLHKASRKVIDLCTEQDVSVLVVGKNKGWKQKANLGRKVNQSFVPLPFARFIQMLQYKAESIGVKVVLTEESYTSGTSFLDGEAPTKDRYDKSRRVHRGLFQANDGRKINADINGAYQIMRKVFPNVNADGIEGVALRPAVVALSMSARRGSGCA

SEQ ID NO: 40253 - protein, 450 aa, Weissella sp.
MKFEKLSNTVENIYVRRYHVVATPELIKHHAHNMQTQNRLWNFGNKYLEKTYGRKHLNRPYPNNKTQKNYVINCIKAKFIKENYNLNRWNATIVGLHSQGANEFLTTLLTNFGEYRKTLYRASTMTAQEKLEYVNNVHGNNSQHRSWYRKGSLNYLRGKNSFKTVSLPNNNQVEIVSAHHIKIQDYGELQVVENISNLRNTTIGITKLKRKNNGQFELQLVFKRQVFRVDPATMVAGDWNMTNNKVFHTSNDEEIYIKNDVAAKADTIERQINRLKSKRDRSIWLGKDSRRVVQMNEEIRYLNIKRKNILDEHYKQLAHVLMDDYDVIVIEDLNAKYMRAKKRQARSANRKLAMIKPCRMAQFIEMLANRTGKTLIRVDAYKTSQIEYGTTHEEKHNTSVRKWTSTLTGKLINRDLNASWNILDWGLNPEHHIKLKDYPHLSASSLVTIN

SEQ ID NO: 40254 - protein, 521 aa, unknown
  TnpB Polypeptide
MFVSLQFKLELKKEDKQKLIKLMRKQSSAIRVAYNMLKELEKEKTKNPHAQIYQRLRQLFPELPTRYIDSAIYKAKQYPTDRPVVFGGKRLFEKLCKNHLSGKAREKLKKQWRELRQGTLISIGSKADKGNRLMRFEDLNGQLCLRITTGSREFIYAKVLREPSNSKDKWLTFMAMLLESWQTKNYFAYIVELKLRGGEVYGSVSFELPMPKVRYTKENGVIAIDTNASPIHLAIAEVSKTGELLSYKTISLHHLLRLSQNSKDHQEWILAHQIVDLAIQKGKAIAIENLKKLKRGVRGDGKATLRKRLHQWNVKKFLQKLKRVAVLKGVEVVEVHPAYTSVIGMLKYAPQLNIDKDIAGAYVIGRRALGFKEDMPKNYEKLLKDKTYLKFALKKYEDREKELRELLKEETNQYKRNAIKSELKNVEYAKELLINLIQSLQSESSSCEGAYGRNPEQGRGNLASFVAWQVLKVALLFPILGKVLPRDLSPLKPVLVEGAWDRVRSRLVPFEAGGTVPIRDF

SEQ ID NO: 40255 - protein, 190 aa, Acinetobacter sp.
MKTLKLRIKDKHSKMLAQLASEVNFVWNYVNDLSFKHLKRKGKFLSAYDIAKYTKGTSKECNLHSQTIQAVTEELVTRRKQFKKSKLGWRVSNKKSARRSLGWIPFKKVAIKYADGYVQYGKHQFKIWDSYGLLNYSIKTGSFVEDACGRWYVCLVVDSPKTEKTTATKAIGIDLGLKDIGTCSDGTVEQ

SEQ ID NO: 40256 - protein, 354 aa, unknown
  TnpB Polypeptide
MQVVEQHCISKDDPRYAIIDVAAFKSKNQATFTGRPKLPGYKHKTEGRNLLIYTVQALRGGQSKKGLPPGRIQPSGLPVEVKTQQDPKTIDQVRIVPRKGYYVVEVIYSKEPVQASVDPSVCVAIDVGVTNLAAITSNCAGFIPRLVNGRPLKAINQWYNKRMKELTVCLPKAERERVTKQMRRITTHRNWQVNHYLHAASKRIIDLLVQEGIGTLIIGKNPFWKQEASMGRRNNQNFVQIPHARFIDMLTYKAALVGIQVEIQEESYTSKASFLDWDPIPTYKPDDEEKHIFSGKRIGRRNRLYRTQGGRVICADVNGSYNILRKRKPDAFVHANAKGVAAYVVQPLRLAIAV

SEQ ID NO: 40257 - protein, 392 aa, Escherichia sp.
  misc_feature (173)..(206): Xaa can be any naturally occurring amino acid
VKRLQAFKFQLRPGGQQECEMRRFAGACRFVFNRALARQNENHEAGNKYIPYGKMASWLVEWKNATETQWLKDSPSQPLQQSLKDLERAYKNFFRKRAAFPRFKKRGQNDAFRYPQGVKLDQENSRIFLPKLGWMRYRNSRQVTGVVKNVTVSQSCGKWYISIQTESEVSTPXXXXXXXXXXXXXXXXXXXXXXXXXXXXXXXXXXQLSRKVKFSNNWQKQKRKIQRLHSRIANIRRDYLHKVTTTVSKNHAMIVIEDLKVSNMSKSAAGTVSQPGRNVRAKSGLNRSILDQGWYEMRRQLEYKQLWSGGQVLAVPPAYTSQRCACCGHTAKENRLSQSQFRCQVCGYTANADVNGARNILAAGHAVLACGEMVQSGRSLKQEPTEMIQATA

SEQ ID NO: 40258 - protein, 545 aa, unknown
  TnpB Polypeptide
MVVGMLLYSFIINYWLEWRFRDKEGLWIMARMKKRDKRWMWVAKPGDKIVVSRTAAIPSKQISRRDFRALEEILNIYGRMLGDVLPHASRNIIESYYRLKNEKYRELRNIYPDIPSHYIHGVCQDAVERISSLRRNRARQYSRESFDELVKHLGLGKKDLRSKRLVRYLWRRSWEIARHQVDLEMSDGILVPRINSVSLWLVDDHVWKPIDATKININGVENTFFTRVAINTHRGWVYIDLEPSKEFYKLLARGFKPSSHAKIKLDRRNRRVLFHLSLEKEAKIYRPGNIKPIDVNENSVATLYGAFAVILETDLAETTLGYSYRKKSIQRRNGSDSREARNAMKKLKEGKKKRDYRWKTANLIVRDALRMKGVIVIERISGEDIRVMIARYRNKQLRHRIYQSALKGELNTIIDKAREYGVPVLMIDPRNTSKICPIHNASIEYGEDRIGICSKGGERWHREVVALINIYFKALEALDEGIAQKGFEVSILDGSPIPLGSTATHEPIGISISLWGRWKSLDDHRGVITSLWIKKTQQHKTKENQ

SEQ ID NO: 40259 - protein, 657 aa, Streptomyces sp.
VSRKLPLAEGETSRTACARGLLRTGVDERTGELLSAAALAERVVWCVSLVSGMVSALTVERWNTADVDTLAAGEDAGGRKLPSNAWMALRRLGWTVAPPEGVKVNDRIVRMAQEQAGRALRSAKWRADLTAGVLTTWPGDPARRTADEWDAVREAVPGGQFLPSSVIKSRTRQTASFNAKNGRMPVDVFELEPAPRTARMLLLSACDGQQATIERADEPGRALLRLQLPTRPDPASYKDWTWVACRISLPPTIPAGAVLHLPTLRIHRDRVRADLAYTHAVPKTSRTGHTIALGVDWGLNTLLSAGAARLHDDGQITALGSGGQFRAAGVLAKQHRLRRLSEHLHAKTDRYQRLTGGDKQHSLTAKHTVLSDEIRHVCDRRSHLNDALAWAAARWTVDQAITASATVIHVEDLRSMEARGMGRTVNTRLSQQVRGQIVDHMRHLAAEAGIAVVTVPARNTSKHCPQCLTPLRHRKAPDRPTAPGWKWALCPSCRWQGDRDQGAWRRIAARGLTHQTKTVTDCASGAMVIRTVVDKLETRAVITATADKTSRNDRSKTGPTRPRTTRPTPRRRRTPSPTRPTGPAGKRPEGHTHTDRTRLPRAAHRHQGVTTISIPTASRHRPRGAALGAGFHLHAHATPQRWAIPSPDTTSDTGSLS

SEQ ID NO: 40260 - protein, 541 aa, Streptomyces sp.
VGSRWDNATPPSGSRTASARGWRAAPVNPTTAATTVSAWRIFSHARVGGPSRFLRRAEKKPKKAQRELSRKQMRSKNREKACLKVARAHAQVADVRREFHHQLSTQLIRENQAVAVEDLAVKGFARTRLGKSVHDAGWAQFLAMLEYKAQRYGRVLVKVGRFEPTSQVCSVCGVKDGPKPLHVRTWACTHCGTVHDRDHNAAKNVEQAAGLAVTACRARLRPGLVPARREEAGSHGIHTGVRAAQRHSSRRGRTESRCFSRGSKSMSGVDGLDSGVRVRLRRQGEQEAPSGKGGGWPGGVDGVHGGPGVPEAQQLGGGDRGVGVERLDPDEAQPLDIAQQPGPLDVAGRQRQHRRIQRPQPAGRLHVERRDRLVERILRVVQRRSGRVVQDKRDCPHYAAVCEPCCAAPRLSRRALAFASASELGTLPRAEASSARASSARSAYSAWVGVPCASSSTRLRMVLPCSAASTASRSRAAALTLMLVSSVAIFRLYRSPLLSVEDCVHCSHLWRPRLSSPLGAAHGAALPLPGAVRAGHPRWHG

SEQ ID NO: 40261 - protein, 322 aa, Nocardiopsis sp.
VGVSTITVQLKLTPSPEQAAVLGATLRALNDHATHVSQTAHREGVVKNHPLRKLTYPGLRAAGVGSQAAQLTIKKVADAYTTRTANLKAGNYGPPGSKRRRRIESTPISFRPEAAQPYDARNLSLALDQRTISLWTLRGRLKDVPFAGSPDQLKLLADHERGESDLLCRDGVWFLLVGVQVPDTPEYAPDGFLGVDLGIVNIATTSDGEILAGRGLNPYRRRQQRLRAKLQTKGTKSAKRLLKRQRRRESRRARDANHVISKRIVAEAERTGRGISLEDLRGIRARVRQRKPQRAALHSCRSTSSGVSSPTRPGGPVRRWCR

SEQ ID NO: 40262 - protein, 464 aa, Lactobacillus sp.
MIHLSDTTEYVRVRRYRLVPTEELRMRYKVNIAIQNDLYNYALKYLEKTYGYKHLGRKYPDTRTKKIYVIKDQILPKYIKEKYNLKRWNNKIIGLHSQAAHQFLLTMITNFGEYRKTLMLASKMSKQDKEGYKNNVHNNNPKHKSWYRKGSLNYLHSDRSTRCISLPSNGQAKIMSAHFIKIQDYGIIQVVENLANMRNTDIVTTKIKRKSDGKFELQVVFKTVNKRKEVINKIGADWNMKDNKAWHTSEDEELYINKDVSDKADELENKINKLKSQRDLITWLPRNSKRIVKLNKEIRYWNSKRSHILTDEYNAMAKKLLSKNDLVAIENLDAKEMRKRQEDSSNSQNRAKNRKLAKIKPYEMEQLIIQMANRLGKTVILVDSYKTSQVEYGTEYQEKHSIDDREWTSKYTGKTIKRDLNASKNILAWALNPKEHIKYKESLALQKEGKIKKAIRPQSLIAIN

SEQ ID NO: 40263 - protein, 358 aa, Polynucleobacter sp.
MSETALKTIKTLCLRVKDKHAKTLCAQAREVNLVWNFINELSEKHTRRTGKFFSAYDLNKYTTGSSKEGLSLHSQTVQAINEEFVTRRIQFRKLRLSWRKSSGVRRSLGWIPIKKSVIRYRNGQLHYQGQIINLWDSYGLADYELGSGSFSEDARGRWYFNTTVKTQNDQNTAITSVGIDLGLKECAVASDGQRLTGRNYRKLEAKLGIAQRANKKLRVKNIHAKIKNRRKDELHKFSTKLTQEYGAIFIGNISSKDFIQTKMAKSTLDAGWSLLKTMLEYKSDCAGVVFEEVNEAYTTQTCSCCGNASPSSPKGRAGLRIREWTCSDCGSVNDRDLNAAKNILALGHERLAGGILSI

SEQ ID NO: 40264 - protein, 369 aa, unknown
  TnpB Polypeptide
MTEDIVDQEGESGVRQCGARSALTVMRFRLRDKHARELSSQGRAVNFVWNYCNETQQKTARAGRKWLTAVDLQRLTAGASKDLDLHAHTIQKVCQQYDRSRKQHRKPWLRFRGRKSLGWVPFNQGHVTVVAPGKLKFRGVIYETMHWRDLPDGAVIRAGSFNQDSRGRWYINLPIEMPAEAFAKSGGSIVGIDLGLKDLATLSTGEKIENPRHLAKHAERHAKAQRAGKTKLARSIAAKVANCRKDYLHKASARIALAHGTIFVGNVSSERLARTRMAKSVLDAGWSTLRTQLSYKALRHGGKMIEVDERNTSRSCSVCGADSGPKGIAEIGIRRWECEVCGESHDRDVNAALNIVRVGLDTLVEGASL

SEQ ID NO: 40265 - protein, 465 aa, Leptolyngbyaceae sp.
MVRMNLARHSDLFQQARKLPQGKIRNDAFAAARKDARYSEYDIQAYATVRANAAQWIAQKVDANTQQTLAKRAFQASEKVMFGRAQRVRFKVPSRFNSMEGKTNKQGIRWVEGQLVWGKLRLNAIIDPGHESIAHGLDSRIKYVRLIQKQLNGKRRWFAQLIGEGVPYQKPQNFVTAGVVGLDLNVSNVAYVADSPAGLLPFAEKVPTFEKEISAIQRQMQRSQRANNPDPYEPDFEGRKGRKTVTKKGKVKKGKRQWNKSQRYLKLAAKKRELERRKAAYCKSQNRKLVNDILRNGNQIRTETVSVKGWQKRYGKAIAAKSPGYFQSELKRKAESASGSFTKFSTQKMALSQTHLSGERGKKSLSERVHRDQTGVTMHRDLFSAFLARYVDENQLSLQDAVNQYPGMESFLLEAWQRYETNRKPVGIAESRKAHPPLERFSSDSEKANQIDAVGDDSTAGRKVS

SEQ ID NO: 40266 - protein, 391 aa, unknown
  TnpB Polypeptide
MERGFKYRIYPNASQRDQIARTFGCCRFVYNRALDVKKSAYAKIGKTVSWVELCRMLPVWKRNPETAWLAQADSMALQQSIRDLDRAYKNFFRRVREGKKPGFPKFKSRRHCRQSYRTNLGKVIDCNHIALPKLGTVRAKVSRPLQGRLVSITVSQDVAGRYFATFLCTDVLLKSAPATNQEVGIDLGVKTLATLSNGTKIENPHHLKKYERKLAREQRKLSRRKGARKGERPSGRYLKQRKKVAKIHAKIADSRTDTLHKVTTMLADENQVLCMEHLNAEGMMKNHHLAKTVSDASFGEFTRLLEYKCTERGRTFVRVGRFYPSSKTCSSCGHRLEILPLSVRSWNCPACGAHHDRDVNAARNILAEGKRILSNTEGTAGHVGTTTAVVV

SEQ ID NO: 40267 - protein, 424 aa, unknown
  TnpB Polypeptide
VEEVFSVGVRAYKFRAYSSKTTARVLQTQLVVACKLYNTLLHAEEEEYTKNKHTMSRNELRQLALDLRKQNPEFQALYSQVAQQVAERLYQARERFFEGLANKPKVKKLHKYLSLVYPQSGWRLSNIREVGQAENTEKKKARLHLSKIGFFTVVMHRGFPLSRVCQVCIKLNPSGRMYVVFLVEEEAPNEQAPAGEPREAVAVDVGITRLATLSDGRFLESPRPLERSLDRIRLLQRSLSRKKKLSKNWLKAKRKLAKKHEYVKDFRRDLFFKLGALLAAEYDLLILEDLDVEGLIQKGETGMRRLRLHDSAFSELRRILEWQFRKQGRGVLAVPAYNSSRECFLCGRINQRLTLEDRVFHCPCCGFTLDRDLNASLVLSKRAGWEPPAAPAELRPLPPLPTLGLARGRQGGALMREAPTFRAG

SEQ ID NO: 40268 - protein, 379 aa, unknown
  TnpB Polypeptide
MEFIRALKMRIYPNNEQKAKIDKTLGSCRFVYNHMLARNQKVYERRKEHLSYYDMQNLLPVMKNYLPWLKEADSQALKYACRQLNTAYDCFFKKKSGFPKFHSKRMNRQAYTTTKKTSITYDAENRKVKLPFLGWMQCSGNRILNNPEFKYATVSRQNGKYYVSITYSIEKTIRLVAVSENQALGLDYKSDGLYVDSNGNMAGMPKWFRDSQAKLKKEQRKLRNKVGSKRGELKSHNYSKQLQKVRKLHEHIANQRLDYLHKESTRLANQYDAILIEDLNMKAIANKGFGNGKATFDNGWGMFTTMLNYKMEEHGKYLQKIDRWYPSSQTCSICGCINSALKNLNIRKWTCLECGTEHDRDINAAINIKQEGLRLLEVM

SEQ ID NO: 40269 - protein, 389 aa, unknown
  TnpB Polypeptide
LQKSFKTEIAPTSAQMRKINQTIGVCRFVYNLYIAENKKEYKETNRFINGMTFSVWLNNEYIPSHSELEWIKKVSSKSVKKSIMNGEGAFKKFFRKEAGFPNFKKKNKSDVKMYFVKNNKTDCICQRHRIKVPTLGWVKLKEKGFIPTTKDGYVISGGTISKKAGRYYISVLIEVPDIPKTNIQSEGIGIDLGVKDFAVLSDGTVVKNINKTGKVRKIERRLKRAQKRLSRKYESLKKRKKEEKGETTQQNIQKQILKVQKLHHQLDNIRTDYVNKCIWDVVKTKPAYIVIEDLNVSGMMKNRHLSKVVAVQKFYEFRVKLTAKCKEYGIELRIVDRFYPSSKICHQCGTIKKDLKLSDRTYRCTCGYEADRDYNASLNLRDAKTYKLA

SEQ ID NO: 40270 - protein, 337 aa, unknown
  TnpB Polypeptide
MTCTAIRLVAACYSKRKRKKLSGTVNFKKPFALFLIGKRKRDAAIKRDGTISIWTVGGRKRLAFSVPEHFLGYFLNALSFDSLTVKERNGQLIGYLCVTLPKPAIKGSILVGVDRNEMNLIVAVKETGEVFFESGLSLRIWRKKHRKKVARLQKKLAERKAQRKDTRSVRRLLKRLSLRQRNFTKTYCQTVAKRLVVWAGTDAVLALENLKFQQGKKGSEALNRRLTQFPHGLLLRCLRNKGEMLGIPLLLVNPAFTSQTCSRCGNLGDRQRHRFCCPHCGFTLHADLNAAFNILRRAEETMLSEPKGLGSGLKSTSPEAQTVKAVMGKPSALADGS

SEQ ID NO: 40271 - protein, 618 aa, unknown
  TnpB Polypeptide
  misc_feature (24)..(24): Xaa can be any naturally occurring amino acid
VTAATAAAVPAGTSTPAVEPKPVXRREFRSDWSPGAYRVTLDLDPGQEAQLTRAVGAARFAFNAALAEVKANLDTRAAEKAQWGEPVTDPLGWSAFGLRAVWTGVRDTRAPWRGEVSVWAFDTGTAQLAAALKNWSDSRRGTRAGRPVGFPKFRSRRRPGAQSIRITNHAKIKVGAVQGARDNRHIVLPGGLGGQARTRENLKRLTRRLTAGSAAVTGATISRTPSGRWTVAIHVQQHQPIPGHGQTPGSELELAQEELLEPAADTHEPAGRSSSSRSSGSASSSSSRSSGSASRPSSSCPSPLVGVDLGVGAQNLMVVADPARTEVWRVENPKALDRVHGRVVALQKKIGRAHRVAVAEGRVDTNGRPIDSQRVLVLRARIARLHRRAADIRSDSIHKATSALVAAGHTAIVVETLNVAGMMTSGGSRKKGLNRAVADAALGEIGRQLDYKTERAGTRLTATGRWFPSSKMCSRCAAVKPKLPLAVREYRCDNCGLVLDRDRNAAANLARVAVDPAWETSGWVPTAAGSSKQHQPGGKPVQGSRHQTNNENTPASGRGSRRKPSGADGGNGADPTRVENCEPLPVPLRALDPTGKGPGPVTAAPGFLTSPNKTEKAQ

SEQ ID NO: 40272 - protein, 268 aa, Desulfotomaculum sp.
MQTVTLKIKLLPPNKGKLEKMTRMLEIYRQACFWFLEQAEALNTTSRAHLNRETYRQACELFDLNRGTLQCAMLKALSVRRSYLSRKQRGKKASLPKFEKTVPVMVRQDCYSLHQLPSGTWVIKFPVSSGRSQIAVPLAASTYHAKRLQDLAGGSCRQGSVEIWRDKSGEWYAAISLVYETCLNEPCGVIGVDFGIVKLAVLSNNVFFDGRQVRWRKERWAERRKALQQAGRLSRVKKESGREQRWMRYINHCISKRIVEIAKAEGKV

SEQ ID NO: 40273 - protein, 787 aa, unknown
  TnpB Polypeptide
MNISKNFKVRKKKSLQSNPKFRSIKTTVNHVLLDKDRDLPLLNHYVLQINKMITFTFLLVRAFLIKQYKDKQPLLDIQESTFEVAMQCICQPDDISHDSKSEDDNKRKEKALIVNFFKTSFLPLINDRKSLPDWNYKTDRIINGQHIIKNKKLPFSPFIQKLRTNMLTVFINNIWMHYFKRLKRTIYTIVEKNPIFIADKRINKEKKKIKYGIFNAVLSRNRQSEYPEYQDLINESIQSFIPKEQHSAEWVNDSLQYDLKANSRKFFIPSIAMQEKLESLEVSGFQSIPLRKSFVPHYIQIDSVVLKKILKIPGKKLTAMKIKTSKIIEESNNNPIDGDSINSSPEAKYTIDPKDELWSLFLNLDLPIFKQNGYSFFHSIEIDGFGCVLKFQRNEQQYNKYDKNKKSKKTGGKKGKKSKGTKKKINDHSKLADEINNEDINEKDNNENNEEELENKLLDDDYDYEDNLNMYINNLSPEQREELKDCILVGVDPGKYNIIQMVGSNGKVLRYRIPQRRTESGTHDNYMVRKKIYDSKPEVIELLNKLSKTSSITVDYDKFCDYIKVRSEITPKLTEMYDLIVFRKLKFRGQIRAQASYDKLIDRIQRTFGANCVLLYGNWSRTSQMKGIVPTPGIGLRNLLSTKFRLFIIDEYKTSKKCCHCHKDLEMVYKEIQAGKNHKKNQKKKKNKNKKVQKSGKKRIYRVLVCRKCPNLNGYEGIRYIQRDINGGKNILDRGREEIYGLPRALAFQRTRNVEIPIGTLAKIKIKIIRKEPGSTSLDLSLSEKTG

SEQ ID NO: 40274 - protein, 377 aa, unknown
  TnpB Polypeptide
MLLTVKVKLRPSEEQQEALQSTMERFNAACNGISSVAFSTMTFNRVRLHHLTYYEVRHEHGLSAQLTVRAIAKVADSYRSTMSGIRERNKIHRAKKEPVEVLKRIEFREHGAVVYDPHIMTINKEGVGLTTLKGRMTIPFVNGNILQGKKLEGEADLICVRGRFYLCVITNKSEEPLSEPSGFLGVDLGIVNIASTSDGMMYSGKVCDRVRERYMNTKAALQSAGTKSAKRHLKLISGRERRFKTNVNHIISKRIVQVAKDTKRAIVLEDLRHIRSRVTVNHDQRERFFKWAFNQLRQFLEYKAKIAGVIIELVDGSYTSRQCSVCGYTDMKNRKSQSEFRCLACGHAENADVNAAKNIVLRATVNWPIAVCQVTGS

SEQ ID NO: 40275 - protein, 408 aa, Pyrobaculum sp.
VGRVSIRFAKDSWSYKKAISSVAPVRLGLSLPGRRREIWIKPHRRFWLYWWRVLRKEAELASTLVLKRRRNKWYAVFVFDVAPRKEPPAEVVAFDVNENSVAVARLSLLATVDRVATWNRQYINPVLYSIRTDFGRLARRYEAVRNAKLEELKQKYPYAGRDEEERRQNITDTREYKKFARRLRERRRKGGRVRQVAREVAKSPALIITEELGKNPQEEMIGLEEKRVKKRELRHRIKQTPFKKLVRAVEEKAAEAGSVVVYVSPYRNSKVCPIHFSLVKNGSGWHTLHCPCGHDVDRDHAAVLNMLWKITPEGAAKGVWWDLKDVKRRLEKGRGLVPRELAKRRNPLVTWPVVYAVWTSLAQLKASDKWPAVLARAAPMTPAQGADEDGTRAPPRGAPVLGEEVSSI

SEQ ID NO: 40276 - protein, 241 aa, Methylohalobius sp.
LDSTSREIEGAVKTVTIKRDPLGDLYVFFSCEIEDRPNHRVVSGESAGADFGLKTFLTFSDGSEEVSPLFYREGRKAIRRAGKKLSSKQKGSNNRRKARMALARVHKRIANQRRDHHFKLARRLALRYDHLFLEDLNLKPMQRLWGKKVGDLGFSEFVRILHPQAGKAGSVVHHIDRWFPSSRMCSACGTVNEALDLKDRRWRCACGTVHDRDRNAALNIFREGASSLGLGDVRPSGAIAV

SEQ ID NO: 40277 - protein, 434 aa, unknown
  TnpB Polypeptide
MLKAIKVRLYPTETQCSYINRLCGSYRKVFNMCLEKKITAYNTDKTNIGLTELGHYIHHDLTKNDELSYLQEHNTKVLKQSVIDLLDSYKRFFVNNTGFPKFKSKHDKQSVRFPLEGISKLNTYSDSRVTLGKPLQKVKFECSERDKNYLTNHKDKIKSATLSRTKSDKYFLSILIENYITEQPKPINDIIGVDVGIKDFMVCSDGQVFDNLKLKRKNEKTLIKLQRQLSKKQRVKTGEFIFSKKWNKEVEVTKLSNNGEKSRLRLASFQEKLNNIKINYIHNITTQLVRENQTIVIEDLNVKGMLKNHCLAKSIQDLSISEAFRQLKYKCDWYGRDLVVIDRWFPSSKLCNVCGYKYKNLSLKERVWTCPDCGINHDRDYNAATNIMKEGKRIIGTRYPKFTLVDYPLMDEHSEMNLRSNDRLKQEESNLTRL

SEQ ID NO: 40278 - protein, 393 aa, unknown
  TnpB Polypeptide
VRRSFKFRMRPTARQHVALQKCLDAHRELYNSALQERRDAWRANRTRIRYGDQSAQLSEIRAVRPDVGVWSFSSQQATLRRLNSAFDGFFRRVKTGDRAGYPRFKSAQRFDSVEWPKDGDGARWHPDASRIYLQGIGQVKVTAHRKTAGRVKTIQIRREGRHWYLVMSCDDVPATPLPATGTPVGVDVGITSFATTSDGTHVHNPRWTRNSAAKLAAAQQKLARAKRGSYNRKRAKEIVGNRHRKVANQRRDFQHKTARDIVRDYDLVVVEDLEIRNMLRRAKPVADLTNPGQYLPNGSAAKSGLNRSISDAAWGQFVSILCAKAEDAGRAFFEVDPRHTSDRCERCGHAAKDNRVTQALFRCRSCSYETDADEHASRNILRAGLARHTATAA

SEQ ID NO: 40279 - protein, 245 aa, unknown
  TnpB Polypeptide
MLDNGKLRLQGVGAVKIKLHPPIEGKIKTVTIKREAGKWYAVLSVECEPKPLPASAEKVGLDVGLTAFATLSDGTEIENPRYYKEAQAKLRRAQRKVARRKRGSNNRKKAVRDLQRAHAHVRNQRADFAHKVARTLVALFGLIAVEQLNIKGMAAGMLAKSVNDAGWASFIAKLTYKAAEAGRELVKVPANGTSQRCVCGAPNPKTLSQRWHQCESCGLSVPRDHASALEILRLGLSLLGGTWPT

SEQ ID NO: 40280 - protein, 572 aa, unknown
  TnpB Polypeptide
MALSPGNLQQCSTAPSGANGSGAVASVLDVSGRRLLPSNTLDADLAAGGRDSAVNATRLSVYCDLSVAHGNVVETESGREVRLMARLNVADGSVLQAYRFALDPSPAQVQSLESHCGAARFAFNHMLAFIKSNLDQRAAERSYGISDRDLTPLQGWSLPALRKTWNVRKAVAAPWWSANSKEAYNSGLDALARALDGWSKSRAGARVGAMVRFPKFKSRNRGPRSVRFTTGTIRVDDHRHVVLPRVGRMRTHESTRKLDYRLQMGTARILSATVRYSGGRWHCSFQVVVTGKRRPGHASRSNHRVVGVDVGVRDLLVAATPEGDEVLRIAAPKSLVCEQSRLRAAQRRLARRQGPFDAQTGTRRHPSKRWQRTSAQISRIHARVSAIRGEAIHRATTRLATQHDVVVIEHLWVKNMCRSGGQRKTGLNRAIADAALSRIRTQLDYKTSWYGARLVVAPRFFPSTQICSRCGAKTNLRLRDRIYCCRDGCLAIDRDLNAATNLARLGALGSPEGKRTGTGSKSAASDSAGEGRGAIRKTSHATIVVKPAEGTEASTPIADLVSGTATSQGGAA

SEQ ID NO: 40281 - protein, 281 aa, unknown
  TnpB Polypeptide
LQGITPRIKLDKRERRLIVYLVFKRDVGEYEPKNWIPIDVNEDNVTALIDYKPIIFETGQKKITLGYYYRRKRVQEKWDRLYGSRNRVKKRIFEKFHEKGRKEDIRSKLAKIIVVEAKKRNAGIVLEKLPKNTPKRMLEKIRDRQLRHRIYQSALLGIQKAIEEKAREYGVPVIKVNPKNTSRVCPVHNAPVAYDGRFGVCTAGGEVWHRDVLAVWNLLLKALQSDGGSALNSGGFSLDGRPVPLASTATSEAIWIEKSRWLRWNSLPLIQSDTPLYKMKR

SEQ ID NO: 40282 - protein, 463 aa, Beggiatoa sp.
MMKKAKKVTRITYSDDLNQAKYDALQEIAKRCGSVRTTVWHNYGAKSGLDAKFRPVRDEWIADGHIKNLPQRIWRVTLSDVLGDIKANREAAKINVNSHIFRNIDDKNKRKELFKNLKNDSVWINNSYQRRLMRKYWKHGKNDTFNQIVLEPGSYKCFSYHGKNDIEVISKTHGKRIAIPITTNYPITGQIRLILRSCQVEIHYTIDNTDARACGLPGSKIGIDKGYTEAFVDSDGNFHGEGLGKILSDETDFLNKKYRKRNKIGAILEKLKQNNPKKAKRIIKHNLGRKKLDRRKSRHRGKVKTLIFTAANNIVGKAETVVCEDLTKTFKSKNLGKTVNRRLSGWVKGLMASAIDTVASRRGSRVVLVNAAYTSQTCSRCSSLGKRTGDKFHCTPGCGAVMQADLNAAINILARLDDKELHRWLPFTKVKQILLKRCRRSDETAHPELQLQLQKLSTESELS

SEQ ID NO: 40283 - protein, 413 aa, Kitasatospora sp.
MQLRYNYRASPDAAQRRALASAFGCARVVWNDCLRARQEAHAAGLPYVSSAVLSKTYITQARKAPERAWLADVSAVVLQQSLRDLDSAYKNFFDSVTGKRRGPRVAPPRYKSKKDTRQSIRLNANAFCLRGNGTVYVAKVGDIRVKWSRPLPAVPTSLTVVKDAAGRYFMSFVVEAEPQIIEDLNFTGPLDSETGIDLGLAHFAVLSDGRKISAPKFLRRAEKKLKKLQKDLSRKVKGSNNRARARVKVACQHAKVADRRRDWHHKESTKIIRDSQAVYVEDLAVRGLARGRLAKSVHDAGWARFLVMLEYKAARYGRYFARIGRFEPTSQVCSTCGVLDGPKPLCVREWTCMECGAVHDRDVNAARNILAAGRADRLNASWSAGKTGRIPAQRGEAGSHRDGQPTVAGILGL

SEQ ID NO: 40284 - protein, 379 aa, Kitasatospora sp.
LDRATFGGESTSKCTWLFSPLNSAISTSKSSQTLLVTSSSHVRCRYGEHLVPVFRHENQVCVQDECAVTVSCEIMTHSHASTGTVTFVQLRYSFRLYPNGPQRAALARAFGCARVVYNDALRTREDARAAGEAFPKIGDLSKALITEAKKTTERAWLAEVSAVVLQQSLRDLDTAHRNFFDGLTGKRPRVGAPRFKSRKDNRQSVRFTANARWKITVGGDLSLPKIGDVRVKWSRPLPSGIKEPRQGPCQSSPHSRAGGRCAARVPPPALHPDHAREPSRGRGRPGGQDTRPHPDGQVRARCRLVGVRGHAGVQGREIRPHPGQDRSVRAHVPGVLGLRDQGRPQAPQRPRMDLPGVRGSPRPRRERRRQHQERRRTWR

SEQ ID NO: 40285 - protein, 445 aa, Kitasatospora sp.
MPLRPLTSLDKGDLRREVHQQVHVVVLAFELHHLRFEVLTDTPRDLLQPGQVSVGEHLVPVFRHENRVRVQGVCAATVSPGILTHSYKPTGTVAFVQLRYSFRLYPNGPQRSALARAFGCARVVYNDALRTREDARAAGEAFPKIGDLSKALITEAKKTMERAWLAEVSAVVLQQSLRDLDTAYRNFFDGLTGKRPRMGAPRFKSRKDNRQAVRFTANARWKVTAGGDLSLPKIGDVRVKWSRSLPSVPSTVTVIKDAAGGYFASFVVDSDPGADLLPEATGVVGIDLGLTHFAVLSDGTKIDSPRFLRRAEKRLKKAQRDLSRKAKGSRNRDKARVKVARAHARVADARREFHHQLSTWLLRENQAVAVEDLAVKALARTRMAKSVHDAGWSAFVAMLEYKAVKFGRTLVRIGRFEPTSQVCSACGIKDGPKPLSVRAWTIPVL

SEQ ID NO: 40286 - protein, 517 aa, Kitasatospora sp.
LTGATSPAAISRSVASPDAETASYWPVFISETISSEVPAILVLTLQPVCCSKGWTQSTRARSFAVGFCGATGTNRSTGLQPGGAILSGALTRARARSVLLSVPSARLLTVQLRYSFRLYPNGPQRSALARAFGCARVAYNDALRTREDARASGLPFVPSAVLSKALTEAKKTEARSWLGEVSAVVLQQSLRDLDAAYRNFFDGLKGKRPRMGAPRFKSRKDNRQAIRFTANARWSITPGGDLSLPKIGDVRVKWSRRLPSVPSTVTVVKDASGRYFCSFVVETDPADDLTRMPETDAVVGIDLGLTHFAVLSDGRKIDSPKFLRRAEKKLKRAQQALSRKAKGSKNRDKARIKVARAHARVADARREFHHQLSTELIRDNQAVAVEDLAVKGLARTRLAKSVHDAGWSAFVTMLEYKAARYGRAFHRVGRFEPTSQVCSNCSVQDGPKPLHIREWTCGACGAVLDRDINAAVNVAKAAGLAVTACGAQVRPVLVPAQRVEAGTHRDGQTTVVGIPAL

SEQ ID NO: 40287 - protein, 378 aa, unknown
  TnpB Polypeptide
MRKKKGVKNKAIKYRLYPTTEQEIYFSKCFGCCRKIWNLMLCDREKSYKETGKSVKNTPASYKSEHPYLKEVDSLALANVYLDLELAYKSFFNKKGGYPKYKSLKKSRKSYTTNNQNGTIAITDNAIKLPKAGFVKAKIHRQPKSNWKLKSATVFQTTDGLYFVSVIFEYEENIDKTTNFDNCIGLDYKSDGLYMDSFGNVGDNHKFYRESHKKLAKEQRRLSRKIGSKKNEKKSNNYLKQLKKVNKIHRHIVNQRLDNLHKKSNEIANRYDVVCVENLNMRNMSNKGFRNGKATIDNGYGMFLNFLAYKLNDRGKYLIKVDKWYPSSQICSVCGAKKKMTLNERIYFCECGNTIDRDLNAAINIKKEGLRLLKEMVA

SEQ ID NO: 40288 - protein, 380 aa, unknown
  TnpB Polypeptide
MERLKAYKFRIYPTEEQEEFFSKTFGCVRKVYNLMLDDRIKVYEETKNDPSKKRRFPTPAKYKNDFPFLKEVDSLALANAQLNLDKAYKNFYRDPSVGFPRFKSKKNPIQSYITNKQHGTVDLVERKFIKLPKLKSLVRIKLHRQPKGVIKSATISRHSSGKYFISLLCKEEISEFPKTSSAIGIDLGITDFAILSDGQKVDNNRFTSKMEKQLKREQRKLSRRTLLAKKAGKDLFEAKNYQKQKKKVARLHEKVINQRTDFLNKLSTEIIKNHDVICIEDLNTKGMLRNHKLAKSISDVSWSNFVTKLHYKADWYGREIIKIGKWFPSSQICSDCGHKDGKKALNIREWTCPVCHAHHDRDINASINILNEGLRLQTLA

SEQ ID NO: 40289 - protein, 218 aa, unknown
  TnpB Polypeptide
MWTSSPCRKRRPCRHRPGVKDLITLSTGEKIGYGDRLKKLETDVIRQQRMLSHRMKGSNRYRKQRLRLEHAYVRLRHYRENMRHQLSHRLIEENQLVGLETLAVRNMVRKVKPKKSPDGRYMRNGQNCKRTLNRLIHRASWSGFVSKLVYKAEWYGRTLIQVGRFYPSSKLCHECGWKYKELKLSEREWTCRNCGTRHDRDVNAALNILAEAERLAAS

SEQ ID NO: 40290 - protein, 395 aa, unknown
  TnpB Polypeptide
MLISYKYRAYPDAITEVRLNAALDTCRWLYNKLLEECNTARETGITPTMRGMQARIVTLKEENPTLKSVYSKTLQMVNYTLWSNIPALSQTKKRGCKIGKLRFKSAVRYRTLNYNQSGFKIDREQSRITFSKIGTIPFNMHRPYSGNVKGILITRSGERWHVIIQAEQTVSASKREGRSVGIDVGLDSFAVDSDGAVIENPRFYEHSLDRIKKLHQSIARKKRSSQNWKKAKCRLEKVYEHITNQKNDFLHKLSRQYTDTYATICVEDLNIKYLKENGKSRGLRRSIHSASWGRFFSYLSYKAESAGTNFIQIDPRDTTQLCANCGSIVKKTLSERVHDCPYCGFIADRDYNAAVNIHRMGMEQPFEPVEPIPLHHIAVMQVLAMKQEAPPESAG

SEQ ID NO: 40291 - protein, 440 aa, Nocardiopsis sp.
MPRFRLYPTSAQEQQMLSHCAHARYVWNLALEVNNSYRKGGARTGKPPRFASMTRLLTEVRSTETVGMDPESAEEFAWVASGNATIQQQALKDFDQAISNFLNGTHGYPKWRKKHRNEGFRVIGEGRTLAYSPEGQPLLNAKGKQVMHRKVSVHKLNRKWGQVRVPGCGWVRFRLTRRELPDAKSFRITYRHGQWHVAFALVPNPIPAPGDGSVVGIDRGVAITAALSDGRKLNCPQPSTKERARRRKHERRASRAPRNSPATAAEYTKVARLKAREAAQRKDWVEKTSTMLARTFDTVRFEDLKIKNMTASAKGTAEEPGRRVRQKSGLNRAILAQGWGMLRQRTGHKAHGRVQDVPARNTSLRCSDCHWVDKNSRQSQAEFVCTHCGFTCNADTNSSLNVAAGQDTSPAPHKVRAGGVIPLPRSSTREPQQLQLALSW

SEQ ID NO: 40292 - protein, 404 aa, unknown
  TnpB Polypeptide
MRNTTHKLFKDKTLRHLHDELNIIGVVRNHFLAVSMRYYRRYGKGLSYRKMSSHLTKLKKLEKYQHWNIPYSWALQNVLKRLAQSFREMKTLGRGHPQFKSCKKHKGMTFRGEHVKIAYLLPKQKHERNHPTYQIRLNGRWYRFGLHRRIAGEIKQVQVTRDALGDMYITLTEDYSEVKIEPKTGKAEGFDFGIKDFLTGSDGERYGAPMFYTENADKLAKAQQAHSRKVKGAHNRERERKNVARIHKKIANQRADHHWKLAIDFCRQFDILFFEDLNLRGMKALWGKQVSDLAFGEFMRKLKHQSHKRIRSVLKIGRWTPTTKCCSVCGHKNENLTLADRDWTCPKCHTHLERDPNAAMNILKEGVASFGLGVVRPIVLFNRIVGRSVEATSPLLNSTNASVV

SEQ ID NO: 40293 - protein, 390 aa, unknown
  TnpB Polypeptide
VPRLRSSVSTLKHRERVKVNTVYRFRIYPNKAQRELFAKTFGCVRLVYNRMLAEKKAHYEKTGKNLSLTPARYKSEFPWLKEVDSLALCNAQLHLQTAYKNFFRDASVGFPKFKSKKKSVKSYTTNYVNGNIVLQNGKLKLPKAGWVRIRQHRKIDECYQLKGATISQEADERYYVALLYSCEEPVHETRKAETAIGLDFSMKELYVDSNGNHAAYPHFFQKARQKLAREQRRLSRCEQGSNRYKKQKKKVARIHTRIAHQRKDFLHKESKKIANSYDIVCIENLNMKEMSQDMHLGKSVHDNSWGMFTDFLTYKMERAGKKLIRIDRWYPSSKTCSCCGKVKEDLQLSDRIYECVCGNRMDRDENAAINICREGIRISGMMLDIEKKIF

SEQ ID NO: 40294 - protein, 404 aa, unknown
  TnpB Polypeptide
MILVEQHIIGKNHKYYEECDKLSFLAKNLYNASLYSIKQHFFDTENYLNYVKNYHIVKSSVDYKALPAKVSNQVIKLADKNFISFFRLLQKKLAGKYDKPVKMPKYLHKTKGRFVLRYEAQALGRKRFKGGIIGLSKTNIEITTKQKNWSDIKEIRIVPRNNYYVIELVYFKAEKEKREDKGKYCGIDIGLNNLFAVGFNAPDIEPFIINGRPLKSINQFYNKELARLKSELEKKNKKKTSERIRKLTLKRNNKINDYLHRSTRLLVNQIVLTEVNQVVIGLNKSWKQDINIGKKNNQNFVSIPHSRAIDILSYKLKLEGINLIIREESYTSKCSFLDGEYPKKREVYTGRRIKRGLFRSCGGIIINADLNGAYNILKKEIPEAYADGIEGLAVNPKLLTVKSH

SEQ ID NO: 40295 - protein, 497 aa, Tolypothrix sp.
LAVRTSSFVTEIPLITTSKDLSVLAARLEAGRQLYNAVLSEGLARLELVRNSEIYQQAKLIPKSNKKERSTAFQKAREAYRFSDYDLQAFANKTAIASIWIKSHLDANTIQKIATRAFKAVERMMYGLAKKVRFKQKGQFASLEGKTNKQGIRWTGNAVEWSTLKLKAIITNDPVILHGLSSKIKYVRLVRRILNQKNYWFAQLVCEGLPYQKPKNIISDGTIGIDLGVSTVAIVGDKKTIWTSFADELESKQKKIRKLQRKMDRQRRANNPNNFNSNGTVKKGSKRWHKSNRYKKKNNKKRETERKQAAHRQSLHGRLVNQTLAIGKHIKIEKVSVKAWQKNYGKSIGFKSPSSFQSELVRKAENAGGTVLMFSTRYTALSQTCLCGNKQKKSLSQRVHHCSVCGLTMQRDILSAYLSRHVDPKTETLSIQSARDSWLGMEKSLLDGWQDGSNQRARTATSSKSPISNNGSERVFSNLIACEESEPLRVNETRVVS

SEQ ID NO: 40296 - protein, 486 aa, Oscillatoriales sp.
MATLTYCKGLPTPVHELNELGKTDFEMFLGAYAPIFRAASIETVDHLLFDAEFKKSEWNTHLQQTYGINKRHANGVISSTKGRVDSAKEHRILHLKALEGKIKSITTWLKKAERKLVLARKFYAKRKWQNSKTGCNFPIACSLQYKSTNWQNLRFQIHNKKRKLTLVTKKTEDLKIKPIKVFIPRCDIFVVGSKDESFGNQVCQWNRDKITFRVPKCLESRFGKTLSSLVGDFSRNINRLPECGAKTWHFYRKNGKWVIAVQFTPNPGSRVSRERMYGCIGIDMNPGSIGWAYVDSEGNLKAKGQIPLQMGLPNGKQQAQIVDACLQLAAKATEFECPVVCEELDFSTKKQSLGEKGRKYARMLSGWAYREFYKQLSSILSNRGIELIAVNPAYSSIIGGVKYLRMYGLASDEAAALVIARRAMKLSEKIPRSLTAYSEVNSEKHVWSEWNQLNKKIKHSAVISRRCDYYSVSNWSFLVNLDNEEA

SEQ ID NO: 40297 - protein, 315 aa, unknown
  TnpB Polypeptide
VPYPTGRVRSVTLGFDAGRLYLDVTAEVPVAAYPDGTGPDPARVAGVDLGIIHPYAVAGPGDQRLLVSGRAIRAECRQHLRDRKGRSRAAARRAPRPGQQGSRRWRRHKRRARDAEARHLRRVRQAQHEAAKTVVSWAVERRVGTLAIGDPRGVLNLEAGRRHNLRVRDWRVGHLIRALRDKAEAAGITVALVDERGTSSTCPHCSRRVPKPAGRNFRCPHCGHEGHRDLIAAANIAARNGGGTTPAVPPGTTGITHRRAGTHLPGAHPARRDPRRRPPSRPPARGPLAGTGPPPTATTERGVARHQARSPQAVG

SEQ ID NO: 40298 - protein, 542 aa, unknown
  TnpB Polypeptide
VVKNRENKYMSTIKHETLTNIGKIAKLEPLWKEYRSLLDYFIHDMNVKLQKGLNVPNFTNVKPYNSDINELYNRAIKTHNNAIKNGKSIRPLQDILDDITNNSIKTPLSARYVQTCYTQTRESYLSWTALLSDKVKNYLTLSSIDDKLIDNQPFLTTCYRVNKRHLWYKKPTLKWAYDENNNLVVPTKNNPAKIELPVPEEILKFLRRLVKQARKKISLPNLKKVATLKLDEKVAQLEVTRNATHVNLWLKLSTLEKGKPIYIPLKNNIFYEQLLKTGVRLPSVQVCLKEGKLIVAPILEHEKAKLRDNDKEIGIDFGMVTMFATSTGERYGITSFNKLKIWDQIVTERAKLLQKEGKKLKTDPVYNKLQAKIRSFITNEIGRILNKIAKQGHSVFVVEKLDFRSSKLSKRMNRLIGRTYRKVIKDKLKRLEDTHGITVVEVNPAYTSQECSKCGFVSKKNRRTQGTFKCTCCGHKINADVNASRNIIKRRSFDIKMRSLANGQKIRITRCLILETLLQNHFKKCNNHSSEVSIIGCHPQSA

SEQ ID NO: 40299 - protein, 394 aa, unknown
  TnpB Polypeptide
VRRASTFRLRPTARQHVALGQCLASHRELYNAALQERRDAWRLRTTTVAYGDQSAQLKEIRRIRPDVAAWSFSSQQATLRRLNRAFASFFRRVRAGETPGYPRFKPAHRFDSVEWPEDGDGCRWQPDTRRVYLQGIGQVKVSVHRQVEGRVKTIQVRRHGRRWMLVLSCDNVPTRPLEPTHAAVGIDVGIASFATLSDGKHVPNPDFGRIAGAKLGAAQRVLARKQRGSSNRQRARETLAARHRKVANQRRNFHYHAARALVAGYDLLVVEDLKIRNLVRRPAPRPDPGRPGGFQSNRAAIKTGLNRSIHDAGWAQFVSILRAKAEEAGRVVIDVDAKHTSDRCEACGHTAKENRASQAVFYCRRCGHTVDADEHAARNILRAGLARLAATPAA

SEQ ID NO: 40300 - protein, 420 aa, Streptomyces sp.
MCTFGPVKLVVQVKLLPTPEQAAALQATLHACNEAATWASEVAFERGEFKNFALRKHVYGEIRSRWNLGAQAAQHTIKKTCDAYATLKANLKAGNLGKPGSKRYRQATEKPIVFHPQGAQPYDDRMLSWQIPERRVSVWTVTGRVKDVAFTASPEQLATLALYRRGESDLLERDGMWFLNATCEVPEAELNTDPVDFLGIDLGIVNIATTSDGEITAGRELNRIRTRERGLRARLQRKNTPSAKRRLKKRRRKEARRARDINHKIAKHVVAEAERTGRGIALEDLTGIRERVRLRKPQRATLHSWAFAQLGAFIAYKARRAGVPVVYVDPAYTSRTCAECGHMDKANRVSQAWFACRNCGFVDHADRNGSRNIRARARELWRRGVQSTAPAPPPEHTRRGGAGRKRSITASDARCASPTL

SEQ ID NO: 40301 - protein, 379 aa, Clostridiales sp.
VLRHKAYKFRIYPNREQEILIAKTMGCSRFVYNHFLSLWNEAYTKTGKGLTYHACSAMIPQMKKDEQTIWLQEVDSISLQSSVKNLSDAFSRFFKKQNKRPQFKSKKNPVQSYTTKNVNNSIRIVHHSIKLPKIGLMKFAKSQEPKGRVLNATIRKNASGKYFVSLLLEEDIQPLPKTNSAIGVDLGITDFAILSDGQKIDNHKFTSNMEKRLQREQRKLSRRGLQATKNGINLLEAKNYQKQKGKVARLHEKVMNQRSDFLNKLSTEMIKNHDIICMEDLHTKGMLRNHKLAKSISDVSWSGFVSRLQYKADWYGRKVIKVDKWFPSSQICSECGHKDGKKPLNIREWTCSVCDAHHDRDINASKNILREGLRIQAQN

SEQ ID NO: 40302 - protein, 193 aa, unknown
  TnpB Polypeptide
MARRVKAIRATVSMKIALSEPLLVLVNNYVKAIRFTLFWLKENVPNPNEKGVVSKVHEELYEKLREEYNLPSKVAEDCYRDALSIYKGWYNSPKKGRFPRVYKPTVWLTPKASYNVDFEAMTVRIASVGELPILGYPRNLKEYMSWRMREARLTVKGDKVSLKWFFEKEEEKVEPKESVAVDINMAEVVIGKR

SEQ ID NO: 40303 - protein, 472 aa, Streptomyces sp.
  misc_feature (367)..(444): Xaa can be any naturally occurring amino acid
VKRAFKYRFYPTDAQAAELLRTFGCVRKVYNMALAARSEAWTLRRERVDYNATSAMLTGWKKTEELAYLSKVSSVPLQQTLRHLQGAFSNFWQKRAKYPTFKSRKKSRRSAEYTTSGFRFRDGRLTLAKMTDPLDIVWSRPLPAGASPSTVTVSQDAAGRWFVSVLCDDRPAMPTPVNDAVGVDVGVASLVTLSTGERITNPRHERKDRERLARAQRDLSRKAEGDGSNRAKARLRVGRAYARIADRRRDFLHKLTTRLVRENQTIVIEDLTVRNMLRNRRLSRAISDASWTELRSMLEYKADWYGREVIAVDRWFPSSKLCSACGTLESRMPLDVREWTCACGTTHDRDVNAARNILAAGLAVAAXXXXXXXXXXXXXXXXXXXXXXXXXXXXXXXXXXXXXXXXXXXXXXXXXXXXXXXXXXXXXXXXXXXXXXXXXXXXXXSEMCIRDRLQPVETVSDLNGALRAGSRR

SEQ ID NO: 40304 - protein, 460 aa, unknown
  TnpB Polypeptide
VYCNRHNDGTRLHDTNHLFGKVLAFTQNRNTRSEIMTHKWKSKGEKRTITWNYDPSPTVLAYLKDMQDAIRYSLSVAYGIVVKDPLHGTPSPIELRREIRDWFYSRYDYARHHINPVCRASVAMLRSYRKNHGELRIPEVKKLAMRIDSELFKIVDDKIWVTLQPNNYVWIPINTKNKHYQVYCRGRTSELLLTDKKVCLTFIVSRNEKPLGKKLIASDLNFNTIDHTSVSLSAPRLEGVATEPIRRIAQIQNDFSRRRRAIQLHVKNPQKRERKLKETRGRQRNRVKDALHKLSTEQVKRNSDASFGFENLNGIRKNGVRKSEKRSSKKFRTQLNRWPYRMYQKMIEYKSPNKTLYVSPRGTSSECPVCGGKLEHPAWGISRCKNCGVDYDRNRLASLAILLRGLRLCGQPFAVSEDASWRSLKDEYLYVSTKSDCGKAGWTENANAPNENGVYKNTHS

SEQ ID NO: 40305 - protein, 501 aa, unknown
  TnpB Polypeptide
VSRTYPRRPYAAFSKDGEPLDLKGVLDGIRKDAELVAHYALRELTDQNLALVTYFDRFKPAEAGRRMGLFLPSEVKERFRSGASRLEMLFRERVVSTLRSWAARVNAANGTYDGYVSDGWRRTVKGSKPESLDLRLSLSATNNQYRKIHVQEDKIILDLVVRGEWVTLHFPIPPQLLEDGCDPGVLNIWVDKDDRVMFGFHGKTNPGRPEFSSRYVIGVDVGVTNPAAYVVWDIEKKQIVERSLLGQRARSLNNKIKRGTRQVAVLRRKGKGEEAVSHRTHLSNRRKELSILIAQEIADAAWRYDNAIVSFEDLSHISNTMRFGRWFRGEVLRRTRDMVEADGGRVLKANAAYTSRKCHICQSDLDMSDYSQPHCTTCGTTHHRDLNAAANIAQRANVKKACQTRKRHATKTKRIRRSKCRVKPLKHPGTKNRPTPKAPQNRSKTLVHPSLPKKGVSKGMCPADNRVSAVDHNAWFQTTSGTTIPKENQIANMVDVVYPKE

SEQ ID NO: 40306 - protein, 445 aa, unknown
  TnpB Polypeptide
VDILKYTTETRLYIKNNKDIVDYFNEVKNQYNHIQRKVYHIIINNPKIKMSLLNTKLQNEYSISKRTANSIIKSVQGRINSIKELKKTEIKQKQYKLKKISEKLEKLVPVLTELKLKAETNNIDDLTKYRNLKTKIAFLKIRKDKLVNKISSLNYQLKTNKFKITFGTKKLFGQNLEEFLNKRDNQIVFIGSKDETGCNQNFQLKYISKINQFIIKMRKDFKYKNEKREKRYVYGKCFFNNHKKLLKEILKSKSSPLTYRIIKRNNKYYLQCTFEINNESASLTRKNCGVIGIDFNKGFLAVSQTNKYAHLVKTDKMTYRFGSGRKTENDLLLIINKLTNLAINTGKDIVVEDLNFLKTKSKTVKGKSENGKTYNKMLHSLAYKMFLNRTEQICNRKNVGLIKVNPAWTSWIAKNKFCNRMKLNIHIGTSFVIARKGIGIKDEVK

SEQ ID NO: 40307 - protein, 427 aa, unknown
  TnpB Polypeptide
MIENQTKLEQQKTWLEKRENYLHQKIEVVKGKIARTKEKTPKDRSLKGLYALLSSLQNRVAHLILKPVVFGTKSLFRERIRGKISRTEFIIRRDASFCCIGKAQGGVQNNNLKILPSDALRISTFHKAKGTIPKRIRVPLAVNPDQRSAFQEILQLDKYTVVVKRQFIKGELRYYTHVSYETPEPNARSGFQNGAIGLDFNYNFFVLVNIDRDGHFLSYQLIPFRNLHTFRKGRRHDYASFKLEKVINYCLNKGKGVIIEDLSFDQSFSYNKKRNRKINQLKTSMLPLLERKCMRKGIAIKKIHPAYTSIIGELKYSRSFNLSRHVLASYVIARKGLGFTEDFPAFYKRLLAQVGGVLKPRLNPSSPYYQWAQLYDLFKQCGITSFNPSKTPSYKPAAIVKKLMMNGANPATGTQPDNLTAGLLACG

SEQ ID NO: 40308 - protein, 387 aa, unknown
  TnpB Polypeptide
MRRLLKNFKTEIDPTEEQKVKIRKTIGTCRFIYNFYLAHNKELHENGKTFMSSHQFRVWLNNEYLPDHPEYAWIKEAYSKAVTQSVNHGQTAFTRFFKHQSGFPKFKKKGKSDVKMYFVKNNPKDCRCERHRINIPSLGWVRIKEKGYIPTTKDGYVIKSGSVSMKADRFYASVLIEIPDNKTTDIYSEGIGIDLGLKDFAILSNGKKYKNINKSARLKKLEKQLIREQRCLSRKYENLKKGESTQKANIQKQKLKVQKLHHRIDNIRTDHINKTIAEIVKTKPSYITIEDLNVSGMMKNRHLSKAVASQKFYEFRTKLKMKCDDNGIELRIADRFYPSSKICHCCGSIKKDLKLSDRIYKCSCGYVEDRDLNASLNLRDAVTYKIA

SEQ ID NO: 40309 - protein, 410 aa, unknown
  TnpB Polypeptide
MIREALDIIIKNDVRSRKKAHELCYKVLRNKYPHLHNKFVQEAYKRALAMYRSYRKLMNKWKRLPVKKRKKISPPSLPTVEDNRVVELHIDTYKLERRHGSLVLMVSKGSGVYLKFLVVEYGYARRELEGAKLGNSRILVDENEAYLLLTIRRDVEVNEHRNKLFIDINEDSIDCLLVNYNRNDAMLFSIRHDIRRIRTNYRRIRKSIQEKVKNPRLRDKLLAKYGYRERKRVEDRLKKITTLLAEIARECNADLVRENLKDIRLNGRNRSKQLNYRLSTFPYHKFIEYIDYKFYEQGLNVLEVDAKGTSVTCPICGYVDKRNRIDKESFRCRKCGFSFNAQYVACLNLFSRSNDGLITIRGGRLVLITRKTAQVVAVNVAPNEPPNQMRWLREKPVPKLIINNSGTVST

SEQ ID NO: 40310 - protein, 398 aa, Streptomyces sp.
MATGHVKRAFKYRFYPTDAQAAELSRTFGCVRKVYNMALDARTRAWQRGERVNYNATSAMLTAWKKMEELAYLSEVSSVPLQQALRHLQGAFVAFWEKRAKYPRLKSRKKSRVSAEYTRSAFAFRDGVLTLAKMQEPLAIVWSRPLPQGAVPSTVTVSRDAAGRWFVSMLCEDPGVKRLPTSGGAVGIDAGLEHLLTLSTGEKITNSRHERKDRARLVKAQRELSRKARGDGANRAKARQKVALIHARIADRRRDTLHKITTRLVRENQTLVIEDLTVRNMVRNRRLARAISDAAWSDFRSMLEYKATWYGREVIAVDRWFPSSKLCHACGTLQEKMPLNVRTWTCGCGATHDRDVNAAKNLLAAGLAVSVCGAGVRPQRRTPGGQSATKQKTPRREP

SEQ ID NO: 40311 - protein, 339 aa, Crocosphaera sp.
VSGWRLEETKKHITFTDKKGIGMLKLVGSRDINYFQPEQIKRVRILKRADGFYVQFCIKLDPRDTIKPIEPSGKAVGLDVGLKYFLADSQGNIEPNPRFYRKAEKRLNKLNRRKSKKFKKGKKQSNNYHKARQRYACANLKVSRKREEFVKRVALRLVKSNDLLFCEDLSVKNMVRNAPPLSTADPAGFEIQQERGSAFHALNSIQGGSAVKNRRLSKSISDAGWFLFRRWLEYFADKYGKIAMAVPPHGTSQICSNCGQKVEKTLSTRTHICPHCNYVEDRDIKAGKNILQKGLSRLGRSQTHASGEIPSWLVGEILLANGNSLNEESPRRDSRGERQ

SEQ ID NO: 40312 - protein, 449 aa, unknown
  TnpB Polypeptide
MLKQKYTAVTQLHEINNKDIIEYFENASVYFCKLQRKAFHIFRNENIKGNKIDYNLILKKFMADYKINRRTANSILKDVQGRIKALAELKKYEVSQKEQKIKKLKEEIEKLDIKISEFQEKMENKIKVNHLKYWNLKKSRAFKKMKLNKFKMRLEQLKWQTETGNYKLCFGTKKLLKSNKKEFLLQRDSQMSYIGSQDETGRNSMFQLSYNNINNQFEIKIRKDFGLDTEEKYVFGKCYFNNHKNKMIEALENKNSTPLTYSIIRKNGRYYLHCTFEYRIEDKSNFLTRKNFGIIGVDFNKGFLTVSEIDRNGNLIKADILEYRFGKGNKTKSDLENCISKILKRALKTGKDICFEDLDFKGKKSKATKGKTDKGKKYNNMLHTLAYSLYDKLITNMAFRNRIGIIKVNPAWTSWIAKNKFCERMKLNIHIGASFVIARRGLGIKDTVK

SEQ ID NO: 40313 - protein, 545 aa, Erysipelotrichaceae sp.
  misc_feature (436)..(537): Xaa can be any naturally occurring amino acid
MNRTKTNQALSIPPVYEQPESLVIPLEIRLDKRLCPEVIARIEYGFNVYSKAYRFAFSRIDHSQENLNQLTKELQNQYGLKSRTANSIARDAKTRHQAGLELARAQAETLRVSILRKKKKKAKLKETVEEKSRKAAANLLDERELSHYRRQKRDLWRLGQTIPKLEAKLKRWKKEIKNRHVRLCFGTRKLFKAQYHLKENGLSCHEEWKETFVKNRDRMMYLCGKNDEKNGNQLCHLIRMENGSWKIEVLSVLRPEKGQDTSITGPVKITHVPGLELLDKAFDGFEAAIPIKQAISVRILRRKKGYYVQFFLHLPKPEGWSTSSFEGVIGLDFNADHIALCETDGKGEIIYARRISLPGLGKKEHNYNQGIAQMMKAIKEITAEARFKGKDLVIEDLDFSKKKSDLQKNKDYNRMLTQLAYSQYTQAVKRRCFKDXXXXXXXXXXXXXXXXXXXXXXXXXXXXXXXXXXXXXXXXXXXXXXXXXXXXXXXXXXXXXXXXXXXXXXXXXXXXXXXXXXXXXXXXXXXXXXXXXXXXXXDVLKTMWI

SEQ ID NO: 40314 - protein, 435 aa, Erysipelotrichaceae sp.
MNRTKTNQALSIPPVYEQPESLVIPLEIRLDKRLCPEVIARIEYGFNVYSKAYRFAFSRIDHSQENLNQLTKELQNQYGLKSRTANSIARDAKTRHQAGLELARAQAETLRVSILRKKKKKAKLKETVEEKSRKAAANLLDERELSHYRRQKRDLWRLGQTIPKLEAKLKRWKKEIKNRHVRLCFGTRKLFKAQYHLKENGLSCHEEWKETFVKNRDRMMYLCGKNDEKNGNQLCHLIRMENGSWKIEVLSVLRPEKGQDTSITGPVKITHVPGLELLDKAFDGFEAAIPIKQAISVRILRRKKGYYVQFFLHLPKPEGWSTSSFEGVIGLDFNADHIALCETDGKGEIIYARRISLPGLGKKEHNYNQGIAQMMKAIKEITAEARFKGKDLVIEDLDFSKKKSDLQKNKDYNRMLTQLAYSQYTQAVKRRCFKD

SEQ ID NO: 40315 - protein, 256 aa, unknown
  TnpB Polypeptide
MIPSLKNVRLKECGYIPTNAKVRSGTVSKSADRYYVSVLVEMDIVDANIPTNEGLGIDLGLTDFAVISNRTFKKNINKTVTVRKLEKKLKREQRKLSRKYESLKLRNKNKKEEATRQNIQKQVVKVQKIHQTLTNIRTNYINKVISDIVKQNPSFITIEDLNVRGMMKNKHLSKAVAGQKFFEFRTKLTNKCNWMGIELRIVDRFYPSSKLCHECGCIKKDLKLSDRIYKCSCGYEEDRDINASLNLRDAKIYKIA

SEQ ID NO: 40316 - protein, 386 aa, unknown
  TnpB Polypeptide
MKDRKTIPMKTYKFKLYSNHGNRELHKMIDGHAHVWNHCVALQRRYYAIYGKYISKFRLINHISKLKRLPQFAHWNQLPSQAIQDVAARIDKGYKSMFEARAKGKAWGRPRFKPRRKYKSFTLFQAGWKLLNSNKIRIGKRIYQYFKSRDVLGNPKRCTIKRDAIDDVYICILTDYVEPDLHRVMTGKIAGFDFGLKRYLTGHNGHDIDSPQFFKRSINVIKRANRAHSRTKKKSKNRERARLDLTRKHRKIERQRADFHWKLAHQLTDEYDEIRLEALNLKGMQSLWGRKVSDLSFADFVKKLVYIAKQKGVKITFIDKWYPSSKTCSACGAVNEALNLRDRNWQCDECGAVHDRDRNAAINIFRVGASTHEGEDVSPGLLGNPC

SEQ ID NO: 40317 - protein, 341 aa, Campylobacter sp.
MSANNNELISISHKVELKPNNKAKTHFKKAFGCARLAYNWGLAKWQEYYKQGIKKSHLELKKEFNAIKKEQFPFTYEVSKYATQQPFLNLNLAFQKFFRDLKQGKVSYPKFKKKRDNFGSYYIGGDQAIIKDEKYLKVPNLGLVKMKEKLKFNGKINSFTISQSADKFFVSFSMQISKDEYLKTHNKAKNNNLALGIDVGLKSFLSLSNGLEIKAPKPLAKLNRLMIKRARQLSKKQHAKTKQEALQGIKKSSNYLKASIKLNKLHRKIANIRSDFLHKLTSSLTANVKYFCLEDLNVKGMKQAQGITEQLKAENALEWTGCLNNIRACAREIVEKEIIFA

SEQ ID NO: 40318 - protein, 356 aa, unknown
  TnpB Polypeptide
MTLSFGKGSNKTTVKVKHSRKDLYGYEAEALSRRVCYCRVIRKAYPEGWRYFLQLVLDGPPPVKADPKTGEVLHSLGKGRVGLDIGPQTLAYSAEKDVNLVELAEGAQNMQDELRRLKRAMDRSRKISNPGMFYPDGQVIPRNRLPAELLDRRGRRKWVKSKHYRQMEMRLRSIYRRQAAFRKHQHHRMANAMLPLGDKFFVEDMRWRALAKRAKKTRRNKKGKFLSKKRYGKSIANKSPGSFLTILEEKVVRFGGTFQRIVTWEAKASQFDHQTGKYNPKKLSQRWHILSDGTKIQRDLYSAFLIQHTNADLKSFDQSSCDRDFRAFMVMHDRAIGRLKASNKYLPSSMGIKKSA

SEQ ID NO: 40319 - protein, 200 aa, Burkholderia sp.
VILVYRYRVKSLNGLLNRQSRAVNYIWNFCNDTQKHALKWSKKWPAGFDLNVLTTGSSKELSIHSGTVNATCEQYAKSRNQHRRPYLRYRVRKSLGWVPLKGRDLKREGDAFRFAGNTFRVFNSRPLPEGKSIAGLRTREWACGGCGVEHDRDTNAALNILRCGRASPGVGILSLYGEEDVKVIGSSSGFPTRLSTIRPR

SEQ ID NO: 40320 - protein, 576 aa, Halobacteriales sp.
MTQLTEQFHMPDEYHEACDRLTTLVETHTQRLLTDEYWDDTHLDALDTHSGHSYTYIRDDDHDAFEGVEEYLYSRFKRCVYHRVTHVLDAHTDEYDAFRFVTDTVAERKIRRIGWHRLRTRLFDDDDSPYIEWRILESVVAQLNDYYDRHGRFPDSYTDLVDCPDPNGTLPYAPDKGDYHIHDLSVDEGELVVTLNAPDSLSPESHYDWTDHELRFPVHSRFQGMITSGDMEAPTLHASEYGYTLDVPVVVPETECDTVDGRVLAVDLGVKKQVTAVSVEQNGDELTQGGPPQFLDHPAKAKLFRLKADAEGINDRLAELRRQGKTHTDRFDHLLSEFRKTRRKERRLREHIQHDIANELVRSAADSGCERIVFESLGQLDSGETSSAVAWSISSWARGELLDLVAYKAELLGIGVETVNPWGTSRYCPRCGERGRTVNAPDDHTECRHGGHFHCPECGYECDRDMVGALNVGRKHLADTKMEAANPVAYTEAGNHASFPSPSGARSAGVQSTTDQQDAASGRQTHLSQLRVTPLILKRDERESGGLHQNQGRKTGLRRPSGSVTRYVLARTTECS

SEQ ID NO: 40321 - protein, 380 aa, unknown
  TnpB Polypeptide
MSDTGGENMEYAYKFRLYPNREQENLILRTFGCCRFVFNHYLALRKEAYEQTGETLNYYACAKDMTGLKQQEETLWLREVDATALQSSLRDLDTAYQNFFRRVKNGEKPGYPKFKSKRNRRQSYKSKCIGTNIKVLEGAVQLPKLGKVKCRISKPVEGRILSATVSQTPSGKYFVALCCTDVDMEPLPSTGAVVGIDMGLKAFAITSDGVEYPNHKYQSKSQKKIARLQRQLSRKTKGSNRWEKARLQVARLYERTTNQRQDMLHKLSTDLVRNYDLIAIEDLAPSNMVKNHKLAKAISDASWGEFRRQLEYKAAWYGKEVVTVDRFFPSSQLCSSCGTQWAGTKDLSVRKWVCPSCGASHDRDLNAAKNILNEGLRLLA

SEQ ID NO: 40322 - protein, 424 aa, unknown
  TnpB Polypeptide
MEIVKGYKTELKLNNKQITACFNHSGSARFTWNWGLDRRKTAYKRDGEKLNAIALHKELNELKKTDFDWLYQVSKCAPQEALRNLDKAFSNFFSKRAKYPKFKSRKKGIGSFTFTGTVKVFNNMIQLPRLGKLGLKEKGYLPIDKHILKATVSEKAGRWFVSVQVKEDIKVPKNNGGIAGTDLGIKTLAYVSDGKKFENPKALKRFERKLSRAQRRLSKRRKGSKNRLKQKRIVQKIHRKVKNIRNDNTHKVTSYLAKNKSFNCIENLSVKGMLKNRRLSKALSDAGLGEFGRQMKYKCNWYGSDLTVADRWFPSTKRCSGCGSIKDMPLSCRIYCCEECGLVIDRDYNASLNLRYYMEREIGSFGFPSVIDFYDTSKSMVAVSLPETLNAFGEGSSGLFTEISETAFDELGIEHYLGIFDLDG

SEQ ID NO: 40323 - protein, 364 aa, unknown
  TnpB Polypeptide
MERRLQAHLENETPPPDVLRRARQDAPQANLVQSARNRAAEAITGVVARWQNGKKGSQPHFTTPSVRYDKRSATFNDNHVSLSTVDGRIEAEYVLPQEGDTPQTKYLRDDEYEVTGATLQYRDATDTFFLHIGTKADVESEIPDEGDAGHSTVLGVDLGIEQIAVTSTGQFWSGDYLNHRRREYERVRGDLQRTGTESAHRTIERMGDRETRWVEDYLHRTSKAIVQEAAAHGCDTIAFEELTDIRNRTPGAKKFHAWAFRRLYDYVAYKAEAEGIDATQVDPAYTSKRCSKCGTTLDENRPSQAKFCCQKCGYEVNADYNAAKNIGFRLLRAGQKSPHGGATRHLALKSGTLNVNGGYSPANR

SEQ ID NO: 40324 - protein, 425 aa, unknown
  TnpB Polypeptide
MNPVQRLQAFRYELRPNGQQARQMRRFAGACRFVFNQALALQQQRHAAGEKRLSYAQLSQALTGWKRQPELRWLNDSPSQALQQALKNLDRAYINFFDKRAAFPRFKKKGQSESFRYPQGVQLDQANGRIFLPKLGWMKLRLSRPVLGTIKNVTVSLRTGQWFVSIQTEREVEQPVPPATHAIGIDMGIARFATFSDGDFLAPLNSFKRHQVRLARYQRRMARKTQFSSNWKKAKAKVQQLHSHIANCRNDFLHKATAAISQNHALVCIEDLQVGNLSRSAQGSKGNPGQNVKAKSGLNRSIMDQGWYEFRRQLQYKLEWAGGMLVAVPPHNTSRTCPCCGHISPDNRCTQARFLCAQCGYQNHADVVGAINVIERGQRLLACGEDVSRAKVARPKRAASRKQEPTEATHVQHGAGVGAVGIPCL

SEQ ID NO: 40325 - protein, 457 aa, Acidimicrobiaceae sp.
LSDGSGSNPASCPTWSDASPCGWCRVSAPAPRVRRTTLRTKADHSGSGSFWRHSASVPSTLMSRSRTYRYLLQPTSRQRTGLERMCLSQCELYNAALEERRGAWAWERRSVSYVDQCRTLTETREVRPDLFKCGVTVCRGTLKRLEWAFAAFYRRCHSGETPGYPRFKAASRFDSVQWEDTKGWGLDTDNKRLRLHGIGHVKLRMHRPLRGTPKAITVSRQGKRWWVSIRCADVPAQPLPATGHSVGIDLGVCALVATSDGELVSEGRFAKRGRNRLAGAQRALSTKRRGSMHRRRACEAVGRAHRKVANQRKDLAHQLSRQLVNDHDLIVVEDLRVAQMSRRPKPRPNGKGGFDSNGARAKAGLNRSIADAGWGMLRSMLVYKAEDGGRELIAVDPRHTSLRCASCGHTESENRLSQAVFRCRGCGHRDHADVNAARNILRAGRAQRASARAGLGN

SEQ ID NO: 40326 - protein, 472 aa, Streptomyces sp.
MRSATEFHSQCIGLQPGGEANLVTAARSVAVSFRRSRTLRHGGEAGNGCSRRYRVVCVRTITECSFGTPSACTRSPVNAPRWPGRSGCARVVFNDAVRAREDARTAGLPFPGADELSKRLITQARPTAERCWLGEVSSVVLQQSLRDVEGAYKSFFASHKGERKGKQVGAPRFKSRKDTRQSIRFTANARWKITETGQLSLPKIGDVRVKWSRVLPAVPSSVTVILDSAGRYFASFAIDTDSETDRARWNEPEPGSAVGIDLGLTHFAVLSDGTKICSPRFLRRAEKKLKKAQRELSRKQKGSKNRAKARSKVARAHAAVADARKEFHHQLSTQLIRENQAVAVEDLAVSGLARTWLAKSVHDAGWSQFVAMLQYKAQRYGRAFVKIGRFEPTSQVCSTCGHRDGPKPLHVREWTCPACGTLHDRDHNAAINVKQAAGLAASACGAPVRPGLVPAQREKTGSHGTPTRTCAA

SEQ ID NO: 40327 - protein, 403 aa, Streptomyces sp.
MNLIFRHVRPRGVPTVIGMQLRYNYRAYPDASQCRALARAFGCARAVWNDCLRDRREAHAAGLPYVKSAELSRLRITQAKRTEERAWLADVSAVVLQQSLRDLDAAYKNFFDSIKGKGRGRKVGPPRYKSKKDAQQSIRLNTNAFSLSGDGTVYVAKVGNLKVKWSRLLPAAPTSLTVTKDSCGRYFLSFVVDTQPEILPQADTEAGIDLGLSAFAVLSDGRKIGSPRFLRRAEKKLKPLQRGLSRKVKGSKNRAKARIKAARQHAKVADRRRDFHHKASTQIIRDNQAVYVEDLAVAGLGRTRLAKSVHDAGWSAFVGMLEYKAVKHGRTFAKVDRAFPSSQICSACGFRDGPKPLHIRQWTCGGCGTVHERDHNAARNVLFEGRRIVAAGRARHKTPVERR

SEQ ID NO: 40328 - protein, 418 aa, Streptomyces sp.
MTQQVKRAFKYRFYPTNEQADELSRTFGCVRLVYNKALEERTRAWYGEQRRISYVQSSAALTEWKKTEELAFLSEVSSVPLQQALRHLQAAFGNFFAKRAKYPRYKSRKKSRASAEYTRSAFKWRDGQLTLAKMAEPLSIRWSRPLPQGSEPTTVTVSCDAAGRWFVSMLVEDTIAPAPAANAVVGIDAGITSLVTLSTGEKIANPKHERRDRARLAKAQRDLSRKAKGSANRGKARRRVAKLHARIADRRRDFLHKLSTRLVRENQTVVIEDLAVRNLMKNGKLARAISDAAWTDLRRMLEYKCAWYGRELVVIDRWFPSSKLCGTCGTIRGKLPLNVREWTCGCGTVHDRDVNAARNTLAAGLAASACGDGVRPQRESSRTGRSSVKQESQRATAGVPRLRAGEEVNADSFGNGGR

SEQ ID NO: 40329 - protein, 236 aa, Streptomyces sp.
RVSVWTTAGRGKDVAFTASPEQLATLALYRRGESDLLHRDGMWFLNATCEVPEASPDTGPADFLGIDLGIANIATTSDGEIMAGRELNRIRVRERTLRAKLRKKNTQSVKRRLKKRRRKATHSSWAFAQLDQFIAYKARKAGVPVVYVDPAYTSRTCAECGHIDKANRVSQARFACRSCGFVDHADRNGSRNIRAKAWQLWRRGAQSTAPDPLPGPGRGTGRKRSTTASGARSASP

SEQ ID NO: 40330 - protein, 315 aa, Streptomyces sp.
VVAARSPRVSVWTTAGRGKDVAFTASPEQLATLALYRRGESDLLHRDGMWFLNATCEVPEASPDTGPADFLGIDLGIANIATTSDGEIMAGRELNRIRVRERTLRAKLRKKNTQSVKRRLKKRRRKATHSSWAFAQLDQFIAYKARKAGVPVVYVDPAYTSRTCAECGHIDKANRVSQARFACRSCGFVDHADRNGSRNIRAKAWQLWRRGAQSTAPDPLPGPGRGTGRKRSTTASGARSASPGLQSRAVDSQHMSMRPAKLSYPARSKARAIGRFPRSVSAVTRSAPCAASRRVPSASRSSTKPRPRWPSTTPR

SEQ ID NO: 40331 - protein, 237 aa, Okeania sp.
VQKFNLPRENSKGIDLGLLYYAVTSDGEFINAPKFFRKSEHRLSRLQVRLAKKQKHSKAWKVLKGKIAKLHQLIARQRLDWQFKLAYHLFNDCQVIFLEDLQIASLVRRCKAKIGDNGQFLPNGQSAKSGLNKSLQDVAFGKFVQVLEYVAWKLGKRIIKVDPKGTSQHCWECLSKVPKSLSERWHSCPKCGQELDRDYNSALLIQKIGLLSTQGEDITSVKTAVSASLTEESRVVA

SEQ ID NO: 40332 - protein, 378 aa, unknown
  TnpB Polypeptide
MNKIFEYKLRPNKKQVKLLDSLLWETKCLYNNALQELIDYYEKTGKYLNRFTQDKNYNKQIYPNIPAQFVDTTLDRLHRSFANFFRGLKQGKKIGFPRFQSYKRWSSFAFRDYTQGKIKDGKWYISKTNGIKVIQHRDFLGTPKLTRLVKRADGYYIQVICEIKSVKVKKTDKQIGLDLGLRYFIADSSGNKIEAPKFFRKAQYKLARNQRQLSKKQKEGKNRNKVRQIVVKNHLTIQRQRRGWLHKLSHKYANENDVVVVENLNVAGMVRNRYLSLSISDASWATFLSMLEYKLQILSRTFIKVNPVYTSQKCSQCGAIVQKSLSQRTHYCPECLYIGDRDVNAAKNILKLGQVLPFGEDTAIAGLTTQEANRSLGV

SEQ ID NO: 40333 - protein, 348 aa, unknown
  TnpB Polypeptide
VGRYDQQKMFPQWSKDFPEVKAVHSQVLQNVAVRVDLAFRAFFQRVKEGKTPGFPRLKGKGQYDSITYPQSGFKIGDSTVSISMFGKQVQVKAKLHRPVLGKVKTCTVRRYGSKWFVCFSAEQPDAFLPPSSEAVGLDAGLNSFMALSNGEFLDNPRFFRKDEKALAKAGRKQAKTKKRSRDKITCERRKANKVLSRIHERIRSRRHDFVHQTARRLVNRFGIIAVEKLNVKNMLGNHCLAKSISDASWSLFRTVLTHKAESAGREVIAVNPAYTSQDCSACGYRPDGLEGRTKKKLSERWHFCPMCTASLDRDTNAAINILALARNQSGITDCQVTPVEAPAFTHGE

SEQ ID NO: 40334 - protein, 398 aa, Streptomyces sp.
MIRGVKRAFKYRFYPTSEQAAELARTFGCVRKVYNMALAARTEAWARGERISYNATSAMLTAWKKTGELAYLSEVSSVPLQQCLRHLQGAFVAFWEKRSKYPRFKSRKNSRRSAEYTSSAFRFRDGLLHLAKMKDPLDIVWSRPLPEGTQPTTVTVSQDAAGRWFVSMLCEDPGVKPLPATGTAVGIDVGLAHLLALSTGEKIANPRHERRDRARLAKAQRELSRKAKGNGANRRKARLKVARIHARISDRRRDHLHKLTTRLVRENQTLVIEDLTIRNMVKNRSMARAISDAAWSGFRSMLEYKAAWYGREVIAVDRFFPSSRLYSACGTLQDKMPLSVRTWTCGNCGTTHDRDVNAAKSLRAAGLAVSVCGAGVRPQRRTPGRPSATKQKNPRREP

SEQ ID NO: 40335 - protein, 280 aa, unknown
  TnpB Polypeptide
MNKKRYSTIGLTCARLWSELNYEKRQAFFNRELTMMKRDKINRRYYHKYKGVLGVNAGQVVNKNDEAWNEFFKQLDLRKQRRLPPHIRKLSPPGYWKDRETGEKKIHILIRNDRYHVEPISKNEGYIVLEDFDLRVRYAGRIRWEGKQGRLEIIYEAGRWQAYIPIEVGVDPPKSNKRGYVKPIYDDEEKKKKRRIVNPKSIRQRDPIGDKEAFMDMGLNNLFAVVTTDGSVMLIKGGSIKSEYYWWKREIATYQSIRDVLRRLGISTWINYHEKYLCYV

SEQ ID NO: 40336 - protein, 221 aa, unknown
  TnpB Polypeptide
VDINERKIVYGDDKINKEMDTKIDEAHKWKKLAENLQRKYSSSRYPAWRRRRGILNRVRSHHRKARNILEDWARKTSLEIVMMAKKLGHAAAREDLTGLINTLRKIKNKDHRTKLIIMGYKRLGKWIDWQAEKHGVPLAIVNPNGTSSECPQCGSKDLEEAGYRRLRCPRCGFKADRDVIGKLNIRKRALKKLGINPPGGSLTTPSAPQMTDVNPNRWGNR

SEQ ID NO: 40337 - protein, 468 aa, unknown
  TnpB Polypeptide
MASLLQSGVRFRADPDAGLASVLARWIGCQRFIYNGKVGEDHLYAAQRRMLIKSGVTDPDALKTPLDQEYSRFKNRELSPWLYDVPSQVLRNGAYRWMCAKTRQLKGLAKAPARRTRKNFNSVMLTSELFRFVRRNGETVIELGTKAKPVGLLRFNAHREYGQPNVIYIRNEAGRWSVSFSYVHESGQIMREPHEIAYEIGTLDDAALEAATIGIDRNVRDNCFTDSTGRQHRPDPINLNRIARREKGARRYQRMVSRAKPGSANRRKIVQKMGRRKSYAARVRLDFTHKTTHALVSSDARMFVLEDLRIKHMVRKPKAKQCPETGKWLRNNARAKAALTTKILSSCWGELDRQLQYKAAWQNKLAVKVTAAYSSQECSRCGHTHPGNRNGAIFACQRCGFEAHADENASRVIKGRGIVALRGGAYDAPKTKKRTAFRRNVSGTGGTPGAAQQCADMSVERAQARLAA

SEQ ID NO: 40338 - protein, 447 aa, unknown
  TnpB Polypeptide
MIVYQAYRFALDPTPRQQGALASHVGGARFAHNWGLGLVQQRLDERAAGQNVEVPWTLPALRREWNRAKDEVAPWWAENSKEAYGSGLDALASGLRNWVDSKQGRRAGAHVGFPRPKRKGGGRQACRFTTGAIRVEPDRHHVTLPRLGRLKTHESTRKLARRLEQGTARILAATISQQGGRWFVSFTCQVQRAEQRPRRPAATVGVDVGVAQLAVLSSGERIANPRPLTAALGRLGRTSRQLARQQGPRAPDGTPRRPSAGWRKTQRKLARRHARVANLRAEALHQLTTSLAADYGTVVVERLNVAGMVRNNRLARAIADSGMGQVRRLLGYKCSWAGGRLVEAGTFFASSKTCSDCGTVKAKLSLAERTFRCPACGLVVDRDLNAARNLAALVDGIQQIEQVVAGSGPETVQTPVGGTISPPVTVAGPATPIPGREAAGSQQPVWV

SEQ ID NO: 40339 - protein, 335 aa, unknown
  TnpB Polypeptide
MKVLKGYRFRIYPDEEQLTFFKQTFGCVRFTYNQLLMARKGTANSEESMKLTPAALKKDYPFLKKTDSLALANAQRNLERAYANFFQGRAGYPKLKSKKNSWQSYTTNNQKHTIYFIDGKLKLPKLKSLVQLHQHREIKGMIRSATISAKNNEEFYVSLLCLEEVSFLPKTKKVIGISYCPQRLIQLSQSFDNLPNIEEQLLGDKLEKAQKKLQLRAKIAKKHKVRLRDAKNYQKQKQRVQKLIQEKACKKNDFIDQLTFLLVKEFDYIFVEKQPRITDSEEDNPFTSTDWYSFTQKLTYKTQWYGKEYLVVESPDDTIRSSRIIEVLGKQQFDL

SEQ ID NO: 40340 - protein, 168 aa, Acidianus sp.
NIGKYEAYLELLRERRRLFKKLTRRLLHLYRNLASHLIKTLYELGVSTIYLGYPFNIVKEKGNKFTVNIWSYCKLMESIELKAQEYGMKVYEVVEYNTSKYCAYHDVEVKRSPRGVIICPKGHKLHSDLNGALNILKKALGVIAEAVKKPLSFVVDHNRVAPIKGCNP

SEQ ID NO: 40341 - protein, 437 aa, Acidianus sp.
MPEEGVYEVKYSNQRTNVVRLLPNGFQERKLRRLANLSAKLFNEVDYERRQQFFHEEVVDIKGTWSKYYEKYKAKLGVNAQAVLQKNNEAWSSFFSLLKLKKEGKLPHINRVSPPRYWKDRETKKRRLILIVRQDRYEVDAENHKLILKDFDMEIDFVGRLRWYGKQGRLEIIFDETRNAWYAHIPVEVGVEEAGKKSKHVVKGERKAIQISKPKGNKVASIDLGINVIASAVVNDGTWLLYKGVRTKEDYFYFQRRISEVQSLADRTRNVSEGEAYLELLREKRRLFKKLTRRLTHLYRNLDSHLIKTLHELGVSIIYLGYPFNIVQEKGNKFTVNMWSYRKLMESIELKAQEYGMKVYEVVEYNTSKYCAYHGVEVKRNPRGVVICPKGHKLHSDLNGALNILKKATRILVKALKKPLSFIVDHNRVAPTKGCNP

SEQ ID NO: 40342 - protein, 273 aa, Acidianus sp.
MPEELVEAQIVDFGRLKEIYSDILYYENYKSILKKTGGIDPPPPQSLRALPFSGRRIGPLSLIIAGNVIKIKEIGAIVKPTKEGNPVYAIVDFSQGIKVLLAYEEESPIVGIDLGIRHLFTIVAIVNHGKLYKVKYVGDKKMLDIFSKYLGESQGLVYLNDIRERVRKPVIETVKFLEELKPKVIAIEDLRLYEAKVGKGLRAIQEILEEELFKRGMKVRRLDPRGTSKICSRCGYKKGEVLGSIFVCPSCGYKADRDFNAAYNLALKCYYTC

SEQ ID NO: 40343 - protein, 383 aa, Acidianus sp.
MARRDKNPIRATVSMKIGLSDSLLALVNNYVKALRFTLFWMKENVKDPNEKGTLSKVHEGLYEKLKKEYNLPSKVAEDCYRDALATYKSWYNNPKKGRFPRVYKPTVWLTPKQSYNVVLEKMTVKIAGVGVLPILGYPRNLKDYSTWEMKEARLTIKDGKAFLKVVFEKPKVKIEPKGSVAIDVNMSEIVVGKDDTHYVRIPTRLHDAYHFKTLAENLQKKYPRRWKQNRRILHRIHSFHQKAKRIMEDFARKVGRWTIEIAKKLGANVIKLENLKNLIRNVNKLPAEFHDKLYLMQYRRIQYWIEWQARKHGMIVKYVNPSYSSVSCPKCGKKMIEMAYRYFHCPSCGYENDRDVIAVTNLNGRGSLTLSTAPQMRDVNPNR

SEQ ID NO: 40344 - protein, 201 aa, Acidianus sp.
MPSSGQLYEERKPTSTSAIPEEGVYEVKYSKNYLELLRERRRLFKKLTRRLLHLYRNLASHLIETLHELGVSTIYLGYPFNIVQEKGNKFTVNMWSYRKLMESIELKAQEYGMKVYEVVEYNTSKYCAYHDVEVKRNPRGVIICPKGHKLHSDLNGALNILKKAVGVIVNAVKKPLSFIVDHNRVAPIKGGVTPKTSGNPR

SEQ ID NO: 40345 - protein, 383 aa, Acidianus sp.
MARRDKNPIRATVSMKIGLSDPLLALVNNYVKALRFALFWMKENVKDPNEKGTLSKVHEGLYEKLRKEYNLPSKVAEDCYRDALAIYKSWYNNPKRGRFPRVYKPTVWLTPKASYSVDLDRMVVKIASVCELPILGYPRNLKDYSTWEMKEARLTIKDGKAFLKVTFEKEEEKVKPKDSVAVDVNMNDIVVGKDDSHYVRIPTRLHDAYHFKSLAEHLQKKYPKRWKENKRILHRIRYFHQKAKRIMEDFARKVGRWTIEIAEKLGANVIKLENLKNLIKDVDKLPSEFRDKLYLMQYRRIQYWIEWQAKKHGMIVKYVNPSYSSVSCPKCGKKMIEMAYRYFHCPSCGYENDRDVIAVTNLNGRGSLTLSTAPQMRDVNPNR

SEQ ID NO: 40346 - protein, 402 aa, Escherichia sp.
MKRLQAFKFQLRPGGQQEREMRRFAGACRFVFNRALARQNENHEAGNKYIPYGKMASWLVEWKNATETQWLKDSPSQPLQQSLKDLERAYKNFFQKRAAFPRFKKRGQNDAFRYPQGVKLDQENSRIFLPKLGWMRYRNSRQVTGVVKNVTVSQSCGKWYISIQTESEVSTPVHPSASMVGLDAGVAKLATLSDGTAFEPVNSFQKNQKKLARLQRQLSRKVKFSNNWQKQKRKIQRLHSCIANIRRDYLHKVTTTVSKNHAMIVIEDLKVSNMSKSASGTVSLPGRNVRAKSGLNRSILDQGWYEMRRQLEYKQLWRGGQVLAVPPAYTSQRCACCGHTAKENRLSQSQFRCPVCGYTANADVNGARNILAAGHAVLACGGMVQSGRPLKQEPTEMIQATA

SEQ ID NO: 40347 - protein, 299 aa, Pseudoalteromonas sp.
MSKSRLTTAKQQAIRNQQTAFKNFFEGRAKYPTFKKKRSKQSAQLTKAAFRYTDGQLFMAKSKQPINVRWSRELPSEPTTITISKDSAGRYFVSCLCRFEPKPLSISKNTVGIDLGLTDLVIASNGFKSGNPRHTKRYASKLAKTQRVLSKKKKGSSNFHKARKKVARVQAKIADCRHDFTHKLTSQLINDNQVISCESLSVKNMVKNRKLAKAISDANWGEFVRQLTYKAEWYGRTVVKIDKWYPSSKRCNCCGHVVDSLPLHIRKWSCPQCSSERDRDINAALNIKAVGQTVLACGA

SEQ ID NO: 40348 - protein, 394 aa, unknown
  TnpB Polypeptide
LRVAYQYKLQPTKTQSGALCRLLEIACRLYNDALQERKDAWEREQRTVSFYEQNRKLKDLRATDKELGLLNCATCQHILRRLDKAFQRFFRGLKNGEKVGYPRFKKPHRFRTLEFTYGNGVKIRADERGQQRLYVQNVGLIKIIWHRPLPEGAVIKQVWITHKSDGWFVTFALEVPEEALMKPLPKTGKAVGVDVGVENLLALSDGTLLDNPRWYKETEKKIAHKQQILSRKVKGSKRWRRMCRQIAKLHLKIARQRKDYYFKLANRLVREFDLIAVEDLNIDGLAQGVCSKSVHDASWGVLLNQILPYKAWSAGKVVVRVPPNGTSQHCAVCGAHVPKNLSDRQHRCFDCGFTTHRDINSAMLILKLGLERACRNAGVMPALCLQETVGFIQR

SEQ ID NO: 40349 - protein, 439 aa, unknown
  TnpB Polypeptide
MKTTLSAKLKLHMTPEQFKALRSTQLAYRDALNFVSRYAFAHGKMSNKVGLQEGTYADLRQQFRLPSQMACSVPRQVGATYKGLWTRVKQNVQARRDGRTKKRYKGLDQAPKYASPTLEYQYGKDYSFKRDAHVSLLTLEGRVSIPYTGYTKHVALIQQNAEMGAAKLWYDKPKKQFYLIVSLEVETLDPTPDTHKNVVGVDVGVRCLAVSSTTKGECNFYSGKQIVPKANHYARLRKRLQRKGTRSATRRLIAISGRERRLKQDANHVVSKRITEQYPHVLIGLEDLTHIRERTRRRTGKKTSKKQRTSNATSSKWAFAELHSMIAYKALLNSSMAVKVDAHYTSKACPMCGHTSDKNRPNKGLLFVCQNCHYTLHADLVGSRNVTLRTLLIRQDWMSTGRLSVCPDVSDSEAKALRLLRYSELRWSPDTSPRLPDVG

SEQ ID NO: 40350 - protein, 281 aa, unknown
  TnpB Polypeptide
MEHPSSKRTRVRGQSVERYQSSSPNLRAGGFPKQIKSMSWKLRKHKLKTGERVRQNPIRETAWKHDRLKVPKLGEVKIYMHRPLQGDPKEVTLVKKARGWYAHISCELPDTPKIEPTQAIAVDMGTTHYLTTSEGEKEDNPRWYRQAEGLLRKHSKDLSRKKKGSNRRKKQQHKLALHHERTTNKRKDFIGKLVYKLYHHEKNNVLVAEDLSVSNMVKNKHLSKSISDASWSTFFQWSGNIAERDGFHFHQVDPKNTSQTCSSCGQKSPKKLSLALRTFNC

SEQ ID NO: 40351 - protein, 414 aa, Methanocaldococcus sp.
MSNKTKLKDNKELLYQVVLSYKVSHNYPLKAFLIECKNKLNECIDMIWNNIKYTKKDNPKLPKSNEFKRELRNKLLENWNYASHYIDGIIKTSYSILQSWASNYKRGYRTKTKPIAKRLFVRVKTTLIKYDKEKGEIRITIKPRKDYLILNIKNEWFFDKVKNLTIGEIILKEKETFLTFKDNLNYSDKGMIVGVDSNLRSLDLFHPIEGWTRVDLTELHRIKEVYDRKIDFLKKLLKKFPLRAMRKINRLFERRRNRVKDFLHKLTIQLSRLFPDAIFVFEDLNKRRMYKSKYFNRKIDRVNWNGLIEKISYKTIVILVNPAYTSTICPICGSRMESQEGQVVYCSNCLNSFNRQLVGCYNIFKRGLGNIKEIMGGSGVTTTGVEVSFGKLMTPNPNVIYIVDYNGKYFNEIA

SEQ ID NO: 40352 - protein, 426 aa, Bifidobacterium sp.
MTAYEAVRIRLDPTPRQERMLMSHAGAARFAYNLMLSHVTRQLSLGERPDWTMYAMRRWWNEWKQEIAPWWRQNSKEAYNSAFEWLSLALKNWSDSRKGRRKGRKTGWPRYKSKRTSVPRFAYTTGRFGLIDGDPKALRLPRIGRVHCMENAARLVRGRRIVRMTVSRRAGAWYAALTVEQQPGTHPTAKTRRRDYPVGVDLGVKTLATLSDGTVFPNPHAYARSQRKLRRAQQTLSRRERGSNRWGRSLDRLRRVHMRVTAQRADHVGKLTAWLAATYPSISIEDLNVQGMTHNHRLAKHVLDADFAEFRRQLEYKTARTGARLHVIDRWYPSSKTCHRCGTVKTKLPLGERVYHCDKCGLTVDRDLNAAINIMVAGSAPETLNARGGDVRRPGSPEATQTPVKREPSRRANAVRLGAAPGNRGM

SEQ ID NO: 40353 - protein, 416 aa, Moorea sp.
MRIAYQYRLKPTKQQKAKIDYWLSMLCAQYNYLLADSAKPTLRERFRWYEQNRCSINACPLICYLPELRDNPDYYSQKKTLPNLKKTHPWYKDIYSQVLQDVVKRVKLAFDRFIKGDSNGKRSGKPRFKKPHRYRTFTYPQIKEGSLDGNLINLPKIGKIKIVLHRPLPDGFKIKTASITKKCDGYYLVLSLEDNTIPKIKHDINPNSITGIDVGLKEFLTTSEGETIEIPQYYRKSQKRLRVIQKRVSRRKKEGKNRLKAIKQLARQHKKVADKRKDFHFKTANYLLSKYDVIAHEKLNVKGLAKSRLAKSVLDAGWSSFLTILTSKALNAGLLVVPVSAQNTSQNCSNCGKKVPKKLHVRWHDCPDCGCSLDRDHNAAINIINRAEGQSVLKAQRLLRDTRIGWEAYTEPARSV

SEQ ID NO: 40354 - protein, 382 aa, unknown
  TnpB Polypeptide
MILRAIKIRLYPNKTQEQTLNKVLGCYRFVYNQMLALKQNTYNENKTNLGLNELSKYFHRTLLKDENYTWLKEQNTKVMKQAIRQMITAYNNFFKLNCGFPRFKSKKDKQSALFSLEAISKNNTFETKHISLIKSLKNIKFRCSDKQFKRLQKYKDNIRSATLSKTKSGNYFLSVLVLINDDEFKQFQHTNNKVGIDLGVKDFVITSDGEVFENKHFFKTSENKIKKLQKQLIKKLKGSNNRNKARIKLAKVYEHLTNQRLNYIHYVVNSLLTTYDYVFMEDLNVQGMLRNHHLAKAIQEIGFYVFKNTLKNKAILNNKLVIEVDRFYASSKTCNKCGYIYKGLSLNEREWLCPQCGEYHDRDLNASINILHEGERILKLNT

SEQ ID NO: 40355 - protein, 391 aa, unknown
  TnpB Polypeptide
MILTERHIIRKTNSLYKELDMLCFLSKNLYNSALYTVRQFYFENKKYINWININNQFIKSKQIDYYTLPCKVSQQTLKMVDQNMKSFFNALKAKNSKPRLPKYLDKTKGRFVVTYTNQAISKTELKKGYIVLSKTNIRIKTKIHDVQQVRIVPQNNVIVVEVLYKADCKSNVSDVRKYCGVDFGLDNLMSCGFSDVRPMLINGRPLKSINWYYNKKKAELQSLLKNKYTSNRITNLTIKRNNKINNYLHKSSRLFINYLVSNDITDVVIGYNKEWKQGINIGRVNNQNFVNIPYYKLLNMLTYKCELLGITVHITEESYTSKCSFLDNEEICKHEDYKGKRIKRGLYKSSDGRLINADVNGALNILKKVIGEYKYDPILVCSMPLVLQPRN

SEQ ID NO: 40356 - protein, 444 aa, unknown
  TnpB Polypeptide
VKGKEGHVVLEAVKVALDPTPAQERLMLSHAGAARFAFNATLAHVKAGIEAGDKPEWSFYSLRKWWNANKDTLAVGDDGVIWWSENSKEAYSSGLEALAKGLSNWSKSRKGARRGRRVGFPRFKLKDRATPRFAYTTGRFGLIDGDPKALRLPKVGRVHCMEDVTARVGDARVLRMTVSQRAGRWYAALTVGRDDKPVTKPPQGGAVGIDLGVKTLATLSDGTVIENPRCLAASERRLKMAQKALSRKVKGSRRRAKARAKVARIHAHVANQRLDAMHKATTWLASTYSHISIEDLNAAGMVKNRHLAKAVSDAAFSEFRRQLEYKTARTGAALHVVDRWYPSSKTCSKCGRVKAKLSLSERVYRCDACGLVMDRDLNAAVNILVAGSAPETINAHRETVSRSGQPGRATQVPVKCEPSVGGNVVSDLERVPARTPCKQSQTSL

SEQ ID NO: 40357 - protein, 158 aa, unknown
  TnpB Polypeptide
MAYLQKSFFHDSIRYYSLVEINRELLPQTDNSVDIDLGIKTFTTLSNSKKIDAPKPLKKLIKKYILQSKSLFKKCLGSKRYEKARLKVTKFHNQLKDTRYDFLHKLLTSIINYNQIIVLEVSNVSEMLKKWCNLAIIIVARKNAPKHSQLSKAISDLS

SEQ ID NO: 40358 - protein, 411 aa, unknown
  TnpB Polypeptide
MGRKRRLSFAEQFHFSGKEQEEVPMRTKHKRAYKYRFYPTGEQQRILARTFGCARFVYNYFLRLRKQAYFEEQKSLTYHQTSALLTALKKQAAYAWLNEVSCVPPQQALRHLDRAFKNFFQGRAAYPVFKSKRGEQSAEYTTSAFTWDGTHLTLAKMEELLALRWSRPLPEGAKPTTVTVTLDTANRYFVSILVEEDITPLPAMKSMVGLDLGLTSMVVLSTGETVGNPRYFAADERKLAKAQRRLARKQRGSRNRARARLRVARVHARIADRRRDYQHQLSTRIVRENQVVCVESLAVKNMLKNHRLAKSISDVGWGEFVRQLEYKASWYGRTLVKIDRWCPSSKQCFDCKHVLDSLSLDERFWTCPACGQFHDRDVNAAKNVLAEGLSASACGERVRPGRAKAPAGAAR

SEQ ID NO: 40359 - protein, 427 aa, Nocardia sp.
VSHKQGYRVELAPDAGQMVAMGRHCGLSRVVENFCLEIVQKKWAQRKAEETYGLTGDELTEVPWTAPALEREWRAAHPQRYRWFTENKMSSRVPKEACRVRAAGFANYLKSKKGQRKGARVGFPSWRKRKHGSRFRYDADRAEPVDPRTVRLPGIGHVATREDMSWLTGRLTAGAARILGATVREQGGRWWIAFQLEVDRDEINTRRRVPEQSPQCGIDLGLTTFAVIINDDGTTEEIHAPKPLKAAQRALSRTNRKLSRCLEDSKNRGKARERVARLHLRVAHRRRDFLHKTTTRLARTKSAIAVETLNVKGMTRNRRLARAVTDAGFAEFVRQLAYKADWYGTTLWKADRWFPSSKTCGACSRINRSLVLADRTWVCPGCGVMHERDYNAASNLLTAMLTALSIEIERPLAGKFPGEVKRLVETV

SEQ ID NO: 40360 - protein, 441 aa, unknown
  TnpB Polypeptide
MGKDNFHSFRKECTHSVISDNSEESSDEGYFIRTTEYALYPNREQERKLLLFLEVCREVYNRLWKICKFLLERNLNLPNDIYLIRIARGIWNHNEWMRPIYQNCLNDVAKRVHKAFKSFLKGRKEGRNVGYPRYKSRNRYDSFTYPHPQGYYFVSKDGSKGGFDRIRLGKIGNIRFGNRFRIPGIMKTATISRTRVGKEYRWKICIVWIVNKFTEHQTSLDFEDTYSKPVGMDLGLRLLAAFSDGTVIPNDNTYRRKESELAKVQRKLSKAIEDNPEYRKSDDYYRMRARLTHRFRKLKNHRKDLYHKTTRDITYNHGDIYAESLNVKELSEESESKTMKKQFRDAAWTTFMSILSYKAEEAGTIIHEVNPAYTSQICSRCGNIVEKDLSVRIHECPYCNLRMDRDINAARNILKRGLGAARQVRGQRQISEPLLVSTSGI

SEQ ID NO: 40361 - protein, 398 aa, Microcystis sp.
MSGMEKAYSYRFYPTPEQESLLRRTLGCVRLVYNKALHERTQAWYEKQERVGYAQTSSMLTDWKKQEELDFLNEVSCVPLQQGLRHLQTAFTNFFAGRTKYPNFKKKHQGGSAEFTKSAFKFKDKQIYLAKCTEPLPIRWSRQIPEACDPSTVTVRLHPSGRWHISIRFDDPTIKPLPVTDKAIGIDLGISSLVITSDGDKVSNPKHFKKHYRRLRRASKNLSRKQKNSKNREKAKIKVAKIHAQITDSRKDHLHKLTTQLVRENQTIVVENLAVKNMVKNPKLSQAISDVSWGEITRQLAYKCRWYGRNYIEIDRWFPSSKRCSNCGYIAEKMPLNIREWDCPDCGTHHDRDINASKNILAAGLAVSVCRATIRPEQSKSVKAGAEPRKGKKQKPKS

SEQ ID NO: 40362 - protein, 376 aa, unknown
  TnpB Polypeptide
MRKSYKFRAYPTKAQAAAMETMVETHRHRYNRALSERKDTWERQQRGVSYGDQSATLKVQRLANPYLAATNFSSCQATLRRLDTAFQAFFRRVKAGDKPGYPRFRGRGRYDTVVFPSYGDGGKLRDGRAYFQHIDAVKVKLHRPIEGRIKTMAFKREADGWYVVCSCDLGNVTVAPSTNPAVGIDLGLQAFLTTSDGGSVPPPKFYRSAHRKLRRAQRHLSRGQKGSKRRQKARERVARLHQHIGNQRRDWHHKTALSLISRYGTVAHETLNIAGLARTRLAKSALDAGWRQFLGILTHKAEGAGVSVMAVDARNTTQACSDCGCLTAVPLTLRDRVYHCASCGYTADRDLTAALNIRNRLGWSRQALTGTVVPVA

SEQ ID NO: 40363 - protein, 186 aa, Streptomyces sp.
VNIATTSDGDIMSGRQADRYRRRKRDLRTKPQKKRTKSTDRVLKRNRRKEARYATQRNHIIAKKLVATAERTSRGIGPEDLSGIRQRVTARKDQRARLHSWAFAQPGAFVEYKARRAGVPVVHVDPRNTSRQCSECRHTHRTNRVTQARFACRSCGIVLRADHNGSRNIAHRADAVRRQDAVTPHR

SEQ ID NO: 40364 - protein, 417 aa, unknown
  TnpB Polypeptide
MIKFKRNAKFWGLDLSELEEDFKKELETQRRISKHVRNMIRNGEITWITSDKDLILADGTKQTKAKFKDSISYLFDEDACSESMKRNCVITVLHSYRGYWQRNKDRILDIKCPIGFKYKSFRFNEAAIKVDKENKVLLVKTMYMPTGKFRKVPYKYSLKEDLITKKEFGGNISFTQKCFVAGINVEVNEYVSNDILAFDINKDSKSWIYFNDGTVITKPETLIKLEKEIKEINHSLDKDKKVPIKKRELRSKQRRKLRLQIQKKHQKANRIVFKICKDILSTVIKNKQLLCIDGVSIATAGTFGQDKIIPNLRTMCENQGVPFYVTPTTNTSRRCALCGHIHKNNRKTADEFHCIECGHQDNAQLNAAHNIAHTGKRFLDVGVPFGSWDHRNADKLVEEYTVGDKAENSEEMAIDFE

SEQ ID NO: 40365 - protein, 371 aa, unknown
  TnpB Polypeptide
MIRTYTTRLKVTRKQNTRLEHLLSHLCEIYNMALEQRKDMWMQFHTSISQYDQQKELTELRTWFSEYEELPAVIERDPLHRLQLAFNGFYRRAKKEENPGYPRFKSITRYDSFSVDSQNFKLDFIGNQISLVGLGTFHYKTHFKMKGEPKQVHVKRCGKHWQAQVVCDIGAALEKKPVCNAIGIDLGLTTLVTCSDGTEIENPRWTKQESDKLAETNRSLSRKKRGSNNRSKAKEQLRHCHQRIKGKRSAYLHGISRQLVDSYDLIAYEDLKINNMVKFHLAKSILDAAWGELIYQLKYKAEEAGISAVAVNPRNTSQLCSGCGRKVPKDLSQRIHTCPFCGLVIGRDLNAARNILDRGMRSAVFSTRGSN

SEQ ID NO: 40366 - protein, 482 aa, Streptomyces sp.
  misc_feature (381)..(466): Xaa can be any naturally occurring amino acid
VKRAFKYRFYPTDAQAAELSRTFGCVRKVYNMALAARTQAWTRQERVNYNQTSAMLTAWKKTEELAYLNDVSSVPLQQALRHLQTAFANFFGKRAKYPRFKSRKKSRRSAEYTTSAFKYRDGRLTLAKMDGPLAIVWSRPLPEGAQPSTVTVSQDSAGRWFVSMLCEDPTVKALPPVSASVGIDVGLTHLATLSSGEKITNPRRERRDRARLALAQRRLARKAAGDGANRAKARRRVAKIHARIADRRRDHLHKTTTRLVRENQTLVIEDLTVRNMIKNRSLARAISDAAWTEFRTMLEYKAQWYGRTVVVVDRWFPSSRLCSHCGTLAGGMPLNVRTWTCGGCGTTHDRDVNAAQNLLAAGLAVTACGAGVRPQRSTPGXXXXXXXXXXXXXXXXXXXXXXXXXXXXXXXXXXXXXXXXXXXXXXXXXXXXXXXXXXXXXXXXXXXXXXXXXXXXXXXXXXXXXXVGIPLLQEGEEVKAAV

SEQ ID NO: 40367 - protein, 387 aa, Nocardia sp.
LTTPQAEYAEQVGAACRAVWNTGLEQRREYRRRGALLNYVSQARELAEAKLEHEWLKIAPGHCLQQTLMDLDRACQDQGPFKVRWRSARLWQPSFRFPEGSKIQVERLNRRWGRVKLPKFGWVRFRWTKALGGAIRSATVSRDGQHWYISFLVETGVCTPEQHARPNTAVGVDRGVIVAVACSDGRTRNRAFTSDGERIRRRRLQQKLARQPKCSANRRKTRAALHELKLRERDRRKDFTAWTANRIATANALVVLEALRTRDMTASARGTINEPGRNVAQKSGLNRAILDKGWHLFELALRSVARLTGTEVVKVSAAYTSQTCSSCRSVDPRSRESQARFRCTSCGHSENADVNAAKNILAAGLAVTACGDLAIGRFVKQEPAGKP

SEQ ID NO: 40368 - protein, 509 aa, unknown
  TnpB Polypeptide
MESLNTVKTFSTMKIDINAKELTEYFNNTGILVNNLTNVCIYINRQWHFYNQNIYYNDNPEKKQENYKPYNYDKKLIDNLLLYIKEYDAKRFKKHIKNGKSEKDFIKSNFNNKELSYMFLEYYLKNTDNVDYKHKDLGSHTAQQAVKKVAESFKSYYKSFFDYLKNKDKYSGKPELPKYKKKVSFCSFSFTNIECKIKNSKIKFPKTELKLNFNYNTNDLKHIKTTVIKYYDKIQLQLVFEKEFAENKKENLESRHVAGIDLGINNIVTIATNKGKSLLVKDKYLKQLNQFSSKELSDIYSKQTTTGKLEKPKSSKKVKTVFRKRNNRITNFSYILANFIVKYCLDNNIDTLVIGLNRDWKQDSNLSKVNNQSFQQIPFSKIIDKIEYKCKLNNIEVIIREESYTSKSNCLNYDYIPTYKKEDNKEYKFMGKRIKRGLFKTDSNILINADVNGAVNILRKEFKNIKIETDNIKYLTNPEVIKELIKTGKNKKYKNRIGIKKAEKLKKVS

SEQ ID NO: 40369 - protein, 448 aa, unknown
  TnpB Polypeptide
MLKQKYTTVTQLHEVNNKDIIEYFENASVYFCKLQRKAFHIFKNENIKGNKVEYNKFRQDFMKEHNISKRTADSILKDVLGRIKSLAELKKYEASQKEQKIEKLKEEIEKLDKKISEFQEKMKNKIKVSHLKYWNLKKSRAFKKMKLNKFQMRLEQLKWQIETGNYKLCFGTKNLLKSNKTEFLLQRNSQMSYIGSQDEKGRNQMFQLSYNKRNNQFDIKLRKDFGFDKEEKYVFGKCYFNNHKNKLIKALENKNSTPLTYSIIRKNGRYYLHCTFEYRIEDKSNFLTRRTYGTIGIDFNKKFLTVSETDRNGNLVKTNILEYRFGKGNKTQSDLENCISKILKRALKTGKDVCFEDLNFKGAKSKTTKGKNNKGKKYNNMLHTLAYSLYDKLITNMAFKNKIGIIKVNPAWTSWIAKNKFCNKMKLNIHTGASFVIARRGLGIKDTI

SEQ ID NO: 40370 - protein, 405 aa, Streptomyces sp.
VGTSSLVKRAFKYRFYPTDAQAAGLSRTFGCVRKVYNLALAARADAWTRQERMGYGQTSALLTTWKRTEELAYLAEVSSVPLQQALRHLQSAFAGFWGKRAKYPRFKSKRKSRASAEYTRSAFRYADGHLTLAKMAEPLDIVWSRPLPAGAAPSTVTVSRDSAGRWFVSLLCEDTPAPMPATTNAVGIDVGLTVLATLSTGEKIPNPRHERRERDRLARAQRALARKEMGSKSRAKARTRVARIHALIADRRRDHLHKLTTRLVRENQTLVIEDLTVKNLLRNHTLARAVSDAGWRELRSMLEYKAAWYGRVLVTTDRWFPSTRLCSVCGTSADTMPLHVREWTCENCGTTHDRDGNAAINLLAAGLAVAACGAGVRPHRESSSRLGRSVVKQETPPVRVGLPSS

SEQ ID NO: 40371 - protein, 584 aa, unknown
  TnpB Polypeptide
VPSSTGSPPATSAPSPRTSTPPAPARRSPPASSSPRPPTRTWPAGSAAGPWPPTSTCPSTAPSTSGWAGASAWPRCGRRGRPATARARWPPSTTTWSMSWLSTAPPRPAASGSCSTPRPGSTPRSWPYSRSAATCARPSGASARPPPDPWGRAAGGYAVVASLSHQLGRFAGSSRRSLPLLCGRIPAGGGVRRAYKFRLRPTARQHVALEQCLASHRELYNAALQERRDAWRLRAAAVFYGDQSAQLKEIRAVRPDVAVWSFSSQQATLRRLNRAFIGFFRRVKAGETPGYPRFRSAHRFTSVEWPMDGDGCRWHPDTRKVYLQGVGQVKVTVHRQVQGLVKTIQVRRQGRRWMLILSCDGVPTRPLEPTRAAVGIDLGIASFATTSDGEHLSNPGFGRLAAARLATSQQAMARKRQGSNHHRRARESLAARHRKVANQRRNLHHHAARTLVVRYDLLVVEDLKIRNLVRRSAPRPDPDQPGRFLPNRAAAKTGLNRSIHDVGWAQFVSILRAKAEEAGRVVIDVDARHTSDRCEACGHTAKENRASQAVFSCRGCGHTVNADEHAARNILRAGLARLAANSAA

SEQ ID NO: 40372 - protein, 382 aa, Rhodococcus sp.
VQLRYQYRVYPTPGQQHMLARSFGCARVVFNDALRVRQDAYAAGVTLSDTDVQKQVVTAAKKTPPRAWLAEVASVALVQSVRDAAVAYRNWFDSMSGKRKGRKVAAPRFKSRKDNRQAIRLTRNGFSLRSNGKLYVAKVGEVKVAWSRELPSEPSSVSIIKDAAGRYFASFVVETTDEPLPEVDFEVGIDLGLTTFAVLSDGKVIESPKFLRQAERRLKKAQQALSRKDKGSRNRAKARMRVAKAHAKVADARKDWAHTQSTVIIRENQAVFVEDLCVIGLARTRLAKSVHDAGWAMFTRMVEEKAARYGRTFVKVDRFYPSSQLCSVCGMKDGRKPLSIREWQCAACGVVHDRDLNAAKNIHAAGRAEWLNACGGTVNPAV

SEQ ID NO: 40373 - protein, 392 aa, unknown
  TnpB Polypeptide
MRGCQHRQLYDIIHTGMSLLSVRCKLIPDASTAEKLARTVNQFADACNYALQVARRDNLWNKFALHRAVYHELRERFGLTANLAVRAIARVGKRKGRKAKGFKATSVDYDQRILSVNLADEVVSLSTTDGRVKVPMHIAEYQRQLLRTAKSIQGGQLVRRRGSWYVHLWCEYEDPPVLDPQGFLGVDLGIVNIATDSDGETYSGQHLNSVRHRHRRLRKKLQKKGTKSAKRRLKKLSGKERRFANDLNHRISKRIVAKAQRTGRGIALEDLQGIRERVRLRKPQRAALHSWAFRDLVQKIQYKAERAGVPVVFVDPRNTSRQCPACGHTERANRPTQALFRCVACGYSGPADYIAARNIASRAVVIQPNAGVRDAVHGYRSTCKPRTSVRGR

SEQ ID NO: 40374 - protein, 423 aa, unknown
  TnpB Polypeptide
MLTWKQNLKHLTKKEYEYLLHLCRLSKNVYNEALYNIRQHYFIQGEYLQYTSNFRLMKSSENYLRLGGGISQQTMRCVDAAFKSFFALLEGVKKNKFSPREINIPRYLDKDGLYPLHFTDIKLDKNGSFLVPVSRVLRNETTVRIRLRCPPQIRNKHIRQIHIVPKCKGKYFEARYIFDEEIKIEKPQLDASKVLAIDPGVNNFATCATSDYDAFIIDGKHLKSINQWYNKELARLSTIKDHQYLNKVHTRRQYRLSLKRDRRIQDYIYCSAKYIVNYCIENHIGNLVFGYSDGFQEMKQKHKNVKQNFKFLPYGKMKERLKFLCERAGINYRIQEESYTSLASFFDNDEMPVWNPQNPKQGTFSGSRVRRGLYRTSNKTYLNADVNGALNIMRKSKLNDITPDIKQCRGAVITPLRIRCVPN

SEQ ID NO: 40375 - protein, 387 aa, unknown
  TnpB Polypeptide
MLPMIRTIQCPLLFDQDLVDTVRIYNQAVQSVIDIGYEAKIFNKKKLNAMTYASVRDQFPALQSSLVQCARDMASAMLKRDKFQCKKPIKRELSGIRYNQRTFTPFLESHKISISTVNGRKKYDLIVPPYFQQYNGKVTSLTIKIKNKTQIIAYITIELPNTPITPPKTYVGIDRGIKRVVVLSNNLFWNTSAILRIKYKNQHLRQVLQQKGTRSATRKLKRLSGRERRFMTDTNRRIAKWIIGQPYDCIVLEHLKGIKHNSKKKHRVGIKLRRKFGNWAYYQLEQFLVQSAERCGKTILFVNPKYTSQRCNQCGHITKDNRKGQSVFKCQECGYELNADLNASRNISDLGTSVVGRVDVRHPNVAISDSAIQDVLLRGIPVTSPPL

SEQ ID NO: 40376 - protein, 535 aa, Thermoanaerobaculia sp.
MLTNPTATLQAVARPGAPPPAHRAKRSAPAARGQEIHSVPAETFARRRATLRLYPNASQEKQLLTFLRLHCELYNAALEERRDAWRAARKSITHYDQTRQLPLLKKLRPDLVPLGAQALEGTLKRVDLAYQAFFRRVRSRVGPAGFPRFRAWRDFPGWTYRQTGWRWTPREDGQHGRLELANVGAIRVRGGARTLGRMKTCTILRRAGKWYASILLECHPGRRGGSEALGLDWGVSHFATLSDGSTIENPRLLERDLERLAAAQRVVARKKKGSRRRAKAKLAVHRLHEKIRNRRAHFLHQASADLVARASLLATEKLATKNLTRSAAGTIEEPGSNVAQKAGLNRAILDTAPATFLALLRYKAQEAGVPFVEVDTKTVKPSQTCPACGAVAKKELSERAHRCSCGAALPRDQAAALVCLGVALTGRPEGAWSPTSLRSSETRHRSETTACGGQGRGAAAPGGEVGSPPPPVRLRNSRMLLPSLVVAANDEDEELLDTYTIAGRCPAARGPRGLREAPTQRGGQSDLQSHEETNE

SEQ ID NO: 40377 - protein, 206 aa, Firmicutes sp.
MSHFFVDSQNNKGEYPKFYRQAQETLAREQRRLSHCKKGSNNYYKQKLVVALIHEKISNQRKDWLNKLSCQIAKDNDIVCLEDLNMKGMSQTLNFGKSVSDNGWGQFVNMLNYKAKSVIKVDKWYPSSKTCNHCGTKNVNLMLNDRVWTCSECGTVIERDYNASQNILDEGMRLVRKNRKNKTVGTTGLAYLCLAQQGYRVGSHCL

SEQ ID NO: 40378 - protein, 401 aa, Richelia sp.
MLVFEAKLEGLKQQYDKLDEAIRTARFIRNSCLRYWMDNRGIGRYDLSAYCAVLAQQFAWASKLNSQARQAAAERSWSAIARFFDNCKKNRSGKKGYPRFKKEQTHGSVEYKITGWKLSECRRYITFTDGFGAGTFLMWGTRNLHFYQAKQIKRVRVVRRADGYYTQFCIDSKRQETREPTGKTIGLDLGLTHFYTDSDGQTVENPRHLRTSEKSLKRLARRFSKTKKGSKNRAKARNNLARKHLKVNRQRKDFAVKLARCVIQSNDLVAYEDLKVRNMVKNRHLAKSISDAAWTTFRQWIEYFGKVFGVVTVAVPPHYTSQKCSNCGKVVKKSLSVRTHVCHHCGHTQDRDWNAARNILELGLRTVGHTGTLNASGDIDHCLSGETPSSKPSRRKRKPKQ

SEQ ID NO: 40379 - protein, 350 aa, unknown
  TnpB Polypeptide
MTKTLSLRVKDKHAKFLLSQSREVNFVWNFVNDLSYTHTKKTGKFFSAYDLNQYTTGATKEGLSLHSQSVQAVNEEFVTRRIQFRKVKLRWRKSHGSQRSLGWIPFKKSAIKYKNGQVHYQGKAISLWDSYGLSNYELGTGSFSEDSRGRWYFNTAVKVKTQESKASKSVGVDLGLKECAVTSDGNRLEGRNYRKLEQSLGKAQRANKKSLVKVIHAKIKNRRKDQLHKFSTMLVKEYGAIFVGNVSSSQLVKTKMAKSTLDAGWSSLKTMLEYKSRQAGVVFEEVNEAYSTQICSSCGEISDNSPKGRADLNKRSWKCHCGSVHDRDINGALNILAFGHERLAVGIPVL

SEQ ID NO: 40380 - protein, 368 aa, Lyngbya sp.
LTQCPKPRFLSREPSKQAFCGLSAFGLNRGANTDKLGSGLPQLLAIPGFSCTCCCKISKPQIDTQHFRSFPFGLGGNFNYYIDVIVAIPTLRKRGTCGELTSKQCDLIATNFQLKISPSRLKCDSNFLQGLNIFECSCVKRDTCWSKLVDLFGSFVLVNNPSDGLTNVVSLQPRRLSDGFVGQVMQLGCVPTVLFFCLEQYLVTSIGKSHQSFIDRLGQVWWDYQLAFDRYCLRHTPTISQAGVFCKLYRSRHSSHRQLRLLAWVSCRNLDEFRRQLEYKCKLYGSELVIVDRWFPSSKTCSNCGTIKESLSLSERTFICDDCHFELDRDLNAARNLAALAGSLPVSACGVVDADITTSKQEQNEEPR

SEQ ID NO: 40381 - protein, 368 aa, unknown
  TnpB Polypeptide
MKRLQAFRYELMPTGGQRRQIRSFAGSCRFVYNKALALQKELYNQGDKKLGYASLCRLLTEWRNSAQTPWLKDAPTHPLQQSLKDLERAYSNFFAGWTGFPRLKKKGRSESFRYPDTRQIKLDQPNCRIFLPKLGWLRYRNSRPVLGEVRQVTVSGSGEKWFVSIQTECELQALLHPSGSMVGVAAFATLSDGQVCVPINSYRKRQKRLAFLRRRLRRKTKFSNNWKKANARVRKLHTKVANCRRDFLHKTPSEISKNHAVVVLEDLAVENMARSAAGTVEQPGRNVNAKSGLNRAILDQGWSELRRQLDYKERWRGGSVVVVPAKNTSRTCPGCGHSRPGTVKRATSSSALHVRTRRAPTWLRRATF

SEQ ID NO: 40382 - protein, 410 aa, unknown
  TnpB Polypeptide
VPLITLKVQIHADPQTEAVLKDAMFCATKVYNGLLWHLRKEYQETGKVNISRKNLNRILKELPRAKGYYSMSVQLTRDEVREAYKSFFALKKKGLTQHGAPGFRRKGQLSPLKYVQSGFKVEGGKVTLSLGTGREDGVKEVTFRISHRPGVEYERVRELSIAYDKVSGRIEARLVVEVKARENNGTGKVAVDLGETVLMACAFDDGMVTLYSGRLIKAVRRYWQKVRASLKQNSRRWEEIAHRERRQVEHLLHIATAHFIGECMRRGVKEIAIGDLNGIRESVDYGDRLNQRLHAWPYRKLINMLRYKGALVGITVRDDVEEKSTSITCHACGKVMPSNRRYRGLYVCSCGFKAQADVNGALNIYERAYQVSPVKGSSGRVARPAVVSYHLGWHGVAEPKHRDKPLCASA

SEQ ID NO: 40383 - protein, 435 aa, unknown
  TnpB Polypeptide
MNKLLSTEPMNNALISISHKIELMPNDKAQTHFQKAFGCARLSYNWGLDKWEEYYKQGIEKSYLDLKKEFNAIKKTQFPFVYEVSKYATQQPFIHLNRAFQKFFRDLENGKVSYPKFKKKKTNSGSYYIGGDQVTIKDGKYLKIPNLGLVKMREKLRFEGKINSVTISQRGDKFFASFNMQISKEEYIRTHPKVKNNQLGLGIDLGLKSFLSLSNGLEVKAPKPLDRLERLLIRRSRQLSKKQHAKTKQEALQGVKRSKNYQKASIKLNKLHRRIANIRGDFLHKTTSCLVKNVQYFSLEDLNVQGMMRNHRLAKAISDVSFYEFKRQLEYKATYNSREIHQVDRFYPSSKLCSHCGALKEDLTLKDRVYCCDKCGARLDRDYNASLNLLSQLKKHIGGVHPEFTPADLTALQEDLAINRLVTSKCETGIQPKSH

SEQ ID NO: 40384 - protein, 391 aa, unknown
  TnpB Polypeptide
MLKRQAFKFELMPNGEQIRIMNQFCGCARFVSNHALALHNTQYAQDNNITFSYTKIANLLPQWKKTFPWLKDCNAQVLQQSLKDLDSAFKNFFRNLAGFPKFKKKGIKESIRFPQDCKLEQHNNRLYLPKIGWVRYRNSRNVVGEIKNVTVRKKCGRFYVSIQTQCEVEIPQHQGGEIGIDMEIARFATLSNGEYFEPLNAFKTYKGKLAKLQRQLKNKIKFSKNWQKLQAKIAKLHHKIANCRKDFLHKISSTISKNHAMIYIEDLQVSNMSKSAKGTIEQPGTNVAQKSGLNRAILDQGWYEFRRQLDYKAQWQGGFVVAVPPHNTSRTCPCCGYTDKENRPTQAKFECVECGYRNNADVVGALNILERGRATVQRNPTGGDTAGALVK

SEQ ID NO: 40385 - protein, 478 aa, unknown
  TnpB Polypeptide
MANYVLTLGLKTELWQEHILEKRLNIARMIYNSCLGEILKRHRKMVNSFEYKEIKHLDKKEQVKKYRELDKKYLISKFELNKFVKTMTQKFKQNIGSQISQMGQELAERAFATYEKLKYGKAKKIYFKRDGDFYSVREKGNITGLRFFKEDNCIVWLGLKIPVIIKKNDKYAQSCFLDKLLYCQLLKKVINGKHKYYVQITFEGIPPNKHKVGEENEIGLDIGTSTIAIVSDNKVELKILAENIEIDEKEKRKLQRKLDRQRRSNNPNKYNADGTINTKNKEKWKKSQSYVKTQLKLANLHRKIADKRKQSHHILANSILEMGTRVKVEDMSFKGLQKRCKKTEISEKTGKIKKKKRFGKTLLNRAPALLIEIIDRKLGYVGKNIIKVNTFKVKASQLNHSTNEYEKKTLSKRWTEISGNKIQRDLYSAFLIKNVKDNLEEVDIEKAEKGFKNFVKLHNEEVERLKESGAKTLSCMGF

SEQ ID NO: 40386 - protein, 398 aa, unknown
  TnpB Polypeptide
MQLTYRYRLYPSRAQEHKLFAALDSCRWLYNHFLEKLNQKEDGKIPRRYELQATLPELKRKHPGLKQVHSKVLQMVLHQLYSNLRALAELKRNGRKVGRLRFKSKGWFKSFTYNQSGFKIIEGHGKRRELWLSKIGPIPIVLHREPIDGKVKQVHIKRERSGKWFACFSVEVEETPKVEKFSKPVGIDLGIAHYTADTAGNFVEHPHNISKSEWRLKREQHRLSRKERGSKNRAKQRVKLARAHERVRNQRLDFLHKLSRYYVSRYDFIAVEDLGVKELIEMAHNGKNRADAAWATFLHMLTYKAERAGGWVEKVEPRETTDRCSKCGEMVEKPLCVRVHRCPRCGLELDRDLNAAQNILQDGLKKVGWGPAEFAPVEIGPLSPWRQARSSKQEAPSG

SEQ ID NO: 40387 - protein, 414 aa, unknown
  TnpB Polypeptide
MVFCSVNLVEKHIIRKGHKWFGACDRVCFLCKNLYNYVLFENRKKFIETGKIYSMKEFFKMLRTNNQPDFRALPSQVAKEVVRLHYKNWLSFFAAVKSHRKNPSKFTGRPRLPKYKKQKGDTKYGRFIACYYFPEAISRKALKQGIIKLSGIDNLSRPLGIEIDSRGRKVKMVRIVPKYGRYVIEVVYEVPTPNLQAANGKEAALDLGVNNLGTVVFNTGDHPVIINGRPLKSINQYFNKLKAQLMSYVGGKGHSQRLEKLTLNRDNKIHDFLHKHSTLLMNYLASKGITKLYVGKNQGWKQSIKIGKRNNQNFVNIPFDKFIQMLTYKGALRGIEVICHEESYTSKCSCLDRESVKKHLIYKGKRIKRGMFKSNKGILINADVNAAYNIGRKSNPEFLDRIEVLPLVPRRLIA

SEQ ID NO: 40388 - protein, 419 aa, unknown
  TnpB Polypeptide
MLRAIKIRLYPNREQELKLNKVLGCYRFVYNQMLALKQQEYNENKKSLGLTDLSKHFHGTLLKDEQYAWLKEQNTKVMKQSIRQMLSAYDKFFKQHNGFPKFKSKKDRQSALFPLEAISKGNKFDERKITLTQPLKDIRFRCSDLYFKRLQTYRDGIRCATLSKTKSGNYFLSILVELPQKEAVRFGQTDAHVGIDLGVKDFVITSDGEVFENRHFFKKQENKVAKLQRQLSRKQKGSNNRNKQRVKIAKAFEKLTNQKEAYIHSVVNGLLAYYDVMFMEDLNVQGMLKNHKLAKAIQEIGLYRFRQILEYKAMDNYKEVVFVGRFYPSSKTCHKCGYVYKGLTLGEREWTCPVCGEHHERDLNAAINILVEGERIIGSRRPEFTPVENPTVDERTETCLRSGGSSKQEAETDGNHRFS

SEQ ID NO: 40389 - protein, 416 aa, unknown
  TnpB Polypeptide
VKQVVQVRLEANAAQLDVLARTLIACNNTANVVSRIAHAKRVFRRRDLRAITYAQARQHAGLGSQVAQSCIRKVADAYTTLSTNLRNGRYGKTGTARRMKVEGSPIRFRSLAAQPFDDRCLSWSHDTSGETGGTVSIWTVDGRMKNLRFTGEPTQIAMLRAYRCGETDLVIRRRRGGGLTAYLMATIDVPHPPVHTGEHLQIADGWIGVDLGVQNIAVTSDRPLARELMTTYGSDAADRAAGRGNVKDRRTRNRELRQKLQKKNSRSAKRLLRKRARKEAHFAADVNHQISKRIVAEAERTGRGIAVEDLTGIRERVRLRKPQRATHASWAFAQLGAFLTYKAARAGVPFVQVDPAYTSQRCTHCGYIDRRNRTSQAEFVCRDCGFIAEHADILGADNIAHRAPTTWAQSTVPSAA

SEQ ID NO: 40390 - protein, 395 aa, Nostoc sp.
MEKAYRYRFYPTSEQEQILRRTIGCVRLVFNRALAARTEAWYEKQERVAYVQTSAMLTQWKKFDDLQFLNEVSCVPLQQGLRHLQTAFTNFFAGRAKYPNFKKKRSGGSAEFTKSAFRWNDGQVYLAKCVEPLPIKWSRQLPRGCEPTTITVKLDPSGRWFVSLRINDARDETMQPVDSAVGLDVGVSSLMTLSTGEKIANPKAFDKHYQKLRRAQKSLSRKQKASRNRDKARLKVARIQAQISDSRKDHAHKLTTRLVSENQTIVVEDLAVKNMVKNPKLARAISDAAWSELVRQLDYKAKWYGRTLVKIDRWFPSSKRCGSCGYIVDKLPLNVREWDCPNCGAHHDRDINASRNLLAVGHTVAVCGANIRPDRHKSKGQLQKTRKGNKQKPKS

SEQ ID NO: 40391 - protein, 381 aa, Bacillus sp.
MLFHFVPNIDLSKVMNSLRKVVKTMARKKAVKVLRKQKKRENMQRFTQKQNIGRACLTTKEFRLLQRMSHSSKALRNVGLYTMKQSYLNHNRMATVKEVDTAMQNDMNYSGIQSNSVQAIRRSLFTEVKSFFKVLEQMKKPSTTTSNALSCDLGVDRLLSCVTNTGDTFLIDGKKLKSINQYFNKMICNLQQKNMDNGISKRIVTNKMAALWHKRERQINGYIAQTVGLLFKKVKEFDIDTIIVGYNAGWKQNSHMGKKNNQKFVQIPFQKLIAAIENKCVKEGIRFLKQEESYTSKASFLDKDPVPVWSKDDKTAYRFSGKRITRGLYQSKAGTCIHADMNGALNTLKKSGVVELDDNLKVKTPILLEVQKRKAIASRIA

SEQ ID NO: 40392 - protein, 393 aa, Escherichia sp.
  misc_feature (293)..(293): Xaa can be any naturally occurring amino acid
VERLQAFKFQLRPGGQQEREMRRFAGACRFVFNRALARQNENHEAGNKYIPYGKMASWLVEWKNATETQWLKDSPSQPLQQSLKDLERAYKNFFQNRAAFPRFKKRGQNDAFRYPQGVKLDQENSRIFLPKLGWMRYRNSRQVTGVVKNVTVSQSCGKWYISIQTESEVSTPVHPSASMVGLDAGVAKLATLSDGTVFEPVNSFQKNQKTLARLQRQLSRRVKFSNNWQKQKRKIQRLHSRIANIRRDYLHKVTTTVSKNHAMIVIEDLKVSNMSKSAAGTVSQPGRNVRAKXTTTVSKNHAMIVIEDLKVSNMSKSAAGTVSQPGRNVRAKSGLNRSILDQGWYEMRRQLEYKQLWRGGQVLAVPPAYTSQRCACCGHTAKENRLSQSKFRC

SEQ ID NO: 40393 - protein, 396 aa, Haloterrigena sp.
VSSDDYHRRTVITRVTELSDDDERLLLETINEWRDGCNLAIDRAWGVCETKSDVQNLSYDQVRDETDLGSQHAVLACHAAAEAITSCNERLESGKKASKPRITARSITYDTRSMTVFHDSEQVSLTTHGDHSRVRADLALPEATDGYQYRFLNDDAWEYTESTLHYRNGDWYLHLGFRMLKVDTSESTTTNGTVLGVDLGVNQIAVTSTARFFSAGELNHERREFERVRSELQEAGTQSAHRTLVDRAGRERRHAQHVLHTVANGIVEEALVHDCDGIVFEDLSEIRSQLSHADWHSQWAFRTLKEYVEYKATIEGIFVVTVDPRNTSKKCADCGFTHDGNRRHTEFECQSCGNRNHADYNAAKNVAKRYLRRGPQSSRRRGVSQYALKSGSKTLS

SEQ ID NO: 40394 - protein, 382 aa, Escherichia sp.
MRRFAGACRFVFNRALARQNENHEVGNKYIPYGKMASWLVEWKNATETQWLKDAQSQPLQQSLKDLERAYKNFFRKRAAFPRFKKRGQNDVFRYPQGVKLDQENSRIFLPKLGWMRYRNSRQVTGVVKNVTVSQSCGKWYISIQTESEVSTPVHPSASMVGLDAGVAKLATLSDGTVFEPVNSFQKNQKTLARLQRQLSRKVKFSNNWQKQKRKIQRLHSRIANIRRDYLHKVTTTVSKNHAMIVIEDLKVSNMSKSAAGTVSQPGRNVRAKSGLNRSIQDQGWYEMRRQLEYKQLWSGGQVLAVPPAYTSQRCACCGHTAKENRLSQSQFRCQVCGYTANADVNGARNILAAGHAVLACGEMVQSGRSLKQEPTEMIQATA

SEQ ID NO: 40395 - protein, 397 aa, Hydrococcus sp.
MFVLEYKIRAKTAQLRAIDSAIKTAQFVRNKALRYWMDTPKQNKYDLNKYSAVLAKEFKFVDKLNSTARQSSAERAWSAIARFFDNCKKKFPGKKGYPRFQKNNRSVEYKRSGWQLDNQTKKHITFTDKNGIGRVKLVGSRDIYFYNQEDIKRVRIVRRADGYYCQFCISIDVRKDLEPTGKAIGLDVGLKYFYVDSLGHVEENPKFYRKGEQRLSKLQRRVSDKFESCKPATNNYLKAKARCAKYHLKISRQRVEHAKRLARCVCTSNDVVAYEDLQVRNMVKNHKLAKSINDSGWYQFRKWIEYFGVKFGKITIAVPPQYTSINCSNCGKKVAKTLSTRTHNCPHCGYIDCRDKNAAINILKKGLSTAGHTGTWILDIRNAWGEETSTLAGAIQA

SEQ ID NO: 40396 - protein, 407 aa, unknown
  TnpB Polypeptide
MQLVEKHIIKRTHRFWKECDNLAFQSKHLYNSANYIQRQYFFDTGKYFNSIDIYHQTKNLEAYSFLPTKVSKQIVRTVAKAWKGWLAAIKDWSQHPDKYLGKPKIPRYKHKEHGRNVVIYPIDAISKPALNKGVIKLSQTNINLPTRAKNVDQVRIVPKLDHYVIEVVYTIDEPEKNQGKYSAGVDLGLNNLMAVTSNHPGVQPFLINGRPLKSINQFFNKRVSKAQSIEAWKQVKKLNSKRDRRIDNYLHTVSRRTIDWCQLHGISQLVIGNNKGWKQDINIGKRNNQEFTKIPHAKLIHLLTYKAQLAGIEVLLTEESYTSRASALDGDNIPVYNNQSGLKPVFSGKRIKRGLYKTSTGKTINADTNGSLNIARKLIPNFMNGIEGLPFIPVVLGLWTKITNVKC

SEQ ID NO: 40397 - protein, 418 aa, unknown
  TnpB Polypeptide
MLLARKLQVEVTEEQCCYFSHMCYAASKLWNLCNYEKYNWKELGLKEFPSWYYQKKKWKNNFWYKMLPSQTAQEVCKSLDQSWKSYTSLKKTGGIRNPQPPNNKKTPMPITYMQNGMKHNEEEIRLSLPITLKQMVKEANGFNETFLFLRHKAFSQVSNIKQLMIFPPQNGKCDVVLNYEVKEAVALPDNGKYLAIDLGIHNLATCFDSANDKTFIVGREYLAICHYFHKEIAKAQSALAKQSSSQWKAPQYTSKRLKALRKKRNNSIRDYLHKLTKFIVNYCIKNEINTVVVGDLKGLAKNKKRSHHSKSYNQKLYEIPYFKISVMLEYKLTLKGINFVLQEESYSSQCSPNTPEVSKQYAQKSNRIQRGLYIEGNQIYNADAVGAFNILRKYCSSKSIKQQFSTKGLQNTEIIKLK

SEQ ID NO: 40398 - protein, 397 aa, unknown
  TnpB Polypeptide
MKYKKKFKDPNKVHRRYRIRLYPTDEQVKMFFKHIHTCRFIWNYMLTKQKEQYELYKRRYTYCATCRILTELKSREEYSWLDEVSRYSLAITLNDLDTAYDRYFKGINEGLPKFKIKKRSKKSFPIRHDRVYFKESYAHIEKIGMVKFKSSIQLPEGKSEVKDTRILLSKNGKWILSVVIECDKQTPKESLYGNLGIDMGIRKLATFSYLGRSDYIHNINKSRRVRCLRSKLKHLQRRLSRIYYTHGNYHKSKHIKRLIYQIRKIYHRIHNIVYDYNHKQTRMLVNLYPRKVIMEDLEVKKITKRMPRWLRREIYYASWYDFRFKMEYKCNELGIKFVLADKSFPSTQLCSECGELKTGKHKLTLNDHVYVCKKCGLKLDRDVNAARNLEWYDNYLS

SEQ ID NO: 40399 - protein, 374 aa, unknown
  TnpB Polypeptide
MNKAYKYRLYPDNKQEILINKTFGCVRFVYNKMLANRKAIYEQYKDDKEALKQQKYLLPADFKKEFEWLKEVDSLALANAQQNLNAAYSNFFRDKSIGFPKFKSKHHDRKSYTTNNQGGTIRLINNNTIRLPKLKDVPIKLHRQMPKDSRIKSATINKTATGQYYISILVEFEAIIEPIVPTPETVIGLDYSSKTLYVDSQANSAEYPKFYRQAEAKLKKEQRKLSKRQKEGKNRNKQRQKVAKLHEKVANQRKDYLHKISRKIANTYDAIAIEDLNMRGLAQGLRLAKSTNDNGFGMLKTFLEYKLAEQGKQLVVIDKWYPSSKLCRFCGTVNKELTLADRIWTCQECGMVLDRDVNAAINIKNEGCRILGIA

SEQ ID NO: 40400 - protein, 277 aa, unknown
  TnpB Polypeptide
MAIEIPTFIRTLRLKVKPEGYRWLNAAAIEVNQVWNYANATSYKAARPFSGLSKWLSGFDLDNLTAGAAECFEHIGSDTIQRVNAEFATRRRQFKKAKLRWRVSRGSKRSLGWVPFKAVQLKRKPKSLRFAGKAFRVFEKELLEGVAWKSGCFAEDAVGAWWLCLPVEVPPQRMEANREAVGLDLGLKDTVATSDGDKLEAGHFYRHIEHQIAQAQRRGHKRQAKRLHRTAARRRKDALHKFSRKIVNQYQTIVVGDVSSLKLVKTRMAKSVLDASC

SEQ ID NO: 40401 - protein, 394 aa, unknown
  TnpB Polypeptide
MKIHRAHKIRLQPNNQQANHLQQACGVARFAYNWGLGEWRRQHEAGEKTSPYALKKQFNSIKREQFGFVTDVTKCAAEQAFTDLGVAFKNFFRNIKAGKPPGYPRFKRRGIRDSFYIDNIQLQLKGRQVRIPRLGWVRMAEPLRLQGKIRSAVISCIAGHWFCSIQVEIETPDVKAVGPTVGVDVGIKCLAVTSDGRVFQNPKALRTAERRTRLLQKAVSRKPKGSHNRTKAIRRLQLHHYRVACIRADHLHKAAAAITKGAGRIVLEDLNVKGMMQNRRLAKALSDASLGELHRQIVYKAERLGIEIITADRFYPSSKTCSGCGAVKDVLTLGERIYGCEVCGLEIDRDLNAAINLKQLAEGSSVTACCLGSSGVALQQHETTDWAGISHGPT

SEQ ID NO: 40402 - protein, 419 aa, unknown
  TnpB Polypeptide
MTKYRSYKFRMYPTSGQAALIQRTFGCCRVIWNLMLQDAKTNYAKTKKFSYPTPASYKQEHPYLKTVDSMALCNVQINLKKAFYRYFTDRGSKRNHAPRWKSRKHSHKSYTTNRNSISANIRIEQGKLRLPKLGFIRVRFHRHVPGKIKSATVSQTAAGYYFVSILTEQPDVQLTNSIDTSKTVGIDMSFSEIAVYSDGARLKHPRWYRGQEKRLARAQRKLSRRAFGSAGYEEQKIRVARLQERAANQRQDFLHKESRRLVDRFDVIVVEDINLAGLARRGRRRRFGKSVHDMAFGVFREQLSYKAEWAGKQFVKADRFYPSTQLCSCCRKQNTQLRGNLSIRSWVCSGCGANHDRDVNAAKNLVVWYHDNNTGASPGIHAEGDLTATGDSNVSGKSDRGTRKSRRTIDPVGLSTKGR

SEQ ID NO: 40403 - protein, 378 aa, unknown
  TnpB Polypeptide
MKRIAYKYRIYPNTEQKVFFAKCFGCVRFFYNKSLSDMNEIYKNIGKFKNLTPASYKDDYPFLKEVDSFALCNAQLNRNIAFKDFIKQNDKSSKDKPNFKSKRNDQSYTTNMVNGNIKISSNNRYISIPKCPRIRIKKHRDFIGTIKSITVSRTTDNKYYMSILVEEETKPMEPTDKMIGLDLGLKSLIVDSNGHKYKNHKYLTKSQKKLAKEQRKLSKMVKGSNNRNKQRIKVAKLHKHIQNQRNDYLHKLSKSIIDENQVICIESLSVKDMMNDSKLARNISDVSWSRLVSMLIYKADWYGRKVVKVPSTYPSSQLCSKCSYKNSITKDLAIRKWTCPKCGSIHDRDINAAKNILSKGIETLTKDGTHPDSLFMLG

SEQ ID NO: 40404 - protein, 375 aa, unknown
  TnpB Polypeptide
MRRKSTKNVENRVYRFRLYPNAEQTVLINKTIGCSRLIYNSLLTDKKKYYEETGLSLKKKISEYKKEKVFLKEVDSLALANAQLNLETAFKNFFEKRSKYPKLHKKGKHDSYTTNNVNNSIRIVDKKIKLPKLGFVKIKQHRTLGSDEIIKSVTISKVGGNYYISVLTEREPKPIKKVDISTISEDRVLGLDFSVPHFYADHNGNFSEYPKYYRNTQKKLAKEQRRLSRKEYRSCNYYKQLQKVQKLQEHIANQRKDFLHKLSRELVNQYDAICFEDINLSNLKRTLKFGKSISDEGFGMFRTFVKYKLEREGKHFVLIDKWFASTKLCSHCGYKNDDITLKTLEWYCPECGTFHLRDHNAAINIKREGYRMLTT

SEQ ID NO: 40405 - protein, 393 aa, Bacterium sp.
MYPIELISFRQVLMRKTYRYRLYPTKAQEQAMGQQLREGCKLYNAALQERRDAWKKTGTSVNYYDQANQLKEIRTEGLIELANFSCCQDILRRVDKTYKSFFGRVKRGEKAGFPRFKPHQRFDSITFPSYGDGIRLLPSGKLRVQGVGILKVKLHRPVDGKIKTVTLKREAGKWYACFSVEVETLPLNDSLFAVGIDVGLESFAVLSDGTVIANPRQYRKAQARLRRAQRKVARRKKGSHRRKKAVRELQVAHAHIRNQRQDFHHKLAHRLVQSFGLIAIEDLNIKGLAGGMLAKSVHDAGWSGFFSKLTYKAESAGRLLIPVNPRGTSQRCSNCGTEVRKELKDRWHTCTSCGLSVSRDLNSAIEILRLGLSLVDVTLGFSPCVSTEAVCLS

SEQ ID NO: 40406 - protein, 412 aa, Methanoculleus sp.
MLISYKYRAYPDAITRTRLNTALDTCRWLYNTLLEECTTARETGLAPTMRGMQARIVTLKEENPFLKGVYSKVLQMVNYTLWSNIRALSQTKKRGRKIGKLRFKSASRYRTLNYNQSGFKIDQEHSKIIFSKIGTIPFVMHRPYTGEVKGVLITRSGDEWYVIIQAEQTVPASKRKGRSVGIDLGLNTFAVDSDGAAIENPRFFERSRARIKKLQQSVARKRRSSKNWEKAKKKLEKAYAHITHQRNDFLHKLSRGYVDSYATICVEDLNIKYLKENGKSRGLRRSIHDVSWERFYSYLSYKAESAGTNFIRVDPRNTTQMCANCGSIVEKDLSVRVHECSYCGFVADRDYNAAVNIHRVGMEQPCEPVEMQSISQPGKSSISRAVEMIPLHHISVMQVLSMKQEAPPFREG

SEQ ID NO: 40407 - protein, 403 aa, Methanoculleus sp.
MQSVTKLRLVASPAERQMLFATMERYNAACNAVSPVAFSERQFSNIGLQNRLYRHVRETFGLSAQMAQLAIRKVAGSYRSTREAIKEQNKVLAVLGKPLKIFTKLSFREHGAICYDARVLSIGQSRVSIWTLDGRIKLWYSKPDHFPAVATVRQTDLVYRDGAFWLYATVETPDIDPAEPSEYLGVDLGVVTIATTSDGATFSSEATEKVRKRYGRLKGVLQKTGTKSAKRKLQQIAGRERRFKTDTNHAISKRIVCAAEGTKRGIALEDLKGILLRTTVTKGQRERHHKWAFHQLRSSIEYKARRAGVRVQVIDGAYTSQQCSVCGFVHPDNRPTQAAFRCRACGHTENADLNAAKNIAARAAVNRPIAVCSPDTGGEVESQACKEHGAAYGIMPPTSVGGS

SEQ ID NO: 40408 - protein, 314 aa, Escherichia sp.
VKRLQAFKFQLRPGGQQEREMRRFAGACRFVFNRALARQNENHEVGNKYIPYGKMASWLVEWKNATETQWLKDAPSQPLQQSLKDLERAYKNFFQNRAAFPRFKKRGQNDVFRYPQGVKLDQENSRIFLPKLGWMRYRNSRQVTGVVKNVTVSQSCGKWYISIQTESEVSTPVHPSASMVGLDAGVAKLATLSDGTVFEPVNSFQKNQKKLARLQRQLSRKVKFSNNWQKQKRKIQRLHSCIANIRRDYLHKVTTTVSKNHAMIVIEDLKVSNMSKSAAGTVSQPGRNVRAKSGLNRSILDQGWYEMRRQLEYK

SEQ ID NO: 40409 - protein, 390 aa, Actinomadura sp.
VKVVTQVKLMPDAAQTPALERTLPAINEAANWVSAVSFENFQLKGGVRELRKLCYGELKDRGFGAQAAQHIIKRVADAYTTLRANIRAGNLGPEGSRRRRKATSKAIVFRPEAAHTYDDRCLSWNYDAQTVSIWTLDGRIKNVRFACSPGALKQLTQHRPGESDLVFRDGKWFLIATCEVPEAPQFEPKGFIGVDRGINNLATTSDADNHSGRRLDRYRRWQARKKAELQAKQTRSAKQLLKSAPAVRPGTPPTSITRSPRLSLLSPHAPSVESPWKSWAVSVIGSRFPATSEHASLPGRSTSSAHSSPTRPNAPECPSSRWTPGIPRSAARAAATPSAPTGQLGTTSTVVGAASLGRPTTSPGSTSHSERPRRGYSSPCPNRPPQSRNR

SEQ ID NO: 40410 - protein, 334 aa, unknown
  TnpB Polypeptide
MYLVERHIIKNNEELDELCFNSKNLYNKALYLVRQHYFKTKGYLNFFGVNKLMIETKDEDYYALPTRVSNQTLRLLDSNFKSFFSLVKKKQSSNYDKSIRIPRYLNKEGRYITVFPKEAVSKVYLRKGIIRLSKLSIEIPTKVTESNLVEVRVLPRNNHHVIEVVYKVEQKEPKSDNGRYASIDLGLDNLATVSSNVVKPFIINGRPLKSINQYYNKEKARLQAHLKGNKKTSKRIKSITNIRNNKVKDYLHKSSRRIVNFLVSNNISTLIIGYNEEWKQNINLGRTNNQSFTNIPFYTFINQLEYKCKLEGINVILTEESYTSKCSFLDGESL

SEQ ID NO: 40411 - protein, 573 aa, unknown
  TnpB Polypeptide
LNIAYRFRIYPTEEQKILLGKTFGCCRFLYNQMLNDKIQEYKKTKKMLKNTPAMYKKEYPFLKEIDSLALANVQLHLEKAYKNFFRDPKVGFPRFKSKHHSKNSYTTNVVNGNILVEGSRIRLPKVKWITMKKHREPAENCRLKSVTVRMEPSGKYFASLLYEGYSCENQAADEDYSNAKILGIDYAMQGMAVFSEEIEMEEAGFFRKNEKRLAREQRKLSRCVKGSHNYVRQKKKVARCHEKIRNQRRDYLHKLSRRITDQYDIVAVEDIDMKAMSQCLHFGKSVQDNGYGMFRNMLDYKLAWKGKELVKVDRFFPSSKKCSKCGKIKKELKLSERVYRCSCGNEMDRDRNAAINIREEARRMLDDAGLQDCKVMVSNSLDEHTISSLNMQKARIDGYGVGERLITGASSDYSEDSISLLGAVYKIAAVEENGEFSPRIKVSGSVEKITNPGLKKVYRVYDQNGKAKADLIAKADETIDMSTEFRFVDPDMPWRNLKFTHCTVKPLQEKIFENGKLIYKLPTLEEIRAYVKKQLEEEIWEEEQRFVNPHKHYMDMTPDYYDMKMSLLNDSRV

SEQ ID NO: 40412 - protein, 485 aa, Micromonospora sp.
VKKFEPRPGFVVQAFRFALDPNVTQEQRLRSHCGAARAAYNWAVSWVMASWWQRKAEASYGIAEEELTPWRPWSLLALRKVFNEVKKTDPRFAGWWQENSKEAYSTGLANAAAAFDNYATSKRGQREGKRVGMPRPKSKHTARLACRFTTGAIRVEPDRRHVTLPRLGTIRTHESTRKLQRRIAGGTARILSATVRFERGRWFVSFQVEIQRATNRTPARPDAAAGVDLGVKCLAVIAESQGRVRFVPNPAYYDGAVKQLKRLSRRVSRRQGPDRRTGQKPSRRWLAANTERNRVHHRVANLRADALHKLTTDITAEYGTVVVEDLNVAGMLRNRRLARKIADAGFAEIRRQVEYKTAWNGGRRIVANRWYPSSKTCSACSTVKAKLPLHVRVFTCDACDLVIDRDENAARNLAALATAATTGTGVAGDPGVQAPKPRGADHKTRTTTRSRNAAGGRAGGETLPRQRQQETRDRHQDTEAQPALR

SEQ ID NO: 40413 - protein, 537 aa, unknown
  TnpB Polypeptide
MIIDGGYKKLLKQFHKHSDRHILVIETDMPYSDILKVVALSDKIRKAGNELVGLMKKNYAQLLRTKRYRKLLFLYGNTEDKDKRKIYANQLNEMQKIYNVTWNYCRTSMIPIGKKYGIDAVFALTKAEDVWRGMEKCLYGNGNTVHFSKHGDLPCIRAKQISRGIPISVRNDKLQFKLGKTSFGIQVNDRFQQDEVNAVLSYLVEPEIMDNKAVNTLIEDAYCIDTYRPCYATLVPKMIRGKYRVYLHLTIEGKTKLKYDKHGNPRYKYGKGIIGADIGTQTVAYTSDTEVGLKNLSERGNSIQTSERKERLLYRAMDRSRRATNPQNFNEDGTVKKGRKTWKYSNHYKKLKTKHSELCRINAVNRQLAINEDANHLRGLGDTLVTEPKNASKLMKRAKETTVNSKGKFNKKKRFGKSIKNRCPSGFQTTVEKKFKTTGGTYIEVPNNYRASQYDHTVDDYIKKKLSDRLYKLQDGTEVQRDWYSSFLLYCYDYKIQNIDKNKCITEFDNCYKKEKALITWIKTHKIKVLNSGIKTA

SEQ ID NO: 40414 - protein, 490 aa, unknown
  TnpB Polypeptide
MPYCTVSLKLLSPTEHKKRQLEDAMDRYASAFERLLRCVRPKIEGHICSKAEIARQINLYMPQVDQLGVQPFKDALKRDVAKTLYLYTVQKQKGSGKRYPMLQSNDEDLTQLLMRKEPIAPRTLDYWLERYHRQRPLLFCRYSETRNYALLYDEIQDRYYAKLYLFNAEQARQTPPRRQGKLRYLTSDKILKQSRRPYCYQLYPLEIGGWQKQHLLWLQNGTASAKSAELVQRDGKYYLHVRLWIAPRQAQSVRTTLGVSRGIEHTLCYALCSEQGAVLRTGYLQEEPGEHRERRLSEQVLALAKEHKARIVLANLVTRNDSLDMFTAPQMTVRSYNRLAGRLRYRTELCGMPPAVLVSARGLFSRCPECGTVSQGNRMNERIFLCISCGHVEQLETVGAVNLAGKLAQYRKEKLTVYYEIQEQRIVFTLPQISFHHCTENGPRAKESCLQAIQAWMDAQKAPKESVQRNIYQKLRHTVPLEDALQFVHK

SEQ ID NO: 40415 - protein, 259 aa, unknown
  TnpB Polypeptide
MTEATVFTIDGRVRVRLCSGDFQKRLLQCGKRKESNLVYRKTKKGESWYLHISLEFEITLAELTDQIKKEEVIGVDVGENNMAAASTGQVWKAGKLKHKRDQYLGLRARLQSNGSQSAKQHLRKTSGRERRHVTHVNHVVSKSIVEEAVKEKAKVIVLEDLTHIRDRVKAGKRVRSRLHRWPFRELQQQIEYKAQRRGINVMYVDPRYTSQTCSACQQLGKRAKHRFVCPHCGLRAHSDLNASRNLQGLGYQLIAQGLL

SEQ ID NO: 40416 - protein, 348 aa, unknown
  TnpB Polypeptide
MLAKTAGTARYCYNWGLAKWNEMCNNGENCSTGLLSRLWTSERPEWSKEVSRGSQTQAFISLGAAFSNFFKRRADRPRKHKKGKHDSFYVANDKGWLKANRRIHLPNIGDVRLAEELRFNGKIQRFVVSKEADKWYVSITVEMPDEAAEENTSVVGIDVGSKHWAVSSDGGVLDRPKSIPKLEKRLKRAQRSLSRKQKASRNRQKARMRVARLHQRIRNVKRDAVHKFTSMIAKNHGVVCCENLCVKGMSRSVKSIRKAVRNSCMSELRMMLAYKAANYVEIDRFYPSSKRCSRCGNVKAELGLSERTYRCEACGNVLDRDMNAALNIRDEGFRIFTEGHSGSACGGR

SEQ ID NO: 40417 - protein, 490 aa, Moorea sp.
MPKQSTTNKKISTQIVPVVGMTKSVENELLATMKNLGIVRSESYHKLGSINHWGIDWKKSYPEVRTFRTPDSLGLPSKLMEWTVSDVAKAITAQQAASIDAVVKKVYKRFPGKANLKVRKDQCLQLKTLAFMDSPLLHRLVRKEYQRGHSWIRNKIVYQQGGYKCKRVSRNTYQLELAGLKRGKRNKVLVRSNRKIKGQIRLIHNQLLQRFEVHFLVDHGRVDVPLERPSIGIDKGYTEAFFDSEGKAHGKGLGRLASKKSDRICAKNRNRGKLWALHRKLEEIDPAKSARILENNLGRKTENRRYRKDLGEILAVIGQASKSLLGGKALKVFAEDLTQPITNKRQSKAMSRKLNSWMIGLMRDSLQKWANWTGSVVTEVQPSYTSQIDSRNGTLLGKRTGDNFTGFDGVVLQADHNAAKNILARGTDFEISRFSSRAEVQAVLLRRTARYLKGLGLSLANAVELGWLDSKHTKTQTFKQLLAGMSGTSK

SEQ ID NO: 40418 - protein, 405 aa, Euryarchaeota sp.
MLHKAVVFLIDGKLPSEAKFLMEDFRLAVNRAVRAGLQAKVSSRYALVKLLYKDFRQDHPGMYAKHLVCSFEVAGSVLKNLRRRLNRGGPCRVPYVKRLMMKAENQAYKLDRVNGIVDLPIKAGCHVKLKLVLSDYHRRYLNDPSLSLGSLTLIPDKVIIAFRKGERRPYEPETAISLDTNERSLDGVFVKGGVCTPAKAAFPEVAEIQARHHGRRRRLQKKKAHDRRTSRLLCKKEGRRERHRIEYGMHQVANAVLDFAEENRSAVVLEDLKGLSKPKRDKALNRRLSVWPRRKLHQYIEYKAAWRGVPVIKVDPYNSSRRCPTCGRIQYSRMGARFECECGWRADKHVNAGVNLLQTAFPEGEAGGLWFSPGAFQHDVMMVLYDPVRGARPEPNGTSPMAGVA

SEQ ID NO: 40419 - protein, 242 aa, unknown
  TnpB Polypeptide
MEIVYEIEVPETENIVSERIAAIDLGVDNLMTITTNCDVSPIIINGKPLKSINQYYNKKISKMRSALKLRNDSDWSNEMQRFTTKRNNQVDDYIQKSTKMVVNFCKCNNIDTLVCGYNSGWKQDTNMGKRVNQKFVSIPYLSIVQRLEYKCENEGIKFIKTNESYTSGTSFLDGEEPIEKNYNKDRRIHRGLFQSEKGKYINADVNGSYQIMKKVFPKAFVNGIVDAGSHPVVVNIPLQTVK

SEQ ID NO: 40420 - protein, 261 aa, Klebsiella sp.
VNGKIKNATISQLAGKWYVSFQVEIETDKPKHESTSMVGLDAGVTKLATLSDGTVYHPVNSFKASQRKLAVLQRQLSRKVKFSANWQKQKQKIQRQHLHIANLRRDYLHKITTTISNNHAMIVIEDLKVSNMSKSAKGTAERHGRNVRAKSGLNRSILDQGWYEMRRQLEYKQLWRGGQVLAIPPAYTSQRCACCGHTAKENRLSQSKFECQICGYTANADINGARNILAAGHAVLACGGMVQSGRLLKQEPDTERSDVTH

SEQ ID NO: 40421 - protein, 396 aa, unknown
  TnpB Polypeptide
LRAIKSIKQSIQPNSDLDGLMEIFRDMMNHCIRIGIKENCSTLKRMSILSYHELRNYDILSSYKLNAMSQACGILAKYKKEFKKNPNAKMPYVTRPYITNCYGIKHSGSLLTIPFKPYQPINILLNNHTQQILSDPTLKVRSFTITALNISICILKEVEMIDCTKIVGIDRNLRNVTCGNDESVTFYKTNKLLSIKQNTIYARAGFKRNDYRKKKQYFKNMQNRLQNRTKQFIHKISKQIVDDAVKSKSMIAFENLKGIRKLYRKGNGQGNKYRKKLNGWQFYELQRQVEYKALWEGIPVVFVDPKRTSKLCPICGCTVQEDRQNKRKLLCINCGKSMDRDVLASMNIAHKAWSRFTHARDDTGEAENSIFEESMSESKLVIRIVDVSKCISSRSR

SEQ ID NO: 40422 - protein, 364 aa, unknown
  TnpB Polypeptide
MMKTMQTVVFEDTSQKTILDDTFSRMASAQNFVADTCYDTEDTNTFRVHHKTYSKLRKNFGLPSQLAVVANKYACAAVKTAIKRKGRKAIFSGKSIHYDARSCTINFEKKVASLLTTQGRIKVKIEIPKYFRQFVGWKAKESNLVRCKDGKFRLMISIEKFTHKSDKTGKAIGVDRGINNLIATSDGWLYESKHVWEVKQRYVRLRSRLRSKGTHSAKRHLKKVRGREGRFMRDVNHGVSRKLIESAGRDGVIVLENLKGIRSAKHRHEQNWLFSNWAFSQLEQFLVYKGEEFGVAVEFVSARDTSKTCSACGSLRRGQRKGAVFKCKTCGIVMHSDFNASKNILHRYTNLRAAVNQPIARLNA

SEQ ID NO: 40423 - protein, 352 aa, unknown
  TnpB Polypeptide
MNLTVQIKLLPSKEQEQWLTTAATEYISLVNDIVDYALGQGMVPEFSSGDVAAPLPAAVKNQAIRDARSIYRKCCKTHIQHTLRKPIILWNSQNYRASEDCVSVPLCLNGKTHRIQLRAVTPPDILSKMASGRLGTLRVTQKNGKWIAQVAYEARESATFGAKAMGVDLGILCPAVVVHEDGRTRFIGNGRQNRFVRRKHHARRKKLGKAKKLNAIRKSEDKEQRWMRDRDHKVSRAIINEAIANGVGIIKLETLSGIRSKTRKSLKNKYRSKSRKYNRSLSSWSFYRLASYIEYKARLAGIEVQYIDPAYTSQICPHCGCIHKAEGRNYICPHCGYRGHRDRVGAVNILAA

SEQ ID NO: 40424 - protein, 409 aa, unknown
  TnpB Polypeptide
MHKGVKIALDPSPVQIVLLRKHTGTARFVYNHLLAYIQEEYDKGNKVSTNFYQLRKHWNSVKAEAAPWWNECSKEAASYGCESLSRAFANFFEGRKSGREVGYPRFKSKNRCRPAFAYTTGSFGAIEDDPYGLKFPKIGRIHTFENVHHRLKGAKVIRMTITEEGGRWYASLTAEADFFKLAKETGQKVGVDLGIRQLAVLSDGTVYENPKHLARSERKLKREQKSLSRKQRGSNRYDRQRRKVNRLHARIRHQREDRIHKMTTDMTEKYDEIVIEDLYVKGMVRNHRLAKAISDAGFGKIRQQLEYKCAQRGKKLTVIKRFEPTSKKCSHCGHVKTKLALSERTYICEACGMVMDRDLNAAINILAAGSASEAENGRGEDVRPSLSADLCEASTRQSLELSLATGHEN

SEQ ID NO: 40425 - protein, 372 aa, unknown
  TnpB Polypeptide
MEYSYKFRIYPNIAQVQQIRRTFGCCRFVWNHYLAQRIEAYRETGKSPTRFMQDKSLTSLKKQEETIWLQEVDATALQSSLRDLDTAYQNFFRRVKKGEKPGYPKFKSKRNHRQSYKSKCVGSNIKVLEGAVQLPKLGKVKCRISKSVEGRILSATVSQTPSGKYFVALCCADVDMEPLPSTGAVVGIDMGLKAFAITSDGVEYSNHKYLSKSRKKLAKLQRQLSRKTKGSNRWEKARLQVARLYEHTTNQRHDMLHKLSTDLVRNYDLIAIEDLAPSNMVKNHKLAKAISDAGWGEFRRQLEYKSAWYGKEVVTVDRFFPSSQICSFCGTQWAGTKDLSVRKWVCPSCGASHNRDINAAKNILNEGLRLLA

SEQ ID NO: 40426 - protein, 428 aa, unknown
  TnpB Polypeptide
LEGKKDKDILAALRQLPQGKLDSWLTLSSLKRARAIHRACPGRVVIFGGKRNLRLRAQKQISAEQWKAKRLLPLYFEGHAKSYGEQGGNHRFVLDIQNNTVWFYPRAKIALPLKLKLGKRSNYRELLEQLQFRCTFHRDTPFTVSLTETDISITWDERVTKVETSYNPDRILALDLNPNRIGLAVLEREGKCSKLIQWAVFDYPDLNQRLGLGSDHPRSIHQQNKRVFELSCMAKEMVALAVHYGCSWVVTEHLNIESADHGKGKSFNRAVNNQWTRRGFSLPLVRRLQHAGLRHGEVNPAYSSKMGSLLWGWPMLIPDPACAAVELGRRFLQGDLKSSGRTNGGNRRKEERQAEVSKDIKARAEWKQVWNRLHPKSGDTPRCTLLALRQKFPAACPRPNAFKSRQSFVQRLKPLRLAHNIRLTAQDL

SEQ ID NO: 40427 - protein, 373 aa, unknown
  TnpB Polypeptide
MYPNKTQEELLAKTFGCVRIVWNACVDSFNSYDKETNPNPKFPTKSDLVIEKPWLNEVSAATLQQRQRDFIEFSKQFFNKSRKDKFGRPNYKNKHDNQSFRLPFPKFKIADNKIRIEKIGWVKIVIDREVPDNARFISCTVSKNRTGQYFVSVLVEAEQCYKQKTGKTVGVDLGIKTLATLSDGITVDNPHFLRENQAKLKRMQRHLSRKKLGSNRRNKCRLKVSRLHRDIANKRSWYMHNLTTMLVNNYDVICIEDLNASGMLQNHKLASSVSDASFSMFRNQLEYKCRWYGKELIVIDRFYPSSKTCSRCGWKNKDLKLSDRTFICKNCGAQIDRDLNAAINIQRVGVDILSNRTQRDEVASSVEVSKIQW

SEQ ID NO: 40428 - protein, 406 aa, unknown
  TnpB Polypeptide
MKRIQAYRFELRPNGEQQRLMRQFAGCCRYVYNKALELQIQRHESGEKKLGYAELCKTLTKWKKEFPWLKESPAHPLQQKLKDLERAYLNFFQKRADFPQKKKKGKNDSFRYPEPKQIKLDEQSSRIFLPKLGWIRYRKSRNTEGALKNVTLSLSADKWFVSVQTERETPNPIPTAETAIGIDMGITNFAALSDGTYLKPLNSFKKHEKRLAKYQRAMSRKQKFSSNWKKAKAKVSKLHSKIASVRRDYLHKSSTAISKNHAMVCMEDLKVKQMTRSKKGTGAKSKLNKAILDQGWFEFRRQLEYKLSWSGGLFIAVPPKNTSRMCHKCGHTHKENRVTQAKFHCMACGYTDNADHNAALNILAAGQAVSACGEMVQSGHLLKQELTETINTGYAGKDTVAGIPCL

SEQ ID NO: 40429 - protein, 422 aa, unknown
  TnpB Polypeptide
LTKRKLFILERLTARLGFCVHLFSKLIEERDMRVTGFGEFTPHDITEIKQLTKLSISYVQQCRDQALWTWRSYHAQHREWETRLKHAKGKWREKLVKREPHKPFQTCSISKIPVRMDRRTGEVQASRKIRIAPVVLRLSTLQKNYRITVPLNPAQYHLNLLKKGRIIDFQLVKSNGWFYAHVCIKYDVPDRPVRAVIGVDLGVKRAMATVLLKPHAPLHREDLTFLTDGEKKHQLDKLNHRFAELQRHRKWAALRHLRHKRRHVADYFDRLDAIRIAEMAASQDAAVAVGYPKGIKYDNYRGNGQRLMRRVLQQRFSYGQRTRYILEECTSRGIIAEVIPEFWTSRRCHRCGSMNTCRPSQSLFLCFNCGIKFNADWNSAINIGSVLFAERLGPRARAGLAYAGDELVHKPASPEVKDIAKI

SEQ ID NO: 40430 - protein, 528 aa, unknown
  TnpB Polypeptide
MSNGSTRTYQTRIHDGFDDPLSAYSSLMSHVEHCLFADIAAGKIAGDLKSSYLTDFQITARQFNATRVKLEGKIDSILQLLTQRMETKKHQIESLEETIAHLKNKKTIHQKKRRLAKLKYQLEKLEIIHKEKKIALCFGTKKLFRAQFNLEANGYTTHEEWKNDWEQARTSEIFILGSKDETSGNQSCTATIAQDGSIALRVRLPDALSPQFGKYLHISNVWFAYGHDAVVAAVRDCRLRQQLFFLNDPAYKNHGQAITFRFKKDSKGWRIFASADIQLPRPITHKENGVIAVDINSDHLAVVETDRFGNPLHTLNIPLQLHNTSKDQTRALIGNASARIIALCEETQKPLVLENLDFKKKKAQLREKDPSYSRMLSAFAYASIIAHLNSRGQAKGIEVHSVNPAFTSLIGRVKFAERYGMTIHMAAALCIGRRFLGVSERMPQGQRDIPDGKGGHVTLDLPVRNRSRHVWHQWGQLNKKLSVALTAHFRAVSNTDPRAPLKTAHCDSMLSDLVGETPAREPLTRLLC

SEQ ID NO: 40431 - protein, 263 aa, unknown
  TnpB Polypeptide
MPGPKIGWVQFKRNRAFAGWTSYRSTADRAGRWHIAFAVIPDPIPAPGTGGVVGVDRGVAVAVALSTGELTSPAGRSVKEAERLLRLQRGLARAARGSNRRHKVKTLIAGLKATGGDRRKDWVEETSTGLARTFEVIRVENLNVKAMTRSAAGTVQKPGRNLAAKAGLNRGILTPGRVEKVKAAYTSGACNPCKHIAAGSRKSQARFVCASCGHRANAELNAARNIAAGHGVTARGDCRVLARSVKREPHHARPPQVAELLES

SEQ ID NO: 40432 - protein, 263 aa, unknown; identical to SEQ ID NO: 40431
  TnpB Polypeptide

SEQ ID NO: 40433 - protein, 394 aa, unknown
  TnpB Polypeptide
MLTLKYRVYPSKKQVTKLFRQMFLAKKLYNSLLEKCKEHYKETGKTFSQFDMNKHLPQLKKENPEFKELHSQVTQNESKRIADSFKAFFRRVKEKKHGVKVKPGYPRFKKYVSSLTYPQSGFKFKNEHMLFLSKVGSIPVVLHRLPKGTVKTCFVKVYPSGKWFVGFSSETPGKTFESNGKEAVGVDVGLTSFVTLSNGERVESPKFLRKSETKLKTLQRRVSRKIKESANRRKARFKLARLAERVSNQRFDFLHKLSKQQVNEYGLIGVENLNVRDMMKNPRFAKSIGDASWATYKQLLAYKAGSAGCKLVQVDPKDTTRTCSGCRNKQEMRLSQRQYYCPVCGLSEDRDINAARNILERATAGQAGSHACGENALYGTANVSQGDFAETRTI

SEQ ID NO: 40434 - protein, 376 aa, unknown
  TnpB Polypeptide
LPQKVEEGFRVLTLMTEVDKEVLDFIKQYRVLASHMYWAKRLGIEPSDAVLQRAKESIKSYWRWHIIDEKDPMYLFKGIEKTPRPHSVILNIPLVDALHESKGGFIRDGKLILRLNKKVEIKIPERALEWLNKRLAENPDRKTIRVFERRGRLVAQIILHKRNIVSLPSDPLLVVVDINSSYGIVVHYWDGKLIKTEKYKPPNRSTKWVSVKKLMKHRDNLYNQGCLTQEKINTYSALIRRTLGGSSRGWIQQTVDKIVRRIRRIARRHEKDPLVLIDIPDDESLRGSALQRTLLSFAKYFENVLSWYGIYWDETRLYSKICPQCGSELNLETRSKNARIMVCENCGFKEEKDKIPLYWALIKIKLLPTPRRGEAS

SEQ ID NO: 40435 - protein, 166 aa, Clostridium sp.
MKIFNPNNEGLGIDLGIKEFAICSNSNKFKNINKTSTVKKVEKKLKREQRKLSRKYEGLKIRNKNIKEGRATRQNIQKQVVKVQKLHQRLRNIRTDYINKTVFSIIKQKPSYITIEDLAVSNLMKNKHLSKAIASQKFFKFKTKLTVKCKENHIELIYVRRASFGI

SEQ ID NO: 40436 - protein, 172 aa, unknown
  TnpB Polypeptide
VSILFAYEESISPAVVTKETTIGLDYKSDGLYVSSEGDTCGMPHYFRQSADKLAKAQRKLRHKTIGSKNYNKQQKRTAKIHRHIANQRKDFLQKKSTEISNYKLRDRGGQLIKVGRFFPSSQLCSHCGFKNPLVKNLSIRHWDCPNCGTTGIDRDVNAAKNIKKEGIRLLTA

SEQ ID NO: 40437 - protein, 404 aa, Fischerella sp.
VFSLTYEFKLQPTKQQSETFLDWLEINRKVYNYALAERKDWYKSRSCQVNACSLRSEYIIPADTPRPTFASQCKALTAAKEQYLELKRVQSQVLQQTLKRLETAFVSMWERNFGFPRFKKVGQLRSFVFPQLGKEPLKPGYIKIPVIGWVKFRQSRDIPTDAILKQVRIIQRASGWYAMLTLQWNISVPQPMPYGEALGVDVGLMSFIAASNGLCVKRPKFFVDLQRQLKLLQQRVSHKKLGSNNWRKAQKKVQKLHEHIANTRKDFHWKVAHQLCDQAKTIFVEDLNLVGLSRGMLGKHCLDAGWGQFFQILEQCCFKHGIYFQKVDSRKTSQICPSCGTQTGKKDLSERVHVCENCSYTTDRDVAAAQVVLIRGCAAVGHTVKMLAEGKFIGVPAKQESHGF

SEQ ID NO: 40438 - protein, 388 aa, unknown
  TnpB Polypeptide
VNVVCNKFRLYPSKAQETALNETLAVCRLVYNSLLHERTALHEQGLKSPTYYTQAPAITRWKKDHAELKTVHSQVLQNVAIRVELAFQAFFRCVKENKSKQGETPGYPRLKGKGQYDSITYPGSGFKIGESSVWLSLFGKQVQVQAKLHRPVVGTVKTCTVRRYGSKWFVCFSVIKSLVEQEDNPLSTCAEAVGLDAGLNSFLALSNGEFVDNPRFFRRDEKALAKAGRKQAKTKKRSKERRKANKVLSRIHERTRNRRHDFVHQTARRLVNRYGVIAVEKLNVKGMGRNHCLAKSIADASWSMFRTVLTQKAESAARDANGTALREVIAVNPAYTSQDCSGCGYRPDGLEGRTKKKLSDRWHFCPKCSASLDRDTNAAINILALATS

SEQ ID NO: 40439 - protein, 543 aa, unknown
  TnpB Polypeptide
MARPRAKKKKVSSGTHTRSVFLYGSPNAEKRSTLEKLQADYTDAVNFYISLLSDREDCLLQLLKNSKKDPLLRRLEKESRIKALSSAYSQNAFDEAVTKLHNRLDNIRKDVIAATGGSVFAVSILLFHAVLTGQSREEMCDLLARIRDSYKAKEKIQYYDKLRDTVKTMEEKEFHDSVSEVTMFYHIISDEYRIPVVEKAHVMMDTRLCCLEKAKDVTTSHVLSVTIPDRKGERMEVPVQADRDALRRMEQYGISGSMRYTITAGGSLKLTCSFEKKTQTPEEHSAVIGVDVGITDAFHTSGGQAIESFQPVIEFYQTEVEPAFGNLSTLRNRKQQLRRFLKKHKGVLPEKVILDLRKRIDHLEKDIRQAHAPYRKKRHYYQLVEHTIRNAVDTYIESLNGDKTVLTAMELLDIKEFNKSRRVNGMLSVFSRGKLAEKLMEELSWHGFPFVQVEPAYTSQICPVCGCLDKASRNGKVFHCTCCGHTDDADHVGSINIKARAEDKELIGICEKYPYSKKERHAAIQALQAERNMEWKKEQAVTA

SEQ ID NO: 40440 - protein, 379 aa, unknown
  TnpB Polypeptide
MYKSFKFRLYPDIEQRELLNKSFGCSRFIYNYYLSNIKRNGYKDSYSNISDYVNNLKYEYSFLQEIDSTIIRKTLFHLDDNLKKFYNNSFGYPKYKSKFDKYSYTTSAVYRNYKYKNYCNIELDLVNRKIKLPKLKWINIRGYRNIKNVNGKIVNATISREKNGKYYVFVLYDLIDIKNNNYIPKSIIGIDLGIKKLLTLSDGITYDNNKCIEKYEKRIRRLQRELSRKVKRSNNYYKCKKKLAILHSKLKNAKNYYLHNITKKITDEYDIISCEKLTVQKMLKEHNLSKKISEASFYEIIRQLEYKSKFKGKQFYQIDTYYPSSQECHVCGNIDKKYKSLNERVYKCSKCQNEIDRDLNASINIMFEGLKLYMKEVLI

SEQ ID NO: 40441 - protein, 404 aa, Thaumarchaeota sp.
VQINLGYRTELRPNKIQITLLKKACGTARVAYNWGLERNDNIWFYNQLPHEPIKYESAIDQHRLLNERKQKDWSWMYEVSKCAPQEALRDLGNAFHNFLKRPDHFGWPKFKSRRDGVQSFTLTGSIHITSSIQLPTFGAVKLKERCYLPHGHHVLSATIAGKAGRWFVSVGVRKRIKVQKNKGPIVGVDFNVKNNVVSDGTVFENPKKLVGTVRRLKRLQKAIERKTKGSNNRWKARLRYQRLNMRIADARKDGLHKMTTWLARTKSVVVIEDLAVRNLTKNHRLAGGILNGAPAELRRQLEYKTKWYGSRLVVAPRNFPSTKMCSRCHAVKEHMPISERVYTCEVCGLVMNRDLNAAKNLEWYATVAGSSPETLNAFRRQEVTASLAVPAVITGGSVYGHKRP

SEQ ID NO: 40442 - protein, 527 aa, unknown
  TnpB Polypeptide
MNEEIKNINSNIVVNDNIIIDALAFTQNIDNEDKEEEVLRAYMLKHCANQKKTNEVIKILRLYRKLSKQISNYHWFLFFKENERFNDFKNIKHIKSDLSERYKQTCQTQVVGTLKSYISNVQNRFRKIVNSMDFDEKTKMKLFYINKYQKWMHEDVLMKKKPIEKELIFLAKKIFKHLTKNHPTFSHCNMTLDGKVATLLKKEIKEKSNRKNKNKAIKFDYWLKLSTTKIREVIFIPLLSSEYFEGKDGDLKKVVQINQKEKGFTISAIKSIMPIPITEFKKEKLGLDIGMVNFIVTEYGDLRGKKLMTKCKEIDNITTKLSKNLQKQGKKLSENKRYNKLIRKIKLFTKNETGRIINGLIKQYSPKEIRFENLSFQGSNIGRKNNRLLHKFGKGAIEKKLESVNQTTGITVTKAHCAYSSQECPNCHYTDKKNRKSRDLFQCGCCGFKCHADVVGGKNLSNRSPVEFNVNLNKGKIFQLLYEKHRIWKEQRCHSSATDLPFGGEVSKMKKVITNKNKKNISEEKNS

SEQ ID NO: 40443 - protein, 369 aa, Fusobacteriaceae sp.
MEKYNKAFKFRILPTKEQEILINKTFGCTRLIYNMFLEKRIKIYENEKKSTSYNTQTKELTSLKKELEFLKEVDSMSLQITLKNLDKAFQGFFKKITKFPKFKSKRNTRKSYSTNNVNNSIRVEEGKLKFPKLKILKVKFHRLIPTTHKIKSATISCEPNGAYFVSILTEFYQEIKPIPSKNNIVGLDYSSKELFVSSENQRGHSPKFYSQYQDKLAKEQRILARRTKGSNNWYKQKLKVSRLHSKIKNSRADYLHKLSKELIDKYNSICIENLDLKSMKIKNLAKHTFDNAWGMFVLMLEYKAKFAGKQVVKIDKYFPSSKTCSSCGSVKSILELNERIYNCNCGLSIDRDLNASYNILAEGKKLLAY

SEQ ID NO: 40444 - protein, 522 aa, Oscillatoriales sp.
MKGSSAEERNPTIMLRDYLDSQYTSIALNRVHQLYCEKVEKRKFPMQLAYKYRLKPTKAQLVTIATHLELCRRQYNYRLGERFRWWESTRTSVNACPLTAFIVPIEEIYQNIPLTRVQTRDGRKKDESGEPLTKKGDVFSNIEGGYVQWQTVQLADLKNTKKLFPDYKSLDSQVLQDVVNRVETSFSNFTMPDQNGNRRGKPKFKGFHYYKSFTYPQLDNLNIIKDEQGRICINLAKIGQVPMVFHRSIPTGFKVKTGSVIREADGWYISLTLEDKTVPVTVVEIQPTVENTIGIDLGITNYVYFSNGERVENPRLLKKSAEKLAKLQAKLANKVKGSKPWKIIKNKISRLHQFIARARLDFQFKTAHELFSKCDVLIVEDLSVKNLTRRAKPKTDIENGNLVYLPNGQAAKSGLNKSMLDAAHGQFVAVLKYVAWKLGKSVVFVDPRGTSQQCGHCLNKVPKELSERWHFCQCGESLDRDENSAKLIEKIGLNYESGGGTPSLKKAFAKKEKEACGLTVLS

SEQ ID NO: 40445 - protein, 586 aa, unknown
  TnpB Polypeptide
MSALEKQLEFWEFPKEPSEDGKKLEKSRPFARQETSADTTLQATQLALVGIGLPYSMPVSLPQNIKLTSIVSVNISKVDILTQSLSMKLEADSTTKDKNFYPYWNGSCQDLSNVLWSHIKTDSQDLALSCLIGSVPKTLVNSWFSTKLSYLPNANWLTTSLQSSTVSQPDCTDSENIRLKSLKIRIYPSPSLHPIWKKWLAASRYCFNQGIAYQRKHEKISRIDLRKVVLKNVPDWVKETPYSFRVQAVYDAHEAFTKSRKNGTKLADAGRFRSVRDRLQSIKFRPEDYKNGTWFPECTKQFSFQVAELIPSIDVQYQQKQKDGSYKTRIRKQTWNASTQLVYDKKRWFAVYPIEFKPEQSNRQSMIALDPGVRTFLTGFDGEKFVEIGGKDIAKVYRLCKHIDNLISEKSKLKGRKNKRQRQRIQARIDHLLVRVRNLVDEVHKKAAKWLSSEYRLIFLPTFESSQMVAKSGKKSRKINSKTVRQLLRWSHFRFKQTLKFHALKRGAKIIDVTEEYTSKTCTSCGHVHAKLGSSKQFRCPRCRHTLPRDFNGALGIFLKALRDIASVDSSSISVLCPTSSGIVRA

SEQ ID NO: 40446 - protein, 382 aa, unknown
  TnpB Polypeptide
MILGHTIELKPNNKQATHFKKACGVARFAYNWALAEWKNQYEADKGYRDDCLANSIEIDKSKLNSPNQFKLRKQFNTIKKQQFPFMAEVTKCSPQEAIIQLGKAFDNFFKGRAKYPQYRKKGVNDRFSLTNDQFKLIGKKIKIPKLGWVRLKENLRFSGKILNATVFKKGGKWFVSVGVEIDNIPKLNAKTHKSVGLDLGITDLAVLSNGEKIKAPKPLKIKLKKLQRLSKSLSRKQKGSNNRAKAKTKLSRLHYKISCIRKDFLHKLTSKLVSQFDVICIEDLNVKGMVKNKRLSRAISDLGFYELKRQLIYKANQSGKTVKSVDKFYPSSKTCSCCGFKLESLPLSVRTWTCQNCNTTHDRDINASVNILNKADKVLTLS

SEQ ID NO: 40447 - protein, 406 aa, Streptomyces sp.
VIRAYKFLLRPTVRQTAALGEMLQDHCSLYNGALQERRDAWRHPSKTTVRYGDQSAQLKDIRAFDPERQGRWSFSSQQATLRRLDQAFAAFFRRVKAGQAPGYPRFKGTGHFDTVTFPKDGDGCRWDSTPHDAQTRLRLQGVGHVRVHQHRPVRGRVRTISVKREGRRWYAVLVCDQVPAQELPPTGRSVGVDLGTVHFLTTSDGEHVANPRFLDTMAEELAAAQRHLATFPRRTRQRTKRHRAAARKVAKLHAKIRRQRLDFHHKTARALIADHDVIAHERLNIAGISKAPAPRPDPETPGSFLPNGAAAKGGLNRGVLDAGWGQFLAILADKAESAGRLVIPVDPRNTSRTCPPSLGGCGHVDGKSRVTQATFQCTACGFTANADHVGAVNVLDRAGLVLCAAA

SEQ ID NO: 40448 - protein, 415 aa, Trichococcus sp.
VVNAVELNLTIKARLKLSNPKDALAFQEVCEQYRQACNYVSDYVFNHDFELNSVRLNEVLYQDVRQQFHLKSQLTQSTFRTVTARYKTVQTQLRRNPNKYDSGKKDGNGKPVYTHVQKDLNWLWQPIQFSQPQADLMRNRDWSIVDNGKTFSINTLKGRVKYGFFLKGFEEYLDGTWAFGLAKLIKSGKHWFLHISVKKEVAEMELTDVKHVVGIDRGLRQLVTTYDEKDKTTFFNGNATLKKRRHYKELRRSLQTRNTRNSKRRIRKMESRENRWMADVNHCLSKTLVSQYGSDTVFVLEDLIGVRFATEQVAKAQRYEQVSWAFFQFGQMLTYKASKVGSMVVEVSAAYTSQRCPKCGTIKKSNRDHHTHEYHCPCGYRSNDDRVGAMNIQQLGTQYLNGVENPKFEKQQANS

SEQ ID NO: 40449 - protein, 535 aa, Scytonema sp.
MPQVYQTYVTQIDNNLTGEIAPLKMLEQFSPIASEMSLMALEGLQSDMKKEKLNSLIQNTFRVNKRHANSVINFVTGELESAIKCQKRHIDILDAKIKSVKAEIERLNKRLKNHREYASAVEKFNKAIKSPQKTKDGQSKKVPSLKKKAEFDDACPINGQPHGKTYLQLTKLQFHQKKRQLRMLQERRSQVIKRGIKVNLGNLGKIPFVGSTHETNSNQICQLTPGIIPSLKIRVPYFLEETYGEYCTLPLYKINQYGYDNILTAWALNTALTYVFSLNQKGFWVVAITASVNFSITSNDKSWGCIGLDINPGAIGWCATNRHGNPVAWGHIDLDLHSCSTEQTEARLANAITELTARALATLKPIVIEKLDFSQKKKQFSRGRKYNRMLSGFAYAKFFELLKARCLKLGIKVIEVSPKYSSQIGVVKYMRRYGMGSDSAAGLVLARRGMGIYYEKMPARYAFQTSIRPEARQHVFAYWQRFNKHYLKIGSRHAWFGLPNLTGSTGDSLANTGNFGFPKLRHQHESPTLHQSVKV

SEQ ID NO: 40450 - protein, 410 aa, Microbispora sp.
MLSGRKYRVEFTPVQVEFAEQIGGICRSVWNTGLEQRRAYRKRGAFIGYAEQCKQLADAKQDFGWLADAPSHVLQQTLKDLDQAVKTHGTWKVRWRSHRKWSPSFRFPDAKQIVVERISRRWGRVKLPKFEWVRFRWSRPLGGILRSATITRDGRHWFVSFLIEDGRPIPQTHPGPAVGIDRGVVVAVTTSDGDFHERPFITDGQRQRYRRLQRQLARTRKGSNRRKRVVARLGTVMRRVRSRRADFNAQLAATLTRRYGMVVLEDLNTKNMTASAKGTIEQPGSRVAQKSGLNKAILDKGWYGLELAVNNAARYTGSKVIKVPAAYTSQTCSACRVVDARSRESQARFACTSCGHVEHADVNAAKNIKAAGLAVSGRGDLAIRRSVKRQPPRPRARHAAAPAARGIPVL

SEQ ID NO: 40451 - protein, 273 aa, Moorea sp.
MLIGFKTELKLNNQQRTKCAKHSGVARNAYNIGLAACKYILNHNRENLEPHLKFPSAIALHKWLVESIKPDYPWYYEVSKCAPQQALRNLLRAFSDFFNKKKIRGKPVGFPKFKKKGKQDSFYLDGSIICDHFAIKLPRIGWVRTYEKLPHGYKPKNVVVSPSAAKWFISFKIETEPINTEKKRDVIGVDLGVKSLATCSDGTVFEGVKVSKKLEAKLSRMQYLLGKKVRGSPNWKKAQKKIARLHARIANLRKDNLHKVTCYLAKNHGKIGN

SEQ ID NO: 40452 - protein, 356 aa, unknown
  TnpB Polypeptide
MMLRAHKIKLDPHQEQLAYFAQASGVARHAYNWALAEWKAQYEAGLKPNESALRKQYNAIKPVEFPWALDVTKCAPQQAIKNAGTAFKNFFRRVKEGKKGSEVGYPQFKRKGVHDAFRADNGPPSKGIPAVQTDGKRIKLPIIGWVRMREEVRFSSCIQSTTVSREGDGWYISVGVETTEQLESVASHGVVGVDLGLKALATLSTGEVVTGPKPHRRLEARLCRLNRSLSRKQKGSANWKKAKNKLSQLHKRIADRREDATHKLSHQLATQHDTIVLEDLNVKGMAANRYLARSVSDSAMRSLRTKIEYKAAMTGARVVIANRWLPSSKTCSGCGQHHPRNNPRRRYLALRLRPSH

SEQ ID NO: 40453 - protein, 404 aa, Streptomycetaceae sp.
MIRAYKFLMRPTVGQQAALGEMLRDHCSLYNGALQERREAWRHPSKTSVKYGQQSGQLKDIRAFDPERQGRWSFSSQQATLRRLDKAFQAFFRRVKAGEAPGYPRFRGVNWFDTVNFPKDGDGCRWDSTPHDPVTRVRFQGVGHVKVNQHRAVVGKVKTVSVKREGRKWFVVLTAEQTQPEPLPKAGSVVGVDLGIASFLTTSGGEHVPNPRRARRAAAKLEAAQRALSRYPRRKAKNRTANHQRAVERVAALHGKVRRQRLDHAHKTALTLVRRHDVIAHEDLKIRNMSKAPAPKPDPEQPGSFLPNGAASKAGLNRSIADAGWGVFLAILNSKAESAGREVIAVDPRNTSRTCPECGHTAKENRPTQEKFRCTACGLVAHADVVGATNVLRAGLVRRDANQA

SEQ ID NO: 40454 - protein, 429 aa, Halococcus sp.
MKKSLRQNLRSLDREEYQILRKMSRLSKNLYNRHLYEVRQHYFDNGEYLNYYNTYNQIKSNENYELLPSQAAQQTMKQADKGFQSFFKLIEKKKEGKYQANCSPPNYLEKDGFHPITFPNQSFQLKEDYIRVGVPKQFREEYGFSRKEIRIPFTYEEVRQSEIKQLQILPKSNAEYFEYRIIYEEDAEEVETEEETFLSIDLGVDNLATCVDHSGRSFILDGRALKSTNRWYNKRRAKLQSIKDKQGIERETNRMQRIRRKRENKIHDYFNKAVRGLVDYCVEHRIEKVIVGDAKGWKKDSDLGDRTNQSFSSIPHDKFKQKLKHKLEEKGIEFKLQNESHTSKCSFLDNEPVEHHEEYVGTRRNRGLFVASDGTELNADVNAAANIARKHKGKPNTELFDSSVDGVESVVNTPERIRKPDFCQVSTWA

SEQ ID NO: 40455 - protein, 372 aa, Clostridioides sp.
VVVVEKAYKFRMYPNKKQQELINKTFGCCRFVYNKYLAKRIDVYKNDKETFTYKQCSSDLTNLKKELKWLKEPDKFSLQNALKDLENAYEKFFKEKTGFPKFKSKKINRFSYKTNFTNGNIMYFGQHIKLPKLGMVKIRDKQVPQGRILNATISKEPSGRYYVSLCCTDVDIEAFENTNNQIGLDLGIKEFCISSCGDFIENPKYLKKSLNKLAKLQRELSRKTIGSLNRNKARLKVARLQEHIANQRKDFLQKLSTKLIKENDIICIEDLQVKNMIRNRKLSRLISDVSWSEFIRQLEYKANWYGKQIVKVGKFFASSQICNKCGYKNEEVKNLNIREWICPSCNETHDRDINASINILKEGLRLITIQNK

SEQ ID NO: 40456 - protein, 278 aa, Methermicoccus sp.
LERQQKLIEEALQGEWQFCTVEMVKKNGEWYVHFVLKKEVELPDEPETIIAIDRGEKNLAVAVAVSKNNPDKPMKGQLWRGEEIKRIRGNYGHIRRNLQRKKLLKKVKELRGKERCIVNQQLHMIANQIVEYAKQFPRPVIVMENLTGIRDSFTKSKKLNMRFHSLPFRRLQTYIEYKANLERIEVRYLSKKEVRNTSKQCHRCGHVARKVDGRIYRCSKCGMEYDRDLNACINIARRVMSSAGWGSCEPPEPADEGVSVKPTLNAGSHRLKAVVVHG

SEQ ID NO: 40457 - protein, 383 aa, Nocardia sp.
VVQLRYQYRLNPTPGQQAALARAFGCARVVFNDAIAAREQARRDGLPYPKDAELSKALSAAKATPERVWLSEVSSVVLQQALADANTAYRNFFASVTGKRKGRKVGAPRFRSRRDHRQAIRFTRNARFAVTTGRKLRLPKIGDVAVRWSRDLPSEPSSVTVIKDSAGRYFASFVVDLDPQPLPEVDIEIGVDLGLTTFAVLSNGKTVASPKFLRRAERRLRKAQQDLSRKDKGSNNRAKARLRVAKAHAKVADARRDFAHKQSTTLIRENQAIYVEDLCVTGLARTRLAKSVHDAGWGMFTRMVEEKAARYGRHFGKVDRLFPSSQTCSTCGRVDGRKPLSVREWGCPCGAVHDRDLNAAINILAAGRAERRNACGGAVSLSA

SEQ ID NO: 40458 - protein, 468 aa, unknown
  TnpB Polypeptide
MKRVNTFEVVPQTENDKECLRRLLDASASLWNELTYERRQNHFGDGDVWDTSEYRGRYNGVVGSAAVQQVTRKNSEAWRSFFALKEKGEYANPPSYWGNEEDGRELRTYIRNNQYTIQWGKRSRLEIPVGQELKDEYGLGYHERLRLEVRGNPKWDGKQGRLELEYDEVSDTFRAFQPVTVPDSRLDSPLASHEAALDVGANNLVACSTTAGNQYLYDGRELFGRFRETTDEIARLQSKLRKGRYSSKRIQRLYRQRTKRRDHAQNALVRDLVERLYDEGVATVYVGDLTDVLETHWSVRANEKTHNFWAFLATGERAWIDPETGDTIKGEPLYDDVIFHRVIEDFMIQTGDPTGTGRGGPGYQFDDEFHHELRHDEGVLSMANSGPDTNGSQFFITLGPQPHLDDRHSVFGKVTDVSASDASGGLEDERSESSSGMDVVREIGDVNTNANDQPKEDVVLESVSVDDE

SEQ ID NO: 40459 - protein, 631 aa, unknown
  TnpB Polypeptide
VAEGVTGEHLGRSGSSSNAKVLADRELRPGMTGPGSTAPRQFAVTTRAYMAVDDATGEPIGLDDVDTRVGWLLDLIAAAGAELVSRLWQPATFDVLAAGLDRQDRRLPAQGHVAAARLGWTPLYPDGVYVPSRVTRVVTAQVMATLRTLSYRDTAIAALSARFDPATGVVAPPTEPGDSVPAGFVRGVRRQLIARARRDGGVPAGRLRITEVQGPPQTSAMARLSAADRQLAQITSTERELVLTVKLPTSPTPAGRAQWSRVRLTAAIPEHLDGRPVTDWHLPSLVLDRRGLLWRCAATELAPAADLTAGRVAVGVDWSPTSLGAAATAAQGAEGLSSDYRGWTYDDRGLGIKLARLQAEGQLLHGKAARLTRLSATAPPEVRAELEEKIAVLDAHRTAVGIKRGKINRELAFDFARQVTDYATDAQAQLIAVEDLTTLESRGHGRVNNNRAAQSARRKAVDALTHTAAGVGVTVVSVPARGSSAWCPGCNEPLSRPGGYHRAWCEQCKIGGNRDHVAGVNLAKRALLGRNKTTRRRGGLPAVRVTEHAPVRQSRDKHAPTPSRPRHRRVRRSLPTVTPRLGVTPNQHVPASQASVWDTVKPTPPHGDAGSRDTRPSPTPATQVADSMRST

SEQ ID NO: 40460 - protein, 238 aa, unknown
  TnpB Polypeptide
MKAGIDLGIANLATVAVDDGSWTLFKGGSVLSEFKKITKSISIEEKRLARHGLKTSRKLEMLYNKRSLLLKNAREGLAREVVETLYDKGVGEIYIGYPKGIAQDKGNERNSNFWSYLKIIKRIKNVAQEYGIKVKLVDEENTSKTCSLCGEIHENGRIERGLFKCPHTGKVINADLNGAINILHIPESVEDRGKWLKAQPVVYRWTNGAGWVTTSYEAMKMKAVNHEPMIRLEGTIAF

SEQ ID NO: 40461 - protein, 390 aa, Pseudoalteromonas sp.
VKLAFKTQLVLNNKQKTYMQKACGVSRFAWNWGLDAWNKQYKAYIDSGKKKELKPSGMMLKKQLNAIKKSEYPWMYEVTKYASQQPFIFLQRAWSDYFKKKTMNGKPVGKPRFKKKGKSTDSFYVGGDQVVLKNNTVKIPNLGWVKMAEPLKYGGHINSMTITRVADKWYVSFSIDVEVSFIRSENQASVGVDLGIKELATLSRGNVRYWRTPKPLQHSLRKLARYQRRLAKKVKGSNGFKMLKMKIAKLHKRIADIRRDCLHQLSSYLVKNFGQIVIEDLNVKGMMANRRLARHIADVGFYELRRQLDYKSKWYQVILQVADRWFPSSKLCSDCGHKHTELALSDRIFKCPACDSSKCRDHNASLNLENYTACSAGSYAVGDVGSAQAA

SEQ ID NO: 40462 - protein, 397 aa, unknown
  TnpB Polypeptide
MFKATKVRLYPTSEQRRALAFQFGAMRWAYNFALHWRREAWAGNDERISKRMTLDRLVALKRAEETAWLKEADSQALQQAVIHLDDAFKRFFKGLGRYPRLKSKHGKQSMSYPQRIKVVEGRALYLPKVGVVKAVLHRVLVGRIKTVTVSRTHTGKYYASILCDDGQPHPAPVKVLAEENIIGVDMGLSHLVIASTGEKQTNPRFLKRASANLRRKQKSLSRKKKGSANRNTARVLVAKAHERVANARNDFQHKLSRRLIDENQAICVETLKVTNMLKNRRLAQTIADAAWGELVRKLDYKATWAGKHLVWIVTWYPSTKTCCHCALKMTSLPLSARQWRCPTCGAAHDRDVNAALNIKQQGILQLKAEGLSVSACGGMHKTVTLPAAACEARNPVL

SEQ ID NO: 40463 - protein, 430 aa, unknown
  TnpB Polypeptide
MGKQSKSKKTKKPLYGTQKQQLNKLTKKEYKALREMCFLAKNMYNVGLYNVRQYFFNEGKYLNYESNYPLCKENENYKMLNSNISQQILMGVDGAIKSFFELIKLARTGEYNYKDIKIPKYLKKDGFFSIIIGQIRIKPDGTLDIPMSPKFKREYGKVSIKVPRNLKDKKIKEIRIIPKYNARYFEIQYAYEIPESKLKLNKNNALAIDLGIDNLCTCTTNYGHSIIIDGKRLKSINQWANKQNSKLQSIKDKRGIKGITKKQCNLWIKRNNQVNDYINKTCSYIIKYCIDNDIGNIIIGYNDTIQKESNMGKKNNQNFVNIPLGDIVSKLEYLSKRNNINFVKQEESYTSKSDFLANDPLPIINLDNPQKHTFSGKRISRGQYKSSTGIIINADVNGGLNILRKANIVDISHIQRNPNILKQPIRIKVA

SEQ ID NO: 40464 - protein, 562 aa, Mycobacterium sp.
MIVQMRTRAQAAKVAAATGGVQLCGKPKRDGTPTLSTRVDVGADFEAHRVAVGAVSVLCTLFDADALTGELVEVSSGWVVRAYRYALDPTSAQLGALQSHAGGARFAFNTMLAAVRANLDQRSAERSYGIAEQQLTPVLSWSFQELRNRWNQLKHQVAVGGDGCPWWQDNSKEAYANAVANLAEALGNWDASRTGKRAGPPMGFPRFKRKGKAVSKFTFTTGAIRVEPSRHHVTLPVLGTIHTHESTRKLGRRIESGTAQILKATVRFERGRWLVSFTCAVRRAQGRQSTAGAPDAAAVVGIDAGVTDLLVVASADGTEIARHSAPRELKRALRKLRALQRKAARQRGPWNAAGQHKQDASRGWESTQAQISRAHARLANLRADRIHKLTTSLAKTHQVIGGETLAVKNMMRRPKPKPDPDNPGAFLPNGAAAKSGLNRALADAGLGEMFRQLDYKTRWYGSYLVKADRWFASSKMCSGCGAVKTKLHLAERVYHCEHCGLEIDRDRNAAINLARHALKATAPSTGVVTGGADRKTKPSGAAGGSETGTVSQRSARPKGRAA

SEQ ID NO: 40465 - protein, 412 aa, Planktothrix sp.
  misc_feature (158)..(182): Xaa can be any naturally occurring amino acid
MLVLEAKLRAKDWQYELLEEAIRTANFVRNKALRYWMDNRGVSKNDRPNLCATLAKEYDWAGKLNSQARQSSADRAWNGISRFYANCKEGKPGKKGYPKFKKRGRSVEYKQTGWKLSEDRKRITFTDGFKAGTFKLLGTCNFNFYQPEQIKRVRVVKXXXXXXXXXXXXXXXXXXXXXXXXXFLIDVERSETQSPTGKTVGIDLGLEFFYTDSEGNQVENPRFLRKSEKSLKRLQRRVSKREKGSKNRKKAINKMARKHLKVSRQRREFAVKTARALITSSDVIVYEDLKVSNMVKNHKIAKSISDAAWSMFTDWVDYFAKIRGVHVISVPPHFTSQDCSGCGERVKKSLSTRTHKCPSCGLVEHRDFNAAKNILAKGLGLKSTVGHIGTQTLEEIEPLVFSEQSERVKFGH

SEQ ID NO: 40466 - protein, 295 aa, Oscillatoriales sp.
MIVLEFKLKGKAEQYRIIDDMIRTAQFVRNKTLRHWIDNQGIKLVDLYKRCAVMAKEFEWAGKLNSTARQASAERAIFAIQRFFANCKAKKPGKKGYPQFKKHTRSVEYKTSGWELSTDKRCLTFRDGFAAGKFKLIGSRDLHFYAPQEIKRIRIVRRADGYYAQFCINVERKEEAISTGKVIGLDVGLNHFYTDSDGETIANPRYLRKSEKALKRLQKRVSRKKKSSKNRKKAINKLARKHLKVSRQRKDFAIKTALYAVKSSDFVAYENLQVRNMVKNHKLAKSISDAAWSQT

SEQ ID NO: 40467 - protein, 503 aa, unknown
  TnpB Polypeptide
MRRGLGLAPSVGERAGRMTQGGTIPRFVPTGGDPDPLQSLREEIERRLNSNWRDVRLRLLPTEVEHGSLMGIGLTCVRLYNEVNYEKRQAFFKGELTKAKMYEIDRRYYYRYNEVLGVNAQEVIRKNDEAWKSFFELLKLKKQGKLPPHTRKVSPPGYWKDRFTGKKEIHIFIRSDRYHLEPIDENGGYLVLEDFGLRIRYAGRIKWEGKQGRLEIIYVNGRWYAYLPIDVGREPPKSNRKGYVRPNYKDKKGRIVNPKSIKQRDPIGDEKAFMDMGLNNLFAVVTTNGYVLLVKGGVIKSEYYWWKREIATYQAVRDLLRNTGFPTWILYHERYLEAMNTRDERLRHLYLTSIRFLAETLWNRGVRKLYIGYPIMLSQDNGNEYNTNIWWYRKIVLWIVDVFREYGIEVEVVPEYYTSKECSVCGEVHENGRVYRGLYVCRRTGRKVNADVNAALNMARRQGYKVKITRKIESYLVTHNGVKPLNPARRANTQDPEVRNPAL

SEQ ID NO: 40468 - protein, 396 aa, unknown
  TnpB Polypeptide
MKIQRTVSIKLKDFPDTISDTFQAYTNALNYIANIAIQEKLCFSPFKLQKRIYHKVRKKFGLKSQMTINAIRLVTSTFKSAWKNKRFKLPNFSRKSILLNYPRDFKIIDRQYLFLNTIYGRQKVEFVSGDHQRQYLDGSWQIGSGHLIKKRTGYYFNISVSKEIEDISLQETVDVIGVDIGQRYLAVVSAPDSRYKFFKGGELKHKKERFRKTRSGLQSKGTRSSKRVLQRLSGRERRWQTDRNHTVSKQIVEFAKGYRRPIIVMENLKGIRKTAKQRKEQRYFFHSWAFNELQRFVEYKAQGVGIPVFKIKPEYTSQVCPKCEHLTKSNGLQFICSFCGFSLHRDLLGSRNIATKFVVNRQALIGNGLQSISPEVASVDVEGSKEQLKRSSATSS

SEQ ID NO: 40469 - protein, 286 aa, Moorea sp.
MIILEFKAYGKKHQYLAIEEAIRTVKFVRNSCLRLWIDNRGISKYDLNKYCRVLAKDFDFASELNSTARQAAAERAWSSIARFYDNCKKKVPGKKGFPRFQKHCRSVEYKQSGWKLSPDKKSITFTDKKGIGKLKLKGTWDLWRFDKKQIKRARIVKRADGYYVQFCVSVDVKEQLKPADATVGLDVGLKDFYTDSRGKTEPNPRFYRTGEKRLKFYQRRVSRKKKGSTNRKKAINRLARHHLSISRRREEHAKRLVRSYRKKSAAFIVGRLCIKGGRFCCKAALF

SEQ ID NO: 40470 - protein, 544 aa, Moorea sp.
MQTMGHSDAKRPQEGLDSLTQQIFSVLEKLQSLTDCTVTPSVIAESVAKNSETILPAKSPIFTPSSPTPKLSKTSGQVSTIEGKGLEPYWSELCSEISSQLLLPVETDLLDSGLNSLSTWSVSTVEKSWFSTNLKVAQNLNLPQIFSESFTSSPAGFMDSGNTVKKSKKIRLFLNPEQRSVIRKWFGVSRYVFNKTVKILQAGVVKANWKAIKTGILNDLSEWCKEVPYQIKSIAIKDACTAVKEAKKKYKKTSQINRVRFRSRKNPVQSCYIPKSAVSETGIYHTKLGRLTYAEGLPADICDCRLTSNNGDYYLVVPHKVAVSYTENQGRVVALDPGVRTFITFFSETSVGKIGHGDFSRIQRLCQHLDNLLSKISKAKRGQKHRMRKAARRMVIKIQNLINELHHKTAKFLVDNFDVILLPTFETSQMSKKGNRKIRSKTVRNMLTFAHYRFKEFLKHKACLTGNTVVDVCEAYTSKTVSWTGELINIGGSKTIKSKVDGKVMDRDINGARGIFLRALGDTPWLREQLALVSQDLLLVDSGS

SEQ ID NO: 40471 - protein, 422 aa, unknown
  TnpB Polypeptide
LHLRGGNPGIYAGEEPRLSLLGVDNDAKSYYINGEMISDAAFRYRFYPTPAQADFLNRTFGCVRVVYNRARAMREEAWSRKERVGFIQTNAMLTKLKKNESFAWLSEVSSVPLQQALRHLDAAYVAFFRKRSRYPRFRSKVGPQSAEFTKSGFKYRDGAITLAKMDAPLDVRWSRELPSEPSTVTVMREADGRWFVSCRALHYTEELTGGGEVGIDLGLTHFATLSTGEKIENPRHLLKRQKKLARAQRRVARKKKGSNNRRKAALKVARLHSAVRNARQDFLHQLTTKLIRENQTICLETLSVKGMLRTKLHSRSISDAGWSEFVRQLSYKAVWYGRQVARIGRWHPSTKTCGACGTTGHKLALSDRAWTCCNCGTAHDRDINAARNILAEGLSVIACGGGVNPGVSRHDGLSPMKQELVL

SEQ ID NO: 40472 - protein, 422 aa, unknown; identical to SEQ ID NO: 40471
  TnpB Polypeptide

SEQ ID NO: 40473 - protein, 374 aa, unknown
  TnpB Polypeptide
MPSIIADRETIEQFMYVTINGRLVPKSNEDYMKLCLLAHRFKQAVKHGVNLVLEKIPQKEAYKELAKLLPSSIYGETAYKYAKLLVKGAKEQVSNEVIVNRINIKKKWVASRGGVTWRGNLNIKLISTDRVLVRYYNGEWLEFKMRFGEKYLSLINELIELASYKRISYGITISFRKGRSYIHVEVPLWLYLKHFSSPKPKGYGLIAGFDINSDRLNVVVLSGDGSIAVMKTSWYSETVSHGLPKNKAKWLRLSALSEVLKWCRRIGVDYIVYEDLTKIKTRRFTSNPCANRKITRFPKKRFLKHGVIKALKLGFTVILVNPRGTSSSITHKQIMIEKGLDKHMTSAYIIAYRGLKKLKEQKPSITPSITPIIN

SEQ ID NO: 40474 - protein, 415 aa, unknown
  TnpB Polypeptide
MLLTFQYKLKPTKPQLAAMEQTLEVCRHLYNGALAERKDAWENERRSMNFAQQCASLPALKGKSAYLSGIHSQVLQDVMHRANRSFENFLRRVKAKETPGYPRFKGENWYDSFCYRQFGDGRGAKFDSAGRLSLSKIGAIRVCKDRPLTGTPKTCTLTRRADGWYACIACETEPEPLPRTGESVGIDVGLESFAALSSGETIANPRLLRRAERQLKTAQRRVSRRKKGSERRKKARVLLAMAHLKVRRARLDFCHKVAHGLVARFDTIVVEKLHVKNMSRRPKPRPDPDHEGRFLSNGASAKAGLNKSIADAGWGLFVSVLTMKAESAARQVIAVNPEYTSQNCFNCGMRVPKELSIRLHSCPHCGFEAHRDMNAALNILKSGNILKSGNILKSGNILKSGGGTAFGETATLVAV

SEQ ID NO: 40475 - protein, 379 aa, unknown
  TnpB Polypeptide
MLLCPLLSTVCVKHSSFGCIPRPRRSGRCWRRLMNAAGCTIACLSNARPPTRRRAQVQRSTKQRATFGALKAERPSLAGVHSQVLQNVAVRIDLAFKAFFRRVKAGETPGYPRFRGRERYDSFCYPQSGYQLDGDRVFLSKIGRLKTVVHRPLGGTVKTCCVRRTSAGKWFVAFSCEAAPLSVTDTAVGIDVGLEKFATLSTGEQLANPRFFRRDEHDLARAQRRLSKEPRPRKGERAAPARRKRRKVVARIHERITNRRANFAHQESRKVINGHDIIAVEDLSINTMVHNHCLAKSIHDAAWRQFIAYLTYKAEDAGRRLVTVNPAYTSQTCSHCGHRTRKELSDRVHRCSCCGLVLDRDHNAALNIVALGRQSLAHA

SEQ ID NO: 40476 - protein, 424 aa, unknown
  TnpB Polypeptide
MEQEFTKKHDEETPGFSRGGIAAVGYGDLSSNEVYGNHRVMIRTIQCPLPLDPSLAETIRQYNEAANDAIGAGWARRTYNKNVLHATTYSSIRERMPRLQSSLVQCARDMASASLRLAKKKNWQCKKPVKKPMSSIRLNQRTFTPFLESGLISISTVDGRMTYPLVIPEYFRKYQFSTVNAVVLKAKKDKIIAFLNIEILNPAVNDYPVTFLGVDRGINNAVVASDNTFYSSKHIKNVKYKYQYLRQSLQSKGTRRCKRKLKALAGRERRFMTGENYKIAMWLVAKPFDCIVLEDLKGIKINSKKEHRVGKQTLKKFAYWTYYQLEQIVENKALEAGKMVLFVNPKYTSQRCSRCGHVVKSNRHGSEFACKQCGFSIHADLNAARNISDRGNAVVGRAKVNRPNVARNDEVEFLPRIAVASPRL

SEQ ID NO: 40477 - protein, 484 aa, Micromonospora sp.
VRKFEPRPGFVVQAFRFALDPNAGQEQRLRSHCGAARAAYNWAVAWVMGSWWQRQAEASYGVAEDELTPWRPWSLLALRKVFNEVKKTDPRFAGWWEENSKEAYGTGLANAAAAFDNYATSKRGQRKGKRVGLPRPKSKHTARLACRFTTGAIRVEPDRRHVTLPRLGTIRTHESTRKLQRRIGNGTARILSATVKFDRGRWFCSFQVEIQRADRAPARRDVAAGVDLGVKCLAVIADSQGLVRFVPNPAYYDGAVKQLKRLSRRVSRRRGPDRRTGQQPSQRWAVANADRNRVHHRVANLRADALHKLTTGITGEYGTVVVEDLNVAGMLRNRRLARKIADAGFGQIRRQIAYKNDWTTGTTVVADRWYPSSKTCSRCRTVKAKLPLHVRVFTCDACGLVIDRDENAARNLAALATAATTGTGVAGDPGVQTSKPRGADRKTRATTRGRKAAGGRAGGATLPYQRQQETRDRHQDTETQPALR

SEQ ID NO: 40478 - protein, 419 aa, unknown
  TnpB Polypeptide
MEVRRTASVKLVVPDERRDDLHKSARQFLHCANRAAEFCWSDNSYTECVTANTTARNALYDDLRDETDLTANLVQEAIRRAVQATKGCVERWKNGKRVSQPEFTSWSMVYDKRSATFYRNKVSLSTVNGRVECEFELPSDSPTPYEEYVLSDEYEFRASTLQYDAVDDEFYFHITTRKYDSDECGRDDAKVSADTGHQTVLGIDLGVNSLAVASTGTFWQGDDYDHWCREFEKRRGEMQQRGTQAAHNALLRLGKREEAWRTQYIHTVANEIVREGVENDCDVIVFEDLTDIRNRLPQAKWHHIWAFRRLFEYVSYKAPERDISVEQVEPNHTSQRCSRTDCGFTHDNNRRGERFCCQKCGYEVNADYNGAKNIGMRYARKRTHRLRSSPKSGSGDAPVDVRINGGTLNGESHQPIAGD

SEQ ID NO: 40479 - protein, 446 aa, unknown
  TnpB Polypeptide
MEIFSTYSVKIKHYNHIFKETVSLYREAVDFYIHVCLEHWDILFQEKNSVKRVNILERFTHKTKKNPVVQYPSFDQKFYKFPSYLRRSAISEAIGKVSSYKSNLANWEKEPVQTRGRQPSFPKAGYVYPALYRTNMYLQTGAYEVKIKVFTRNTWDWLTVHVRRSDMDYIQKHCQNRRQCSPTLQKRGHQWFLDFPFEESVTLSNTDISDQTIVAVDLGILSAATVSVMRSDGTILGRHFCKLPREYDSLNHAVNRIKKAQQYGNRKTPRLWARVKGINDDISVKTAHFIIDVALRYHADVIVFEHLDLSHKKRGSKKQSLHLWKSRYVQSMVTGKAHRQGIQIAHVNAWGTSRFAFDGSGTVARGKEAGFQSYSLCRFKNGKTYNCDLSASYNIGSRYFIREILKSLPEKERLVLEANVPQVAKRSTCTFSTFLNLNAELQALRA

SEQ ID NO: 40480 - protein, 212 aa, Bacillus sp.
VSLLVETEVQELPKTHSYIGIDVGLKDFAILSDGTLYKNPKFFRSLEDKLAKAQRVLSRRMKGSFRWNKQRVKVARIHEYISNARKDYLDKISTEIIKSHDVIGIEDLQVTNMLKNHKSEQVISEVSWSQFRSMLEYQAKWYGKQVIVVPKTFASSQLCFCCGYQNKDVKNLNLREWDCPSCRTHHDRDINASINLKNEAIRLLAARTAGLA

SEQ ID NO: 40481 - protein, 298 aa, Halorientalis sp.
MTFSQSGFELKNTSGRRATLWLSKIGDIPIRYHRDIPDEADIKEVTVKKEATGKWFVSFALETDDASLPEKPDVDSLDASNSVGVDLGILNYIHTSDGHTVDWLDPEDEYERLQREQRMLSRKEEGSNNYEKQRREVAKVKRHIRRKVLDYQHKITTWLVREYDAVFVKELNVKGMLEQSHNARSKQDAAWRQFIILLEYKADLYGCHVKQVEPEGTTKECASCGVETAKPIWVREHSCPACGFECDRDANAAMNVLQRGFSELGLGWPEDTSVETALPTDTTTVSAKRVIEAGSLRA

SEQ ID NO: 40482 - protein, 352 aa, Halorientalis sp.
VKFTNEGVQLDHQPQNHYEWYVKIPHHDDYHLWIPTGVNPEQRPWLEALHAGDAEMGECRLLERDGKWYLHVTATRDLEKRSASDPTDRTPVGVDIGDAALATVCHRDERGTPTAPDIYSDEASQVRHLRKTYFSATHRLQRRESERIAEEYGDSLWERIDHIIYRVSRQVAERAQQVDNPVLVLENLRYIRENLDYDAFMNRRLHGWAFAKLHAQIRYKAEEAGIPVATVNPRNTSRECHVCGETGTRPQQATFRCTNDECWVGEYQADLNAALNIADRHRSGESQPQTDQDSAQKTAGDDSATDGVVRESGALSSSRKARSAFRTTSLTGPQDSHSEGETRPATSGTHTS

SEQ ID NO: 40483 - protein, 334 aa, Halorientalis sp.
MRIAKNINRLGQLKEQGYNVGELRWKSPREFRSFTYNQSGFEFDKKSGQTVLSLSKLADIPIELHRPLPDDATVKEVTLKKEKTGEWFAIFGIEMDTEQPAKPPLEDIDTDEMVGIDVGILKYAHDTDGTAVESLDLSEERNRLGREQRKLSRKAYNSNNWEKQRQRVAECHQQIKRKRRDFLHKLSNYYAREYELVAVEDLDVKGMLESPRNSRNTASAAWNIFTDMLETKCEREGTHFVEVDPEGTTKECAQCGVETEKPLWVREHSCPACGFEADRDANAAWNVLSRGLIKLGLGHSKGTPVETAVVSAKRVVEAGSPCLKEPPKTASRQG

SEQ ID NO: 40484 - protein, 252 aa, Bacillus sp.
MFGIMLVREVKIVGLTYSRKIKVNFVKEAELILDGQSKICNWLYNQLLDACQKDYKENNNALKLLKNRNLRNYGVSLKAKHPFLNTVFSSPLKEPSTRLVNAYKGFFEGRTGYPQFRSWKKKWFSLVFDEPNKGWEILNEGKTISISLGTIPGMKIEKGKGNPSVSGTLKEKVELKKGEIIKTFTLCKQQGNQFYAIFTIERCSDQELEFKKVMSDYRKAFNLAKKEGKEKPIKPKLPEKKVNTPMNSKWIA

SEQ ID NO: 40485 - protein, 412 aa, unknown
  TnpB Polypeptide
LNYERRQQFFQPQRVDFKGTWDKYYEKYKNILGVNAQAVLQKNNEAWNSFFSLLKLKKENKLPPHMNHVSPPRYWKDRELKKRKLLLVVRQDRYEVDEQNNKLVLKDFGLEIEFAGRLRWYGKQGRLEIYYDETRNAWYASIPVEVGAEETKTGKGSKYIVRGRVYKLNHLKETKVASIDLGINVLASVVLNDGTLLLYKGVRTKEDYFYFQKKIAQVQSLADKTKNIGEYEAYAELSREKRRLFKKLTRRLLHLYRNFASHLFKELHELGASTIYLGYPFNIAQDKGNKFTVNMWSYRKLMDAIELKAQEYGMKVFEVVEYNTSKYCACHNVEVKRHPRGVVSCPKGHKLHSDLNGALNILKKAANIVVSAIKKPLSFIVDHNRVAPVKGRNPRDLREPSPFRAGRRSVGE

SEQ ID NO: 40486 - protein, 240 aa, unknown
  TnpB Polypeptide
LLALVYLVAHLVGDGHWYALIVCETTPQTEHLPSACSHPAIGLDVGLKSFLTDSEGNTVENPRFYRTSQRTLRRKQRQLCRRQKGSHRRRKAAKHVAKTHLKITRQRRDHHFKTAKPYAQGYQRIVVEDLQVTNMVKNHHLSKSILDASWGLFLAILTAKAESAGHEVMRVNPRFTSQKCFTCGEIVQKALSVRTHVCPCCGSVADRDVNAAKNILSLAGARPSGTVSGGSPVELRSPQL

SEQ ID NO: 40487 - protein, 190 aa, unknown
  TnpB Polypeptide
VTLTQTPVKGQIICSVDLGINTDAVCTIMRADGTVLGRKFIDFPSEKDRMYRTLGRIRRFQREHGSAQAGERWAYTRRLNIELSRKIAGAVAEYAWENHADVIVFEYLEMNGKISGSKRQKLQLWRKRDIQKRCEHQAHRKGMRVSRICAWNTSRLAYDGSGIVLRDWRNHSLCAFQTGKRYNCDLSAFL

SEQ ID NO: 40488 - protein, 545 aa, unknown
  TnpB Polypeptide
MEQFRGYRTRTLKTYKINNSEYEKVDQLCLVAKNIYNSVLYICKQDFFYRIEHRIPYSKGTYSPTAKKSTLYNKAENKVYQSESIKSLLLNIYEKDCRALPSIVVDSIVNKACQTFQAFIAAQLDYKKNPQKYTGKPKLPHYFKETNKKGSRFTCILPSTFNYVFYKDHQIFINYTYNKKLIANGRVKNAPLTLNPVKTNLDLSYGLYSTSKLDYNPLIQLQIVPKKFSKSHYNYELQLVYDLPTKIQVDSSFKNIGAIDLGIDNFAAFTVYSTQSSVRPLIINGKGLKSKNKFYNKEISYLKSIGAINNSNSNKFTFNKIRGIYAKRDRVFKDFYHKASRAIVDYALENKVSIIFIGYNKNWKSSSSLTKNPNQTFQQISYEKFKQYLSYKAESVGIKVREVNEAYSSGTSYLDNELPVTENYNKERRIYRGLFTTNTNKIINADINASYQIMVAGCKQYFKKYHCLYDPAIITKESLSPKVINIDTFKVNQHKTKIQNKQHFNAPVSQYRTDKQAAKVYNLAQQYEQLRISEQNKTYTEVLCI

SEQ ID NO: 40489 - protein, 373 aa, unknown
  TnpB Polypeptide
MKKNKAIKYRIYPNKEQQELIFKTFDCSRFVYNYMLEQSIKAHENGESFCTRNSFNYLLTSLKKELPWLKEVDSTALTSANDNLAAAFSNFFKKNANFPKFHKKKLSGSYTTKRVIRNIAILDRSIKLPKLGKVRASLHRMPKKDWNLKAATVSQSPDGKFYASVLFEYESDIDYQVDINNAIGLDYASNGLFVDSNGKRGTNHKFYRKAQKKLAKEQRRLSRMKGSKKNEPKSNNYIKQLRKVNKIHRHIANQRSDNLHKISTEIANQYDVVCVEDLNMTAIGNKGFKNGKATYDNGYGMFLRMLEYKLSDRGKHFIKIDRWFSSSQLCSCCGNRKKLELSERKYICACGLEIDRDLNAAINIKNEGLRLLA

SEQ ID NO: 40490 - protein, 375 aa, unknown
  TnpB Polypeptide
MANKAIKYRIYPTTEQSIMFAKTFGCCRKVYNLMLTDKIAYYKATGKSIQTTPAQYKDEYPFLREIDSLALCNVQLNLQAAYKNFFDKKRKVRCGFPKFKSRKARNSYTTNNKKGTIAIIDDKYIKIPKIGKVRAVIHRKANADWKIKSATISKERDGSYYISILYEFERVVTKVAKLKNTIGLDYKSDGLYMDSNGNIGTNHKYYRESHNKLAKAQRKLSRMKGSKKNEPKSNNYIKQLRKTNKIHRHIANQRLDNLHKISTEIANQHDVVCVESLNMCSMANKGFGNGKATYDNGYGMFLRMLEYKLFDRGKYFIKIDKWFPSSQLCSCCGNKKKLTLADRIYKCDCGFALNRDQNAAINILNEGLRLLNEVA

SEQ ID NO: 40491 - protein, 363 aa, unknown
  TnpB Polypeptide
MQKGVKFRIYPNKKQRNLINQTFGCCRFVYNLGLEMRNKAFENGEKVNYSKTSAMLTELKRSDEFSFLRDVDSVALQQSLRDLDNGFVNFFQKRARHPRFKSKHSNHQSYRTMNPRNNVRIVGKRIRLPKLGYVKVRQSMDIGKINNATVVRTPTGKYFVVLNVDFEPELKQNDGGSIGIDVGIKEFYSDSNGNVVSNPKFLEKSLKKLSREQRRLSRKKKNSNNRNKQRIRVARVHEKITNQRNDFLQKISTMLISENQVICIEDLKIKNMVRNHKLARCISSVSWGKFFNILEYKANWYGNDIIKVPTTYPSSQTCSCCGYKNPVVKSLAVRKWECPNCHAKHDRDANASINILNKGLSIA

SEQ ID NO: 40492 - protein, 377 aa, Bacillus sp.
VLVKKAYKFCIYPSKEQETLIAKTIGCSRFVFNRFLGQWNDTYKETGKGLTYSSCSAELTQLKKEFVWLKEVDSIALQSSLKNLADSYTRFFKKQNKAPRFKSKKNQVQSYTTKETNSNMAIVDNKIKLPKLGLVRLAKSREVEGRILNATVRRNPSGKFFVSILVETDVQPLKKTESSIGIDLGITDFAVFSDGHKMDNHTFTAKMEKKLKREQRKLSRRALQAKNKGIHLFDAQNYQKQKRKVARLHERVRNQRDDFLHKLSTDIIKNHDVICIEDLNTKGMLRNHKLAKSISDVSWSAFVSKLEYKAKWYGKTIVKISRWFPSSQICSECGHQEGKKSLEIRDWTCPICHKHHDRDINASQNILAEGVRTLDLA

SEQ ID NO: 40493 - protein, 380 aa, Bacillus sp.
VKTLLINKAYKFRLYPSKEQEIFIAKTIGCSRFVFNRFLGQWNDTYQETGKGLTYNACSAELTQLKKEFVWLKEVDSIALQSSLKNLADSFTRFFKKQNKAPRFKSKKNQVQSYTTKETNSNMAIVDNKIKLPKLGYVRLAKSREVEGRILSATVRRNPSGKFFVSIVVETDVQPLKKTESSIGIDLGITDFAVLSDGRKIDNNKFTSKMEKKLKREQRKLSRRALHAKNKGIHLFDAKNYQKQKRRVARLHERVMNQRDDFLHKLSTDIIKNHDVICIEDLNTKGMLRNHKLAKSISDVSWSAFVSKLEYKAKWYGKTIVKISRWYPSSQICSECGHQDGKKSLEIRDWTCPIFDKHHDRDINASQNILAEGLRTFHTA

SEQ ID NO: 40494 - protein, 356 aa, unknown
  TnpB Polypeptide
MQRSLKFSLNFANSNKQSIINNLWGDYKKLVNSFLIRLFNKEDLSEIYLKSINSLLSYRYKQCAKRQAFKIFKSWCRNKKKGEKPIFKNAMILDYRFIELQKGKNSFDYWVKISTLEKGKPILIPVKSYDYANKYFQDWSLIGGGRLKKTEKGWFLIVTFKKEAPIKKQIGESIGVDIGIKKLIVDSKGNEYGKDIESLMNKIQRKQQGSKAFKRALKERDSYISKTVKELPFADLKMIALENIKGIKRNTKKEKRSNKEFRSKFQRWTYPLLISRIKQLSEVGGVHCLMIEPAWTSQTCSQCKFIHKLNRSGEIFKCRNCGYTLDADFNASLNILNLGLTQQSMVAENMRGNICL

SEQ ID NO: 40495 - protein, 259 aa, Streptomyces sp.
VRFTANARWSITTDGKLNLPKIGPVRVRWSRPLPSVPSTVTVIKDAAGRYFASFVVETDPADEILPSLDTDQGIDLGLAHFAVMADGSQVRSPRFLRRAEKKLRREQRRLSRKDKRSNNRDRQRVKVARAHAKVAYARKDFHHKLSTKLIRENQAISVESLSVKGLARTRLAKSVHDAGWSAFVDMLAYKAARYGRTLTKVDRAFPSTQICSACGHRDEPKPLHVRAWTCGTCGTRHDRDWNAGVNIKHEGRRIRATAS

SEQ ID NO: 40496 - protein, 549 aa, Streptomyces sp.
MQQQQSGGRPLRSIAAPFVALGPSGVAIRDRLKHLTAEDADILRVVGEYQGGLASRDLKTRCTDGFGHSADTWAARKRELTAVSSSRIAGTITKATHDQWALARRCQAAHIQNLKAGIGTLRHRLSLPLGEKGTKRAAGGYRSRGEWFRKSRRLAMLEARHAAVVEDWQAGRVRVVRGGRRLLNTRHHLEAAELTEAEWRRRWEAERWFLAADGESGKRFGNETIRVTPDGEVSVKLPAPLAHLANARHGRYILTAQVEFKHRGEEWRDRVTGNRAVAYRIHLDVSRGRWYLTASWQRPVVKTVPLDTARAQGMVGVDTNADHFAAYRLDPHGNPVGDPHRFFFDLSGTADHRDAQIRHALTRLLHWAARCGVTAIGIEDLDFAAEKTREKHGRRKRFRRLISGMPTGRLKTRLVSMAAEYGLAIVAVDPAYTSMWGDEHWRKPLTGTNRTMTRHDAASVAIGRRALGHPIRRRTAPPHDDRSDRRGHRTVLAAPGIQGREEPRPPTTDRAPRVSSPSGTRKRGTSRASNTVRDARSGQVWVQDSVLLT

SEQ ID NO: 40497 - protein, 405 aa, Streptomyces sp.
LKAVVGTYLSFLVYVYAVHANGHTVAVVQLRYAFRIEPGPGQRLGLNRAFGCARVVFNDCLRARRDAHAAGLPYPRSAELSKRFITEAKKTPDRSWLGEVSAVVLQQALRDLDAAYTNFFAGIKGTRKGTKIGEPRMRSKRDARQAVRFTANARWSITADGKLNLPKIGPVPVRWSRTLPSVPSTVTVVKDAAGRYFASFVVETGPADEVLPPLDTDQGIDLGLTHFAVMADGSRVRSPRFLRRAEKKLRSEQRRLSRKARGSRNRDRQRVKVAEAHARVADARKDFHHQLSTKLIRENQAISVESLSVKGLARTRLAKSVHDAGWSAFVGMLEYKAARYGRTVTRVDRAFPSSQICSACGHRDGPKPLHVRTWTCGRCGARHDRDWNAGANIKHEGRRIRATAA

SEQ ID NO: 40498 - protein, 532 aa, Streptomyces sp.
LRVSAGDGEVLRRVGDHLGRLTRADLAERVRIGDVVAKDNRRAVRKKGLTAVASSRWAGTITRTSEDQYQLSKRCLYDERAGLRRAVRKLATRLKASCGGREHGVRGYVDQAERFEKQRRLSVLSGRLAAVERRIETGRPSVVVGGRRLAKVRHSLSDAGLTESEWRQRWQAKRMFLTADGESGAPYGNYTISVDPTDGSVTIVLPEPLRRLANAPRGRYRLACAARFHHRREEWLDRVNAHKAVRYDIVHDPVRDRWYVDASWSTAKAALPTPAELAATGVRLLGVDLNADHLAACVVDAHGNPIGEPFTVTTDLTGSTSRRDGRLRAAISELIALTRRHGCAGIAIENLGFADARTTGRETMGRGKRGKHFRRTVAGIPTARFRERLCGMAYHRDLTVVAVDPAYTSRWGAQHWRTPLQQQTHQITVTRHHTASVTIARRALGHGARRRPGVTAHHQRMAGRRATGQTAPRPRARGTTGPPRTTGTPHQGDKTCWSRSDQSALFPAPKTVRGATGPSPVHGESANTGQYR

SEQ ID NO: 40499 - protein, 296 aa, unknown
  TnpB Polypeptide
MPSHCTASHRGGSPYTRPARPPTLGEDAVRWILARVREGARLVLAAVWAGPSRGSRAARLCVALIFRREVAPIEARRLLAADLNALHNGIAWAVVERDRVLRRGALRPHLRRLEKLQREIARLDSLCARRGGPHCDTARGAKSRLWRLLGEWTKEAAKFVVRLALQYRAAIVVDTPESESMQELKQSGSYPADRKALLNFGRLRRLIEGLAAWHGATCIEARLYSTLCPQCGTKMTELQNRQVRCPRCGMEARRDEVPAMWAQRRLDGLIGPANPRRGPAPRLVSGDSGPRSAAGS

SEQ ID NO: 40500 - protein, 421 aa, unknown
  TnpB Polypeptide
MIVHQAYRFALDPSPRAARALASHVGARRFAFNWGLVLVKERLEARKRGEDVEVPWTLPALRREWNRAKETAAPWWRENSKEAYSSGLAGLAAALKNWSDSRKGRRSGRRVGFPRLRKKGRGRESVCFTTGAIRVDDKSPVVLPRIGRVRTYELTTALVEKIEAGKARILRATVSHEGGRWFVSFTCEVEREPKAPRFPDVAVGVDAGLRHLAVLSTGERVENPRPLKAALRRIARLNRELGRRKRGSQNYEETRRRLARAHSRVANIRRDVWNKLTTRLARTYGVIVVERLCVAGMRRNRCLARAVADAAPAELRRMLAYKCVWYGSRLVEADRFWPSSKTCSHCGAVKEKLPLWERTFRCGACGLVLDRDENAARNLAVLAAAVAGSGPETENARGRDVRPGVGRQSWRKREAGSAACA

SEQ ID NO: 40501 - protein, 381 aa, Nonomuraea sp.
  misc_feature (304)..(348): Xaa can be any naturally occurring amino acid
VKLVVRVKLLPTPEQAAALEATLRAVNDAATWVAALAHTQRVFRNYDLRRHVYGQVKDRYGLAAQAAQHVIKKVADAYATLHANLRSGHLGRPGSVRRERVQARPIVFRPGAAQPFDDRCLSWRMDARTVSIWTVGGRMKGVAFTASADQLTLLAAHRKGESDLVCRDGRWFLIATCDLPDVPVRAPDGFVGVDLGIANIATTATATGTGTGTGTGTGDGVRHSGKTLNAVRHRHRELRRRLQAKQTKSARRLLKRRRRKEARFAADTNHTIARRIVTEAARTGRGIALEDLQGIRDRVRLRKXXXXXXXXXXXXXXXXXXXXXXXXXXXXXXXXXXXXXXXXXXXXXARKPSPVRRAASLSTPTSTQPATSPHAVRRAGQ

SEQ ID NO: 40502 - protein, 449 aa, Streptomyces sp.
MGRRYRLYPTEEQDKVLTKWGHTVRALWNVALEQRNYLWKQRRHTMRAIEQCKRLTAGRAELTWLAELPAQAAQQVLRRLDRAYDNYWNPEHPAGFPQLKKRANRVAVPLPGQSVEVRKLNRHWGEVKLPKLGWVRFRLSRPLGGNIRNATVSRDGLGWHVSFGVATGWTAAPPNGKPGCGIDFGVAASAYVSTEAAPRVKPDGLTKAEKNRLRALEQRKARQITYAKKHADGRYSNRLRATIAAIGKLRTREANRRQDFTHKLTTDLAKNHGFVGIEDLRVVSMTASAKGSAGQPGKNVAQKSGLNRAILDNCAGERRRQLAYKCPQYGSQLIAVPAAVPHRPAPPAARSTLSPVWDAADCSPARAADTRTTPTTTPRSRSRPEPAGRAARSPTARAGTPRCRVPPACGGERVKPSRLPPGSPRESLGTNREGIVKTTRSSQPNSRYP

SEQ ID NO: 40503 - protein, 359 aa, unknown
  TnpB Polypeptide
VSQYQTSSTVVDASTLVEYATITGRLIPASSEDYMKLTRLAWSFKRAVQVATRMIAKGVDSNDVLKELRKMLNKAYADSAFKIAKAIVRGCITNGGDPLHVEVRKLFIVSEGESSRLGNRNVRFEDTNLVKVKYPYDGSWTQFRAKFGEKYLPLLRELVKLAKQKKASYNAKIVFRNTKIYLHLSVPIQLYLKYFKRGDALGEFIAGFDLNSDRVNLVIIDKYERIVDVKTEWFPEVTSPGFSREKARALRLRALAKLLKYCYTHGVGAVVFENLLDVKKRRFAKSKTANRKISRFAKRELLHYVIVMSLKYGFKVLLADPKGTTSSAEHGRFMMKHGLDRHTASAYLVALRGLTHQIT

SEQ ID NO: 40504 - protein, 382 aa, unknown
  TnpB Polypeptide
MQRSHKIRLNPNNAQATYFAKACGCARLAYNWGLAEWVRQYEAGGKPSAFGLKKQFNAIKRQEFPWITEVTKCSPERAFDDLDRAFKNFFRNVKQGKKLGFPRFKKKGVKDSFYIPNDKFSIHEDYIKIPKLGIVRMTEPLRFQGKIMSAVVSKGATGWFASIAVNITDGEECSDNQVHSSIGVDLGVTKLATLSNGVVFENPRVTKTYEVRLRRLNKSLARKKKGSNNRKKAKEKLTKLHYKISCIRKDATHKMTHYLATNYSDICIEDLNVAGMVRNRKLAKVISDCSFAEIRRQLEYKAVRVHTVGRFFPSTKLCMNCGQLHEMPLSNRTFSCDCGTPDMDRDLHAAKTIEVEGLRAYTEGFSGFQACGDSSSGTNLSV

SEQ ID NO: 40505 - protein, 367 aa, unknown
  TnpB Polypeptide
MRRSHKIRLSPNNKQATYFSKCAGVTRFTYNWALGRWKERYEAGIASSSFGLKKEFNSIKRTEFPFVAEVTKWAPERAFANLDKAFQKFFKEKKGYPKFKKKGVHDSFYISGSVLKLDGNKVKIPKLGWVKITEPVRFLGKINSVVISKKVGKWFASFSVDLGEVPRENQSGGLVGIDLGISKLVTLSDGTVFENLKTTKKYEKGLRRLNKSLARKKKGSENWKKAKEKLGQLHHKISCVRADDIHKMTSTVSKNYSGVCIEDLSSKNMMKNKNLAKSLADASFGEIKRQLLYKVDKVIQVSRWFPSTKLCSNCGQLNKMPLSKRTFECDCGFGPVDRDLNAARNILLEGIRQGLPNFKPVELEALT

SEQ ID NO: 40506 - protein, 403 aa, Clostridiales sp.
MAGVKGYYAIRTKRFVLKTSYEPWLWVTWELYNELLRFYYQLFLEHSELHSLGKQKLLRALEQLSIVGRDKRPVEQPLPFKGVPLYFRRAAINAALAAGKSYLAREGQKQPTEAFEAGVTLYKGTYKDLDSHSIRIKVWNGERWLWIRCRLSGNVIKEGDVCLSPRMVFCDERIELHVPVRQPVPDGRTLRERMEKDMDICSVQFTNGDAIGVCCVVDCRGCLRTVRFLRGGRDYAHRCRRIQEKIRISQESVGRRRGSNDNKKYWKKLKQISDDMAHQVSRQIVDFCVETGAGVIVLPKYSETFTKYVMASVGNWSPLHLNYQIRSQLKYKAWQSGILVLESEVSDIKRYCAVCGGVVHSQGEQFVCENGHRGNRRINAAVNLGRKTRESLSEHLSCNKQNG

SEQ ID NO: 40507 - protein, 515 aa, Lachnospiraceae sp.
MSLYSVRISRSADIRRTLSATADIYRKAVDFFIHVCMKEWDSISTCRGQTGKVNAVEAFTVKTVRRPSVLYDFGKDYYKFPSYLRRAAIAEAAGKVSSWKSNLKNWKEADPRTRGMRPGQPSAGYVYPAMYRDNMFVRTGTYTASIKVFTRGTWDWLEVGLRRGDVDYILRHCKDRRECVPTLQKRGKLWYLDFAFEETVELPGTEVPARRILAVDLGINSACTCCVMGPDGTVTGRTFLKLPAENDRLDRAVGRIRKAQRQGARRMPRLWARAKGISADIAVKTAEFIVKTAVLHDVDVIVMEHLDVGGKKRGSGKQRLHHWRTVYVRQMVAQKAHREGIRISTVCAWNTSRLAFDGTGRVKRGRESERTADNYSICEFSTGKIYNCDLNASYNIGARYFIRELIKPLPATAKQRLEAKVPSVSKRSPRLYGGEAVRTLKGEPAARRGVGSTRLQSCEASLCSLYISTVIRLLRYSRGLFEICSLQVCSGFRLLGTAEDFIRYVPRRYAVIFGS

SEQ ID NO: 40508 - protein, 295 aa, Scytonema sp.
MGQIRLIYNSELDYFEVHFVVNFGIYTKSPDSERTPIGIDKGYTEAFIDSSEKVHGDGLGTLLTKKSNRITDKNRKRGKLFAIFRKLEKHDPVKAARILENNLSRKTENKRYRKDQAAISSLLGTASKSLFATGKLKVFAEDLTEPIKNKRQAKSLSRKLNSWVKGYMRDSLQKWADWSDSVITEVNAAYTSQTDSVTLTLLGKRVGDSFTRHTGVVVQSDCNAALAILHRGTDKDITPYMGASEVQAVLLRRTAMFLKLEGKSLEDAVKLGWLDPKHLLNPEFQSSGRWEPTNV

SEQ ID NO: 40509 - protein, 407 aa, unknown
  TnpB Polypeptide
MSSLKAYKYRLYPTKKQAIRLQEVLDRCRELYNAALQERKDAYRMAHLSIGYTQQAAQLPEIKEIRPEYQDIYSQVLQDVLRRGDKAYKAFFRRIKQGEKAGYPRFQGDGRYDSFTYPQSGFSLTEDNRVCLSKIGTIKVKMHRELEGTMKTCTIKREGMHWFVIFTGEIEPELVYHPSGEAIGIDLGLLHFATLSDGSTIENPRYLRKAEQKLKKLQEALSRKKRGSKRRRKAAQLVGKNHRHIRNQRKDFHHKEARKLVNGYGVIVFEKLQPANMSKRPKPKQDEETGQYLPNGASAKAGLNKSIVDAGWGQFQQIVTNKAEWAGSRVLFVSPKYTSQRCSGCGSIAKKELAERWHSCSCGCELDRDHNAAINIKRAGLLLLEKEIQARTEPSGDALLRSPALQG

SEQ ID NO: 40510 - protein, 439 aa, unknown
  TnpB Polypeptide
MPITIQGTIHNLSDKNKLQQLMQDFCSAKRFSYCRFKEEKELNNVRYLTKIKYSYLNSTYMNNAVDEGKALFTRFKEQKIIFGSKKLWKRLIDKEISKENWSQKRNDEIYSRGDKRKNGNLNTRIYLENNKLKLRINCGIRDYIYADVWLPPKYYSIILDIIQLENPCYSVRIKQEQKQCRIIISYDEQYPEIEHPLAHGAIGIDLNPNLIAMAYIQPDGNLVETKSIINNRINNARWGKRHYDIWMIAKEIVEYAINKNCGIVLEDLDFKKNKKYKHTNDKYNKKKNRALGNFTWRQLLIAIEAKAHRNGIEVKKVNPAWTSVIGRLKYCDDIKVHEAAAYVTGRRGLGYKERIPDWLRSMIAETLQEEGIKKSNWKIWSDLKKLTVPDCRAFVPQRVRRRVKDPPSGLMDESKDLSSPELLGFTGRDVSEETSEITW

SEQ ID NO: 40511 - protein, 398 aa, Hyella sp.
MPQYIVRKLKIGKTSQLDELARAAGELYSRTLVSFWRTVRKKDVWLSGYTMERWHMSPLLHAHTSDAITQSFYASLKSWRSRRKLDPNSKPPRRRRWFYKVTWKSSAITLKDGKLRLSNGKGNQPLIVQWQWERPKQIEMGWNRNAQCYELRACYSQPKISAEKSQKIAAVDLGEIHPMVITDGVDTDIYNGRLLRSKKQYQNKLKAQLSKLIDKKKRGSKRRKKLIKSKQKQLAKIKNQIKDIEHKLTSKAVSTLKKRSVQTLVIGDVRDIRKNIDYGKKANQKLHQWSFGSIRQKLEYKCAKAGIKTELISEAYTSQECLSCRQKNKSKNREYRCSCGFRWHRDGVGCSNIRAKYLGEIPVVGLMARPSGVRWNPHLQCNSTTFLVEESPAFTHGE

SEQ ID NO: 40512 - protein, 441 aa, unknown
  TnpB Polypeptide
MEKYIACVNSLVALHLSGVSIQKFSSKDVDAELPAAVKNQAIRDAKSVLRRYAKKQRKVEHKRAWFAEQGKTPKRPIRDTKVPILHRPVLFVNNQNFKIDLDAKTVSFPLFRKGETKRNSVQKVIRVATVTPRHREILTTTSHLSTLRIVVKGDKFLAQVGYTVEEPETAELDDLIADPNTLVMGVDLGIKCPAVSYSTDGKIRFFGNGRENRYKRRKFYTRRKKLQKEKKLRAIKRISDKEARFMKDRDHQVSRAIVNEAIRQGAKVIALENLDGIREGCTKSTPTRKSRKNVDKPNVDSVAENVKCAPSSAEEPVQLDLFSESETLTKKERRKKRKLSKKQIAVRRRNNRSLNSWSFYRLAKFIEYKAVLAGIRLVYVNPYKTSRRCPNCGETHKAKDRKYVCECGFHAHRDLVGAINIAKNAFNSNKTGCAGGAKFAG

SEQ ID NO: 40513 - protein, 382 aa, unknown
  TnpB Polypeptide
MRAYKFRIYPSKTQEKEMNRHLWLSKELWNDILAFTKEIYNNYEKFPTKRTLRELVKQSGLFSQVGQELVDRLIDALHRKIEMKKKGEKGGFPRFKSFDRMNSLHYPQYETGFWLDEKLRVTPFGEIAIKKHREITGKIKTLILKRESSGKWFAVFCAETPAEIPKENKGEAVGIDLGLKTFATLSDGIKIKNPRYLEQYEDRLAFVQRKFSRKKKGSTSRKKAKLKVARLHEKVANTRADFLHKTSTDLVNNYSFIASEKLATKEMAEQRYGKQINDAGWSMFANMLAYKAEGAGCRVVFVDPKNTTQECSNCHQIVKKDLPERMHNCPFCGLSIDRDLNAACNILIRATEGHSGSNACNSLQKERDVAVATSMKQEAHTL

SEQ ID NO: 40514 - protein, 408 aa, Geitlerinema sp.
MHRKQALEILTQHQAEIENFGVKFLAIFGSVARDTAQPDSDVDILAPSAGSPALYAKREWRPGKPRRQSGGQTARSARLSLTRLLIALMKVVKLRIYPTKEQEVALAKAFGCCRLVWNRSLQLTTEAYRQTGKGISGYDLKKMLPQWKRELEWLGETYSQCLQSSVLNLSRAFVNFFEGRARYPRFKSKHKRQSLQYPQNVKLEGDKLHLPKIGEVYCRVHRWFEGTIKTVTVSRNTDGRYHASILIDDGSDKPEPNPDGKAVGIDMGLKHFTVTSNGKKYNNPRHLKKHERNLKRKQRKLSRKQQGSNSRQKARRLVARVHSKIANSRADFLHKLSRKIVNENPVIVVENLAVKNMVKNHSLAKAISDVGWGMFSTMLKYKAEGEGKVYLEVDRFFPSTHNPPNPPC

SEQ ID NO: 40515 - protein, 409 aa, Desulfosporosinus sp.
MVEVVVKIIRVLKTKFQTSQININRLFACNHTSAQIWNDCLSLAKEHFQRTGHWIDRGTLHLATKGQYPIHSQSIQGVFEKYLDARDNAHKAKLMGFTKIRYPYKHKKHFNTKWKKDGFRMGNNGKVELSLGLLNSKRQKPITVQIKKLPSGKLKEIELIYDRGLQLAITYDDGNSPNENDHVNIAAIDLEEIHTIASVCDNGQGVIITGRKLRSIKRFRNKKLKELQKKIAKCQKGSRQWKKYRRALTYILSKSDAQLMETLHKTTREFVNWCLENNVKEVVVGNVEGIERHTSPRKKKKKKKKKNKHKRSRKHNQKMSQWHFGRTTTYLYYKLAVEGISFQKVDESYTTQTCPVCGRRKKTSSRNYRCTCGYREHRDIHGAKNILSNYKYGVFREVYVEEPKYLRIA

SEQ ID NO: 40516 - protein, 392 aa, Gottschalkia sp.
MKKLKRAYKIEIKPTAEQKMKIHRTIGVCRYIYNFYIAHNKESYEKERKFINGMNFSKWLNNEYIPNNEDKKWIKEVSSKAVKQSIMNGDKAFKDFFKGKSKFPKFKKKKNQNVKVYFPKNNKTDWIVERHRIKVPTLGWVRLKEYGYISTNSIVKSGTISQKFDRYYVSILVEEAVKTNNTKYTEGIGIDLGLKDFAICSDKKIFKNINKTLRVKKIEKKLKREQRKLSRKYESLKLNSKDKKMKGGTAIRQNIQKQIVKVQKLHQRLTNIRTDYVNKIISEIVKQKPSYITIEDLNVSGMMKNKHLSKVIANQKFFEFKTKLISKAKENNIEIRIVSVFYPSSKTCSNCGTIKKDLRLSDRIYKCECGLEIDRDLNASINLKNAKKYKAA

SEQ ID NO: 40517 - protein, 423 aa, unknown
  TnpB Polypeptide
MLLAYKYRIYPTEADKILLAKHFGCCRFLYNHFLTYRKEEYQKGNKVSYYITQKELTKMKALEKYSWLNEVASQSLQMAIQQLDGAYKKFFRQQGGYPNFKSKHNSIQSCSFPQNIRLEGNKVFLPKFMKNGIKAKFHRNIPKEASIKQATITKKNNKYYISISFDDNLPTPKPIIAQSSIGLDVGINSLVATSKDVKIDNPRYTKKYARMLKLASRHLDRKQHSRKKGDTTPKSKRYLKQQAKVARIHEKIANSKSDYIHKVTNEITNQYDVICIENLNVKGMIKNHKLSKHIADVAWGELRRQLEYKSERKGKILIKVDRWLPSSQTCSSCLSLTGKKPLNIRKFTCPICGVVHDRDINAAKVIEYYGLLIFFTLGLQHNLSAGTVDYTRGEPSVGDGDSITIVAPSSHGSVKREALASLK

SEQ ID NO: 40518 - protein, 268 aa, unknown
  TnpB Polypeptide
MCCYINNQNFRINDDSISFPVIINGKSKRISVNTKISKIQKSIFSSSKLGTMRIVVKGHDLVAQIVYDAKEDAASSNDNVMGVDLGIKCPAVSYCPDGSIKFYGNGRKNKYIRRHYNNLRKRFQKAKKPKAVVKINNKEQRIMKDIDHKLSREIVNTAKAHDISVIKLERLQNIRSTTRTSRKNNHSLHTWSFYRLATFIEYKAKLAGIEVEYVDPAYTSQICPICGSVHHANDRNYTCRCGFHTHRDLLGAINICNSTEYIGNRYTA

SEQ ID NO: 40519 - protein, 309 aa, Cyanobacteria sp.
MCDWLETSRNVWNYALGERKDWYKSRSCRINACSLKGEYVIPANAGRPTFASQCKALTQAKKTNPDLRAVPSAVLQQVLKRLEHAFTSMWERGFGFPRFKKSGQFRSLTFPQLAANPIQGLRIKIPKVGLVKARWSRPIPDGFVVKQAQVVRKASGWYVMLTLQCDVDVPSPTARGNAIGLDIGLQSLVATSDNELIPAPKFFVRLQRKLRLLQQRASRKQRGSNNQNQALKKVAKLHEHIANCRQDFFYKLAHKLCDRAGMIFVEDLNFIAWAKGLLSKHMLDASFGEFFRILEWVCWKRDVLFLVGF

SEQ ID NO: 40520 - protein, 378 aa, Nostoc sp.
MLTLEFKVYAKPNQFQSIDEAIRICQFIRNKSIRLWIDGGAKSWFDLSKYCAIWAKEFDFANKLGAMARQASAERAWAAISRFYDNLKKGIKGKKVGFPKFQKHCRSVEYKTNSWKLSDNRKSITFTDKCGIGKLKMKGTRDLNFYQPEQIKRVRLVKRSDGYYVQFCVSIDRTEQVAASGKTIGLDVGLKEFYTDSNGEMIPNPKFLRKGEVRLKRAGRLVSRKIKGGMNRRKARVILGKRHLKISRQRKDHAVKLARCVITSNDVVVYENLSVSNLVRNHCLAKSISDASWYQFRVFLEYFGKVFGRITIAVNPAYTSQECNNCGEVVKKSLSTRTHICQCGCEMDRDHNAAIIILNRGISTAGHVGTSVLDTVNA

SEQ ID NO: 40521 - protein, 279 aa, Dactylosporangium sp.
VIKMRSARAPGFIRGVSASSPGGQQRARSHVLSLWLSLCGRTATSCSSAPSTSCGARSTGGGCSATSDGETYNREFVTAGEAKRLERLQQSLSRSLRTHGRSRRSTRRDATRAKLGRLNARIRARRTDFAAQTAVQLVRNHEQVAVEDLHTRTMTASAKGTVAAPGRNVRQKAGLNRAILGKGWGRFLLRLEHSARYHGATVVKVNPAYTSQRCSRCNLVDADSRKSQAEFACTGCGHRDNADVNAAKNVLAAGLAVTGRGDLADRRSAKRQPPERRAA

SEQ ID NO: 40522 - protein, 463 aa, Nocardia sp.
MSVSSEVPLTFVVQAYRFALDPTADQVAMLRSHCGAQRFAFNWALRLISANLRQRAAERSYGIDETDLTPALGWSAYELRKRWNQAKGEIAPWWWENSKEAYSSGIANLSIALTNWSTSSSGDRRGPRVRFPRFKSRKTHASCRFTTGVIGLSTKDRRHVKLPRIGTVRTCESTRKLARRLDAGTARIRSATVSFRHGRWFVSFSVEVAKNSRKPDRTDGVVGVDLGVRHLAVLSEPVRGLTDSAGMLPNPKHLDRVRKKMRRLQRQAARRRLAGKSRPNTEPSKRLQSTNRRIARLYAKVTQARSESLHQLTATLASRFGTVVVEDLNVAGMLRNRRLSRSIADAGWGELRRQLSYKVRWNGGALVVADRWYPSSKTCSNPRCGVVKAKLHLSEREFRCEHCGLVIDRDRNAARNLARLAVRMAERPPRVAGRRKTSPLEIRVSPATRSAEDTATGTPRAVR

SEQ ID NO: 40523 - protein, 438 aa, Natronolimnobius sp.
VKIVVEEAFKYAAEPKDTSTAESAWHSIQTCREVYNHALTQEYKPAPEYDKPSYTTMQNKLPQWKREWTEWSDVYSKCLQMAVRRIKNGESILESLEERGFDVGELKWKAPRDYRSITYNQSGFDVDSNTGRTNHATVKLSKIGTFHLNFHRPLPDDATIKEVILKKQKTGDWTVSIMVEYDADYPEKPAVEDIDIKDTVGIDLGITKFIHDSDGRAFAPLDETGDRERIETRHQAVSRKERESNNWNKARQRLARAYERLSNKRLAYREALANAYTQRYDAVFLEDLNVGSMMQQNGNSRNVASMSWYETLKTFERFGDKNGCHVLLVPPEGTTKRCVQCGVETEKPLWVREHSCPSCGFETDRDQNAALEVQRLGVLELGVGEDKSGVGQELAESTPAETGTSAGLLRREVVPASAVVDTGTPICSRARSARSHGP

SEQ ID NO: 40524 - protein, 274 aa, Microcystis sp.
MLKAFKYRIYPTSEQSVLLAKSFGCARWFYNYALNLTSETYKQTGKGLSRDEIIKLLPSLKKEYEWLSEVPSQVLQQAALNLSSAFLNFFEGRAKYPNFKKKQNRQSIRFPQHCKLKNDVLVLPKIGEVHCKVSRQPEGNLKSVTVSVNPSGEYFASCLYDDGQDLPQKSSEGKAVGIDVGLTHFAITSDETKHGNPQYYRKYEQRLARRQKKLSRQQKGLVDENQVIVVENLAVRNMVKNQKLAKSISDAGWGQFCTMLKPTFRTSNTLQNVV

SEQ ID NO: 40525 - protein, 363 aa, unknown
  TnpB Polypeptide
  misc_feature (304)..(329): Xaa can be any naturally occurring amino acid
MAAMKKTEEYRFLKEADSIALQQSLRHLDMAFQNFFKQPKTGFPRFKSKKRNKNSYSTVCINGNITLSNGYLKLPKIGQVRLKQHRIIPDEYRLKSVTVSQTPSGKYYASILFEYEDQVQEKEMQKFLGLDFSMRELYRDSNGKEPAYPRYYRNAEKKLAREQRKLSKMQKGSNNRNKQRLKVAKLHEKVSNQRKDFLHKQSRQITNAYDCVCIEDLDMKAMSRSLNFGKSVSDNGWGMFTTFLKYKLEEQGKKLVRVGRFFASSQTCSVCGYKNAKMKNLALREWDCPQCGTHHDRDVNAAVXXXXXXXXXXXXXXXXXXXXXXXXXXGDSSLMLSTEVLSNENQTCRGWEAPFTGGGGCHE

SEQ ID NO: 40526 - protein, 387 aa, unknown
  TnpB Polypeptide
MVKAIKVMLIPNNVQKTKMFQYAGASRFAYNWALAREKENYEKGGKFISDSELRKEFTKLRHSDEYAWLLNISNNVTKQAIKDACTAYKNFFKGLQKFPRFKSRKRSMPKFYQDNVKIQFSNTHVKFEGFSSSRKANKQKRNWVRLAEHGRIPTDAKYRNPRISFDGVNWWISVCVEFPDCRETLNEDGVGIDLGIKDLAVCSDAVKYKNINKSQKVKKLEKQKRRLQRSISRSYEKNKKGESYCKTNNVIKKEKLLLKRNHRLTNIRKNYLNQTISEIVNRKPRFICIEDLNVSGMMKNRHLSKAVQEQGFFWFRKQLEYKCSDKGIQLIVADRFYPSSKLCSCCGNIKKDLKLSDREYRCECGNRIDRDFQASINLKAYGEQFAS

SEQ ID NO: 40527 - protein, 407 aa, unknown
  TnpB Polypeptide
MWLLSCTVFAVKSVWQHYISSSEVLGMLELFRKMVNESLRIGLANEVSSLRKLSLLSYNQLAQYDSPSCYKLCAISRAAGILAARKRSVRRGYATRTPYAIRQQLVSCYGFRIESGGLKIPISRGKRFRIPLTKHTSEVISQQGAKVRSFTLTRNRLSLCIARDVPTVNRASTVGVDRNLRNLTVGNDVQTRQYDLSKCVRIGNTTVRIIASFTRDDDRIRTAIASRYGQRRTARVGHLLHNATKTVVALAVRRKTAIVLENIEGIRSLYRKGNGQGRRYRGRMNGWSFGEAQRQIEYKARWVGLSVICLSRRETRGSSLSCPRCGERLQSDKRLVRKLWCGKCRVVMDRDMVAAINLSRRGRVRFARSRPLIPLEAQGGAVEAMKGNPTTVIPGVDAPKLTHETKS

SEQ ID NO: 40528 - protein, 398 aa, Moraxella sp.
MKTLKLRIKDKHATQLNRLSSSVNFVWNYVNDLGYKYLQRTGKFFSAYDLNEYTKGSGELLGLHSQTIQAINETHTKSRKQFKKAKLNWRTNNPNSKRKSLGWLPFKKSAIKHLATRQSGKKALKSTLQPSLAKGQKLILDLWDSYNLSLYQINTLEIVQDSRHRWYACITVKDYPKTQCGAGSVGIDLGLKDSATTSNGDKLQIKQTLKYAKALAIAQRAKNKQRVKAIHAKIKNTRLDLIHKFTTGLIKQNALIVVGDVKSNQFNSKKGKLAKSVYDAGWFELKRQLDYKCKYAGCQLEIVNESYTTQTCSCCGDMSSSPKGRAGLRIREWTCAKCSTWHDSDLMPLRTFLRPSLTVWEQESPNDRAGRKSSVSILGQIYWLFVRHWRSFSSVISQ

SEQ ID NO: 40529 - protein, 459 aa, Actinoplanes sp.
VKTIQAYRFALDLNPRQEREVLAHAGAARVAHNWALAKVKAVMEQRTAERSYGVPEQLLTPSLSWSLAGLRKAWNTAKPEVAPWWGEVSKEAFNTGLDALARGLKNWADSRTGKRAGRRVGFPRFKSRRRSTASVRFTTGAIRVEPDRMHVVLPRLGRLKLHESARKLARRLDNATARIMSATVRRDAARWHVSFTVEVERAQLSPARPGSIVGVDVGIKHLAVLSTGELVANPRHLITALQRMRMLARALSRKSGPDRRTGRRPSKRWQRAAARLGRAHAHVSNLRRDDLHKLTTRLAAEHGTVVVEDLNVTGMLANRKLARHIADAGFAEIRRQLAYKTGWNGGRLLVADRWYPSSKTCSACGAVKTKLALNERVYHCQACGLVIDRDLNAALNLATLAAEFDTAGSGSVAGRGADQKTRVRGQVAVKRQPGTAPAGQTGTAPPQGGTANHALTREH

SEQ ID NO: 40530 - protein, 563 aa, unknown
  TnpB Polypeptide
LRRGALRLLEESFGEDASVIVDMAAPAAPFGRHLSRYYNQSLQPQYNRALLTPAAGSYTVRKIITPCAYRGLTHTLIKTPFAPLATRLKADAFQPLTVASSSVLVPPRPCYAPFPTNVKKRKMNAMVQKKTALSDGEHYRAYKVRLHPTPEQAEVLRTWMASKRLFYNQTVAEINNFRYADVSRDQWPYTVVRPWVRDIVTNDHPWTEEINQQITANSTAAAWEAFETNLAKQRVNPNHRFRMQFQSLRCLDITPTEVINCGVPGPRSQGLFKGFLPAASLRKVGGTRADFECRFGGGMPGTIRATDSSVVVIELLAMKNTPFSPLILWEKRTHRWYLILRRVVTRSPDTRPAADREVLALDPGARKFAAFYRPDGTHGELLRGADSYIQKQCRKADLERSRTDTAANHDQWHRHRGRMLRTFARIRNWTRNAHYEAIKSIFTLADFIVAPIFESQRMVRRAERVFGNDTARRLYTWSHYGFSQRLYSKVQTTTNKQMAFTREPGTSKTCDRCGAWNAALGGSETFTCRACAYEADRDHHASRGNLLAALGAAMNVGPDGVER

SEQ ID NO: 40531 - protein, 627 aa, unknown
  TnpB Polypeptide
VAKTQMLSFPIRLPDAMQAEALRLLDASRIAINQIITDLWPQLDLFAADRSGLAWKQVETHLLKRSGHGNRQERCEMEQAGRILRAQASRKQVFHTILPLLSEGLIRPAEGQRKARKDHRQIKEQVRALRAQLQEAGEDADAFMAMTNVLEQACNWYLQTEAFPTTYEELQPAPVLAKGQLTFAGDDGMQSGQTYRAQIEVSHVCEVASRKEHKRATLMLKLRTPNEEGHWAWGEWSQAIPLPETVCTYLWQGAKPQAPTLREIRSDDGRFVVVLDVILEVTAKYVSPLEQESRAVGFDWGIRSLITVSVLEKSEGDEPYRQVSRPVFLDTGGIDGRQARLRREIDRLKACREHYDTLISQALAAHAEQHTPLPTDFPRWKGRVSAYEARIKQCWKKYERRNRELAHLAANLLILLALVYDCRLICGENLATLKTEGRGRGVRGRFRNWRNNTTVRGELWRVLKYKCHLLGIRARQVEPRGTTHTCPRCGKAAKTYLSPATSDRQKALKWAPWLCCSDPVCGWNGARDYAASLNIARLGLAFLLTYHQTRRYVSYRVTSEEVKPASYTGAGATLLLPSQGITPRPLEGKHINYAGWSYSIALRTSQPTAILSVLSASQLRKHVLSSA

SEQ ID NO: 40532 - protein, 404 aa, unknown
  TnpB Polypeptide
MKAFKGVKFAYNPTPRTLQLLSTFRDMVNDAIRICLHEKLRGRFELRNRIYREFRERYGVLSCFPYSVAEVAWSIVKKHKRWHRKPYAKRLMLKIEAADFSLNYSILSLPFRKGERILVPLSYGEYQRSFLTDKTLKRGSVTVTESSVVIAFSKELPTNGPLRSVGYDLNEKSVVGSDGTTHDLSGVARLHTLYRVKRSKSYERHPLDRRLRKKFASSRREKERVSQALHRVSTLIVEKARAKKEAIVLERLKGIRYAHQKGNGEGKAKRRRIALWPFRQLQSYIDYKAKWAGVLVEYVSPSYTSKKCNVCGSINMKLKVTDRSWLCPCGAELDRDLNAAINIERRGKIRCLGEAHPGARDTDEAMKGNETTMAPILRAEAPKPSLREVQQTCQSHKSTRPAFG

SEQ ID NO: 40533 - protein, 543 aa, Succinivibrio sp.
MQNKQNIEQDFDKKLKAFHRRSSRHVLVLETNMSHKDKCKVFHYADLIRKAGNELVAIMNNHLKQLCKTKKYKQLKSLYAKYYKAKDHAKCKHIALQLNELYESYNLTKRYCVKAMIPIGKKCHIDAVFALTKAEDVWKGVEKCLFKNGRILHFSKYNELPVIRAKQDIRGIVIKNEDDKLQFKFNGNTFGVAIKDDFEKDEVNSILEFMYEKDRIEKEAIDTLEKSNTCISTYRPCFASLVCKTIRNKLRVYVHITLEGEAKPKYDKLGNLKHTLGTGKVGCDIGTQSIAYTTDNKLALKNLAQRGSSIIENERKERLILRALDRSRRATNPNNYNDDGTFKKGRKTWKYSARYQKLKAKFIELSRKNAVNRHLAINQEVNYLRSLGDVFITETKNAKALQKRALETTVNANGKINRKKRFGRSIKNRCPGYFQAQVKRKFTQTCGTYIEVPQDYRASQYDHTVDEYIKKKLSDRMFKLTDGSRVQRDLYSSFLLYNIDLKARKIDRTKCIESFNDFLLKQQDLITYIKVNKIKVANSGIKL

SEQ ID NO: 40534 - protein, 286 aa, Prochloron sp.
VKFRSRKDLIQSCFIPKPAISDKGIYHTKLDKLAYSQKLPDHVCDSRLMSNNGNYYLCVAHKVAALPAENQGRVVALDPGIRTFVTFFSETSVGKIGHSNFSRIQRKCQHLDNLKSKISKANGGQKRRMRKAARRMVIKIQNLISELHHKTARFLVDNFDVILLPTFETSQMTKKGSRKIRSKTVRNMLNFAHYRFKEFLKHKAQETGKVVVDVCEAYTSKTVSWTGELVNIGGSKIIKSKVDGRTMDRDINGARGIFLRALGDTPWLRNQLALVSQGQLLADFGS

SEQ ID NO: 40535 - protein, 389 aa, unknown
  TnpB Polypeptide
MKNKIYKAYKFRIYPTKTQVDFLNKQFGAVRFIYNYFLNQRDTQFKETGKSDNYYAQTKTLKLMKGQKEFKWLKEINSQTCQQALQCLDAAYLKFFRKETAFPRFKKKKNHQSFCVPQHFKILEKGIIIPKLKSQIKCKFHREIIGEVKSLTISKTPIGKYFVSILVEQENKYKQTSEGKIGIDLGIKDFVTLSSGTKYSFSVSKKTKKLKKLQHYYSKKQKNSKRKEKLRLKIAKIYEKITNSRLDFQHKLSNKLTNEYQTICLESLKIKNMMKNHKLAKAIGEASWFSFVNMLQYKGKWKGCDIIQIDQFYPSSKTCSVCNWKKEDLKLSDRSWICPNCGTVHDRDINAAKNILTYGLSLKSISSGTEDNKRREVKKSSKKRLKVTS

SEQ ID NO: 40536 - protein, 356 aa, unknown
  TnpB Polypeptide
MLRSIPIKLKVNDLIIKTIELYKEGLQHCVDVAWGMKIRNNVELHPFVYKDLRKMGLPSQLSIACIKQSCGMVKKARSNPIINKVSIRYNAPRSFSFKNNVLSISTIQGRVKIPIKIPDYALKYFDWEIRESLLTQNNGKYYFTFTFLKEAPNNSQHSNRILGVDLGINKIAVTSENKFYGQEIKSLRKKRDRFVSELQSKGTRASRRKLKKFSGNWNRFMRWTNHNISKSIISELKEGDVVVMEDLGGIRISARYNKWVHKWAFRQLQSFIEYKALEKGIRVVYINPAYTSKECNRCHSRNTIRHSGFFECRDCGHSLDSDINGARNIAQRYTRNMCRAVVNTPILTSDDAVLSV

SEQ ID NO: 40537 - protein, 212 aa, Okeania sp.
VSEVSNIPLQQSLNDLNQAYQNFFTSTKGKRKGRPVKPPRFKIRKSKQTARFTKGGFKVGQHKVYLAKIGKLKIVWSRKPPNVPSSVTVIKDVGANGRSPLHRYFLSFVVETCAKVLPKTDNSVGIDLGIKTFATLSNGQKIDAPKPLKKRIKKYRKLSKSLSNKTQGSKRYEKARLRVAKFNAKLKDTRTDFLHKLSTKIIRENQTIVLEV

SEQ ID NO: 40538 - protein, 416 aa, unknown
  TnpB Polypeptide
MYLTVKQQIKHLSKDDYLVIKELCHIAKNLANEAVYNIRQYFFIEGKYLNYEKNYVLLKNSENYKLLNSNMAQQILKEVDGSFKSFFSLLKLAKKGKYSFNSIKLPKYLPKDGFTTLVIGFVRLNGNKLTLPYSNAYKKNHKPVEITIPPVLIDKKVKEIRIIPKANARFFEIQYIYEVDCIQRNLDKNNALALDLGINNLVTGVTNTGKTFIIDGRKLKSINQWFNKRNAYLQSIKDKQKFGKNSTVRQKSLARKRNNRVNDYLCKTAKMIINYCIINNIGILVVGYNETFQRNTNIGKVNNQNFVNIPYGKLRDKLSYLCNLNHIVFVEQEESYTSKASFFDNDEIPMYNSDNPQAYIFSGKRVHRGLYQTASGKVFNADVNGALNILKKSKVVCMNTLYCSGEVDTPVRIRVC

SEQ ID NO: 40539 - protein, 379 aa, unknown
  TnpB Polypeptide
MLRTYKYRLYPTPKQAQALSAILQVGCWLYNGALHFRRKRWQESRHSVTYFEQAAMWRDWRNEEPGENPLRLLNMTAGQQVLRRLDSAFREFFQGKRGYPRFKKSSRFNSINYKPGDGFRIKGRQVYVQNAGLITVRWHRPLPAGKLKNIILLRRASGWYACFQVELPEPEPERHPGPAVGIDMGIAHALTLSDGTTFDSPKHLQQSLARLRRLQRKVARRQKGSNRRRQAIHQLAKQQEHIANQRRDWWHKVTRQLVDAYGLIVLEDLKLNFMLQNGNLARSAHDVSLGMFRQLLAYKAIEAGCEIVAVKPAYTSQTCSGCGCLVPKKLSVRTHHCPDCGLILDRDINAARNILSAGTRRSGVNVDGCIVRSPRSSPL

SEQ ID NO: 40540 - protein, 501 aa, Erysipelotrichaceae sp.
VLNGEIEEDLIHLMYEIADEKGFVIRHVEIGLDDHVHMMISAPPKISVSTIVKCLKGTSAFRLFRMHPELKQFYWKKEERHLWSPSYFVESIGASNEQAVAKYIDDQRKRRRHMPKIKKGFVIRLYPNQAQMQQIRRTAGCSRWLYNQILAMNDSRKELNQGAPFLFDRKLNYLLPCLKEEYPWLKEVDSTSLTGVVDNISNAYKRWLSGKSKRPKFKKKSAYQQSYVSKCVNNNIVLIDANHIKLPKLGVIRFKAGELPHGRICSATVSLKASGKVCASVLCEYDEVELPKTGEKVGIDLGLKDLAILSDGTKYELPRWDKESAARLHYWQRIASRRLLRAKEAMKEDDSLRLTDCKNYQRARQMVAKICEHIANQRRDYLEKLSTMLVTRYDVIVVENLIVRNMMHNHKLAGAISNASWGMFAQMLAYKCAFYGKQLITVDPAYTSQACSACGCVNGRLGYNAYGWLKVREWTCPVCEAHHDRDINAAINILNAGMIAA

SEQ ID NO: 40541 - protein, 393 aa, unknown
  TnpB Polypeptide
MSRYRIQPTQTQESTLLRHCADARYVWNLCVEQESWWRAGRDPMPGFTERCRQLTAAREANPWLAEGSVIVQQQAIRDHAQAMANFFAGTHRRPTWRKAGRDEGFRIVALKPGDVRRLSRNRGAVRVPKAGWVRFRWSRPVPADAKSCRITRDRAGRWHVAFAVIPDPVPGPVTGEVVGIDRGVAVSAALSTGELLHVPGLSGRERKRLGRLQRRLARARKGSQRRGRVKHAASRLRAREADRRKDWAGKTSTRLARQFDVIRVENLDITGMTRSARGSLQRPGRNIRAKAGLNRGILGSCWGLLVRRLQDKAPGRVEKVNHAYTSQRCSACGQVDAKSRKSQAVFACTACGYACHADVNAARNIAAGHAVTARGRTGSPERVNREPQLVLLP

SEQ ID NO: 40542 - protein, 375 aa, unknown
  TnpB Polypeptide
MLKAIKIRIYPTVEQVDFINKQLGCCRFVYNNCLAFRKDSYQNEHISVSSSEAVKHITVLKKDNEWLKDVHSKVLQQSVRDMNQAYDNFFKLHKGFPKFKSKHDNRQSCRFPKDAFIGVRGNRIDLIKVLKDIHFKCSRNDERYLNRNQDKVKSITLNKEPNGKFYLSVLIDKPLRQVPQSSSMVGLDLGIKDFAVTSDGQVIENFHFKKNEESRLKRLQRQISKKVVGSKNREKARLRFAKLNEKIRNRKLNFLHDVTNHLIDENQVIVMEDLNVKGMVRNHKLAESISEVNWGEFRRILTYKAAWHGRRLVFIDRFYPSSKRCNHCGYIYKELTLKDRQWVCPECGSLIDRDYNAALNILEEGERIIGLSSPE

SEQ ID NO: 40543 - protein, 314 aa, unknown
  TnpB Polypeptide
LIIYVKLGIIFSIQICLIIRNQYKKKKDIESNKKIALRGVRIKGTWLFLPKSQKSKPEYRFTKIKMAESLRFNGRIADDFSVSVENNKWYVSIIVETPLEEKQSTFNQSTGIDVNVGSIDYLKKDGQNKEYDKFYLLTKSLLRQYDKIKFYSRLISKKRNKNPYYKYSKSYKEAITKLNNAYTKAYNIQEANLNNIVKYFFDNYNRIVIEDLDVNSMKMNKRLCKSLHRNAFGRFKQKMVNKAEEYNVEFILANRYFPSTQTCSECGHVKTGDEKLFLWGDKYGNDHNTYVCYNCGTIQDRTENAILNLNHYGK

SEQ ID NO: 40544 - protein, 410 aa, unknown
  TnpB Polypeptide
MAIRTEQIDVSFNLKLQKDLQEHEIICSYCENNMIKSFKVRLEPNNKQNSLLFGCAGTGRWAYNFALAKIQEHYKETGKFLKDGEIRKQITQLKKTDEFKWLNKYSASTISQHVKDADNAYKKFFKGLSNFPKFKSKKKSKPSFYSRYDRISFTLTHVQLEKIGKIKLSEYNRIPIGKTIKYMNPRVTFDGLNWYLSIAVELENNINPILINEKLGIDVGVKDLAIVSNGNVYKNINKSKTIKKLEKKLKRLQRKVSKKYLMNKQDKKFIKTNNIKKLEFEIQKVYKRLSNIRTDYIQKVSTEIVKFKPSRIVMETLNIKDMMKNRHLSKAIQQQKLYEFKILLKYKSIRDGIEFIEADRWYPSSKTCSECGYKKLKLSLGEREFICESCGCIIDRDLNAAVNLSQYEIA

SEQ ID NO: 40545 - protein, 466 aa, Trueperaceae sp.
VRTEKWRLGVTPQQRSFARATTGEYRAYCHALTGVVMTHWPEIAMAKSRCAAVERLTHATKLNPAPRYGYFNRRFHKFPSYLRRAAIEFVLGQVSSFLTRYGAWQNGQRVHQSARPPRLEVSADAHPSLYRGQMLKWHDGYAAVEVKLFDGREWLWHLVSVRKRGKRDPNWSKLLNPALLALGRKTWLAVPHQFEKPASPRWEDPTADKALGVDLGINKAATVAVVCRDGTVTHRGFIHPGVDMDRRDKTLDAIRKRASLTGVVGKGFCGGLYRRAARHNTQIARFVARGIMRAAVAHGVQVIVLEDLKGFNPRGGRYRSTLRKRFHNWLHRQVHDVVKSQAEEVGIRVVTIHPGGTSTYAFDGSGYVKRDTDNAALATFATGKRYDADLNAAYNIAAKHHYYRYWRHKLGLDKPPSVGGQGNRDEARTGRSPGRAPRTPVTLSTLWACARMMAEGEAPPTLALAS

SEQ ID NO: 40546 - protein, 439 aa, unknown
  TnpB Polypeptide
MIVLEFKLAGADRQYAALDEAIRTMQFIRNKCVRKWCDERGVKPYDLNKYCAVLAREYDFAGKLNSQARQAAAERAAAAINRFYDKCRAKTPGPKGYPRFQRDGRSVEYKTTGWTLDAARRVITFTDGFKAGAFRLKGTRDLGGYALAQIKRVRVVKRADGYYSQFCIDAKRRVATAATGRAVGIDLGLTHFYTDSEGATVENPRHLRRSVKAVKRLQRRVSSKVKGSQNRAKARGRLGRKHLKVSRQRRDFAVKAARALVMSHDVIAYEDLRVAHMVKNRRLAKSISDAGWRAFVTWLDYLAHVYGKIVVAVPPAYTSQDCSECGERVTKALSERTHICPHCTAVLDRDHNAARNILALGLRQLEETTAGHAGSHAWGQSALYPNAGNCVGHGCWMSQESQGVSRVECQSRRLRANPAPLLPLEARQELGRRGVTMPL

SEQ ID NO: 40547 - protein, 463 aa, unknown
  TnpB Polypeptide
MLMGIRFQALPTPEQRLTLSQWIGCARVIWNAKCDEHRYYTTFARKYLPVGTYAPVDQKYSQFKDKELTPWLSQCPSQILRNSAVNWYKTYNNFIKGKCGKPRRKKKHDNISIHLTRELFEFQLCPDGVTRLFIGTKSNNIGFLVLKTHRKFKEPKSIRVKKKNGRYWVSFCYDDPIDESELKTKQEHLDVLQTRTTQELENMVEAIDRGTCCPAQTTDASYDFSPEQKKSLQREERKRKRLQKAMHRGEKGSNRRQKKKWRIARSYEKQANIREDFNHKTSKKLVKNASVLIFEDLKTKQMTKRPKAKVDEQTGRFLPNGAKRKAGLNKAILSVGWHQLEKFTEYKAHRASKVVFKVSAYQSSQECADCGHTHPDNRKRRELFVCLGCGHRENADVNAAKVLKKRAINLIQDSGTELSQRGVLRRDTGRGANEKTQTAEAVGAHGCESSKKKVAHATGSSLL

SEQ ID NO: 40548 - protein, 439 aa, unknown
  TnpB Polypeptide
MIKVAHGSAWFKPEVEARIMELMKFQSSALRSAYQAITKHKLKFNDIKNYVKKNYMSSLNQRFISDACSMASLYAVNEGVCFGGKKNWKEMTAGDLSKDEWQSIRNSQLYSQGDRTKSGNPNIRIVGDRILVNDPSGRGKWLEGKVYIPEKFNPDFKCYSVRLLMKKGKFRIVLSWTEESVVLPVREGAVGVDCNPDGVAMVDVSATGTLLEHRYIRKQRIQFASDNKRDYDTGLLAKEVVQYAYDKKKPIVLEKLEFKKKGKKSYKKFNRMKSNFIYRKMLNAIKQRAVKIGVPVLEILPAFTSILGQLKYQKMYSLNRHTSAGLVIARRGLGLLERESFTVEPSKTKKNTLKLEARDVSIALTCKAFSWMQKTFLYPKKSTLTASSLELGLRPSIDGSIGELPMGESQPIIGRLGLINNKQEYERTPLSLGKFVQVS

SEQ ID NO: 40549 - protein, 405 aa, unknown
  TnpB Polypeptide
MDIQRTITIKLPDDADLRATLSAFRDVQNAVTGDAFNGGALVGAVDLQRQVYGRVKGTLNSQMTITALRLVVGAYASVARNRTRRLKAEERRKKRFLAKGWTYKPCTIKPMGVCRFERMAAMFLVGVRGRDADFRKDGTLAIWTVAGRKRLPYTIIPDHKSLFDAATEINAVTVIERGGHLYGRVALTLDAPEPKGVEPVGIDLNETNALVAVDADGRELFISGLATKVRNRRTMQATRCVQKKVVAKKAEGKSGRSAQRVLKRLSGRRSRRTHDFARVTAKTLVAWVPKDAVLVFEDVQMQQPEKGVTGGVALRRRLSLWQHDAIRQATISKAEMAGTAIAYVNPAYTSKNCSRCGLRGVRTRHRFRCPHCGQVMHADVNAAINIRNRFVQSRLDGPPSVGPVA

SEQ ID NO: 40550 - protein, 465 aa, unknown
  TnpB Polypeptide
VEIRRSYRYALRPTGTQERALLAQLDAHRLLYNCALDHRRTAYRMAGVSITYYDQARELGAIRADDPQQKACNHSSQQHTLRRLDRAFQAFFRRIKAGQEPGFPRFRGRTRFRTLTFTHGDGATFTETGMIPLRHPFTATVKIQGVGAIPLVYHRRLGEREGGQMADPVRIGTVEIIRMGDHWEVVFSCTLTIPTPKDAYPTLPATGVDVGLDYYVSLADGEQVPNPRFLRRGMGEVKRLQRKLDRARKERTAEKRATKKRDAETATAKAAGKPIPPTPPVEVWASKRGKKRPKRTAERRARILSRTAARRHARISNQRAFFQWHLARSLISRFGLIAVEVLKRRNMARRPKKTVDDVKAKETGQPVYAPNGGAAKSGLNKSIYDAAWGLFVQRLGSKAEEAGCTIVGVRAAGTSQECPRCARKTSKALDERWHTCPCGCSLPRDVAAAQVIRARGLASVAASAA

SEQ ID NO: 40551 - protein, 273 aa, unknown
  TnpB Polypeptide
MRLGEFYLCVPRAAEMRRDNQAPPRSTVVALDPGLRTFQTTYSPDGRTLEFGRDSKVNPTGKKNKKGNGGISRIMRLCIHLDKLQSKWSQPDVRHRKRYTMKRAGARIRKKIQDLVLDIHHKTAKFLCENYQVVLVPLFETKNMVCRLKERLGKRNGSKTARMMMTWSHYRFRQILLSKAKEYPWCQVLVVNEAYTSKTCGQCGFIHQKLGSDKVFKCPRCKVEMDRDVNGARNILLRFLSTDTRSSGFRAQIFNATPPGVLGACTRLPPRGV

SEQ ID NO: 40552 - protein, 397 aa, unknown
  TnpB Polypeptide
MKVINKTYRFRIFPTAKQEQNLARHFGHSRFVYNYFLNQRKEQYQSDKKSDNYYKQAANLTKLKKEEGTEWLKEVNSQTLQFALKSLDSAYTNFFRGNAMFPRFKSRRNKNSFTVPQFGRIDDGKLNIPKFKEGIKIKMHRELKGKIGKMSITRTPTGKYFVSIFTEQEIEQLPKTDKALGIDLGLKDFVITSDNKKFKNNRYTKQYARELKKAQQHLSRKQKGSNGFEKQKLKVAKIHEKIANSRLDTLHKVSYKLVRDNQLIAIEDLNVKGMIKNRKLSKHIADASWGNFVNLLQYKADWYGREVVKINRWYPSSKTCNECGWIYQDLNLSIREWTCNNGHVLDRDENAAKNILKEGLKIHRLGRSITKVEEKSDYLGSTFDETRSPSIAFGVGG

SEQ ID NO: 40553 - protein, 367 aa, Moraxella sp.
MKTLKLRIKDKHTNQLNCLSGLVNFVWNYVNDLGYKYLQRTGKFLSAYDLNDYTKGSGELLGLHSQTIQAINETHAKSRKQFKKAKLKWRTNRPTAKRKSLGWIPFKKSAIKHLATRQSGKKGLKSTLQLSLAKGQKLVIDLWDSDNLSLYQINTCEIVQDSRHRWYACITVKNHPKTTCGTGSVGIDLGLKDSATTSNGDKLHIKQTLKYAKELAIAQRAGKNKRVQAIHAKIKNTRLELIHKFTTQLVKDNALIVVGDVKTTQFNSKKGKLAKSVYDAGWFELKRQLIYKCKNAGCRFVIVSERYTTQTCSCCGDMSSSPKGRAGLRIREWTCAKCGTRHDRDINASRNILAVGLDRLAVGIPKR

SEQ ID NO: 40554 - protein, 413 aa, Methylophaga sp.
MQRLQVFKYELMPDGEQQRNMRRFAGSCRFVFNKALALQQAHYAESKKKLSYADLCKQLTEWRKSSETQWLSETHSQPLQQTLKDLERAYKNFFEKRADFPRFKKKGQSDNFRYPQGCKLDQGNSRIFLPKLGWVRYRNSREVLGIVKNVTVSGKQGKWYVSIQTEREVEAPIHPSTAIVGIDMGIARFATLSDGSYFAPLNSFKRQEKALVNAQRAMSRKKKFSNNWKKAKAKVQKIHAHIGNARRDYLHKATTTVSQNHAMVCIEDLQVRNMSKSASGTTETPGRNVKAKSGLNKAILDQGWYEFRRQLDYKLAWNGGQLVAVPPQNTSRKCPCCGHVAKENRRTQARFRCVACGFEENADVVGAINILRAGHARCACEVSDAVMSPAAGTHRSNSLRRDAGMSAVGISGL

SEQ ID NO: 40555 - protein, 484 aa, unknown
  TnpB Polypeptide
MYSICMSSTLQSGARFRAYPDRGVASLLRRWVGCQRAIYNGKVEEDRLFAAQRRLELASGKADVKTPLDQRYAQFKDRELTRWLYEVPSQILRNGAVRWMSAKQRQLKGLGQAPRRRCRKDFNSVVITQELFRFVRSRTGEMVIELGTKTNPVDVLPFKAHRAYGIANTIVVREVAGQWFVSLCYAHESAIVLREPHELAYELNGLDDGAIQQVTLGIDRNVRNNCIATSEGRQYRAEAIVLERMRRKEVGAKRYQRRIAHAKKGSAKRRKRVTRLARKKAYASRARKDFAHQVSHGLATSGAQFFVLEDLGIQGLTRAPKARRDEASGKWLANGARAKAGLNRSILQSCWGSIHHTLAYKAARRNKLVGLVPAAYTSQECSRCGHIHPENRQAARFVCQRCGFEAHADHNAALNIKARGIELLRGGEYASVKTRKRIAFRRRDERAQQPTERNTTGGRPAYACGGEGPHPAHRIERTQDRVAA

SEQ ID NO: 40556 - protein, 403 aa, unknown
  TnpB Polypeptide
MGDFRLLVNECLREILRTGVTSKGEISRYARTRALETRLTGTIGLAASEIACSLASGHRRRLSQGMECRIPYVRASFVRIPEKSFHFDPETGKLRLSLRRGEWTSLVVPVSDYHRAVLADPNRRVTQVHIGLRRVVFVFAQTVPTPYTPTSLVALDTNESSLDGVRVDPESASFVRLVYPEIRELQFRHMGRRQFLGRKKAHDRRLSRWLLGREGRRERNRIRSRLHTLTLTLIDQLAAHHSALALEDLTGLPPPRRRRVHGRPRVLASRSFRRRLSSWPRAELHRQLTYKAQDRGVPIIWVDPYLSSRTCPRCGEVSEHRRRVGTRFDCAKCGWSLDRQLNAGLNLGLTVLRTTAGLGGLRLDPDALPQDVVRPLSGSDERRPARVERTGREGERFRDTLSG

SEQ ID NO: 40557 - protein, 418 aa, Leptolyngbya sp.
MINMTWEFKLEPTAQQASEIERILDVCSKVWNFALRERKDWLNSRKCLVNACSLHSEYIMAPDEPFPGYHVQAKRLTAAKKEFAELKTVNAQVLQQVLRKLDQAWDVWRERRAGLPRFKRHGQMRSFVFPQMLKSTIVSDDGIKLPALGWVKVRWSREIPACFTIKQARIVRKASGYFVMLSLQADVNVPDPMPHGHSLGIDVGLEYFLSTSDGLQVKRPRFFNELHRKLKLLQRRLKRKQKGSANWRKLQQKITRVHQRIADTRKDWHFKLAHRLCNQAGMIFVEDLDFRIMAKGMLGKHTLDAGLGQFANQILPWVCWKCGVYYGKVDAHGTSQECPDCGASVKKGLGIREHRCHVCGSVKPRDVAAAQVISTRGQRGIENACGVEVTGAQVTESSQLALKQEIFGAIRGISMHNL

SEQ ID NO: 40558 - protein, 384 aa, unknown
  TnpB Polypeptide
MPSAASAQRQGQVIAKQFKSFAKAAVEYSKHSEKFQGKPRLPGYRKKYRTFYVGRNGYQIRDGQLTITGGKDIGFSPIRIVCCKHQEFNAKAEEAVTGDLRIIPMGNTFIVELTYRVGREESNNPKSVSLNPNEALCCDLGIDNFATFVSTKPGVRPFLVKGKILKSINQRYNKQVAELKSKKHYEHIRIKGVKRYWQLQDLMHKASRLAVNFCLAHDLGRIVIGTNRNWKQRVSLGRRNNQNFVMLPHAKFIEMVRYKAEEYGIQVTVREESYTSKASAIDFDEIPDFDPKGRNPTTSFSGRRLKRGLYQSSKRHLINADINGAANIGRKELGDEWLKKLLELDGGVFVDTPAVVRNLHECVGVRQLLKMGARSHETVHVSAR

SEQ ID NO: 40559 - protein, 394 aa, unknown
  TnpB Polypeptide
VEEVVRRAYKFQLRPTTKQVQALEAMLEDHRQLYNAALEHRKTAYAKAKVSVKYGVQSADLKYIRREDPEGQGRWSFCSQQATLRRLDKAFQAFFRRVKAGEKPGYPRFKGWGWFDTVESPEDGDGCRWDSVPGRTRVRFQGVGHVKVNQHREVRGAVKTVSLKREGRRWYVVLSCDNVPEELLPQTGAVTGIDLGVASFLTTSEGVLVENPRYFKASADKLAAAQRELARKKRGSNRRRKARDRVVATHRKIRNQRLDFAHKTALKLVRDHDMICHEALKINNMTRSASGTLEAPGTNVAAKAGLNRSILDAGWGVFLSILRAKAESAGRAVVEVSPRHTSQKCSRCGHIAAGNRVTQAEFRCLSCGLSMHADVNAAENILRAGLALQVATAA

SEQ ID NO: 40560 - protein, 406 aa, unknown
  TnpB Polypeptide
LRYHQSPRETPAFRHGEVRGRFSIVLDIALNSSILDNMKLVANLKLKPTKEQEQMLKATLERCNEACNWLSGQAWEAKIFRQYDLHKLCYHELRAKFEITAQVAVRCIAKVADSYKVDQKTQRTFRKHSAQPYDDRILRFCADDVVSIWLVSGREKIAYACGDHQRELLKYRKGEVDLMFVRGKWYLAAVCDFDDPKLLTPNGVLGVDFGIVSIATDSIGNQYSGAKVEANRQRYAKRRATLQRVGTRAAKSRLRKMSGKQQRFQKHENHCISKAIVSTAERSCLGIALEDLTHIRSQVKARKKQRNRLHNWGFGQLRDFVEYKAKRAGVPVTIVDPRNTSRTCAECGHIDKRNRKTQPEFLCVACGHSSNADDNAARNISGKGSFVNLPMFAHTFAPCAVESPRL

SEQ ID NO: 40561 - protein, 394 aa, Cyanothece sp.
MLKVVKVRLYPNTEQQQLLEQSFGNVRWLWNYCLNLMNQTYLDTGKGLSGYEVKKLIPSLKKEHEWLTLTYSQCLQQTCLNLGVAFNNFFERRAKYPRFKSKHGKQSIQYPQNVKVLDCGLNLPKIGAVKAVIHRPIEDKIKTVTVSKNSCNQYFASILFEDGKETPLIGGTEGGEGKAVGIDVGLTHFCITSDGSKFDNPRFLTKHERNLKRKQQQLSRKQKGSNNRNKARKKVAKVHRKITNCREDFLHKLSRRIVDENQVIVTENLNVKGMMKNHFLAKAIAQVGWGMFMTMLKYKAENDGKTYQEVDRFFPSSKTCHVCLNQVGSLPLDIRHWTCENCQTKHDRDVNAAINLRDEGLRILTCGTRDKAYRQTVSRSNRGRKKSTTALVSG

SEQ ID NO: 40562 - protein, 270 aa, Cyanothece sp.
MKMSRPIPNGFLLKQIRVIKRASGYFVQLIYQLAVNVPETPIHGHPLGVDIGLDSYLATSDGELVKRPRFFNQLHGQLKSLQRRLKNKKKRSADVPSHSTCPRTKQGSNNWQKLQAKIARVHQKIHDTRKDWHFKLAHHLCDQAGMIFVEDINFKAWAKGLFGKHTLDAGFGQFFTVLSYVCWKRDVYFLKVDKDYTSQICPNCNTHTGKKNLSNRVHNCPNCGYQTNRDVAASQVIRNRGLNAVGQPVLENAFGDVLLGSIFDWLDKSL

SEQ ID NO: 40563 - protein, 401 aa, Cyanothece sp.
MFILEYKLKGKQHQYQAIDEAIHTVQFVRNKCLRYWEDNKGVGQKDIYKYTTELRSEYSFVKELNSTACQQACERTWTAILAFYNNCKINIPGKKGYPKYSKRTHSVEFKKSGWKLNRDAKKITFTDGKNIGELKLIGSRDLFYFQEWQIQRVRIVKRADGYFVQLLLKLDIRDITPSLEPTRKCVGLDMGLKYLYADSDNNMVEPPRYYRQAEKRLNKLNRRKSKKFKRGKKQSNNYIKARRQYAKGHLKVSRQREEFAKRLALRLIQSNDLIAYEDLKVKNLVHNKKLAKSINDAGWSKLRKWIEYFGVKYGRLTIAVNPAYTSQECFNCGQLIKKSLSVRTHICSCGYCEDRDTMAALNILKKATIGHIGSWSEDLNAWGDSTSILVGSNTCQDKLSQ

SEQ ID NO: 40564 - protein, 384 aa, Cyanothece sp.
MLKAYKYRIYPTNEQKDLLIKSMGCARWFYNYALNLTSQTYKDTGKGLSRNDIINLLPQLKKEYEWLTEPPSQVLQQVALDLSSAFLNFFEKRTKYPHFKKKHKKQSIRFPQGIKLDGDCLTLPKLKKVYCKVSRLPQGKLKSVTVSMTSTGQFYAACLYDDGIEKPESGSKGKAIGVDCGLTHFAITSDGSKHGNPKYYRKYEEKLAKKQKQLSRKQKGSSSRNRARIKVARVHEKIARCREDFLHKLSRNLVDENQVIVVENLAVKNMVKNHKLAKSISDAGWGMFCTMLKYKAENEGKTYIEVDRFFPSSKTCNVCLNQVGSLPLDIRNWTCKHCQTNHDRDINAAINIRDEGLRILAGGHLATASGVRVRPSKGTAFARR

SEQ ID NO: 40565 - protein, 383 aa, Cyanothece sp.
MGNKTYRFRLYPNQEQQQFLAKCFGCSRFVYNYFLRLTTDIYADCQKSLRYKEWAKLLTSLKKEFEWLNEVNSQALQQTLKNLETAYSRFFKGLAKFPRFKKRSNKQSFRVPQHFSITEESKLKLPKMTPIKMVIHREIEGEIKSVTITKTASGKYYASIVTELEISKAPLNGEKIGLDLGLKDFVITSKPEKFPNPRYFQRSLRRLKIRQRRLSRKVKDSNNRNKARVRVAKIHEKVANQRLDYQHKISLKLTNENQVISCEDLNIKGIVKNRKLAKQISDVAWGQFLTLLEYKGDIYGCEIKRVDRFFPSSKRCSNCGYIKEDLTLKDREWTCRECHAHHDRDINACWNLLQFSDGYIGQEVSESTPNQTVEMQCIKSVSS

SEQ ID NO: 40566 - protein, 383 aa, Cyanothece sp.
MSNKAYRFRLYPNQEQQQFLAKCFGCSRFVYNHFLRLTTDVYADGKKNLRYKEWAKLLTSLKKEFEWLKDVNSQALQQTLKDLETAYSRFFKGLAKFPQFKKRSNKQSFRIPQHFSLTEDRKLKLPKMSPIKMVIHREIEGEIKSVTISKTPSGKYYASIVTELDIPKAPLNGEKIGMDLGIKEFAITSKPEKFENPRYFQRSLRRLKIRQRRLSRRVKGSNNRNKARVRVAKIHEKVANQRLDYQHKISLKLTNENQVISCEDLNIKGMVKNRKLSRQISDVAWGQFLTLLEYKGDIYGCEIKPVKRCFPSSKRCSNCGYIKEDLTLKDREWTCPECHVHHDRDINACHNLLQFSDGYIGWEAPKSTPNQTVEMQCIKSVSS

SEQ ID NO: 40567 - protein, 391 aa, Cyanothece sp.
MTERAYRFRFYPTTEQENLLRRTMGCVRLVYNKALATRTEGWYERQERIGYEQTSSLLTQWKKQEDLEFLNEVSCVPLQQCLRHLQTAFTNFWGQRAKYPNFKKKRHGGSAEFTRSAFKWKDGKLFLAKCKEPLSIVWSRYLPQDCSPSTVTVKLDPSGRWFVSILVKDSTIKPLPKTGKKVGIDVGVSSLITTSVGEKVANPQQFKRLYKKLKRKQKALSRKTKGSNNRYKACLEVAKVHAQIKDSRTDFLHKLTTKLVRENDLIAIEDLAIRNMVTNRKLARSISDAAWGEFNGQLEYKCQWYGKELIKIDRYFPSSKRCGNCGHIIDKLPLNIRQWECPNCGVNHDRDINASQNILAAGLAVSVCGASVRPEESKSRKATALKQKPKL

SEQ ID NO: 40568 - protein, 401 aa, Cyanothece sp.; identical to SEQ ID NO: 3

SEQ ID NO: 40569 - protein, 373 aa, Verrucomicrobia sp.
MIRTYTMRLKPTKRQQVKLNDLLEHLCVLYNSALEHRKRSWEQLGKPVMYYDQQRALTDFRGKSLEVFSFPLTIQRDPLRRIDRAFKAFFRRVKAGEKPGYPRFKTKTSYNSFNVAERFSVNGSCLKIARLGNFRFKTKCKVKGSFKTINIARRGNRWIANLVCDIGEAPAKRPVSNAVGIDLGVTTLATLSDGTEIANPRWIKREEGRLAEAQRVLARKTKGSKNQAKAKERVRRVYQRIVGSRNAYTTTVAKKLIGQYDLIAHEKLNIKAMAQYGYLGKSIMDAAWGKLIWRLNCEAEKAGKWVIPVNPRNTTKACSGCGELVPKTLSQRTHCCPSCGLVLGRDHNAAVNILRLGESLVERQKICLEGIAN

SEQ ID NO: 40570 - protein, 333 aa, unknown
  TnpB Polypeptide
VLAVDLGVKKQATAAALDAGEDGHHTQVAPPEFIDHPSKEKLFRLKADAEGINDRLAELRRQGKAHTERFDHLLAEYRQTRGTERRLRKQIQHDVANQLVWLAVEYGCDTIVFESLGQLTSSDVSGAVAWSISSWARGELLDSVEYKAELVGIEVETVNPWGTSRYCPRCGERGRTVKAPDEHTECRHGGQFHCPECGYECDRDVVGAVNVGRKHLEGFKMEEANPVAYTEAGKHASFPSPQGARSAGVQSATDKQDSASGRQTHLSQYRATPLTSDGSETVLIRKRGERETGGLQQNDGSNTGLRWPSGSITMHALARATGSSGILPNTTEN

SEQ ID NO: 40571 - protein, 340 aa, Proteobacteria sp.
MAGAVNYVWNYCNEVSLLAFRRDQTFFTAYDLHKLTAGTSKDLRLSADTIQQVCTEYVTRRTQFKKIKLKWCSRKRSLGWIPFKAAYIRLQDDTVTYCGHRFRLWLSRPMAGVVKTGSFTQDACGRWYITLQCDVADAAEPVGHLDLGIDLGLKNHIACSDGVQYSRANLTRHYEEALAMAQRAHKTRRVKAIHARIANVRKDWTHKATTAIARRAQVIVIGDVSSTTLIKTRFAKSTYDAAWRIVRSQLPYKAKRLAGVCVDGHERFSSVTCSACGARSGPSGLRGLGVRTWVCPCCGVTHERDVNAARNILAFRSGRATPRKGIPVLEGGEDVNCYLG

SEQ ID NO: 40572 - protein, 252 aa, Proteobacteria sp.
MAAARLVCEIPDVAMPQQIVIGIDLGVNTLLAATDGAQAVLVSGRAAKATVQYRHKRLASCSQAQSTQTKGSRRWKRLQRRKARMLAKTHRRLRDLAHKATRTVVAAFPGAMCYVGKPFNDAAQHLRPKQAQQVSSACNVRLIAQLAYKTCGAIAVDEHYTSQTCPVCGERNKTRRIYRCRSCGITAPRDVIGSVNILAVGRQHALVPGRSVPHAVQWVHPVKYPGPKPGSSPGHSGNSLGISQEAPTRSLR

SEQ ID NO: 40573 - protein, 379 aa, unknown
  TnpB Polypeptide
MQLTAQLLLDTSGQQADALKRTMGMTNACCNYMSGMAFRERAFSRFSLQKIAYRKARDAFPLLSSQVIIRAFAKVADAYATDREALRRFKPFGAVSYDARILSFKPDRREVSIWSVDGRLKVPFRCGERQTALLQGKRGEVHLCLVKGRFYLFVACEVEAPTPIDVQDVLGVDLGIKNIAVDSDGNVYSSAQVNGLRQRHRRLRQKLQAKGTRSARRLLKRRSGKEARFVSDVNHRVSKRIVATAQGTGRGIALENLQGIRSRITARRPQRAALHSWSFFQLRSFLEYKARQVGIPLVLVNPRNTSRTCPACGYIDKANRISQSTFSCVVCGFSGLADYIAALNIHVLGRAAVMRPYVSDAQTLAQRQGQATLSYGNGS

SEQ ID NO: 40574 - protein, 113 aa, unknown
  TnpB Polypeptide
VIAVETLAVSNMQKNHCLAKSISDASWSEFVRQLEYKSVWYGRELIGIDRWYPSSKRCHDCGHIAASMPLNVREWACSECGAVHDRDINAARNVLAAGLAVSACGENVSPVCI

SEQ ID NO: 40575 - protein, 420 aa, unknown
  TnpB Polypeptide
MGGMNCDFISFEIKNIDWIRGMRRAILLQTSATNSKNGRLKEFMDVAISEYNRLLFERSGCGTFMQFHRKTLSVSKQNTSFNVQVRCSLIRDAWRKKADNVDGLTVKFNVPRNCKTFSTKSNFFVELGTYPRNRIAVPIKQNRNYQRFQSLVSDGWTCKTFGLTTDLQIVAYFSKEKEIPERKNILGIDVNAKHFAVSVISAEGKVLYQTYLGKRIWVRRKKIMERRAMLQSLNAVSKLERIRNYESNFVKTNLGQVVREIIRIANRFDADISIEKFGRFKSKGKKFNRTVMRIPFYKFRQILEQRCFDHNIRLNIVDSWHTSKWCSHCGAVGNGHSSNYSLFKCKCSQVVNSDRKASLAIAVKSLLERKGHTSNPDIPIQISERRVPVNGLLRPDAVDGLRSVNHISSTYGKPTSFSRG

SEQ ID NO: 40576 - protein, 332 aa, unknown
  TnpB Polypeptide
MEQITITAKVQIAATDTDKVLLNKTMSVYCDACNYVSDYVFRTHDLKQFSLNKILYSALREKFSLKSQMAQSVFNGRVKLPYFAEGMSKYFNHSIYRFGTAKLVNKRGKYYLHIPVTYEVEESNISDICNVVGIDRGINFVVATYDSKHKSGFVSGKAIKQKRANYSRLRKELQMRHTPSSRRRLKAIGQRENRWMQDINHQVSKALATGNPKHTLFVLEDLTGIRNATERVKTKDRYVSVSWSFYDLEQKLIYKAKQNQSSVIKVDPRYTSQCCPACGHTEKSNRNKKIHLFTCKNCGYTSNDDRIGAMNLYRMGINYLADSQVPDTVVTE

SEQ ID NO: 40577 - protein, 377 aa, unknown
  TnpB Polypeptide
MIKSVKIRLLPSKEQEVLMFKSIGCSRFTYNWALNRCNELYQQGVKYNMSNIRKEFTQLKKQYEFKWLNEVSNKTMVESMRNLDSAFKRFFKNKGCYPKFKTKRKSRLSFYIRYDNLYFLDDMCNIEKIGKVKFKTNYDIPKGRNICRFSNPYCSFDGKYWYLSFGFEVEENQTTLNNDLSIGIDLGIKDLAVVNVLDKPIKNINKSKKVRKLKKRLKRLQKQVSRKYEANKQGNKFVKTNNIIKLEKRIKLLHRKLSNIRNNHIHQATNKIIKLKPYRVVMEDLNVKGMMKNKHLSKAIQEQGFYEFIRQMKYKCEFNGIQFIQADRYFPSSKLCSCCGSIKKDLKLKDRVYKCNCGLEIDRDKNASINLGNYGLA

SEQ ID NO: 40578 - protein, 374 aa, Bacillus sp.
VTTILLNQKYEIFPNEEQRDILDCWLQYCRQTYNSALLDKERKYKRNKENFNRYDMQRQLTLDKMKYPFLKEIPSQPLQEVFGRLKKAFDNFFRKDAKYPKLKKYKDYSSMTFPQFGFNDKGNRMAMSFSENGKLYNTKLGEINILIHRPIVGTIKLLVIKRQGKRWYAIFCVERRALPSAIDTDNSIGIDVGLNKYAVLSNGKEYENPRFLRKKEKQLRKAQRKLSKKKKRSANYIKQVQRVRQLHQKVANQRRDFLHKLSYNLSKDYSVIAVENLNIRNMVKNRKLSKSISDAGWGMFGNMLAYKCEKNGGVLIKVEPKYTSQDCSSCGNRVTKTLSIRTHVCTKCGTILDRDYNASLNILQKALDEWLAAI

SEQ ID NO: 40579 - protein, 506 aa, Bacillus sp.
MILTNSQKGAEVMKTRAYFSIRIYKNVLSDEYVQAITHALFVFNQAKQFAFNTSVKEERSGINKRNKSMHLTVKHRYFLDNHYANSAVKESNAIQKSLSELNKLYIKNKEEQIRTVKNKIKKTKTRLTTLSKIKKSFVKNIPTFPKNSNVKKMGNYFVVQFKSRTDLYYHAYQFEHVFLDREINRLKSRIGFLTFKQNRFDEELKRLKIKVSSVAFGSKKLFKSQFTKEEYINNHSKWVTDWEKSRYNQMTISGRKDSVSGNFVFKYNPSDKKLHFHTPSGVIIEIENLHFPYGQEKVESVIEMQTNCKDKKKHGKPIGWSIEDHGAYYIFKCIVNENENDNINYSKADGVIGVDCNVDHFAISNSNSKGQLISSWSLKFDISNKTSGQITKIIEAEAIELVDAAVKLNKPIAVEKLDTTTSKVSNRYGNKKANYKMSMFAYNKMITAIKSRAGKMGVAVFKVNPAYTSQIGKMRYMKRLEVSIHEAASFVIARRAMGFKEKLPPV

SEQ ID NO: 40580 - protein, 146 aa, unknown
  TnpB Polypeptide
MLVLFLLLYLSDGTYIQNPKFYIHEEKSLAEVQRKFSKTEKGTYEKTKFIESLCRIYERAANKRGDFAQKLSENLVDNYGIICFEDLYVKNITKNHNLTKHILDAAWSKLITYKTYKAENAGRCGIFVDPKNTSKMCSNCGMLVDK

SEQ ID NO: 40581 - protein, 404 aa, Cupriavidus sp.
MQRLQAFKYELMPTGEQQRDMRRFAGSCRFVFNKALALQKENYEAGGKFIGYVAMAKHLTAWRNSAETVWLKDAPVHPLQHALKVLEKAYKNFFDKRADFPRFKRKGQGGSFRYPDPKQIKFDQANDRIFLPKLGWLRYRNSREALGELRNVTVSLSCGKWFVSIQTRREVETPVPHGGAVGIDMGIARFATLSDGTFIAPLNSFKRHEMALRKAQRAMSRKTKFSNNWKKAKARVQRIYSRIGNARRDYLHKTTTTISQNHAMVCIEDLQVRSMSRSAAGTTETPGKNVRAKSGLNKSILDQGWFEFRRQLDYKLAWNGGHLIAVPPRNTSRTCPCCGDVSADNRQTQARFLCVECGFEEHADLVAAINVLRAGHARLACADTSPEVGASGQEPTEATIQFSV

SEQ ID NO: 40582 - protein, 421 aa, unknown
  TnpB Polypeptide
MKKMADMAYHCGIRVKLYLSNEQKRIIAVNDGAARAVYNHLVAVGNERYRLSKTASFVPAYQDRLGYLDSVSGSLKNIKNALPYLYGPDVDDQAVANANKNYFASWKNRKDRHSGVPVFKKKSSMQSYQTNAHYYFKDTKEGHNSNVWFLDKNHVTLPKLGRIRFGGSSLKVAEIIRRQEVCDIRIGTITVRRDSVGEYWASFQLASDTPFFQPLPKTGSERGIDLNLIELVNGSDGQTSANMHFYREAQASLAKQQHKLSRMAEHAKKEGRELHDSRNYQKQRRKVAYIHRKVARQREDYLHVLSKHEVENQDFIAAKDLKVKNLVQNHRLAKAVSDAGWGSFLTKLSYKAEAYGKEFVQVPPRFTSQTCSACGYVLKLEERLSLSDREWVCPACHTQHHRDTNAARVVLQIAKEKAATA

SEQ ID NO: 40583 - protein, 383 aa, Deferribacterales sp.
MIRSFKIRLLPNEQQQELLWKHANCSRFIWNFGLAYQENLFKNNQKHLSGYDLKKVVTQIKKQDKYSWLNDISAQTLNNTILDLDDAYKRFFKKQNRKPKFKKKNKCKIKFPVRTDCIYFNSLVVNIEKIGKVKYQTNYNLPQGRNVCKFTNPRIKYENNKWILSFGMEHNNQVQKLTNNSMGIDLGVKDLAVVSYNNEKLVFNNINKTNRLKSLKNKLKHLQRNVSRKYETNNINNIFENKWFKSKNIIKTQNQINKIYNKLSNIRKNYIHQITRELINKLPKRITMEDLNVIGMMKNKHLSKAIQEQCFYEFIRQMKYKSEFYGIEFILADRFYPSSKLCSDCGYIKKDLKLSDRIYKCEHCGLEIDRDKNASINLMNYKG

SEQ ID NO: 40584 - protein, 326 aa, unknown
  TnpB Polypeptide
MEAIDIYKGFKFRLYPNNTQSKKINKNFGYNRFVYNYYLTKIIKEGYKSTSYYIKDYTTRLKYEYQFLWEADPMLIKKIIFKLEDNYKKYINGNSGYLKYKSKYNKNSYTINIIHSNKTIDYKNIKLDLENKLIKLPNLGNLEIRGYRNLKQIDGRIINYTISREKNGKYYIAVLYELSDIQKVTPETIVGLDLGIKKLITLSSAKTYENNRYITKYEEKIKREQKNLSRKQKGSKNYYKNIKKLNGLYIKLSNNRRYYNHKITKEITENYDIISTESLTISKMIMDKEHHLSKAISDATFNEIYKIRLIIGINFILFFCGNNTKD

SEQ ID NO: 40585 - protein, 391 aa, Escherichia sp.
  misc_feature (21)..(120): Xaa can be any naturally occurring amino acid
VKRLQAFKFQLRPGGQQEREXXXXXXXXXXXXXXXXXXXXXXXXXXXXXXXXXXXXXXXXXXXXXXXXXXXXXXXXXXXXXXXXXXXXXXXXXXXXXXXXXXXXXXXXXXXXXXXXXXXXLGWMRYRNSRQVTGVVKNVTASQSCGKWYISIQTENEVSTPVHPSALMVGLDAGVAKLATLSDGTVFGPVNSFQKNQKTLARLQRQLSRKVKFSNNWQKQKRKIQRLHSCIANICRDYLHKVTTTVSKNHAMIVIEDLKVSNMSKSAAGTVSQPGRNVRAKSGLNRSILDQGWYEMRRQLEYKQLWRGGQVLAVPPAYTSQRCACCGHTAKENRLSQSKFRCQACGYTANADVNGARNILAAGHAVLACGEMVQSGRPLKQEPTEMIQATA

SEQ ID NO: 40586 - protein, 263 aa, Thermococcus sp.
LSFTVEEKLSKKGWIKVPREPKGSLTAGIDLGINNLMAVYVENGKSFLVNGRPLKSIAFYWQKKIANYQSKINKSGCKKSRKLRRMHEKAKLQAKHYINTAVRQTVEKLYHLGVKRIIIGYPKEIARNSNKGKKQNFILSHVWRFNTVIQRLKEVAEEYGIKVVLVDEAFTSQLCPLCGKPHDGARFVRGLFKCPTEGLVFNADLVGAFNILKKVVKTITPSLEGLKAFKVRGNGEKTLPEGLKTQFVLGLNETPQTSPSIAR

SEQ ID NO: 40587 - protein, 434 aa, Thermococcus sp.
MKRSVTVKLQPSKAQEKILFELAQATAIIWNKINYQRLKQFKEFGKIDFSTTEKEAYHKFKNWIGGSTVQQLARKNAEAWRSFFSLNRKKKKGELPEWFKPRPPKFVREENGRKLFIIPLRNDQYRINGNVLELRRLGKFGRLRIQFKGRIHLRGKQGRLEIIYDDVKRKFYAHISYTVEEKLTKKGWVKVPRQPPGSLIAGIDLGVNNLMAVYVENCESLLVNGRPLKSIAFYWQKKIAEYQSKINKSGCKKSRKLRRMHEKAKLQAKHYINTAVRQTVEKLYHLGVSRIVVGYPREIARNSDKGRKQNFILSHVWRFNYVIKRLKEVAEEYGVTVIITDEAFTSQTCPLCGQCHSNARFVRGLFKCHREGVVMNADLVGAFNILKKVVRTITLSLEGLKAFKVRGNGLKAEPEGLIFGFNEAPQTSPPMARG

SEQ ID NO: 40588 - protein, 435 aa, Thermococcus sp.
MKRTVIVKLQPSKEQTKILSELADLGAKAWNRVNYLRRQQFFEGKIVDFNGTEKTVYEEFKKKIGSATVQQICRKNAESWRSFFSLLRKKRNGELPSWLKPKPPNYLKEDGRRKPLIVLRNDQYRIEGNRLILKGLGKFKRLEIQFKGRIHLKGKQGRLEITYDWVKRKWYAHLSLTVEEKLEGKEWVKVPREPLGNLSAGIDLGVNNLMAVYAENGESFLMNGRPLKSIDFYWRKRIAEYQSKLNKSGAKKSRKLKRMHEKAKLQAKHYINTAVRQTVKKLYDLGVSKIVVGYPKEIARNSERGKKQNFILSHIWRFNTVIKRLTEVSEEYGIRVILVNEAFTSQLCPLCGKPHEGARFVRGLFKCPTEGLVFNADLVGAFNILRKVKTITPNLGGLLAQERGNWPKTRPGGSKARFELGWNETPQTSLPMARS

SEQ ID NO: 40589 - protein, 281 aa, Thermococcus sp.
MKRSVTVKLQPSKAQEKILFELAQATAIIWNKLNYLRLKQFKEFGKIDFNGTEKEAYYCFKDWIGGSTVQQLARKNAEAWRSFFSLNRKKKKGELPEWFKPKPPKFVKEKNGKKLFVIPLRNDQYQIDGNVIELRRLGKFGKLKIQFKGRIHLKGKQGRLEIAYDDVRRKWYAHISFTVEEKLESGEWVSVPRKPRGNLSAGIDLGVNNLMAVYVENGESFLVNGRPLKSIDFYWRRKIAEYQSKLNKSGAKTSRKLKAEPEGLIFGFNEAPQTSPPMARG

SEQ ID NO: 40590 - protein, 372 aa, Okeania sp.
MKSIHTKLKLNNKQKTLMAQHAGYSRWCYNWGLSLWNAAYKDGYKPNVRKLREVFTNHTKPLIPWMKKLSSRVYQYAFIHLDAAFKRFFKGLGKYPKFKKKGRSDSFTIDNCGKPIELNGWSHKLPFIGIVKTYEAIEATTKKITISRQAGDWYLSCSYEFNATTTPKKTDVVGVDLGVKTLATLSDGKVVTSVKSYRRFETKLSRMQYLNRNKEIGSANWKAAQLKIARLHRKVASIRKDALHKLTTYLAKNHGKIVIEDLNVRGMLANHKLAKSIADQGFYEFRRQLEYKCQWYGSELIVVDRFFPSSKTCSSCGHVQEMPLNLRTYDCPECGLSMDRDLNASINLRNAVGSVVNACGRSAADSSGRSRK

SEQ ID NO: 40591 - protein, 316 aa, Okeania sp.
LNDLNQAYQNFFTSTKGKRKGKPVKPPKFKSRKSRQTARFRKGGFKVGQHKVYLAKIGKLKIIWSRELPSEPSSVTVIKDSANRYFLSFVVEISPEVLPKNDNSVGIDLGIKTFATLSNGEKVDAPKPLKKRIKKYRKLSKSLSNKTKGSKRYEKSRLRVAKFHGKLKDTRTDFLHKLSTEIINENQVIVLEDLNVSGMVRNRKLSRAISDLGWRQFRTLLQGKAEKYSRDFRVISRWEPTSQVCSNCGFKGGKLDLHVREWECLNCGAKHDRDENAAINILVAGGQSETLNGRGGKRKTTAKAAAANETSTHRGA

SEQ ID NO: 40592 - protein, 239 aa, Okeania sp.
MKARFKYRIYPTPGQKHRLAKLFGCVRVVWNDSLACCQQKYKSGEKKPTNSELQKQFITQSKNTEDREWLSEVSAIPLQQSLNDLNRRGKRPFAPTNFFRSTKGERKGRPIKPPKFKSRKSKQTARFTKGGFKVGQHKIYLAKIGKLKIVWSRDLPAAPSSVTVIKDVGANGRSPLHRYFLSFVVEIQPEILPKTDNSVGIDLGIKTFATFSDGTKVDAPKPLKKRIKKLRKVKFVIIS

SEQ ID NO: 40593 - protein, 401 aa, Microcoleus sp.
MQVLEYKIKAKPSQYKAISEAIRTVQFIRNKCIRHWMDAPKDVKIDRFALNKYSTVLRNEFPFVKALNSMAVQAAAERGWVAISRFYENCKSKKSGKKGFPRFQKDNRSVEYKTSGWSLHKTKRRITITDKKGIGELKLLGKWDIHQYPVKSIKRVRLVRRADGYYCQFAVDVECVDIQPPTGQEIGLDVGLESFYTDSNGHQEPNPKFLRKGEAAIKHSQRAIYKKVKGSSGRRKARAKYSRKHLRVSRQRTEHAKRLARHVCKSNDLVAYEDLRVANMLKNHCLAKSISDASWYQFRQWLEYFATKFGRLAIAVPPQYTSQECSQCKVIVKKSLSTRTHVCSCGLILQRDWNAAINILLRAKSRDGQSQRNAKGVETSTLLGASLVEQVLTMNLESPVL

SEQ ID NO: 40594 - protein, 404 aa, Microcoleus sp.
MIIFEFKVKAKEAQYRAIDEAIRTSQFIQNKCLRYWTDNEKIGKYDLNKYCAVLAGEFPWASELNSMARQAAAERAWAAIARFYDNCKRKVKGKKGYPKFKKHARSVEYKTSGWKLSPHRKAVTFRDGKNIGTLKLKGTYDLSFYDIKQIKRVRLVKRADGYYAQFAIEVRVTVETKPTKNIVGLDVGLKYFLADSNGNTVESPQFYRTAERQLNRANRKKSKKFKQGESPQSKNYHKARLRYARKHLRVSRQRKEYCKRVAYFVIQSNDLVAYEDLNVKGLVRNRRLAKSISDAGWSTFRQWLEYFGFKYGKVTVAVPPYNTSQNCSNCGATVKKSLSTRTHVCPHCGFVADRDINAAINILKLALSTVGHTGTYAWGDLPSWAVGAILLSNGESVNQESPRL

SEQ ID NO: 40595 - protein, 370 aa, unknown
  TnpB Polypeptide
MFDMKLNKAFKFRLYPNHIQTNLLAKTFGCCRFVYNKMLEDKIKYYQKTKENISVTPAKYKEEFDFLKEVDAYSLCNEQMHLQAAFNNFFRHPKVGFPKFKSKKKDKNSFTTSNVHNTIRINDEHQIRLPKLGWINFVEHRKIPTDYKIKSVTVTKMSSGKYYISVLTEYEYEIPERILDKSKSLGLDYSSHDFYVDNQGRSPENLHHYYRDLQDKLAFHQRKLSHMVKGSNNYQKQKVIIARIHEKISNQRKDFIEKESTRLAQRYDIICLEDINLRNISQSLKLGKSTLDNAFGMFRQKLEQKMSLEGKKVVKINKWFPSSKMCRFCGCVNKDLKLSDRVWTCGCGAILNRDENAAINIMNEGLKQLA

SEQ ID NO: 40596 - protein, 485 aa, unknown
  TnpB Polypeptide
MITTFIKIIDEICIMYFMQLTYKFTSKHTNAGKLESIRKLAKVYQSYYNIIASKSLHDLYKNGSLPKYLPVLDDFANKNFSEGYRQTCGSQVKSNISSLLSNIKNKIAHVITNSSLSNDTKIILHYVNKYHLWFQKSVKIRGTEVPQELMKLSRRLFKQYRGRTPKLRNIVMCLDSKVVKIEKSDNSFDYWIRLTTLNKHHPICLPIESYHYFENAVGALKKHVQIIVRNTIEYTFVKESEDKRLIVESDDNKIVGIDLGMVNLLASSSGNQYCQSLYNKLKYYDDIITRVTKRRQKNGFKNKSNKVDRLYCKVQNLIKNEVGRVLNRFLEKEKPDIVVMEDLTGLTRDTKSKLSKKMRRLLNNCGISKISKRIAIKQKRLGFRIVEVNRAYTSQECPICHNIDKENRKDQAHFKCIKCGYKRQADYVASVNIRNRRSIPGIGIHAPYRSVRGLIERHYMSINQSFGNRPKYRLAVASELLVVDS

SEQ ID NO: 40597 - protein, 545 aa, Erysipelotrichia sp.
MQINQNTEQTEYKQILKAYHKLSDRHVLVLEADLSYQDKCKIFHYANLERKAGNELVSIMKNNYGQLIRAKKYRKLKALYGKYANADNKKNCKFITNQLNELQKQYNVTWDFCRTSMIPIGKKYGIDAIFALTKAEDIWRAIEKCLYSDGNTIHFSKREDLPNIRAKQSNRGIVISSADNKLQFKFNGIKFGTLIKDRFENDEVNAILDYLSEPEIKDKLAIETLQAEGICINTYRPCYATLVCKKIRGKLRVYVHITIEGLSKSKYDRLGNPKHKLGKGIVGCDIGTQTIAYTSDTEVGLKNLAERGTSITINERKERLIYRAMDRSRRATNQQNYNSDGTIKKGHKIWNYSNRYKKLKAKHTELCRINAINRHLAINEDVNYIRSLGDMFVTEPKNAKKLQKRAKNTTFNSKGKCNRKKRFGKSIKNRCCGYFQSQVEKKFKCTNGTYIEVPNDYRASQYDHTADDFIKKKLSDRMYKLSDGTIVQRDWYSSYLLYNIDDINKTIDKDKCISNFEQQYNKEKALIEWIKANNIKVLNSGIKAS

SEQ ID NO: 40598 - protein, 498 aa, Mycobacterium sp.
VYNAVLGEFLARSCAVKSDPAWRAARELPQCSPAERQVRRVAFRCVEQAHGFTADAAQSFASSLRRSWVREHLPSQETQNLGARAFDAVRRWHVGRKGKPRFKSTKRGLHSLAAKDGHGALRPKTDEAGALVGLQWGAGFVIPIAPAGASGRRGREQQAELAEIGALIAAGKVLSTRIVRTVINGRDTYRMQLVMDGRATRRHPVGDGRVSFDLGPSQIAVAVARADGSWSGWVEPLADAISLDTMRLRRAQRHLDRQHRAGSPACFNGDGIHTTGRCVWRRSAAAQQTMIRVGELHRRLAEHRKSLHGALGNRLLGHGTDIACEHLDYVSWQKNFPRSVRDRAPGLLVAMVRRKAEGAGGQQLYEFNPRTTALSRTCLCGTKKSKPLSQRTHRCECGMREDRDLFSAYLGLHVQVGADGVDRLDLPSARQGWGHRQDVDEPPKSSRSASARKRRGRRHPPSRRSVARINARRKAKAVMRQSRSAQTSTTDQPTAIAA

SEQ ID NO: 40599 - protein, 425 aa, Mycobacterium sp.
VAPTAAAVPVRKARARKRARDAPTHVRCWPLRPTGAQCREIGIRFFTGVRVYNAVLGEFLARSCAVKSDPAWRAARELPQCSPAERQVRRVAFRCVEQAHGFTADAAQSFASSLRRSWVREHLPSQETQNLGARAFDAVRRWHVGRKGKPRFKSTKRGLHSLAAKDGHGALRPKTDEAGALVGLQWGAGFVIPIAPAGASGRRGREQQAELAEIGALIAAGKVLSTRIVRTVINGRDTYRMQLVMDGRATRRHPVGDGRVSFDLGPSQIAVAVARADGSWSGWVEPLADAISLDTMRLRRAQRHLDRQHRAGSPACFNGDGIHTTGRCVWRRSAAAQQTMIRVGELHRRLAEHRKSLHGALGNRLLGHGTDIACEHLDYVSWQKNFPRSVRDRAPGLLVAMVRRKAEGAGGQQLYEFNPRTTALS

SEQ ID NO: 40600 - protein, 370 aa, unknown
  TnpB Polypeptide
MRKTFKYRLCPTSAQRTVLQRQLDCCRWVYNKTLETRRDAYQQEKKSLSRYDTSSFLPQWKKDEPWLKEGHAQAMQNAQVRVDLAFRAFFRRVKAGDKPGYPRFKSFDHYNSFTYPQQKSNWCFNEDGKLHLSKIGEVKIKLHRPLEGIAKTLTIRRDAIGNWYACFSCIIEPKPLPISNSVAGVDVGLTHFATLSDGEQIENPRFFRRDEKALAKAQRRLSKETKRTPAYRKRKRVVQHIHQRIANRRRDFAHQTSRRLINIYQLLAFEKLDIQDMQDGNWRSMNKSISDAAWRQFTQYCSHKAEEAGRTVVFVDPRGTTQMCSGCGEIVPKDLSVRVHSCPHCGLTIDRDFNAARNILARGLACFAQA

SEQ ID NO: 40601 - protein, 308 aa, unknown
  TnpB Polypeptide
MKIFSSYSVKIKHYNHIFKDTVAIYRSAVDYLIGMCMEEWDTVSGIQGNLLRQQYMERLCHATADNPDPKYTGFDRRFYKFPSYLRRSAISEAIGKVSSYKSNLANWEASDTGIRGRKPSFPKVGFIYPCLYKTGMYEQTGTYEARIKVYVHNTWDWITVDLRKSDVDYITRRCQFRKKCAPTLRKRGHEWYLDFPFEEETVLADTDIFHQTIAAVDLGINSTATVSIMHPDGTILGRHFCKLPREYDSLKHATNRIRKAQQHGNFKTPRLWARAKGINDDIAVKTAGFIIDTAVLYNADVSFRINQG

SEQ ID NO: 40602 - protein, 386 aa, Mycobacterium sp.
VCNSNTLNGNGGKRLAKTRHHLDKAGLTPAQWRDQWEAARYRIAANGSPDEPFGNLTITVTPAGQVSIRLPKPLEHLANAARGRYVLSGAAVFSHRGDEWAQRITSAMSVSYTITRKPGRAGRYLSASWAIPSVPYWVGRDDCAVGDDVHAEGPVVGVDLNDGHIAARRLDAHGNPVGAAERIDIDLTGSASRRDAQVRHALTRLLHYARRHGVTAIAVEDLDFADARTVGRETLGRGARGKRFRKTVSGIPTAVFRNRLSGMAAAAGIQLLAVNPAYSSIWGAAHWQRPYRNVTRHQAAATVIGRRAQGFPARRRKGVTPTRPEDRAVRATNQTGPDSHRANTGSRRRSGMRGTESRPPNRNVRGDHPRRATVTPAPANNGQHHV

SEQ ID NO: 40603 - protein, 445 aa, Turicibacter sp.
MLQLREVSQNTLTATNEQDVGYTLTEVALATALPKASVLAMERHGELVRLDNKNYEKAQLQPYLDHMMIGKTIKLLPTAEQEQILWQHAGTSRFAYNYCKRVSEKYYKYTGKTLSQRAMQKLFRKLKKRQKYAWLQEMNAQVPKQSSKDFDRARRISFEKFGNGFHTNFKSRHSINQGFYVDATTMTVLTKSIKFQTLGVIKTTRQANRDTVYNVRIIHDGTGWYVSYSIRVKKPAKTGNSTEIIGIDTGIKILAVCSNGMIFANINKTRKIKKLEERKANFQRQMSKRYVKGAKRQSNNYYKAKNAHLKVCRKLRNIRNNHLHQATAHLAKTKPQAIVIESLKLAFMLKNKKLAKQTAGQKIGEFYRQLEYKCRYNSIEFLKAPQDYASSKLCSHCGYKYDKADYDNKPWSLRIRKWTCHNCKTAHDRDFNASVNLKNWYKQVA

SEQ ID NO: 40604 - protein, 386 aa, unknown
  TnpB Polypeptide
MKRTYKFRLYPTTPQQATLTQWLTTCRMLYNNALTERKDAWQIHQHSASYYEQANRLKTAKKTNLFLKAVHSQVLQDVLRRLDKTFNNFFRRLKKGEHAGYPRFKGKYRYDSFTYPQSGFALDKKKKKLCLSKIGSITIKLHRPIPAEGVIKTCTITRDVDHWYACFTVVLPDPAPGSQKKAIQKAIGVDVGLKSLLTCNNGDTIENPRWLRHSEKKLAKEQRRKDRKQKGSRNRHKQNRKVARVHRKIRNQRKDFHHKLSRKLVESYDLIVYEKLTIANMVKNHHLAKSISEAGWGQLMCFTEYKAEEAGTLVEYVSAYNTTQLCSRCGKLVPKTLATRIHCCPYCGLDLARDHNSAITILSRSTYYASSRSSSSSGQELPVEPV

SEQ ID NO: 40605 - protein, 524 aa, Promicromonospora sp.
MARMPRHTSFRFCLDPSVEQERVLSRHVGAARFAFNQALRLHKDARTAARRGQSANSLPEVGDVSGAVRVPWTGFDLINAFNAWKRSEAAGRRFLVDPTGTARVEVTGLVWQDRVLAQVFEEACVDLGRGLKASTDSRTGARKGPKVGSPRFKRKNPTGGSFRIRNKTNSGRASIRLGDGDRLRSVRLPKIGVLRMRECTRRLRRMIATGRARILSVTVSRGANRWWISITVEAADLHPAHQHPEARHTPQPVETDEAEIRDGRTQPTRHGGKGWVGVDRGLHVLAVAGTRDGVEVLRVTNQRAFRRGLPRLRRLSKAVSRKKKGSKNRKKAVVRLGRQHARIRDRRRHVLHQVSNQLVKNHARLVLEDLNITGMTRNRKLSRAISDAAWGELARQITYKQAWRHGQVLLADRWYPSSKTCSACGTLRKDLTLKDRVFECWSCGHVMDRDLNAAVNLAAWAENHTPTAEDTGVAGRGAARVGDRQAAGPVKNAHRQDTPTHPDAPRLGGKGLDDVGTNQTAPAA

SEQ ID NO: 40606 - protein, 224 aa, Lactobacillus sp.
LHIGITKKTSDFNSKDNPQIVGIDRGLRFLATTFDSEGKTLFFDGQKILCKRKKFLEIRRQLQSKGTRSAKRKLKQLAQRENRWMTDVNHWLAKTLVAAYGSHTLFVLEDLTNVTFNTDDLPKSLRNNHRSWAFFQLESFLTYKAQAIQSIVAKVNPAFTSQRCPKCGLVEKANRHHETHEYWCVRCQYRCNDDRLGAMNIAALGQEWLSGVKHPKITKLTAIG

SEQ ID NO: 40607 - protein, 471 aa, unknown
  TnpB Polypeptide
MSLPANWPEAVSFVFGQADLVVSILTLQSRVQKNAYAWLEQAAREVNQVWNHANAATFKAWHGRYGGQQKWLSAFEVSDLFTGCGEVFEKIGIDTAQSVVAEHAARRSQFSKSKLNWRKSGGSRRSLGWVPFKAPNLRFSLEDVHGKRVVLKGDKQPVVPAWPKKGELESAEDYKARRAAFAPVRAQAEMALQAWEYRRVQAAAKISIGFMGKSIRVFNANRLVEAYKLACQGVGQLRAGNFSQDAVGDWYLNVVVDKVELQLAPVFGPDSSIGMDPGQQKSMTGSDGRELRSGRYREMEPKIQQAQSHAHPGQAKRFNRKARRQRLDDRNKFCRGVVGDYARVWVGDLSPKKMAKSKLKGQAKSVHDASFGAAYSTLEAMGHRAGRVVGKVNERNSTRSCSTCQALTGPAGLDGCVVRHWVCAACGTDHDRDVNSGENLRHAGETGWQNRLPGLEKRATPRYWRPFAGTR

SEQ ID NO: 40608 - protein, 672 aa, Mycobacterium sp.
MGFMTAAPTDIVTATSGDVVCAARRRGKSKKPNFSYEGPVSVIRLELDVSDDRMRRRVERQWEAVFRLRRALQRDAQARCGAYWAAHHERTADPKALRARLGLSRKGIEAAAKAHIEASGWMRDHLTKAIGLHIADEVWQTIDRHLFADSSGRRQGTPRIGSWWDFTRIPGRARSHTKATPTWETYRLVGSLDGHLGAYRHPLLPTEITTGSAAAARPVGTSILAQPARLCAPTRPGGGSWWDHDGVLAVVFTGLPSGDLVWAVRLAQGAGQWAHLAHFLADSRAWHKIDVVRVRDRKAPGGWRYYAHLLVHQAGYQSPATRARREQIPAGRRAGVDANVSNVSVASFPDDQPAKLIIDQIECTAAQHRSAARVAKRARARQKALDRSRRNTNASQYGPSVRQQKRALRRAAAALAPRRITNPGGARHARCDRAPLRAYRRDNLSRRYQRTRCDHATESRAASQAKRFRAADVAARIVSTHGNNITVEDTNISTWARLWGKRIALFSPGMLVASLAAECAATKGQFFRAGTRSTAMSQHCLCGQRVAKTLAQRTHHCPHCGLHGDRDTVSAALASCVEFANPNDPRTARVDYRLAHVLRDGLASPQEWEGSVNRHQPPTPPDGVGSARTGSRHPVASAEQATLGPPPNRPRQQRGRRGTSRKQPAPKLIGAA

SEQ ID NO: 40609 - protein, 381 aa, unknown
  TnpB Polypeptide
MKLVAQIKLQPSAQQRDLLKATLERANAACNAINDYAWVHKTFSQYPLHKALYYDIKGQFELTAQMVVRCLSKVADAYKKDHDSKCNFSKYGSIAYDERILSYYTQKGVVSIWTLAGRQQIPYVCGKRAKGLLLNQKGESDLLYHRGEFYLLATCELSEPTPKEVDEYLGVDRGIINIATDSDGNIYQGARVERRRKRFAKQRQSLQKKGTKSAKRKLRKISGKQARFQKDVNHCTAKELVKRAKRTKRGVAIENLKGINLRTRVRRQDRDRRGNWSFAQLGDYITYKAALYGVLLRKVDPCYTSQRCAECGHVEKSNRLSQSEFLCKACGHQAHADVNAARNVSWVAVNRPIVSDTTKDRGSARGKPSALVHPCGTAGGR

SEQ ID NO: 40610 - protein, 406 aa, unknown
  TnpB Polypeptide
MQRLQAFKFELMPDGQQQRQMRRFAGSCRFVFNKALALQKERHEQGEKKLGYAGLCKLLTEWRNSPETAWLADAPAHPLQQTLKDLERAYTNFFAKRADFPRFKKKGQHDSFRYPDPKQIKLDQVNSRIFLPKLGWIRYRNSRDVLGTLKNVTVSQSCGKWFVSIQTEREVEQPIPNGGAVGIDMGVARFATLSDGTFYAPLNSFKRHETALRKAQQAMSRKVKCSNNWKKAKAKVQKIHLRIGNARRDYLHKTSTAISQNHAMVCIEDLQVRNMSRSAAGTADAPGRNVRAKSGLNKSILDQGWFEFRRQLDYKLAWNGGWLVAVPPQNTSRTCPCCGHVSTDNRQTQAKFECVECGFEENADLVGALNVLRAGHARFACEVSGAVMPPAAGPHRSDSWAAQCRA

SEQ ID NO: 40611 - protein, 405 aa, unknown
  TnpB Polypeptide
MKLLRTQIHIIDRNHRLFKYCDDLCYKSKNLYNFINYIMRQEFINNKKLLFAFDLNKQYKHHELFKALPSKTSQMTIMRLGSDWKSYFRAIKDWSKNKSKYCGMPKLPKYKNKNGRFVTFFDKQQLKIIDNKCYFQEKGSLKRNKFIETNIVKNELKQIRIVPYGSCYKIEIVYEKEAEEKTNYNNNHLAIDLGINNFATLTNNIGLQPIVINGKIIKSINNYYNKLFAKAEGYIGKGTSNRIKKISTKKNNITEDHIHKVSRWIINYCIENNIDNIVIGRNKDWQRKSNIGKKNNQKFVQIPFESLINKIIYKAEENGIKVQIMTEQYTSKSSFIDNDVIPDKFGKYKFSGKRIKRGLYQSKNGTLINADVNGSFNILRKCNPEFIYDDRIKGISLYPIRVNII

SEQ ID NO: 40612 - protein, 793 aa, unknown
  TnpB Polypeptide
LLASSKLCHRCGHEKEDLALHDITRCCPACGETHDRDVNASINLYFVGLGRPEVTPVEQALVDDRSPNGLPKKPSCAEAGSLTAKDYAVCHGLVYLSMFFANKVPIKVAKSIKMPLRAGTKAYNDMIIPYFRQFISGRQTAYLAQSSLGTLFFYKKHDVIVKYYLPNGRDWSEIFITPSAKNNDFMVHYSNTSESASKILPYHLIGVDYEPYKIIIEKVPLKSSDGSTFNYTDDDLETKIKIIKITTNEKVIEISLTGQVSIGYPLCNNYIPIVNLANKKFTVIILDIASKKVITFVKKWLKTITKAVGDYLEQIKKVDDWRQVNQRIIQGQYGNYKLSEVDFAIGNNYTITKCTFHVRNYTLYSAPIVFKIEIYIEKGIMHYKIIVPKQINITELGIDRIRDDYVVESQVLRLYLTDKEHTETNVLYQDTRYAILKLPSNEEKYCTVNSDGHIEHIIEGYVDCGRTKEPKYLFDIYFEHGFIIVLHKSGILLYDTLKGKWWQVEISNEENKIDFCDHTHEYYYIRKCKKLVFILLDKTADFDYCIMIDLKLIENDDKNYITMISEGYIRYREVIPYVKSTYGDFYPDTNVALHDYSLDANRGVLYVSYRLGNYTIKHVTMECNLCSNTYKWEEFKIDIPLHRHKEHIANTKTPVYISHKHLAMKKIPKYLPMYSLRSLYDIITNKIAHYGLVIKKRIEGVKIIERQHSSLEKRIPLISLYIIDASFNRNVMLFKKIDAFKSWCWDGKIFVMSPYQDIVGIYNSLESQMYNVIHTIGIMLINELVIVNDYRQK

SEQ ID NO: 40613 - protein, 359 aa, Thiotrichaceae sp.
MMKIIRSSKTSLKFLTEKKRQTLYGVMDEYSCLVNLFIEMFWGNEFAKKDLTKDITNIPHSWLTARMRQCAAREALGMVDGEKTSAQEMDRESVKPHHSGRKMILSAQVVKIENSQSNQFNYWLVLTSIGHKIKINMPIKSHRQMNPFYNWKRSTTVTILREYVQFSFEKEIDKKLTTGKNVGIDVGINHLLATSDPELIGSEVKQQINKIKAKKQGSKKYKTAKKALSYYLHKMVKDYFSQHKNLRLVVVEKLKHLKRGKSKNRGKAFRKTLSNWNYRELLNIIEMRCEENRVSFRSVNPYKTSQTCPTCTHVERENRSGEKFLCLRCGYEEHADLVGAQNILERFLSGQYGAAFKAD

SEQ ID NO: 40614 - protein, 373 aa, unknown
  TnpB Polypeptide
MANKAFKYRIYPTASQRELLLKTFGCCRFVYNHYLVLQSERHTAGETYMSRTACNNDCNRILKETHPWLREVDKFALTNAVYALNRGFQRFFQHQGGYPRFKSRRHGRMSYTTNFTNENIAVLEQEIKLPKLGRVCAVVHRQADAAWVLKQATVSMERDGSFYVSLLYEYKTDIVKSEVNPSSILGLDYKSDGLYMDSEGNCCDMPHFYRDSQKKLSKAQRKLKHKKLRSNSYYRQQRRISRISRKIANQRKDFLHKVSTGIANRYDLVCIEDLNLRNLSNKGFGNGKATLDNGYGMFATMLGYKLADRGKQLVQVDKWYPSSKTCSRCGKIKPMPLSQRSYDCTCGLKLDRDVNAAVNIKNRGYEMYLEKCA

SEQ ID NO: 40615 - protein, 384 aa, unknown
  TnpB Polypeptide
LQQTVSTTVRVKLPSLTNRKADLLAREYEAFQTEVHGGDADLYSATKQQASKVRRQKDPNPDTEQPVVLRNDVFDVSYDEDTVLSSWWVKVPVYDPERGRGNSIWCPAHVPHKDEQLVQEGDVRDSELVRRDGDWYIHLVVKRSVTVQDEYDDVLAIDMGARWVATCAFLSDHKTTFYGEEVRRIREHYKQLRKSIGKAKPRQGQQVVERIGDAEARKVDDRLHKIARQIVGDAEERNAVIVVGDLGGIRKDNDKGRYVNDKTHKMPFARLLNYIEYKAHDAGIDLQLVDEYDTSQTCNRCACEGVRATQGRFECPGCGLDDNADKNGALNIGKRALGKFSRPLSEAGAVLAQSETQVIVHRDEEPANLSVSVDSTPSGGTPRL

SEQ ID NO: 40616 - protein, 386 aa, unknown
  TnpB Polypeptide
VYKALNIELKLTEEQKIQVNKTMGVCRFIYNEYIKYNQEQYRLGNKFVGANGYSKYINNIYLPNNPDKQWIKDVSSKSVKQAMIYGEQAFKRFFKGLSGFPVFKKKGKNELGAYFVKNNKTDFDFYRHKIKIPTLKFVRLKEYGYIPKNANIKSGTISKVADRYFLSLIIKIEDTVKVTDTGNKGLGVDLGIKDTAICSNGMIFKNINKTKRVKKIKKKLKREQRSLSRTIEYSKQNKIKLIDLKNFSKKRLQIQRLFYRLNCIRNDYSNKMVNEMTRAKLKYITIEDLKVSNMMKNRHLSKVIQEQNFFSIRTKLINKCKERNIELRLVDTFYPSSKICSCCGSIKRDLKLTDRVYKCSNCGLEIDRDYNASLNLEKAKVYKIIA

SEQ ID NO: 40617 - protein, 417 aa, unknown
  TnpB Polypeptide
MYLTIKQQLKHLTKEEYNILRELCRIAKNLTNQAIYNIRQHYFCEKQYLRYESNYHELKGCENYKLIDSNMAQQVIKEVDGVFKSFFALIRLAKSGKYSFSKIRLPKYLPKNGYSSLIIARFNIKGDGTLTIPYSSTFKKKYESRVKIKIPKVLENKKIKEIRIIPKFNARFFEIQYIYEVQEENIQLNTNNALAIDLGVNNLCTCVTNTGKSFIVDGRKLKSINQFFNKKNAKLQSIKDKQNIKRQTKQQYLISNKRKNRVDDYINKTCRYIINYCLSNDIGTLVVGYISSFQNKANLGKRNNQVFTQLPFGKIREKLEYLCKRHNINYILQEESYTSKASFFDNDDLPVYNADNPQTYDFSGKRIKRGLYQTKNNYLFNADCNGALNILRKSNAVDLTILCSSGEVGTPKRIRIS

SEQ ID NO: 40618 - protein, 490 aa, Moorea sp.
MPKNAGVTKQISTQVVPIIGMTKSVQAELFSTMKKLGIVRSESYNKLGSISHWGIDWKKSYPEVRDFRTPESLGLPSKLMEWTVNDVAKAISASQAACTEAVVKKVYKRFPGKENQKNRKELCLQLKTLAFIEDPLLHRLVRKEYQRGHSWVDNQIVYQQGGYKCKRVSRNVAQLELAGLRRGKRNKILVRSNRKIKGQIRLIYNKLNQRFEIHFLVNYREVKTPVARTPVGVDKGYTEAYYDSEGTAHGKGLGSLLSEKSNRICSKNRNRGKLWALSRKLEKIDPAKSAIMLESNLSRKTENRRYRKDQAEILSVIGKASKSLFGERSLKVFAEDLTQPIKNKRQSKAMSRQLNSWTKGVMRDSLQKWADWTGSVVTEVQPSYTSQIDSRNGTLLGKRTGDYFTGFDGVVLQADHNAAKNILARGTDFEISRYSSRTEVQTLLLRRTARFLKGMGLSLVDAVELGWLDSKHTKTQAFKKLLAGMPGMSK

SEQ ID NO: 40619 - protein, 372 aa, Clostridiales sp.
MILGRISINPSYLRRAAIAEALGKVSSYESNMTLWEKTHEGKRPGRPTAGYVYPALYRDNTFVRIDENTAKIKVWIRNTWDWVTVSLRKTDVDYIRKYCFGRKECVPVLRKRHKYWVLSFSYEEEVRLRDVSVKDQIILSVDLGINSACVCTAMHSDGTISGRKILHLPKEEDCLRHALNRIKKAQQHGSRKTPGLWARAKGINDRIAVCTAQFIVDTAVMYDAATIVFESLDTRGKKKGSRSKRQRIHHWRAQYVQNMVTDKAHRLGMRISRVNAWGTSSLAYDGSGKVIRGKEAGFKTNAMCRFPNGKEYNCDLNASYNIGARYYIREILKSVPETERLRILAKVPECSRRSTSTYATLINLCAELYAAA

SEQ ID NO: 40620 - protein, 365 aa, unknown
  TnpB Polypeptide
LNKSFKVRIYPTKEQQVLLNKTFGASRFVYNYFLNLKSKLYEFYKINLSYISSSKVLTELKRHKTWLKEVDCVSLQQTLRDLDSAYQRFFNCRGKYSNFKRKQDKNSYRTNSNIKIGSRYITIPKVGLLRYKDAYKLEECNITKIYNITISKSSSGKYFASISAEVYIEAFEKTNQSVGIDLGLKDFAILSSGGKIKNPRISKSLEDKYRRLSKSFSRKVKGSANYQKAKLRLARFHEKISNIRKDFLHKLSTMLVSEYDIICMENLNISGLMKNHKLSKSFQDVSLSEFIRQLEYKAKWYGKNLSKIDRFYPSSQLCSNCGYQNKDVKNLNVREWTCPECGTHHDRDINSAINILNEGLRLLNS

SEQ ID NO: 40621 - protein, 387 aa, unknown
  TnpB Polypeptide
LLKSFKTEIRPTEEQIVKINKTIGTCRFIYNFYIAHNKELYENGEKFMSGRRFSVWLNNEYIPNNHDKMWIKEVSAHSVKKSMEDAYVAFNRFFKHKSRFPRFKKKNKSDVKMYFVKNNKTDCLSERHRIKVPTLGWVRLKEKGYIPTSKDGFIVRSGTISHKAGRYYISVLVDIQKQDTVVEVNNGFGIGIDLGLKEFAVCSNGSTYQNINKMNNVKKIEKRLKREQRKLSRKVISINKGESTQKNFVKQKLKVQRLYQRLTNVRTDYLNKTIHSIVKTKPSFIVIEDLNVHGMMKNRYLSKAVAQQKFFEFKTKLISKCKENNIELRVVDRWYPSSKLCHNCGHVKKDLKLSDRTYRCDICGYVEDRDINASLNLRDANTYTIIQ

SEQ ID NO: 40622 - protein, 245 aa, unknown
  TnpB Polypeptide
MPVEVEKPLHQPTADKKKKAYADLGIINIITSWIEKEKRPEIYSGRSVLSDWWYWNGKIGKHQSIMEKNGKRKTSRRLRRLFRKRKKRFTHLINTIIARFVRNCWEKGVSEIVIGDVTRIRENSRKKMKGRKANAMINNFWSFKYIYERLRVTAENHGIKTRKKEEKYTSKTCSLCGKMHRNGRKHRGLYICKTHGVTVNADVNGVANIANPIFPKPYWRDRDNWLVAQPSVVKVKTTTVEPPTL

SEQ ID NO: 40623 - protein, 385 aa, unknown
  TnpB Polypeptide
LKIKKTIKTKIVYLTKVKQRLLEEEYYNLQRFLHGEKVKLYSANKQQAKRFYKKIKPNKEYPISIRKDLLKVEKRNTKIAEYWTKIPVAGRRGGVWVAVKPHCPIEPDMEICESKLFKKNGEFFLYITVQKEAEIPKPQPITNKTIIIVCDIGEANPVVSVELWNQGKKRKNVQFQGRDVRSVRAHYNNLKKGVGRKKIKHAINWIKEHLANKESRKVNDILHKATRKIVNRAKILKRCGYEPVIVFGGLKNVRQSRIKGEARCRKNNRKIHTMPSYKIKQMLTYKALWEEVPVIPLNEAYTSKLCWRCGTLNTEIKKRSFRCKDCGLEYNRDLNGAINIGNMLLSYMLNSKAAVNTPQTSPEYAAPKGDPLAYQSAREETLSEI

SEQ ID NO: 40624 - protein, 415 aa, unknown
  TnpB Polypeptide
VRRRRTNTFRLSPNKEQEQRLFELADNCARMFNEVNYKRRQSFFSGNFDWNTDFFYHKYKKVIGSATAQQVTRKNNEAWKSFFALLRLKKEGKLPKHIRKVSPPTYWKDRKTGKRVLMILIRCNCYKLEEKYLKLPFGLKIRWKGQNRWEGKQGRLEIRYDDLSRRWYAYMPVEIEKPLHQPTGDKKKKAYADLGIINIITSWIEKEKRPEIYSGRSLLSDWWYWNGKIGKHQSIMEKNGKRKTSRQLRRLFKKRQKRFKHSINTIIARFVKNCWEKEVSEIVIGDVTRIRENSRKKMKGRKANAMINNFWSFKYIYERLRVTAENHGIKIGKKEEKYTSKTCSLCGKIHRNGRKHRGLYICKTQGVTMNADVNGVANIANPIFPKPYWRDRDNWLVAQPSVVKVKTTTVEPPTL

SEQ ID NO: 40625 - protein, 388 aa, unknown
  TnpB Polypeptide
MLRTFKYRLWTNRNQERELGVMLETHRRLYNTCLEQRKSAYESEKRSIKYTEQSAWFKEQRVTNDYFARINFSSAQATMRRLDKAFQAFFRRVKSGEKPGYPRFKGYDRFSSIEYPAHGDGIRFLGDRLRVQHVGIVRVNQHRPLPDDAQIRTVTLTNEADKWYVEVCCLFPDVAVGHSTLPAVGLDVGIESFLSTSDGDHLPNPSYLKNELPALRRTQRALSRKKKGGANRKKARKQVARLHAKVKNQRADHRHKTALALVRRYGLIAVESLNIQGMLRNRRLSRAIGDVAWGGFVTTLKHKAESAGVEVIEVNPAGTSQNCSGCGQHVPKKLSERWHTCPHCGLSLHRDVNAARNVLQRAFATPGSGVWAVTESLDSVAQEAICFS

SEQ ID NO: 40626 - protein, 150 aa, Methanohalophilus sp.
MLKAYKYRMYPTKQQIAKLHEKIANQRNDFQHKLTSRLISENQAIALETLTVSGMLKNHKLAQSISDVSWSSFVTKLEYKAEWYGKSILRIGQFEPSTKICNVCGYHNKNITLADRKWKCPDCGASHDRDVNAAINIKKFALNKQNLIGI

SEQ ID NO: 40627 - protein, 387 aa, Finegoldia sp.
MLITYKTEIKPNPEQVIKIKQTMGVCRFIYNFYIVENQKAYKNNMPFITAFNFSKWLNNVFIPNNLNYSWIRDVSSKSVKQSIVCAERAFKRFFKKESKFPRFKKKNKSNVKMYFVRNNKGDCLCERHRIKIPTLGWIKIKEKGYIPTSKDDYVVKSGAISYKAGRYYISCLVDIEEPPKQILKPFGLGIDLGLEKFAVISNGNVYKNINKSKKIIKLEKKLRHEQKCLSRKYEQLKNNKKGESTHKNILKQIAKVQKTHLKLSNIRTDYINKIINELVKTKPAYIVIENLNISGMIKNRYLSKSISNQRFYEFRQKLFNKCNFHGIELRIADRFYPSSKTCHSCGSIKKDLKLSDRIYKCPTCGEIIDRDLNASLNLRDTTSYKIA

SEQ ID NO: 40628 - protein, 463 aa, Finegoldia sp.
MENQTVQDKKYNIYKCYIKDDNPLYNTLDEWSHLANNLYNESIFIMRQLFTGLTKSSDKRQKLETTTIENVLKIAKLYNKNIILNEEYRLVNYPFLDFYFKKTNNENYYSSLPRQTAQSVIKEANTKFSDWLKALKDYKKNPSRYTGKPKMPKYKTSGGCATFSLTNQDVVFKKNKHNYIIKLPKTKATLSFNKKLKNERLKSVNVKKEYGTLKVTFLFENLCDKKANLKSGVFCGIDLGVNNLAAIVTSNGNSLLVKGEFIKSKNQWFNKKIAKNLKGQTIGTDKKAISSKALNNLYKKRQFFIEDAMHKVAKKIVFWCIGENVSNIVIGKNKGWKQKSNIGKVNNQNFIQIPHALLINYIKTIAEKIGMQVVETDESYTSKASFVDIDQIPTYKKDANMTYFFSGSRVKRGLYKDSLGRIINADLNGAGNIMRKILADENIKVNVNNLISPIKLTASEIYA

SEQ ID NO: 40629 - protein, 473 aa, Finegoldia sp.
MKAKTSSYVVEYELLTTTRDRKSLEKKFNSAKSIYNACLNECLKRLKRLRNNEEYSSLLKEKSSKERNRKLKEIELSLNYSEYDMHKYVKDIRKLYAKHIGSQEAQKLATRAFQTVGKLHYHIADKVNFKNRYSDMSVENKSNNTGLRLKDDIVIWNDLKLKIKEKKNDIYNIQSRNDKTKYIRILKRTIRRKTRYFVQVIKEGIPPKKRNYGKESVGIDIGTSSVAIVSDSCVKLEKLSNTENEYKKLRRLDRKLERSKRINNPKNYNDDGTVKKGSKRWIYSNRYIKLRQKRKDLYRKLATKRKEYQEILANKIIELGVDIKVETMRFNALQKRAKNTTINKKNGKINKKKRFGKSLCNNSPSQLLTIIDRKLHYVGSYLKRIDTFEVKASQFNHKTKNCVKKKLSQRWNVIDDIKIQRDLYSAFLIQNVSDDLKSVDTDLCDKKYDKFVNLHNIEINKLKEIKEMRWLIA

SEQ ID NO: 40630 - protein, 481 aa, Firmicutes sp.
VKITTKAILINLNEEHKNIIDNMMLVFCTAIRYSFKRLLEGNKNTLDLEKEVAKKYNLNIRQAKDAVENARQIIMSQKELVKINYENYAAKVKSIEKILNDKDKKITEKKRNSLLSKLDKRQRKANYFKKFIDTDTIPPVIFGTKQMFLKRCKGLITSEEWKDSRNNRYYSRGDKTKKGNPNLRVVIINNMSYLEISTLEKTTTNRAIKIRVPIYLPQKLSKKTGKINGINYRELFLNHLQTGEAYQVELIKRDGKYYAHITFKLPKINTNYTVHKGIIGIDTNPDGFALTYVDNKGNYKWHKYLKQHELQYARSNRRKNICGELVKQVILIAKSENCGIAIEDLKFKNDKDAKGKFARIKQGFIYSKLLTMLESACYREGIEITKVKPQFTSKIGLYKYCHQYRMNVHNGAAMVIGRRSYNYKEKVPRILKEKLLQEKYEFNKKSEWAKWSIIDKNVKRKVGEKPDLWLKRRKQILGLVS

SEQ ID NO: 40631 - protein, 469 aa, Varibaculum sp.
VSLVARRENKQKSPNDEARLAKNARIREAGKATRARRAKMECIVRKIKVDRSHLNNKQKEAIARLFLESKWLTNSCIANERFDIDYLKDLGDKVQVKTPAGMEEREFLVLGGQLAQSVIKGLKDNLRALSKLKSNGRKVGRLRYRRQVRMVNFPQYGNSHKINREKNRVKLAKIPGWMRVRGLDQLPAEAEFANCKLLDKPDGLFIAITCYTDKEPEDFTSGTSIGVDMGVKTHLTFSNGTKIDALVEESEHARGLRRKISRQKPGSNNRAKTMARLEKVLSKDANKREDIANKIVHELLKNEVVYYQDEPIKDWFKKQGRIKSGRRLQGSILGRVKEKLSRNPRAVMLDRYLATTATCICGHKTKHEPDKRTFVCSKCGYTDDRDIHAAKNMARLGQSQNASATERSSILADKHVRPVAPMDYTFIGKTGGVWMKQEAPTYSVIGVVHLSARPDVKSMGVALRKAGLI

SEQ ID NO: 40632 - protein, 541 aa, unknown
  TnpB Polypeptide
MQDSSIRTYQTRLRLDETTDKALLACAELFAHVEHSLFRDVRAKKSPKDLKSQYLKKYGITARHFNAFRVKIEGKIASIQERCQSLISEISEQIKSVEEKLSQPKRKKSPLFIHQKKRRLHQLKQRLQKLQHQQEKGNIALCFGSKKLFRAQFNLEANGFKNHEEWQTAWRFERKNELFFLGSKDESGGNQSCTLSLEEDKTFSLRIRLPDALITKFGKYLRLTNIHFAYGQENIIAGLIDCRQRQLLSQVKDPNYRNHGQALSCRFKRDKKGWSIFVTTTLPKPQWKTDKNRGVIGVDINTDHLALVETDRFGNPLIKETIPLNLYGKTQKQALALIGDACANVIAHAEKTLKPVVLEDLDFQKKKRQLREKSTSFQARKLSSFSYQSILTHIKSRGWSKQIEVYQVNPAYTSLIGRVKFSNRYGLSIHHAAALCIGRRFLNFSEKIPRHLEKIPDGRNGHVALSLPVRNRDQHVWTFWRSLSKKLKVALAAHFRTQRSLSTLKAALETGNLPDLVGETPAHESSTQLLGWRLYEKCTFA

SEQ ID NO: 40633 - protein, 347 aa, Microcystis sp.
MEKAYSYRFYPTPEQESLLRRTLGCVRLVYNKALHLRTQAWYERQERVGYAQTSSMLTDWKKQEELNFLNEVSCVPLQQGLRHLQTAFTNFFAGRTKYPNFKKKHQGGSAEFTKSAFKFKDRQIYLAKCTEPLAIRWSRQIPESCEPSTVTVRLHPSGRWHISIRFDDPTIKPLPVTDKAIGIDLGISSLVITSDGDKVSNPKHFKKHYQRLRKAQKNLSRKQKGSKNREKARIKVAKIHAQITDSRKDHLHKLTTQLVRENQTIVVENLAVKNMVKNPKLSQAISDVSWGEITRQLAYKCRWYGRNYIEIDRWFPSSKRCSNCGYIALENAVKYSRVGLSRLWDSP

SEQ ID NO: 40634 - protein, 527 aa, unknown
  TnpB Polypeptide
LVFAEIPGILWYNYTINVIRKEVSCYELYAYSKVNISVKHPLYGYAQQLTALANNLSNAARFRQRQLMTAAKKEPADWTANEQEVMDELYTAFPEEFVDGPADRQGFLNVYGNLEKLMCRSENPDYFAEGFPRQCSQQVLKQAARDMKAFFESLKAYQKDPSAFTGKPQLPGYKRKGGHCTVTVTNQDCKVSEKDGMWYAAFPLRKDCPLAIGHPIPDAVLKEVTITLDNGRYRFCLKFEVMAELPPVTEQPGRVCAVDFGVDNLMAVTNNCGLPCLIYKGGVAKSINQKYNKTVAAMVSRQTAATGKKYVPDAAYHAVTNRRNDRIVDLLHKCAKHFITWCVENRIDTIVLGVNKYWKQEVTLGDDRNQNFVQIPFLRLRRIISYLAEWNGIRCIEQEESYTSKASFPDMDAIPVYQHGDDTKYRFSGKRRPSRYKGMYRKNGFRGLYKTGDGTVINSDLNGSANILRKALPEAFNGRSLPDFNSVEIIRHPDLLKAAAVRKSQLAANASRPVSRSRQKRLNRKSA

SEQ ID NO: 40635 - protein, 425 aa, Caldicellulosiruptor sp.
MTKTEIAQTLQQTKERRKSQIPVVYQLKINLNSVSKETKNKLFRLFLEAKWLYNYIVADIENRLNSNADKLKEVEIKVGENFERRKIENLSSQMKQAIRERIEQNLYSLHVQKENGYRTGKLHFKHYVNSIPLKQFGNTFKFVNQQKTRVKIQGIKKPLRVLGGHQISENSEIAKAELVRKPSGIYLFVTCYIDRDKYTKVWEQRKNRKGVIKPRVWQTFDVDAGIDFKPAGLVLSNTFKLEWQIKETKRLKKLQKQFARQKKGSKRWYKTKEKIAKEYERLTNIKYDVINKVCSFLYRYRKICFQEDSIKGWKDGLFSRSVHHSAVGAIKRRLSDSLRVSTAVVKRNIPTTKTCSNCGSRREVLLSDRIFKCSVCGLSIDRDLNAAINMLKEVGLGRSEVKPVEWETAARIFRGNPYILVSQTT

SEQ ID NO: 40636 - protein, 225 aa, unknown
  TnpB Polypeptide
MDQIKQLRIYPPEKGNCKIIVVYEVSGQEELPQNGHELSIDLGLHNLMTCYDSGNGKTFILGRKYLALERYFHKEIARVQAQWYGQQSGKGVKYLATSKHIRKLYKRKHDSVTDYLHKVTRYLAEYCREQGITCVVAGDIRNIRREKDLGHRTNQKFHSLPYNRIYIMLEYKLKRYGIRFIKQEEVIPASAVRCHRKWGKDMQSRPNGKREGCTEMETEPITQMP

SEQ ID NO: 40637 - protein, 415 aa, Actinomadura sp.
MYNPSVQLRYNFRLYPTPGQQQSLARAFGCARVVFNDALRARQEAHAAGLPYPLDGELSKRVITEAKKTGERAWLGEVSAVVLQQALADLNTAYRNFFASVSGTRKGRGVAPPRFRSRKDRRQAIRFTRNARWRITPGGKLRLPKIGDVRVRWSRNLPSEPSSVTVIKDAAGRYFASFVVEVPDEPLPQAAADVGIDLGLTHFAVLSDGRKVSSPRFLRRAERRLRKARQALSRKQKGSANRKKAAARVARLHARVADARRDHHHKLSTQLIRDNQAVYVEDLAVNGLARTRLAKSVHDAGWSRFVAMLEYKAARHGRSFARVDRWFPSSKLCSTCGTLAESMPLNVRSWTCPCGAVHDRDVNAAINILAAGQADRLNDRRAQVGPGHVPAPRSEAVTHPDAARSTRSVEGISVL

SEQ ID NO: 40638 - protein, 354 aa, unknown
  TnpB Polypeptide
MAAINAGATHACAVGAAEKLYGRSKLHARVYAELRQRFGLSAQQSVHSIAKVLAQFEREPGKAHQFRPTGAVPLDARSVSYKAEAISVLTLEGRLELPFRLGTFQHDALLKAAAIGGATLSRRKDGRFFLGVSYEPVSDPLFETTKCLGVDRGLINIATTSDGEKVCGRLLEARREKRRNVRASMQRKAAKQKKAARRPQSIRRRLKTLSNREALMQRDVNHCISKKLVQRAKGTARAIALENLSGIGRRTRFNRSMRRRLGGWAFFQLGTFVGYKAERAGVPVVEIDPRNTSRECPECGHINQKNRRTQAKFKCTKCGHTGLADCVAAENIRRRGESQLARSRGKGREHLLAA

SEQ ID NO: 40639 - protein, 378 aa, unknown
  TnpB Polypeptide
MLRAIKVRLYPNKTQDQTLNKVLGCYRFVYNHMLALKQKEYNENKKSLGLAELSKYFHGILLKDEHYAWLKEQNTKVMKPAINQMLSAYDNFFKQHNGFPKFKSKKDKQSALFPLEAISKKNHFNDRKITLIKSLKDIRFRCSDLYFKRLQIYKEKIRSATLSKTKSGNYFLSILVDLPQEEFVKFGLTNKHVGIDLGIKDFVITSDGEVFENRHFFKKQEVKIVKLQRQLSKKQKGSNNRNKQRVRIAKAFEKLTNQKNAYIHSVVNELLTYYDTIFMEDLNVKGMLKNHHLAKAIQEIGFYRFRQILVDKARNNYKKVVFIDRFYPSSKTCSNCGYKNQGLKLSDRSWTCPNCGEYHDRDLNAAINILHEGERLIS

SEQ ID NO: 40640 - protein, 415 aa, Gloeocapsopsis sp.
MQEERLHYFRKLHKDLWNACVYHRKTEYQKFGKNVTYYDQQNILPAFKAEWVEYKELGSQALQATVKRADFAFQRFFSGLGKYPKFKSSRYYRGWTYPASSGWKAHTTGDNGGLELAGISGQIQMRGAARTWGIPTTCTIIWKRSKWYASITVNCDPKRETSTGAIGLDIGCLTAIAMSDGTKVDNPRFLATAQKDINKVSKQLRRKRSPQRKTKASRRWKKVRKQVSKLQNKVANRRQNWVHQIATEITSTNSLVATEELAVKNMTAKAKKGKRKRTRGASTRGTRATHSLQKTGLNRSILDVGFGMLRQAIKYKVIEAGGVFVDVPTKKIKPSQTCPQCGTQKLKSLDERIHQCDCGCTLDRDVASAIVCLNYSLGLGTSLTDGDDLALPKTPKKCGGFRQLNQMKRQKLSEA

SEQ ID NO: 40641 - protein, 231 aa, unknown
  TnpB Polypeptide
VILYSKKVTSKADRYYVSVLVEIPNVKIANNSNGGIGIDLGLKDLAIVSNGKTYKNINKSTRIKKLEKKLRREQRCLSRKYENLKKGESTQKNIQKQKLKVQRLHHKIDNIRTDYINKSIAEIVKTKPSYITIENLNVSGMMKNRHLSKAVASQKFYEFRTKLKAKCDENGIELRVVDRWYPSSKICHCCGAIKKDLKLSDRIYRCDCGYVEDRDFNAALNLRDALTYEVA

SEQ ID NO: 40642 - protein, 307 aa, Bacillus sp.
MIKQNKAYKFRLYPTEEQAHLIRKTFGCVRFVYNKMLAERKEIYETYKENKEELKKQKFPTPAKYKVEYEWLKEVDSLALANAQLNLQTAYKNFFSGQSDFPTFKSRKSRKSYTTNRVNGNIMLFHGYIKLPKLKMVKLKQHREIPPSHIIKSCTISMTPTSKYYVSILTEYEKEIVQKEVQSVVGLDFAMAELYVSSEDEKADYPRFYRQMLEKLAKAQRVLARRVKGSERWNKQCIRVAKLHEKVANQRKNFLHHKSKELATSFDVVAIEDLHMKGMSRALRFGKSVADNGWGMLTTFLAYKLQE

SEQ ID NO: 40643 - protein, 358 aa, unknown
  TnpB Polypeptide
LSKFSCSPTPTSERRSRQPSRSPTKRPTSAPRSPGSGAPFAPTTSSGSPTVRFARSGSAQPAVRVIKKVADAYKLDRRTKRTFRADAAQPYDDRCLSWQPDQQTVSIWTVAGRLKGIRFAVGEQQRKLLAHRKGESDLVHRNGKLYLYATCEIPEASMVAPNGFLGVDLGIVNVATTSDGTRYAGKHLNRIRYRNQRLRAKLQRNGTKSAKRLLKQRCRKEARFAADTNHVISKRIVAEAERTGRGIALEDLQGIRGRVRLRKPQRATLHTWSFHQLGSFIGYKALRAGVVVIHVNPAHTSQSCSGCGHVDRANRQDQATFCCRSCGFAGHADWNAARNIAERGGAGWAAANQPHADG

SEQ ID NO: 40644 - protein, 371 aa, Methanothrix sp.
MKTACKFRLYPTKQQEAQLDLTLEICRHLYNSALADRKNAYEVEGISRTYEDQAAMLTVEKKDGNFRGVFSQVLQDALKRLDKSFKAFFRRVKAGREPGYPRFKGQGWYKSFTYPQVGFKLECSKLTLSKIGSIRIFKHREIKGKIKTCTIKKNKLGCWYAILVTEINDVPQIEPKKAIGVDVGLKSMVALSTGETVQYPRYYILAEQKLAVAQRNLSRKKKGSSNRQKAKLKVARLHQKIQNHRDEFLHQISRKLVDSADIIVFENLNILGMLKNRHLAKHIQDHAWGKLIQFTQSKAAKAGKVVELVVARYTSQKCSQCGIIVPKTLAVRVHHCPNCGLEMDRDVNASLNIRTLGLRGRACGDARALDL

SEQ ID NO: 40645 - protein, 372 aa, unknown
  TnpB Polypeptide
MGTRKTFKYKAKLSKTAEQNALQWLSYCQKLYNLALEQRITAYKRCGVSLSTYDQNNELPEFKKAFPEFKQVNSQTLQDTVERLGKAFQGFFSRLKKVGEKAGFPRFRSFHRYDSFTLKTSGWKLDGRHLKIKGIGILKLHLSRPIEGKIKTITVRRDSCGDWWVAFSCDYVPKRSFPEPRADVVGIDVGVAHFSTDTEGLHVANPKYYREAQAELRRKQRKVSRRKKGSNRRRKAVRELARAHRKVANMRLDFLHKTANYYINNFQMICIEALKVKNMVKNRHLSKSIADAGWSTFFELLSYKAVEAGRELVKVTPKNTSQNCSGCGKKVLKSLATRVHNCPYCNLSLDRDVNAARNIAAAGSGQLLQALT

SEQ ID NO: 40646 - protein, 195 aa, Staphylococcus sp.
LSTALKLYHFYFDYWATIVGIDIGTSEFLSASDLSMEKIYTDQSKEVSRIITKYQNRLTDRNMDAGKIERKFLKGLKKHINSVIKELLELYPYPRIFIIGKGSSINEQDSIYGKVFAMTHKCLYKAIEDYDEIVLIDEQFTSLICPRCNHKNKKNRTKNNRFHCQFCGYEHPNDNVVASYNIAQRFWENNVTGKK

SEQ ID NO: 40647 - protein, 407 aa, unknown
  TnpB Polypeptide
MKLTRKVVLKPNKAMQQVLDSLCDYRRYCWNEALDLWNTLYEQRLIGLTDEERSMIQELVKSKQPLTEELQELNVLYPSPSQYTVRDLLVSQKEDWQYLLSSRVLQLAVKDLADVWSRFYENSKEFGKPAYRSRKTPKQGFKTDSSRIVNGKLVLDKPQPYKGEWYPISFQGAKLPDGKISLCSITRINGKYYASLMVEVETPNLIKTGKINAVDLNVDHFETLEGRFNLQSKVLNKLYNRVKYYQRVLARKRLENSDYKNSKGYQATRAKLQATYDRIRNIQDDLLHKFTTSLFVNYDTVVIEDLDVKKMQMRKQAKNLHRSLFGRFRQYMEYKAIKFDKKLIVADRFYPSTQRCSSCGFVKTGEDKITLEGNKKHGTKHNEYVCYECGFTADRDYNAVLNLLALA

SEQ ID NO: 40648 - protein, 482 aa, unknown
  TnpB Polypeptide
MEKGKQLFVYTRKLNANKSHKEQFAKRFRMADDIYKKTLIALLKRYSKMKKDPLYKKAYKFPKGKDRNAILKELGIKYDLVGKFTASKFANDYRNARNYSDYIPCAVAKMLGFRAWRAFSEVLFAKGAEKVNLRGTLESFEGFNTSSVSVKDNIFTISTRKKKVSCIIHNENDEFEEEILRNTLKYNRLVRRFEFGEWSYYVQSIFEGTLPVKYTSNLEGSVGIDIGTSTIAVSSHYQTELEELAKDVMIDEQEVARLNRKLDRQRRANNPHKYNEDGTIKRGVRQPWVDSNEYLKTKAKLNELHRKAKTQRKLAHKTLANKIVQMGTTFVVEQMSFKGLQARTKETKVNEKTGKYQSKKRFGKTILHKAPSMLIEQIRYKTMYQGKTFVLANTREVKASQLNHLTEEYNKVSLGTRAKMIGNDLVQRDLYSAFLLQHVGLDGVTVDIDGCKSDFDTFLRNQEFTMSQLNTDLKSIGKEYFN

SEQ ID NO: 40649 - protein, 443 aa, unknown
  TnpB Polypeptide
MEKRKFTTVTQLHEKQNPELLAYVESVLPSYAQALRETFHTIKRDSSFNKSNYNTYLQDKYDITKRTANSIISDAQGRLNALVELKRYEKKQLESKISYLEKELIPKLVQKRENNSSLLREGKLVSLIKQRNLRLKIVSKKNKLNRLKQKLSNLDYQLKTGKLKLCFGTKSLLQRNPSAFIERRDSQISFVGTKTETAGNQLFQLSYLTNKNQFSIKLRKDFGFKKAKGEDRYVSGQVYFRHHKDKILSILKKQNSPLSYKIVKKENRFYLYCTFELQVEKEEYVTRSSHGTIGLDFNKGFITLSETNAYGYLVQTQFLPYRFRSGNKTKTDLQRIACHVVQLSRSKGKDLCIEDLDFKKTKSHTDTKEGKKYNQMIHSLAYRQFVEIMESATYRQLVHLVKVNPAWTSWLAKELYCPRMKLNIHVGASYVIARRGQGLKDSV

SEQ ID NO: 40650 - protein, 539 aa, Mycobacterium sp.
VRTRLHLTEEEGATLGEVGMFLGWVYRRELAHRITLGRMDRKQHGRWRAERKQAITVVASSRWAGAITRTVEDQYQLGMRALTAEVTDVRTVIGVLEQRCALRPGEVAAPADVVGGPRRHSRRPVRGYASAAQRFSKTRRLAALRSRLVEAQTALRAGWASITVGGNRLWRTRQHLDAAEMSEQHWRGRWDAARMFLVADGETGKTGGNETIRVDESGHLRVKVPAALVDRFGTHLHIVAPVVFSHRCQEWADRVAGRRALRYDITFNPAKGRWYLDASWTTTPGPAPTLEELRGGPVLGMDLHADHLAACILDDSGNPVGGPLTIPVETAGLRATRRDGRVRAAITALLDVAVHHNCSAVAVENLNFADARAAGRETMGSGQRGKRLRRTIAGLPTRRFRDRLISMATRRGIGVIGVDPAYTSMWGGQHWRKLLQQQTSDPAAVTVHHGAAAAIGRRGLGTPIRRRPAGPRTQQRMRASTPPARPDQPPTPHDGAVVLVHRHAHNDDEARRSTRQHAPSAANTVRVAQASLLLTNQER

SEQ ID NO: 40651 - protein, 388 aa, Mycobacterium sp.
MLAGRRFRVEFTDEQAVFAEGIGAVCRAVWNTGLEQRREYRRRGAWMNYGPQAHELAEAKTEHPWLKDVPGHCLQQTLMDLDKACREHGTFRVHWRSSRRWVPSFRFPEGNKMAVEKLNRRHARVKLPKLGWVKFRASRSLEGETVRSATLSREGAHWFVSFLVDDGIEAPAVHAASGTAVGVDRGVVVAVATSDGELADREFVTTGERRRTLVLARKLSRAAKGSANRTKARQALAKLRATERHRRRDFCAQTAHRLARLNAVVVLEDLKTRNMTRRAAPVEDPDNPGQFLPNGAASKSGLNRAVLGKGWYRFEQALTSVSRYTGTQVIKVPAAFTSQRCPVCGHVDPKSRESQAVFRCTNCPHGPVHADVNAAKNVLAAGLAGHRL

SEQ ID NO: 40652 - protein, 667 aa, Mycobacterium sp.
MAPAPTDSTVAISGDVVAPRRRGRSKAPNFKYDGPVSVIRLELDATEECTRRRLETQWAAVFRLRRALQRDAAARCRAFWAATHERSDDPKALRERLGLTRKGIEDAAKRHIAASGWMRHHLTKAVGLHVADEVWETIDRYLFADASGRRHGPPRIGSWWEFIRIPGRARSHTKAHPTWETYRLVGTLDGHLAAFRHRQLPAGARTACEAAGQPSGTSILTQPGRLPAPARPASKSWWDHDGALAVVFTGLPAGDLVLPVRLPQGAGQWPHLTHFLADPAVWHKVDLVRVRDRKAPGGWRYYAHLLVHRCGYQSPSTITRRGGVVPGRRVGVDANVSNLAVASFPIEQPEHLAVEQILCTPSQQRAADRAAKKTRERQRALDRSRRNTNAGQYSPSVRQQKRAQRRAAAGLAARQVSNPGGARHARADGVPLRAYRRDTLSGRYQRARCDHGADARRASQAKKARAAHVAAAIVAAHGNTVTVEDCRISTWARLWGKRIALFSPGMLVAALDAECAATGGVFSRASTHATAMSQHCLCGARVAKTLAQRTHDCPLCGLRGDRDIISAALAACVELTNPDDPRTATVDYRLAHALRDGLASQQEWEGSVNRHQPPAAPAAGSARTGSHQPVAPAEQAAPGPPPNRPAGKAGRRGTSRKQPAPKLIGAA

SEQ ID NO: 40653 - protein, 402 aa, Escherichia sp.
VERLQAFKFQLRPGSQQEREMRRFAGACRFVFNRALARQNENHEAGNKYIPYGKMASWLVEWKNATETQWLKDSPSQPLQQSLKDLERAYKNFFQNRAAFPRFKKRGQNDAFRYPQGVKLDQENSRIFLPKLGWMRYRNSRQVTGVVKNVTVSQSCGKWYISIQTESEVSTPVHPSASMVGLDAGVAKLATLSDGTVFEPVNSFQKNQKTLARLQRQLSRRVKFSNNWQKQKRKIQRLHSRIANIRRDYLHKVTTTVSKNHAMIVIEDLKVSNMSKSAAGTVSQPGRNVRAKSGLNRSILDQGWYEMRRQLEYKQLWRGGQVLAVPPAYTSQRCACCGHTAKENRLSQSKFRCQVCGYTANADVNGARNILAAGHAVLACGEMVQSGRSLKQEPTEMIQATA

SEQ ID NO: 40654 - protein, 401 aa, unknown
  TnpB Polypeptide
MILRAYKYRAFPTKEQEVLLAKHFGCSRWIYNYALDKKIKAYQTTKESLSRFTIQKDLPVLKKSEKTSWLKEVNSQSLQASLENLDKAFTKFFRDKKGFPKFKSKHDNRQSFSVPQNGIVDFETNTISLPKFKKPIKCKLHRRFEGNSKTVTISKTPTGKYFVSVLVEVNEELPKLKTIDENKAIGIDLGIKTFAVLSNGEEIQNPKHLRSALKRLKKQQRRVSKKVKGSNNRKKAVMKLAVLHEKVANKRSDFLHKVTAKLVSEHDTLCLETLKASNMIKNHKLAQALSDISIGKFNEILEYKAKWNGVNILRIGQFEPSSRMCTCGVVNKELKLSDREWVCQSCGEIHNRDLLAANNIKRFAFVKNNTGGTPEFQACGDKGLPLSEKQEAQPIAYGVGG

SEQ ID NO: 40655 - protein, 389 aa, unknown
  TnpB Polypeptide
MCYNYRHRVCVAFKDRKEVIDMEKAFKFRIYPNKTQQVLLQKTFGCTRYIYNYFLAKRIELYKQDKSSMSYNQCSKELTVLKQELTWLKEPDKDALQKSLKDLDVAYKNFFARPEAGFPKFKSKHDRHKSYRTSYTNGNIKFLVKKIQLPKLGKVKIKDKRTHLEGRILNATVSREPDGKYYVSICCTDVPMVALETANHNVGIDLGLKEFAIASDGTKYANPKYLAKYLKRLKFLQKSLSRKTKGSSNRNKARIKVARLYAKITNQRRDFLQKLSTELIRNNDMICLEDLQVKNMVKNHKLAQAISDVSWSEFVRMLSYKAEWYGRKIVKIDKFFPSSQICNCCGHKHSETKDLSVRKWACPQCGTVHDRDVNAAINILNEGLRIVGL

SEQ ID NO: 40656 - protein, 371 aa, unknown
  TnpB Polypeptide
MFTQWKTNPGMEWLLAVSSTPLQQSIRHADMAYRNFLRLYKAGRTHIVTNHRTGKRHRTGVPRYKSRRDGEQSAEFTKSARFKVEHADGCKWGFLTLPKIGRVKLRWTRELPSTPNTVNIMRHADGSYEASLTVQVDDESDAPRPLHEACGIDMGLDSLMSIVYTDGTREKIPHPRTLKRHARRLRKLDKQLARETKGSNNHAKTRLLKAKTYSRIQNQRKDTAYKLASKVAGENQAVALETLNVKGLARTRMAKSLLDANWTRIIDRIRQLGVQYGRTVKRIDRWYPSSQICSVCGYRDGRKPLDVRIWECPKCGALLDRDWNAAVNILDAAGLAESLNARGGDVRRGLAQADRNADACETGTRRTVSLH

SEQ ID NO: 40657 - protein, 480 aa, unknown
  TnpB Polypeptide
  misc_feature (60)..(60): Xaa can be any naturally occurring amino acid
  misc_feature (274)..(274): Xaa can be any naturally occurring amino acid
  misc_feature (297)..(297): Xaa can be any naturally occurring amino acid
VVTQTVSIYARLSKEQFKIVDTLCFLSKNLYNVGLYNVRQHYHNIRLAGLDTLRPDLIAXWMDTKKTYVPYTRKKDDPNKDYSNYNLSKVNENYGLLHSDPAQQTLKSVEEGYKSYFGLLKLKAQGKWDNPVHPPHYLDIKNGRYKVAYPRQHLTIQGNQVTLGLSNKFKKLHGYTGKELAFKIPSYIKPHQIREVTLLPIHNGKCYKISFSYEIKKPPKIELDPTKYLGIDLGVNNFASLIENATGTAILLDGKYLKSLNRWYNKENAKLQSXKDKQGIKGITKRQHRNLVKRENXISEAINRYVNFVVDYAVKNHIGNIVCLRWDGIKDKREASKTGNQNFVQIPYDKFRKRTEGKCALYGIKYHGDDSEAYTSRTDALAFDEIKKQPYGKSRRIERGLYKSITGHVFNADINGAMNQIRKVAGDAPIREIASSGRFNRPVRIRLAYEPTNFSKIIGTECVAQPGNLPFNPPVLTGGS

SEQ ID NO: 40658 - protein, 335 aa, unknown
  TnpB Polypeptide
MKVLKGYRFRIYPDEEQLTFFRQTFGCVRFTYNQLLMARKNTANSEESMKLTPAALKKDYPFLKKTDSLALANAQRNLERAYANFFQGRASYPKLKNKKSTWQSYTTNNQKHTIYFVDEKLKLPKLKSLIQVHQHREIKGLIRSATISAKNNEEFYVSLLCLEEVTSLPKTKKAIGISYCPKHLLHVSKPLDHLETIEEQMQEDRLIKAKRKLLLRAKIAKKHKVKLKDAKNYQKQKQKVHKLIQEKACRKKDFIDQLTFSLVKEFDYIFVEKQPSTADSEETSLFTSSDWYLFMQKLTYKTQWYGKKYLAIEKPANTENSGQMIEELGKQRLGL

SEQ ID NO: 40659 - protein, 396 aa, Nocardia sp.
VQLRYNYRVYPTPGQQILLARAFGCARVVYNDNLRTREQAHAAGVKLSDTEVQRRVVTDAKHTRKRAWLSEVSSVVLVQACQDARTAYRNWFDSLSGKRKGSKVGKPRFRSRKDHRQAIRFTRNGFSLRDNGKLYVAKIGELTVVWSRELPSVPSSVTVIRDSAGRYFASFVVDVNSEPLPIVESEIGIDLGLATFAVLSDGKRIDSPQFLRRAERRLKKSQQALSRKQKDSSNWVKARIRVAHAHSRVAGTRRDWVHKHSTAIIRDNQAVFVENLCVKGLARTRLAKSVHDAGWGMFVRMLEEKAARYGRTFAKVDRFFPSSQLCSVCGVLDGPKPLSVRSWTCACGAVHDRDLNAARNILAAGRAERLNACGADVRPSLVGAVGDEAGTHPDAA

SEQ ID NO: 40660 - protein, 368 aa, unknown
  TnpB Polypeptide
LNIAYRFRIYPTEEQKILLGKTFGCCRFLYNQMLDDKIREYEKTKKMLKNTPAMYKREYPFLKEVDSLALANVQLHLEKAYKNFFRDPKIGFPRFKSKHHSRNSYTTNVVNGNILVESKKIRLPKLKWIAMKKHREPAEGLRLKSVTVSMEPSGKYFASLLYEGYSCENQAAGPDYSTAKILGIDYAMHGMAVFSEDIQKENEGYFRKSEERLAREQRKLSHCVKGSNNYYRQKKRVALCHEKIRNQRKDFLHKLSHEMAETYDVVAVEDIDMKAMSQCMHFGKSVMDNGYGKFRELLEYKLTWRGKKLVRVDRFFPSSKKCCKCGSVKKELKLSDRVYLCTCGNRIDRDLNAAINIREEARRMLLAG

SEQ ID NO: 40661 - protein, 419 aa, unknown
  TnpB Polypeptide
VILAHKIALEPTPEQAAYFARACGVARFAYNWALARWRQEYALRREYLCGPKPSELALRRELNALKGSAFPWMREVTKNAPQQAIKDLGAAFESFFGGRAKLPRFKKKGRSNDSFRADNGTDKHHPNAVEVDCKRVRLPVIGWVRMREALRFKGRIKSATVSRVADRWFVSLGVEVDHVPPVRENQAAGGVDLGVKAMATLSDGSVIEGPKALRTNLKRLRRLSRALSRKAKGSANRRKAQARLARLHARIGNVRRDALHKATTSIVRKFAAVGIEDLNVRGMLRNGRLARAIADIGAFEFRRQLEYKAPMHASRVAVADRWFPSSKTCHVCGCVHDGLTLSDREWTCDGCGAVHDRDHNAALNLRLVAESSLAAASLPERSGGSVTACGEEGSGLGLAAKAKPASTKQELEHGMFVYA

SEQ ID NO: 40662 - protein, 387 aa, unknown
  TnpB Polypeptide
MSVRTIALTLKATDTEKAALERLQAAFNEACNYVSEVAWREQEFNSVRLHRLAYYDVRAIYGLLAQHAVRAIGVVADSYTADKATRHTFKPAAAVVLDTPRLYRIEHNRASITTRDGRLKVELNIGGFQRQQLANAVKLAEADLVRDHKGRWRLLVSAHYVDPPPIDTDSVIGVDLGRTDIAVTSDGATFSGAHVTAIRDRYARNRTRRQRKASKGTRSTRRRCRQAQKRLSGREHRFQAQVNHIISKCIVDSAVVSGRAIACEDLTGIRERTNTQPRSKMERRRSNAWAFSQLRCFLAYKCQAAGVPFVLINPAYTSQMCHCCLHMGDRSGKRFACLNAACRWCGDADYNGARNIALLGYSVTVPGGPPLCCLDQPGGRAAESPRL

SEQ ID NO: 40663 - protein, 219 aa, Halobacteriales sp.
MPDPERIDVRQARAVYDEGQGKWELHLVCKVEKDAPDSPGDGTTGMDLGISNIAAVSFGNETLLYPGGWLKQAKHYYKQIEYECEGENGLSDRARWAKRKLRRKREHFYHVLSKRIICECVERGIGTLRVGDLAGIRAEENGDGRNWGRHNNNKRLHAWAFSQFTSMLEYKAEAEGIEVVVDTERDTSKICSVCGRERKANRRHRGLYKCDRCGFVGNR

SEQ ID NO: 40664 - protein, 586 aa, Halobacteriales sp.
VETGTRQRTRQATERTAATTHAPPLRGKTKGFKFDPNGYVRLSKGPNAKGYWSDYILCAIDAPPTMPDPERIDVRQARAVYDEGQGKWELHLVCKVEKDAPDSPGDGTTGMDLGISNIAAVSFGNETLLYPGGWLKQAKHYYKQIEYECEGENGLSDRARWAKRKLRRKREHFYHVLSKRIICECVERGIGTLRVGDLAGIRAEENGDGRNWGRHNNNKRLHAWAFSQFTSMLEYKAEAEGIEVVVDTERDTSKICSVCGRERKANRRHRGLYKCDRCGFVGNRHDSTEFDSPLRPDRPGNAFKPEVEPKEGEAVLGKEVNSGFVGTDLEARLHGVGAERVTLVGLTTDHCVSTTARTAANLGFETVVVTDATATFDREGPSDVELSARESHDAALAHLHEEFASIVDTADLLWSSVGATRSARLLNTGEQGTGECFREGVNSAPKGARWCCSSMGIATNAIASTVRSARTGRTSRRSTRTNARSSPRRTSSPRPSGWAHLGPRLQVVSPRKRWNGPVAISAYSRTNTAPSTTLTSIRESPAAGRTCAASPRQASTRSAFTHPTSSGAICTAPTGRISSMSRARRA

SEQ ID NO: 40665 - protein, 376 aa, unknown
  TnpB Polypeptide
MLRAVKVRLYPTAAQANFLRGQFGAVRFVYNKGLYLKKHYYKAKGRNLDPIHDLKKLLPIAKKSKKYSWLAEYDSMALQEGLRHLKKAFDGFFAGRTGFPHFKSRRGEQSSYHCTNVSVGENWIKVPKLSAIKAVIHRPVTGKVKSITLSMDCCGDFFASILFEDGLAAPEPLKEVKESLVTADDMGLDAFFTDSNKVKVYAPKPLKKALKKLRKANRTLSRRQTGSKNREKARLRLARINRRVKRVRQDFLHKVSRKQVNESQALVFETLKINNMVRNRRLARSIMDAAWGEYFRMASYKAEREGKRVVKIDQFFPSSKTCSACGHVLEELKLSTRRWTCPACGAHHDRDENAAINLKRQGILHLRANGLVVLRG

SEQ ID NO: 40666 - protein, 425 aa, Thermovirga sp.
MELQMTKSEKIRESLSRTKDIRQRQVARTYVLKLEKLSRDKRKLLERAFLEAKWLYNWTIHQEDVFSIDGNKVKKVHVKVGEDFEERELTILGSQVRQEIADRIKDSIKALSRLKENGMKVGRLKPKKRVNSIPFKQYGVSHKIDFEKKRVHLQKLGSFKVRGLNQTPENAELTKALLVRKPSGYYVHITCYLPKENRKSIDKPIAIDFGVKDKLTLSNGLKIDFEIPESKRLKRLQKELVKKEKGSKNREKTRQKLAREYERINNRRKDAINKIIAFLKFYSLVIFQDDSVKSWHEGLFSREVQYSGIGKLKERLCSSLLPVLEVDRFELTSRVCSKCGAYFEDLRLSDRTVFCPECGNFMDRDLNACLVMLKKVSPALRVVGQGLPELTPVEREASARILGSNPHIRVSYLVEAGSSMLYSME

SEQ ID NO: 40667 - protein, 294 aa, unknown
  TnpB Polypeptide
MPKIPNYKKKNGHFVAIFTNQQVKVKQGFIHFPKAVNISPMKTSVSKPKQVRITPQATCFVVEVVYEKEVQKVETLPDSFVSIDLGLNNLATSFNNVGLAPFIVNGKPLKSINAWFNKSKAKLQSQLPKGIFSTLQINDYIHKTSRFIIDYCVENKIGTIIIGNNEGWKNSINIGKRNNQNFVQIPHTKLIRSIEYKADEFGILVKITEESYTSKTDNLVLEPLKKHGSNKIRGKRIKKPSLGKRGLFQSSNGMLINADCNGAIGIARKVVGDLALKPIIDKSIALMPRHRFSF

SEQ ID NO: 40668 - protein, 391 aa, unknown
  TnpB Polypeptide
MPAGGEGELTVTVRMKVSPEPEQQRAVLDLMRRYRDALNYSIRAIIAGKALSLTKAHRLLYKDLRERYGLPSKIAQDCYREAIAIAKSWLRNPRRGDMPTVKSLRMWLTHELGYRVKGDRVELAGGYRLRIIGWDRRYDDFPNREARLVFREGKFTLYVAKRVPRPAKYAPKGVLAVDINEGRVVVGNSSVEVRVETPVERALHYRRLAERLQGKYSSTRYMAWLRRRGVRRRVRHFHRKAKNIIEDWARKTAHIIVSLAKQSQLAVAREDLTGLVESLRRLPKGHRTALIALGYRRLAFWMDWQAEKNGVPILVVDPAGTSSTCPRCGAELVEVGYRRLRCPNCGLEADRDSIAVLNIEGRALSQMGGSLTTPTAPQMTDVNPNRWGEPP

SEQ ID NO: 40669 - protein, 645 aa, unknown
  TnpB Polypeptide
MKTVKHKIKPLTPEQEIQFLALVRAYQFEKNYWSDQLLDGSTDEINLKNLYTYQQIRNSKNLTKNNYQSKHHLPIRYCTIALKEAYDLHMRTYEAQIALVKKEVNNKIYKFKPVNEIKSISTNSLATPSLTEDGSVAVATPPNETTLLLKTFKQFLYFATNSLFYNYKTFRKFEEEFYSKKFKKARIYQRILPILQELFKKAIVKEVFTQYQQSLDDHIAHNETNTDELHKQLQENIKTIEQFVFSEFYEFYESLQSAQLAQLLEQTLYYYCNCLVKVIVQFRNFKPIQSQINPTITLDGGCYKLYSKYDEVAKKNRWFLDIMSMEVGKRIKGLELTGFHHAKKIMKRKKYANLVLSFDPNQIKDGDGFYAHFVFDSKPIKKTGNEVAIGYEANEVNAVKKASKPKKRKNSVEKTTKTNVSKNKPQLATLLTIGGDFGLTESFTFSDGWVSGRKQGKVLSYIANSTKDSVAFLQKRSEKGFFGVEKNNKTGKRNHKNNCFNHNQLLGNINESYRKKQQKHNCFLQNYKYLLVNEIIEHFTSDSVYGQYTNVNHDNPIQLVFESLDYTSLGFDANQKRQINLIKGILNVLEEKIEKYNLPIKIIYVNPVYTSQACPNCCFVAKKNRDFKEGRFRCQHCGLLRYCKR

SEQ ID NO: 40670 - protein, 391 aa, Campylobacter sp.
MWKEVKSMLVNKAYKFRIYPNKEQEVLIAKTFGCSRFVFNYFLAKWEDAYKQTGKGLTYNACSSQLTQLKKQFVWLKEVDSIALQSSLKHLDDAYDRFFKKQNDKPRFKSKKNAVQSYTTKHTNGNIAVLDQHIKLPKLGLVRFAKSREVEGRILSATIRRNPSGKYFVSILVETDVQALPKTGSAVGIDVGLKEFAVLSDGTKYANPKWLRKLEEQLAKAQRILSRRKKGGSNWNKQRIKVARLHEKMTNARHDYLHKISTEIVKNHDIIGMEDLSIANMLKNHNLAKAIQEVSWSMFKAMIEYKARWYGKQIVTVAKNFPSSQLCSCCGYQNKDVKHLALREWECPVCHTHHDRDVNASINIKNEAIRLLNRRNCGDRLLNNRKNFRCS

SEQ ID NO: 40671 - protein, 406 aa, unknown
  TnpB Polypeptide
MRLVEQHTIKPSSPYYKELMDLLHKCKNLYNKGLYVVRQHYFQYKDDNTVKYKYLNYYSLEKKLRDENDPDYRALPTPVSQQVLMMVDRNFKSFFNLLNKKNRGEYSEPVRIPKYLDKDGLFMAVFTTIAFSQKWIKQGVVKLPKQFSFTTRTNKQNIQQLRFVPKNGFISLEIVYNKKEKERLGDNGKYLGIDIGLNNLASCVSNTGSCFIINGRPLKSINQYYNKRLAYLKSKLGKNKYVSKQIISLTNKRNNKIKDYLHKASRILVNHVVSNGINTIIIGHNRCWKQEINIGKRNNQNFVSIPFNTLISMISYKCELEGINVSIVEESYTSKCSFLDNEKPVKHDSYKGNRSKRGLFRTMSGAIINADINGAFNIIRKSKESFDVTTLPEGRGFWWNPVRISV

SEQ ID NO: 40672 - protein, 409 aa, unknown
  TnpB Polypeptide
MRLVYRFNIGKDEEISKLCKVSNNLYNQALYVFRETLKNESKWLSYFELDKILKNTKNLDGKINYRLLKAQCSQQVLKLLDNNIKSYYRSIQDYKKHPNKYKEKPGLPKYRKRGSEFNLYYPNQSCIIRNGKIILSKKLFVDIPQYEKYSGLLENFKQVRILPNYAGYRIEVIYEVEDIEIPKSKEEKIASIDLGIDNLATLVSEDFTYLFSGKFVKSYNKLFNKTLAKLNSIKDLQKIKGITKRINKLYYDREQYIEDVFHKISRKIINLLTNSGITKLIVGYNKGWKQGVNIGKRNNQKFTQIPFARLISYLEYKCELAGIEIVTHEESYTSKCDSLAFEAIGKHENYLGKRKKRGLYQSSTGKLINADVNGALNIMRKVVDDSSNYVQRIIDRGLLFNPVRIKSVF

SEQ ID NO: 40673 - protein, 394 aa, unknown
  TnpB Polypeptide
MKTVLDSLCDYRRYCWNQGLELWNTLYEARLIGLPVELRDKIKASLTDKTIRFSEEEQALRALFPAPTEYVVRNELVAQKADWQFELSARVLQQAIKDLATAWNLFFNNPKTANKPSFQSRKKPKQGFKTDRARIKNGRLMLDKPHAYKGEWSSIRFKGTSIPDGKLKLCAVTRTKGKYIATMTIDAETVVLPKTGKKTAVDANVDHFDTTDGQISLKPELLDRLYAKVRTYQRQLARKRKVNKNYRHSKGYQATRAKLHATYERIRKVQNDLLHKFTTDLYRQFDTVVIEDLDVKGMQMKKKSKNLHRSLFGRFRQFMEYKAEKFGKTLILADRYYPSTQRCSKCGHVKTGDEKITLSGNQKHGTKHREYICYQCGYEDDRDHNAVLNLLALA

SEQ ID NO: 40674 - protein, 156 aa, Clostridiales sp.
MNKIKTEGGEVRYKKTKSIIKLENQLKKLNQRLTNIRHNYSHQITTEIIKRKPSFIVVEDLNVSGMMKNKHLSKAIQQQKFHEFKRQLEYKSEWNNIKFIVADRYFQSSKTCSQCGSYNKDLKLGNRKYICECCGSVLDRDYNASLNLKNYGQEVA

SEQ ID NO: 40675 - protein, 210 aa, Methanothrix sp.
LPRIDPQKAVGVDVGLKNIVALSTGETTQYPRYYVQAEKKLAVAQRDLSRKKKGSNNRQKAKIKVSRLHEKVRNLRDEFLNKLSRKLVDSADLIIFENLDINYMLKNHHLAKHIQDHAWGKLIQFTQCKAAKAGKVVELVNARYTSLKCSRCGIIVPKTLADRVHLCPKCGLKIDRDFNASLNIRTLGLRGRASGDAGVSGSMKQEALSL

SEQ ID NO: 40676 - protein, 424 aa, unknown
  TnpB Polypeptide
MKRKKNVKHYLCIKQQLKRLTKEEYLTLRELCYAAKNLYNEGLYSVRQYFFQTEQYLPYSKNYHLLKNSENYKMLNSNMAQQILKEVDGTFQSFFGLLKLAKQGEYNFQDISLPHYLPKDGYMTLVVGFVRLNENQFVLPYSKSFKKTHEPITITIPPVLKDKTIKEIRIIPKANARFFEIQYTYEVEKIETITDQNKALAIDLGINNLATCVTNGGYSFIMDGKRIKSINQWFNKENARLQSIKDLQGIEGTTKRQAYVARKRNNAVNDYINKTCRYIINYCIENQIGHVVIGYNKDLQNKSNIGRRNNQNLVNLPVGEIRKKLEYLCKLYGIHYVLQEESYTSKASFFDGDTMPVYSKDDSQNLVKFSGKRVKRGLYRTSTGYEFNADVNGALNILCKSNVVCLTALYSRGVVATPMRIRVV

SEQ ID NO: 40677 - protein, 377 aa, unknown
  TnpB Polypeptide
MMLRAYRFRLYPNCSQEKALRHHLWLSKELWNRMLDYSKSKYKYEGKFASKKELREMVKHQGLFSQVAQELVDRLVDATFRFVRMKKAGEDCGFPRFKSFDRLKSLCYPQVGFRLVENRLKVTPFGEIKLNLHRPVKGKVKTLVLKRESSGKWFAIFTSEESATFRSNQGVKVGIDLGLSKLAVVSDGSIIANPRCIRRHERKIALLGRRLSKKKRGSRNRVKAKVKLARAYEKVANSRLDFLHKTSRSLVNRYNMISLENLNIKSMIQEKFGKQINDAGWGMLASMLCYKAESAGCKVVFVNPEGTTQQCSRCGIIVPKMLADRVHNCPNCGLVLDRDLNAAHNILRRSTVGHTEPEACEVALKGVTMKQEAHTYS

SEQ ID NO: 40678 - protein, 494 aa, unknown
  TnpB Polypeptide
MIKFRALRELYNTVLGELFKRSQRMQSDTRYVETCKAYQKDKTNKDTQLAFDELQSEYELTQGHLQSFATSIKNKSYMSDHLDAHTTQVISDRAFDAYMKWRMGKRGKPRFKSWKQGIRSIQGKTNSCIFMNKKGKVKWGHLVMDCHYDVIDRYGVQAHALNSEVKYCRIVHRLIKGKNTFYVQLVLKGTPLIKANQQIGYQKPVGLDIGVSTIAAVSKEKALLTPLCQALESHQKSIHKLQRKMARSQRFNNPDNFKDSRFVKKDKHVHKKQGMIKKGKKTWVHSKTYQKDLCSLRDLHRKQRDKRQCLHNQLANEVIALGNCINIEKNHYKAWQKGWFGKTIGFRAPSNFVQTLTRKALKTGGRVEEINAWAAKLSQACHVCRGFHKKTLKERTHTCNGKPIAQRDLYSALLALYYDEEEINIDSIRQDWESLDTVLKNAMLVVHNSRMAGQHVPDCLIPRQIEKRECIQTSLSVIKQTECQQYQQSEFNNR

SEQ ID NO: 40679 - protein, 440 aa, unknown
  TnpB Polypeptide
MKKSYKTKIRGLSKKQLDRLKELSNSAKNLYNQALYILKNEYKTTQKHLSYYEMDKIMKQTLNLESEINYKKLKAGVSQQILKKLDINFSSFFKAIKSYSKDKSKFKGCPKPPKFIKDNYYNLIYDNIRFQVKNDFIVLEKALKDENGEILVDKLEIKIPKYLIGKKINQIEIIPKYGYFEAIFVYEDTKNYKQIAKNKNVVGIDLGLNNLATVVSNGIFKPFIINGKPLKSINQFYNKIMAKLKSRLDKGEQKWSKRLQKLTDNRNNKMKDYLHKSSQKIVEECINNDISTVVIGNVANSNNKINLGKRNNQNFVNISLGQFVEKLKYKLEAHNIDVKVVEESYTSKASFIDNDKLPKKLDIAKKFKFSGVRVKRGLYKPLNAIFKKVNADCNGAYNIIRKVVPNFSFEELSKKVNDGIAGWFLPHIKIIDMSIKVNVN

SEQ ID NO: 40680 - protein, 255 aa, Streptomyces sp.
MATGYLLATCEVPEAVLNALPEGFLGVDLGIVNIATTSTGIRHSGRGLNRTRDNARRVRSKLQRKGTKSAKRRAKKYAGREARRARDINHKISKGIVAEAERTGRGIALEDLGGIRERARLRKPQRTALHSWSFHQLGAFVAYKAKLAGVPVVYVDPAYTSQECSRCHHVDRRNRPAQAVFACRSCGFVEHADLNSSQNIAARGWWTGFAGPSHRPLPAPLSRSLRKTPEVAGRSRGLIAANDDPSSKPRTFSSG

SEQ ID NO: 40681 - protein, 363 aa, unknown
  TnpB Polypeptide
MNCGNFKIPLTSGLMGCSHGKDVQVTVVGKVFKPNRKKILALNRTLNEYFRLVKWYLNFNSTSKKFLHENGYESAKRLFNLNTALIQTARDKAIEILKSFQKNKKDDSILRLRRISIRFDKRCYTFSKTTNVLTPYWLTLSLNRRERISLPIVFGERRKQRIEESLRGEWSFTTVEMVKRNGEWYAHFVLKKTVELPDEPETVIAIDRGERNLAVAVAILKDNPAKPMKGQFWRSEEIKRIRGLYSHIRRKLQKKKLLRKVKELESRERRKVNQQLHIIANQIVQYAKQFPKPVIIMDNLNGIRRNFKKSKKLNKRFHSLPFRKLQTYIEYKENLEGIEVRYLSKKETMNTSKTCHRCGHVAK

SEQ ID NO: 40682 - protein, 632 aa, unknown
  TnpB Polypeptide
MYTPSALDKVMRSYQVVLKCVDQHQREEINQRIRHLEERQDELLSPQLVKQAVDLYRETLEDRFFTRQLGKRVGRNPNIAESAFHWLHIAVKGKVNKELKVQGLFNFMLKNPQQLVEWMIFGRSPYTEISLHKYWRLKRRYIINLLTSTRLQADSYWRKKEKRNYSLQFLKFNALLPSCTQLDIVQAIDDALFYYNHEFSLLPQLKKNQKAFLEKLKLLKKEQNTVVPFLTSWINSSQISRWKSLRTLAEQLALVIGKPSRKLFSAVRLIVVFTLFDNYIQSVPQLIKVLPLEKVVPLPFKRKKKGRLPIKLLMKKDYVIARQGNAQELTKQIKHQGWTELGFPKKGKKRLTAKVYFPPKVLEYIKNGACIRVFQVSSGKAPSFKPRVDVVLEGSHDCFHSSVLLQRYLSNIPGKKAAIIGVDINRLGPYMVRFNVPIPLPQELLSLAEQYKLLSEKVLLELNRGLVRKRKEYDSQGCCKLKGELNRVYTRRSRILREITRLLPHFLAAVLVKKNCKIFKIEDLTADPTGKKGALAKAIYTMPDSTFIYKKAVWLASLELGYDVQLEAVPAIFTSLIHYGCGGVITRQTSQYDIAPCKKCGQKINTHDNATQNIASRSGTTFPHDTFPSLHV

SEQ ID NO: 40683 - protein, 395 aa, unknown
  TnpB Polypeptide
VDADVVAATVGLTIIINFSYALSGVRYLLSYYEFIDKFLSCSMCVGFWVGGILRYLTYFDLASQLVDLKTELTWLNEVNSQSLQMTLRNLDGAYVKFFKGQNEFPKFKSKRRGSQSFQCPQKVKINFENKTLKLPKFKTPIDIIIDRQFKGIVKTVTISKTPTLKYFASILVDTGISIPEKIKIKEKTSIGVDLGINSYIILSDGTKTNNPKYLRKGLERIKHLQLKKSKKIKDSSRHKKLKLKIAKKYEIVTNQRKDFLHKLSDSITKNYDTVCIENLKISNMVKNHNLALSISDASWGMFVEMLKYKSEWRGKNILQIGTFEPSSKTCSCCGNINKELTLSDREWTCVKCNTIHDRDINAAINIKNFALKNKTGVERAKVNVELPTLVGTLKR

SEQ ID NO: 40684 - protein, 467 aa, unknown
  TnpB Polypeptide
LGDHPTGYSTGPRASVHPLQPACLAIGYSAARQGAQFARLARDVPPPAQAAVALDPLVLPEHGGQCQSGDHPEVHRKAIQDVSGLKTTVQVRLYPTPEQAALLRAHCQEYVSTVNVLVAALDTDVLPDGGKGTSTKDFTATLPSAVKNQVLRDARSVWKRSLALGVLPVLRKPICQWNNQNWRMEGDQLLVPVCQNGQVAHIAIRCAPMTLEGKPGVLRINRKRHRWIAEIALTLPEPEPTTGENMMGVDLGIKIPAVVHVIGKGTRYIGNGRYQRFRRRRFHAGRKQLQKAGKVRAVRQSRGKERRWMRDINHKLSRQIVAHAQQQGVGIIRLEELAGIRRRISQYTPRTACTSRGAQRHHAARKNNRMKNTWSFFQLTQFITYKAERLGIRVERVDPAYTSQTCPACFTRNKADDRRYVCVECGWMGHRDAVGAINIARRAPDTGRRAHSVGAAVASGSDGGWVA

SEQ ID NO: 40685 - protein, 385 aa, Nocardia sp.
VKQVVAVKLLPTAKQADALAATLLTANTAATWLSAKAKRDGQRSRTDLQRAHYRSVKAAGLSAQPALHVIRKVADAWKTRAANLEAGTYGPKDSTRYQRAANTPIRFRPDAAQPYDDRCLSWQYDTRTVSIWTTSGRLKGIRYTGSADQLETLQRYRQGETDLVRRDGMWFLYSTCEVPEPPLISPTRWIGVDLGLANIAVTNTGYRAAGRGLRRHREQQRELRRKLQAKGTKAAKRVLKRRRRKETRQATDINHRISKRIVVEAERTGRGIGLETLTGIRERVRLRKPQRATLHGWAFAQLSSFIAYKARRAGVPVVFVDACYTSQTCCQCGRVDRKSRASQSKFDCRSCGFVEHADVNASYNIAARAARMWECGAESAAPVPG

SEQ ID NO: 40686 - protein, 410 aa, Nostoc sp.
MLRVVKVRLYPDIQQQQSLAQAFGSCRWLWNYCLNLMNQTYKETGKGLSGYEVKKIIPQLKKEYEWLSLTYSQCLQQVCLNLGVAFNNFFEKRAKYPRFKSKHGKQSIQYPQNVKVADNCVTLPKIGDVTAIIHRPIERKIKTVTISKSCSNQYFAAILFDDGKDKPSVNTDGKAIGIDLGLTHFAVTSDESKFDNPRILTKHDKNLKLKQQQLSRKQKGSNNRVKARKKVARVHRKITNYREDFLHKLSRRIVNENQVIVVENLNVKGMMQNHKLAKSIHQVGWGMFCTMLKYKAEMAGKIYQEVDRFFPSSKTCHVCLNQVGSLPLDVRFWTCENCHTKHDRDVNAAINLRDEGLRILRLRSVQVLTSGTGDKACRPDVSRSKGGRKKSTTALSVGQEAYTVPSGQCR

SEQ ID NO: 40687 - protein, 282 aa, Nostoc sp.
MLLTYQFKLNPTPEQVVLLETWGELLRRHWNYALGERLDWLRRTRSQVDRCSLVCEPIGEIPDKPDYYTQASILKQTKELFPEYKNIYADCQQQNLMRMDKAWKRWLIPDKKGKRGGKPRFKKRGDISSFTLERVNSPKAGAHLTGNVLKLSKIGEIEVILHRPMPDGFEIKQATILSKADGWYCSFSLEDKTVPALLPIDEIKTATGIDVGLEKFLTTADGQSIEVPQYYRKAQSTLACQQRKLARKVKGSKNYQKQSNKVARLHLHVARQRKEFHYQVAH

SEQ ID NO: 40688 - protein, 293 aa, Nostoc sp.
MRGKARTWGNPTTCTIIWKQGKWYGSITVNCEPKRETSTGAIGLDFGTYHAIACSDGTIIDNPKFLANTQQKVEQTSKKLRRKRAPNFKKKIKASKRWRKARKQKSKLQNKVACSRQDWQHKVAAQIVSSNSLVATEKLNIKGMTRKATAVRSSRETRPHGCLKKDSKRKHQKTGLNRSLLDVGIGNLISLIKYKLSECSGVFVDVPLKIAPSQTCPQCGYKKKKELSERVHNCENCNFTADRDVAASMVMLNYAKGLGTSLSNADAEPLSETTQNCGSFRKVQQLKRQKPRT

SEQ ID NO: 40689 - protein, 384 aa, Micromonospora sp.
VDVKIVVQVRLYPDAVQEAALSATLKLCNDGANLASVEAFQRRIHTKRELQRLTYGRLKALGLSAQPAIQVARKVASAYATLKANIRVGNLGKPGSKRRVKAESKPIQFRRDAAQPFDDRCLSWQLADRTVSIWAVGGRLMRVRFGCSPQQHVTLVAHRRDESDLVHRDGKWFLYATCDIGDVEVKEPDGFLGVDLGIANIATINDGTRHCGKGLNRVRHRNQRLRAKLQRIGTKSARRLLKARRRKEARFAADTNHCIAKQIVTEAERTGRGIALEDLTGIRDRVRLRRPQRVTLHSWAFHQLDRLIAYKAARAGIAVVHVDPAYTSQGCSACGHVAKANRSNQSTFRCTSCGFAEHADVNAARNIAARGVAGWAAASLPSAA

SEQ ID NO: 40690 - protein, 325 aa, unknown
  TnpB Polypeptide
MKNLVPLKEKDEFLKEVDSQALQQSVRDFNSALDNFFRNRNYFGFPTFKSKRNSKQSYRTTHRNGKADVLDSKHIKLPKLGSVKTKHFDMPEVHRIFNITIEKTSTNKYYASICIETEVQPLPKTGARAGFDLGLIDLLISSDGTKFERPKFDYSYKDKLAKEQRRLSKMRTKLERAKLNLDECKNYQKQKHKVAKLYERIANCAKDFNHKLSRKLVEEYDFLAFEDLNVAGMKKNHHLAYSIADVRWSQLLKFVHYKCDWCGKEFRQVDKFYASSKICSHCGTYHNDVVNSLSIREWTCPDCGTYHDRDINAAKNILNQALSVA

SEQ ID NO: 40691 - protein, 425 aa, unknown
  TnpB Polypeptide
MSSISNATDYQLKAYRFALRCQPAQERQLIRWSGQLRWVWNKALAEQRARHARGEKYASYVDMAKWLTCWRNTEATAWLAEGPAQPQQHVLKRLDEAYKRFLKKAGGFPSFKRYGNDPGIRFPDPKQFELDSINGRLKLPKLGWVRLRLSQQVMGELRNISISREGSRWFVSIQTRQAACQPAAGLLPTLGIDLGITNFAATSEGTLIEPLQALKAHRQRLRRYQKSVSRKVKGSCNRKKAVKRLAALHRRIAHQRSDWLHKLTSKLASQHPVIAIEDLKVRNMSASARGTAAAPGKNVRAKAGLNKSILDQAWAEFRRQLDYKVQANGGKLIAVNPAYTSQTCSACGHCSQENRKSQSLFACVACGHTVHADTNAANNILAAGLAASACGEAIRHCSAAKQPNAASVKQEPTKAFKPTQEVEYF

SEQ ID NO: 40692 - protein, 393 aa, unknown
  TnpB Polypeptide
MKTGVAHKSYGVALPMNHGKLDKLFRLLPIWRKGLAYSLNQWCRELFETGSLSTWQSTKTFPNYLSQRQWDSVSRQAKATFDSWLTNRQNEFRSLVYHSTLEDNLKRDLYEINLRYAWYEHSDDKTHHMARWLMKHLRRRNRIPDLSKCRTMDMDGKIARIENAKSTKCERWAVVSTLESGKPIRVPILADRKLDENLFLNKETLSNHLTIRFNLDGSVNGKLITTLPKAEKRTQGETLGLDWGMDCMFALSDGRLLGTRMFDWLKQRDTELIELTRALQKNGVKPFKSRRYRNLQRRIRAYYRNEIGRLFNQLSKEQVKEIVVEKLDFRNLNLSHKMNRLLTRTGRAAVETKLKRIQELDGVTIFWAGMPGISMPGGTALSFRSKSSFIIRA

SEQ ID NO: 40693 - protein, 426 aa, Firmicutes sp.
MRNDVERSVITHKDRLLRFGAELVFAICEEFQTEVVIVNKSEGASYEDELTQDVLEIITVFSARLYGTRSHKNKKLIERMKEAIDNDEDKAAADPILRNSLRRAPRVHQHRSVLLDDTSYRVFVESGKQYISISSLERGKRAILPLLGHVSVQGNIRLVYADDHFEIHTTAKVKVKKTAYRMNDIALDAGTTEVYTDQNNRRYGTDFGRILANVDARVSDDKGKKRNQIRDTVKNKKFATEEERNAHLRKVRKHNLGQKKQTTQRTKARTAFANEINQALNEVLAQQPKRVIVENLNHMRGKAKGKKMSRKVSLWMRSVLNERASFKAEAGGSRLEAVASAYTSQECSNCGFTAKDNRAGDRFRCLNCGTVDTAGGNAAKVILKRFYDPELKPWMNKLQIKRILDRRNAEIAGATLGAGCEADELS

SEQ ID NO: 40694 - protein, 428 aa, unknown
  TnpB Polypeptide
LKLAKACVINTTGNVALVLGHLAYATWKLWNVANYERKNWTKETGIAYPNWYDQKKRFKDQFWYNNLPSQSAQELLHTLDGAWKSFYKLKKTGGIENPKPPKFKREPFNVRYLKDGFIVLTGNKIRLAVPKQLRGYLRDTFGFEDTFLYVDVPNHLQLKGDVVKTLEFKPLGQGKYQLIVVIEIPDIEQHAPSTKFMSLDFGINNFLSGVMYDGNSFVLSGRQLLSINRYFDKTIGYYDSLSDAQQAAKGVQYPKQSKRVTALYETRQKQVHHLLHTMSRAVINMAIVHGVDTIVIGDLTGIREAKSLGTKTNQKFHKWPFRKMAELLRYKAALVGIVVVSMTEEYTSQTCSVCKNMPSKDNARKANRKHRGLYICKDCGTVMNADINGARNIAKKYLGTFCEQLQDRPVVGLGRPWMYRFNGSRFVA

SEQ ID NO: 40695 - protein, 377 aa, unknown
  TnpB Polypeptide
VLKTFQYRLYPTKKQSRSLALWLEECRWLYNHLLEQRKTAYEQRGESLTCFLQQKTLPALKRERESLAQVHSQVLQNVAVRIDLAFKAFFRCVKAGEKPGYPRFRGWGRYDSLTFPQHPSGCCLKDGKLLVSKVGHVKIRLHRTFEGIPKTVTIKRTATGKWFATFSCEWTPTPLRKSDEVVGVDLGLTAFATLSTSEKITNPRFVRREEKTLAQAQRKLSQQPKGSPERIKRRKVVARVHERIAWKRKDFIHQHSRRLVNRFGAIAIEDLSANRMVHNHCLAKSIMDAAWSGFGELLRVKAAWAGRAFVAVNPAYTSQDCSRCGHRQPMPLSERTFHCPCCGLVLDRDHNASLNILAVGLHSLGLALEAPTFRCGK

SEQ ID NO: 40696 - protein, 414 aa, Halobacteriaceae sp.
MEYSYYYPAYPTQQVAAKLDSHIDIHRQAYNYALYEYENVDADDIGSAYNHHYRLPDWKDEFSVFSEVNSKALQRTVTRFYQNLNGLSEQKQNGRKVGNLNWKSPGEFQSMTYSQSGFELKNTSGRNATLWLSKIGDISIRYHREIPDEADIKEVTIKKETTGGWFVSFGLETDDLPEILDVDSLNVDNSVGVDLGIRKYIHTSDGTTVDWLGLEDEYERLRREQRNLSRKDQGSNNYEKQRQTVAKVKRHIRRKVLDYQHKITTWLVREHDAVFVEDLDVKEMLEQSHNARNKQDAAWRRFITHLEYKAELYGTLVVQVEPAGTTRECASCGVETAKPIWVREHSCPSCGFECDRDANAAMNVLQRGFSELGLEWPEDTPVETALPTDTHSVSAKRVIETGSPTLNEATPVAE

SEQ ID NO: 40697 - protein, 337 aa, Herpetosiphonaceae sp.
MVAWTHGITNKNTLHDHVYYPIRAQFALGAQLACCARDKAVEAIKAAHQHGEDASCPAFGPTGSIRYDARSYSLRGPEQVSLNTLHGRVRGILVVGSFQRQALVDSTWEIGGAELICRRTTWYLHITQSRPAPAPVATFSTIGCDLGIVNLLTTDDGTVFKGVAVRRIREKRFKHRRRLQHRGTRNAKRRLKKNAHTEQRFQKDVNHCISKALVTKAVAEQKALRLEELTHIRQRTEATVRRSQRRQHSSWAFRQLRMFITYKALHAGIPVILVNPRDTSRRCFQCGYADKANRKNQATFHCQNPACAHTAAADVNAAQNIAFWAEVSQPIASPLRR

SEQ ID NO: 40698 - protein, 360 aa, Massilia sp.
VAETLGRRIVFAAHLIRLVPNNVQASYLARAAGTARFAYNWALAEWTKQYEACKLDPSLPKPSEAALRRKLNAIKRNTFPWMLEVTKNAPQIAIMQLGRAFENFFAKRAEYPVFRKKGQDDRFSLSNDQFSVEQRRIRIPKLGWVRMREALRFTGRIISASISRVADQWYVSITVEAESPPLPPSESQDAVGVDLGIKTLATLSTGEKFLGPKAMNTLLKRLRRLSRALARKVIGSRNRTKARLKLARLYAKIANVRRNSLHQLSTSITRRFYTIGIEDLCVKGMLANGRLARAIADMGFRELRRQLEYKAAWRGGHLVLRIVGFRAANCAPVADIGWKRLTCSLGSGAVRFVGHHMIET

SEQ ID NO: 40699 - protein, 413 aa, unknown
  TnpB Polypeptide
MIKTYITACHLSRTEADALNRASGQIYTQILVTHWRIYRKKGKWLAPFTAQKLNDWYRQADPRLLHAFSVDGAQQAFYKACKTTHALRKQGLETKFPYKRKYYRTTIWYSNGIRAKDDHLLLSRARGQPPIRVPLATYLRGRWDIREVRLVYDRSSRRYFWHLVGEDGQQPKLAPGPNVVAIDLGEVHPAAISNGQTTVVVTCRELRSQRQYTNKRLAELHARQAKGTRGSRLWKRLQKRISRFLYQQAKRTRDMEHKISREVVKVACEQQAGTMVIGDVRKVADKVKLGKKTNQKVSNWAHGKLRQYLTYKAAAEGIETKLVNEAYTSQTCPKCGERHKPRGRWYTCRQCGFSGHRDGVGAVNILSVYQYGQPGKITPTGSTTYRLPFRRLRRSPLDTGHVACGQPQEAPTQ

SEQ ID NO: 40700 - protein, 426 aa, Paraburkholderia sp.
MQRLQAFKYELIPNGEQQRDMRGFAGACRFVFNRALALQKENHGAGGKFIGYVRMAKHLTAWRNGSETPWLKDAPVHPLQQALKDLDQAYQSFFAKRAYFPKFRKRGKHDSFRYPDAKQIKLDQDNSRIFLPKLGWLRYRNSRHVLGTVRNVTVSGSGGKWFVSIQTAREVDAPVPQATSAVGIDVGISRFATMSAGTYLAPLNSFREHEQRLAKYQRRMCRKVKFSNNWKKAKARVQRIHAHIANARRDYLHKASHSISQNHALVCIEDLKVSNMSRSASGTMRAAGTNVRAKVGLNKSILDQGWAEFRRQLAYKLDWTGGYLIAVPPQYTSQTCPCCGHLSAHNRRTQAKFLCVSCGYENHADVVGAINILSRGMESLSRDEGQDMGDASLRRETAARIACGEPVPSGRSTKQEPAEVTAQLIA

SEQ ID NO: 40701 - protein, 421 aa, unknown
  TnpB Polypeptide
MTTKSEAIKASVKATRAKRKTQMCRVYEVKIDSSHLNQATRDHMNRLFLEAKWFYNHILSQHKIFGMSDKVHEVPVKVKDIFEIRDLRCLSSQMRQGIISRTQDNIRGLSERKKKGYKIGKLKYKSEVQSIPLKQFGNTYNILNKKYITIQGLKQKLKVIGLKQIPKGSDIANGTLIHKNGNYYLSITTYKEKTKQVHSAESVGIDFGLSKQLVLSNGIAIQYTVPVSPKLRKIARELSKRKLHSRNWNKTRIKLNKEYEKATNIKEDIKNKIISHLKTNYGTVCFQDENTKAWQRIWGRKIMITSIGGIISTLKQKVHTPIEVNRMFASTKTCSKCGNIQDIALDERVYVCKNCGNVMDRDYNSSINIETEGLKQIGTVRTELTPVEIEANTLMFLRYFNSIPYVKASSVYESGSLTALA

SEQ ID NO: 40702 - protein, 286 aa, Geobacillus sp.
MPTITLRLELHNPTKVKQDMYERMTEVNTAFANWLLDHPELNQATSKIFKAFSSQRFPSAIVNQTIREVKSQKKNQKTKKFRTFWCCFNNQNVKVEKKGAFYTVSFPTLEKRIGVPVVTRPYQEAWLNRLLNGTAKQGAAKLYKKRKKWYLAIAITFEVKPRHETKVMGVDVGLRYIAVASVGTKSLFFKGNQCAFVRRRYAALRRRLGKAKKLHMIRKIGRKESRWMKDQNHKISRQIVNFALANGVGVIRTEALTGIRKRASGQHRPKKRGEAFMLGRFINCKR

SEQ ID NO: 40703 - protein, 401 aa, unknown
  TnpB Polypeptide
MILRAIKIRLYPNKTQEQTLNKVLGCYRFVYNQMLALKQEAYNKDKTNLGLCELSKFFHGELLKKNEYSWLKEQNTKVMKQAIRQMLSAYDGFFNFGKGFPKFKTKHDNNSALFPCEAISKSNSFKTKHISLIKSLKNIKFHCSNLYFERLQKCKDNLKSATLSKTKSGKFYLSVLISMNEEEFKQFRHTNNKVGIDLGIKDFIITSDGEVFKNKHFLKASENKIKKLQRQLSKKVKGSNNRNKVRIKIAKEFEHLTNQRIDYIHNIVNSLLGTYDYIFMENLNVQGMLKNHKLAKAIQELGFYTFKNTLKNKAMLNDKFVIEVDRWFASSKTCHKCGYGYKNLTLGEREWTCPICGEHHDRDLNAAINILFEGNKILVGSRTTEFTLVEKPTVDERGISS

SEQ ID NO: 40704 - protein, 394 aa, Oscillatoriales sp.
MLVLEVKLSGKNWQYEALDEAIRTTNFVRNKALRYWMDNRGVSKNDLQKLCATLAKEFEWAKKLNSQARQAAADRAWMGISRFYQNCQKQKPKKGYPKFKKRGRSVEYKQTGWSLSAERKKITFTDGFQAGTFKLIGTRDLNFYQLEQIKRIRVVKRADGYYCQFLIKVDRSEPQAPTGKAVGIDLGIESFYTDSEGNQIENPRFLRKSEQSLKRLQRQVSRKKKGSNNRKKAINKMARKHLHVSRQRREFAVKIARRLVTSSDVIVYEDLKVCNLVKNHRLAKSISDAAWSMFTDWVDYFAKIHGVHVFAVAPHFTSQDCHQCGKRVEKSLSTRTHKCPNCELVEHRDLNAAKNILARGLGLKNTVGHTGIYTLEETEPLVSSEQSELVKCGH

SEQ ID NO: 40705 - protein, 424 aa, unknown
  TnpB Polypeptide
MVGAPIVRSLSFPVAEMPPPLLGLLDEFRLIVNKSIRIALLGDIRSRARLTRAAYAPLSQEHAIHKQYISSAFEVALGALKAHRSRLKRGRKSSVPYVRRPMLKAENQSYWLDRETGRLRIPIRGTVGLQVILPLSEWHRSFLRNPSWKLGSLTVVPGRITVAVRRAPPKAYEPLSAEAFDTNEDSLDGIVAERDAGMAVTVPFGGVRRVQATHSRRRRRIAKKKAHDWRVARRLLRAEGRRERHRVLQRLHQVSKRVVASAKARRAAIVLEDLTLLGAGGRSHRMNRRLSSWPRGELHRQIEYKAALAGVPVIKVNPAWTSKTCPVCGARRRDRVGQDFVCSVCDWEMDRQHNAACNILLSALASHEALARAVRFRPGALRDDVVSPLYDLSALPASAREEPSGVESQTVPSAPCWNRTRIYP

SEQ ID NO: 40706 - protein, 375 aa, Candidate division TM6 bacterium
MAQKTVVFPLNLNEQQKEILIQTIKLFSQAYNACLDYAWSMDHPVKKELHEKTYYFLKELLGLKSQYLCVARDTACETVLSVRARLRKGKKASKPQSGLVPIRLDKNTLSFDKTRETASITTQGKRIKVPLLWHKHAKRFEQWHCQSGRIGFDSRGRLVLWLTFVKEVEKPERTGRVIGIDRGIKHAFVTSDNKFYEEGESKNKERLYYLLISRLQSAGTKSAKRHLKWLSGRVRRFKVNCDHRLVKMLFATLNPGDTLVLEKLTGIRDSCGTKGKARKKHRKYLNRWSFKRLADIITSFAELLGVYVEYVDPQYTSQQCPQCGIVKKSNRKNQSTYRCSCGLELNADLNAARNISRRWCMANGYASGHQSIGLL

SEQ ID NO: 40707 - protein, 500 aa, unknown
  TnpB Polypeptide
VGKRSRLEIPVGQELKDEYGLGYHERLRLEVRGNPKWDGKQGRLELEYDEVSDTFRAFQPVTVPDSRLDSPLASEEAALDVGANNLVACSTTTGNQYLYDGRELFGRFRETTDEIARLQSKLREGRYSSNRIRRLYRQRTKRRDHAQNALVRDLVERLYDEGVATVYVGDLTDVLEAHWSVRVNEKTHNFWAFKKFIHRLACVCEEYGISLETESEAWTSQTTSRVWRPREDGSPRGYADVSMWLRGARRPHGVRDVPSGKQQLRNQADGTARAIRVGRPRLVGETIPSRKSQRSAHEPASCLRGSVAEPSTEESSRFSAGGCQALLRPPTSRSNASVSTRIARRFVPSGTNTKGIGTSNARSPYSPHRRRTARRPAVRDGDVLQFVGVVGRHVRPVDPHLVDRHVEGVGEESFQPIVAPVSHAVNSSRASPPSPPRSPSRSRPTRSASAIRCFQQVAGKRRPRKRSYIDASVESGRSRAAIRRRSSTALSSRALGRARR

SEQ ID NO: 40708 - protein, 369 aa, unknown
  TnpB Polypeptide
MKTYKYPFYDQSNCIRLGNLLDDMWQVHEYFHKWQRQRYKDGLPYAGYEAMCAHATDLKRTTHPHWNALPSQAIQEELKRIHLAYDRFLKKLGGRPKIKKRHKFKSFTLKQAGWSLGKNRLTLNFRKWDNDKWRHDKVAYTFHKYREFEGNIRRITIKRDNCGDYWLYMITDFVETKPLPTTGKSVGADFGMKDAYLTLSTGEKIQHPQPLKHSLKKLQSLTKALSRKVKGSNGWWKCVRRIARLYRKISNQRKDFHWQLASKLCKKFDTIVIETLNLDGMKRLWGRKVSDLAFYQFVEILRYKCQKHKRLLKEIDQWTATTKPCSTCGFHNENLTLNDRQWSCPECGSHHDRDINAAINILRAGIAVT

SEQ ID NO: 40709 - protein, 248 aa, Methylicorpusculum sp.
MAWWIQFWKQTEDYAFLREAPAQSLQQTAKALERAFKDAFDKTKPNKRLPKPKKLGKNEAGIKYPQGFKLDENNRVIRLPKLGWVKYRNSRPIKGVIKNVTVSRHGCHCWLSIQTERAIEKPVHPASGEIGLDLGVKRLYTLSNGDYHEPFNIEPLAKQLIHTQRTLSRRVKFSANWHKQKKRINRLNTRIAHARLDTLHKATTRISQNHAMIYVEDLKVNHMTRSAKGTLNDPGRQVRQNPDSTRRY

SEQ ID NO: 40710 - protein, 250 aa, unknown
  TnpB Polypeptide
MSPVIDFYHEEVEPAFAELASLRNKKRKIKHFLRKHDLPEDVRRSLIKKMDRLERMIQTAEAPYRKKRCYYAQLDHEIKKSVTTYVDSISKDTLTAIEKLDIKEFNKSRKVNGMFSTFARGKLQRKLMEALNQKGCDFFEVEPDFTSQVCPVCSNLNAENRHSKGFCCTSCGYHDDADHVGAVNIRNRAGDKEILELCREHQYSHKNLQNAIRIVYEKRHIAYEEKKQHLHESRRDPVTSYMMLQDLICD

SEQ ID NO: 40711 - protein, 426 aa, unknown
  TnpB Polypeptide
LQHLQAQLTWVDSRLATGRVSVCRGGRRLARHRHNLNETNLSTEQWRGQWRAERWFLAADGDAVKRWGNETIRVHPDQHWLELRLPTPPAGLSNTPSRACTYRLGCPVVFRHRGEEWAAQAATGAVRYDISFDSAKARWYLDASWRIKPEQPPSLQELRRHRALGIDLNADHLAGWILDPSGNPIGPPQTIPLQLAWLSASTRNGRLRAVITSILQLAATSGCRSIVIENLDFADARQTGRETLGRGRPGKRFRRVIAGIPTRSFRNLLVGMAASRGLWVIAVDPGWTSKWGRRYWQAPLNHSTKSSIAVSGHHAAAVVIARRGLGLRARRRPGVPGHDRRIVVGELPARPDLQRPGCEGPGPPVGQRAVENPHKTRLAELSRLGDQVVQDRSGPPEQDSNLFAFKERSPGCRSRRQGPSRTARGW

SEQ ID NO: 40712 - protein, 310 aa, unknown
  TnpB Polypeptide
MSTFTLSLKLNTSASDEAVLMERFYQGFLMYNRLVSHARKRLRGLRQDKRYRAAMDSYRKGERKKEELSALRMEYGLSEYQFHSWISIQQKKRKRYMDSLTAQKIASTVWKSVEDVLFRKGKTIHLKKLMDFTSMEGKNNAAGLRFRDKKLHWLGLCIQVRLHKKDWYVQEALQHKVKYCRIVRKPVGIRWHFYLQVVLEGIPPQKHRFLENGDVGIDPGVSTEAAVSGNGCILTELAPERPGTRKEIRRLQRRMDRSLRAANPGNYHGDGTPKKHKKWKKTRHYKQDQMRLKTLRRRNADTVKQSEEAL

SEQ ID NO: 40713 - protein, 411 aa, unknown
  TnpB Polypeptide
MKIYKAYKIRIYPNKIQRDYFENCFNICRFVFNSVLAYKIDSYKIGKKYSVYDAMKDFTKIKNLDGYEWLNIISAQIIQQSIWNLDTAFQRFFKMKSSGFPKFKSKHKRENSFKCTQGIKIDFENKKIKIQKIDWIKFKDKRVFNSKIKDITISKNKCNQYFASILVEEEFEINLPKLVDESKIFSADMSCKDFLVSSEMKFENQKFYRRNERRLKIRHRKLSKKKKGSNNFEKSRLVLAKTYLNITNQRKVYQWSLAHELTQKFDILIFEDLNIAGMQQFNKGISKTVTLDFSFSEFLTNLEWKCFKENKHFIKIGRFFPSSKLCSSCGQIKKDLTLDQRIYKCDCGLEIDRDLNAATNIKKEGINLLKNSTEVNISGSYACKDMIGYSSTISSGNYTNYSSSLIVCNGG

SEQ ID NO: 40714 - protein, 412 aa, Streptomyces sp.
MVITMQLRYGFRLYPNGAQRSALTRSFGCARVVFNDALRIREDARAAGLSFVTLGELSKRLTASKKTPERAWLGEVSSVILQQSLRDLDIAYRNYFDGLKGERPKMGAPRFKSSKDNRQAVRFTANAGWKITPGGKLRLPKIGDVGVKWSRSLPSISSTVTVIKDAAGRYFASFVVETEPSEVLPETTPEVGIDLGLSHFAILSDGTKIDSPRFLRRAEKKLKKAHQSLTRKAKGSNNRGKARLKAARAHARVADARREFHHQLSTKLIRENQAIAVEDLAVKGLARTKLAKSVHDAGWSQFVTMLEYKAARYGRILLKIGRFEPTSQTCSQCRVKEGPKPLHLRTWECGVCGAVLDRDINAAVNVAKAAGLAVSACGARVRPGFVPAQRDETGTHPKPRLTTARQAGIALL

SEQ ID NO: 40715 - protein, 402 aa, Arc sp.
LTCYPGRAIVRREHIFELAESPRILQTLSEVKVGDELRSCKDVKFVNKAYKFRLYPNREQQEYFAKCFGCVRFIYNKMLAGRIDHYKKTRKYLNNTPAQYKSEYPWLKEVDSLALANAQVNLNKAYDNFFRNPSVGFPKFKSKKKNRFSYTTNNQNGTVQIKDGHIKLPKLKTLVKIKQHREIEGEIKSCTISKTPSGKYYISILAEIEIKKLPGSDFKVGIDFGLKDFAVLSNNKVYGNPKYLRKSEKRLAKLQKGLSRKKKCSKNRAKARLKVAKLHEKIYNQRKDFLHKVSSEIISENQAIVIEDLRVKNMLQNHKLAKSISEASWSMFRKMLEYKSHWYGRELIIASSNYASSQICSTCGNKSDQTKNLGCRTYKCTACKLEINRDHNASLNLVKLAG

SEQ ID NO: 40716 - protein, 398 aa, Escherichia sp.
VKRLQAFKFQLRPGGQQEREMRRFAGACRFVFNRALARQNENHEAGNKYIPYGKMASWLVEWKNATETQWLKDSPSQPLQQSLKDLERAYKNFFQNRAAFPRFKKRGQNDAFRYPQGVKLDQENSRIFLPKLGWMRYRNSRQVTGVVKNVTVSQSCGKWYISIQTENEVSTPVHPSASMVGLDAGVAKLATLSDGTVFEPVNSFQKNQKKLARLQRQLSRRVKFSNNWQKQKRKIQRLHSRIANIRRDYLHKVTTTVSKNHAMIVIEDLKVSNMSKSAAGTLSQPGRNVRAKSGLNRSILDQGWYEMRRQLEYKQLWSGGQVLAVPPAYTSQRCACCGHTAKENRLSQSKFRCQACGYTANADVNGARNILAAGHAVLACGEMVQSGRSLKQEPTEMI

SEQ ID NO: 40717 - protein, 498 aa, unknown
  TnpB Polypeptide
MDLNGVLLDSASVMAELAAEVRDISAYATFVVRNDTKLGAGLTQASAVQPAVAGRRAGVTMPDFLANGRTGKSRKEWLFRHRVVTEYRSWQERIAAANGESSKYVSQGWKRTVDASAPSYGEDTVNLGAVDKQYAVIENNPLQDAEIVLRMVIQGAWYRLIFSFDNTRFSEGKVTLPVVKVENNQPVFIFTVVTDNPVVQFSGDYTIGVDVGINDYATVVVRNSHTGQVVHETTLSQRVHSLWNSVRASERQVRALNKKAGKLLYDRQAHMSAVDEGQLHREAASRKKKELAIVAAQEIAYLSHSYGNAVVAVEDLGWIRNTMSNGRWNRGAFTQRLTHYVAQNGGWVVAVNAANTSQVCHLCGSNVLHPEHKVSICPEHGDMDRDVNAAANIAARAVPKVEKARKTRAKNRKLQAQAPLKTPIARASLKYPGRDRTKYAPTPKRKKRVAREVNLPISPARVVMTSVLADCGAYGAVETNQAAINQGNITCECAGYTA

SEQ ID NO: 40718 - protein, 496 aa, unknown
  TnpB Polypeptide
LGNNAVLAQLTSEIQGISSYATYVVRNDTKLRDGLSRVTATAPAEAGRQAGVTMPAFLAAGSTGRSRKEKLVQYNVVTSYRSWQERIAAANGESSKYISQGWKRTVDASAPSYGEDAVNLGAVDKQYAVIENNPLKDGEIVLMMVICGQWYRLIFSFDNKRFTEGKVTLPLVKIENNQPVFIFTVVTDNPIVQFSSDYVVGVDVGINDYATVVVRNSSTGQIVHETTLSQRVHSLWNSVRASERQVRALNKKADKLIYQRQAHMSALDEAQFHREAAARKKRELAILAAQEIAHLSHQFGNAVVAVEDLSWIRNTMSNGRWNRGAFAQWLTHYVTQNGGWVVAVNAANTSQVCHVCGSKVAHPEHKVSVCPKHGVMDRDVNAAANIAARAVSKVEKARKTRAKNRNLQSQAALKTPPTRESLKYPGRDRTKNCPTPKRKSRVAKGVNLPLSPARAQASRLGVRVLADCGPHSVAGTSQAAINQGNVAYKCRLCSLN

SEQ ID NO: 40719 - protein, 524 aa, unknown
  TnpB Polypeptide
MLTLQCLLEFKNEKDKEVVLDLMRKFSSATRYAYKRLLEGDERKDLKKHLSKLFNINTRYSDDAIFSAQTMISSCKERGQNPKKVIFGSRALFDKLNKKHLTGNSRKSLIKKWKEKRQGNLYSRGEKGKQGNLNLRLQWINDKLYLRINTGNRQYIYAKVIRNVSRKNDKWIDFMFMLLRAKESNNWFPYSVRLKLKNGKVYTFISVEEKLPPITIKKDNGIIGIDINAYPFHLALAFANKEGNLEKHQSISLNELLEANSEKRQYLEWQIAHNIIEIAKKENKAISIENLQKIPKGKRGDGFAKLRSRLQKWSYKRLLEKIEILAKRNGIEIRKVNPAHTSVIGKLKYAPQFNIDKDIAAAFVIARRGLGYKENIPKNYKGLLNDVDFLSYSIARIEDNIRNLKQKIKEEKNEYKRNKLKSNLIKLRKHLKVLQKHLDSGKSEPVARQLVNQRKEQVRGLPVGRHKSWQVLSITLAFCCLERHRDFSPLKRILLNGDWIAVANRLVPMPGVGTTMQSCLSSFV

SEQ ID NO: 40720 - protein, 392 aa, unknown
  TnpB Polypeptide
MKKLLKSFKTEINPTQEQIPQINKTIGTCRFVYNFYLVHNKEIYETEKKFVSGMEFHKWLNHVYLKENPEYLWMKEVSSKSVKQSIMNADKAFQRFFKHQSGFPGFKKKGKSDVKMYFVKNNPKDCFCERHRVNIPTLGWVRLKEKGYIPTTKQGYSIKSGTISWKAGRYYVSVLIDIPETEKPQLNDFGLGIDLGIKEFAVISNGIVKKNINKTVIIHKLEKQLKRAQRGLSRKYEDLKKCNKEKKGDATRQNIQKQVLKVQKLHHRIDHIRTDYINKAIAGIVKTKPSYITIEDLNVKGMMKNRHLSKAVASQKFYGFRRKLEAKCKELGIELRVADRRYPSSKICHACGCVKKNLKLSDREYICECGYHADRDYNASLNLRDAKTYKTA

SEQ ID NO: 40721 - protein, 394 aa, unknown
  TnpB Polypeptide
MLCYRLAPTAAQEATMRDHCAHARYVWNLAVEQHSWWRPGRRSAPTYLKQCRQLTEARAECGWLREGSQMVQQQALRDFDQAMRSFYGGTHGRPSWRKAGRDEGFWIVAVKPEHVRRLGRKTGQAWVPKAGWVRFRWSRQVPDGVKSYRVTLDRAGRWHISFVAIPEPILSPGTGEVVGIDRGAAVSATLSTGQMLMVPRLSPSRQRRLRRLQRKIARASRGSKRRAQAKLAIARLRARETDMRKDWVEKTSTDLARRFDLIRVENLRITSMTRSARGTAGNPGRNVRAKAGLNREIMRSGWGLLVRRLEQKAPGRVERISPAYTSQRCSACGHIAAESRKSQALFACVACNFICNADVNAAINIAAGHAVTARGGDGVTRPANREPQLLSQSA

SEQ ID NO: 40722 - protein, 393 aa, Chloroflexi sp.
MIRTYKYRLYPTNAQQKALDFLLWQGRLLYNAALEQRITAYRETGQGVTYPQQWAHFRDQRHANPDTLGQLNATSVQQMLRRLDKAFSAFFRRLKAGEKPDFPRFKGRNRFNSLEYRYGDGCKLRFDDRGRALCYVQNVGEVKVKVHRPLPDGAVIKHVVLKRRLRKWYVCLMLEAPDLPMPQHSRPAVGIDMGLHHLLALSDGQIVENPRWLRKSLATLRVAQRRMARRRKGSRGWREAAVQVARLHERIANQRRNFWHKVTRQLVNTYGLIALEDLTLAFLTANLHLALSAHDAGLAEFRHLLAYKAESAGTPVVTVNPATTSQVCSACGSVVEKDLSVRVHRCPHCGYTADRDVNAAQNILTLAVKSAWTGPPGANVAGCGVRSLGSSPL

SEQ ID NO: 40723 - protein, 467 aa, Planosporangium sp.
MTTKRFQYRAYPTPAQEPALARAFGCARVVYNDALHARETAHANGLTYPKLAELSQRLTEAKKTPERAWLGEVSAVVLQQALADADRAYRNFFQAAKNRKANGGKGRFVGKPRFKSKKNARQAVRYTRNSRFKIRVVNRERALLTLPGVPGEVMFRLSRRLPSNPSSVTVVGEADGRYYVSFVVETPAKQPLPESSRHVALDLGLVDFAAVVATDGTRDKIANPRFLRAAQRRLAHHQRALARKEKDSKNRAKARAKVTAAHRKVREARLDHAHNLALRLVSENQTITVEALNVRGLARSGAKGRRGAGLRRSVHDAGWGQFLRVLTVKAAEYGRSVLAVDPAYTSQSCGVCGRLDGPKPLSVRVWTCAGCGTTLDRDYNAATNILVAAGQTTGLAPVAETLNACGGVMRPRLAAADPGEAGTRPWPRRLTLASNHGNPRRSRRGGCQARVMTNQRERVQVRSLGAS

SEQ ID NO: 40724 - protein, 490 aa, Actinopolyspora sp.
VQLRYRYRLYPDEAQRRVLAQAFGNARVVYNDAVRARRDAYKSGEKFPVGAVLQKRLITDAKHTDERGWLGKCSNIVLQQAIRDCDTAYKNFVDSLKGKRVGRRVGAPRFKSKRDRRQSIRLHTGGFSIRNNGKLRLARIGDVKVAWSRNLPSDPSSVTVIKTADDRYFASFVVEVGDETMPPVVDEHGQEHDLALDLGLSAFAVDQHGNTIDNPRFLRRAERKLKRAQRELSRTQRGSNNRAKARRKLARQHGKVADARADWLHQETTRIARENQAVFLEDLAVSGLARTRLAKSVRDASWGTFRRLLEEKCARYGRELVVIDRWLPTSQTCSDCGRIDGPKPLTCAHLGMSVRHDPRPRHQRRQKYPRRRTGGETKRLWRRRKTSHRGSGRRSRKQRNPARRCRSVHGVSRVENPRRSRWGARQADVLVYFVGILVVPSAQPVLQIDHPRVAGDREVHQGEGAVQGRVHADVRAEDPCGDVRAFRDVR

SEQ ID NO: 40725 - protein, 448 aa, Fischerella sp.
MLIYIKEVKLMYGCQQNLINPNEELKAVLEFICSESHKLTNCGIYYARQLYFKTGKLIGKYDLEKEYKTNKHYQVLHSQAAQQILRSVSESFKSFKELDKKCQKGELHFKPRLPNYRKGAGYALVTYPKQALKLVGDNIKIPLGNTVKRWFKLDSFLLPMPSNMNFADIKELRILPRNKCFYAEFVYEKKSALLLNLKPQYALAIDPGINNWLSCVSNVGTSFIVDGRKVKSLNQWHNKRVSTLKEGKPQGYWDEQLAHITEKRNRQMRDAVNKAAKLVVDHCIKHHIGTVVFGWNQGQRQEATLGKTTQSFVQIPTAKMKERVKQLCEYYGIKFVETEESYTSKASFLDDDFLPTYGEKPETWKPSGKRVKRGMYRTGAGKLINADLNGAANILRKVETQLGLCRVLVCRQVLTLATRFRIWETKTKTRRGVDGCPPRSNSLESPRL

SEQ ID NO: 40726 - protein, 395 aa, unknown
  TnpB Polypeptide
MKIVNRTYRFRIYPNSFQIELLAKHFGCTRFVYNYFLNQRQEQYREKGTSDNYYAQAKVLTELKKQEKTSWLKEVNSQTLQFALRNLETAYTNFFQKRKSFPRFHSKKGKNTFTVPQSATIEDGKLWLPKFKSGITIRLHREIKGRMGKVSLTKTPTGKYFVSIFTTEEYQEIAPTTKAIGVDLGLKDLLITSDGEVFKNNRYTKKYERKLAIAQSHLSRKKKGSNEYEKQRLKVAKLHEKVSNCRQDYLHKCSYSIIKNYDVICIEDLNVKGMMRNHKLAKSIADASWGSFVTMLTYKAAWNNKQVVKIDRFFPSSQTCNVCGYRNSETKNLKVREWDCPSCGTHHNRDVNAAINILKLGLNNISAGAVDYTDGEDVRPNLLKRQSSVKSEAHK

SEQ ID NO: 40727 - protein, 374 aa, Ruminococcus sp.
MQMTVTAKIQLIVPSDYYELLINTANTYRNACNFVSEYVFKTHNLKQFSLNQELYYELREKFGLGSQMTQSVFKTVIARYKTIQTNQHQWIQPEFKVPQFDLVWNRDYSLNQDCFSVNTLNGRIKLSYCSQGMEKYFDKEIYKFGTAKLVYRHKKYFLHIPVTFEVSECANSDICNVVGIDRGINFVVTTYNSKHQSGFVSGKTIKQKRGHYKNLRKQLQQVRTPSSRKRLKAIGQRENRWMQDINHQVSKALVENNPEHTLFVLEDLTGIRSAAEKIKLKNRYVSVSWAFYDLEQKLIYKAIRHHDKVIKVNPAYTSQCCPMCGHTEKANRNKKIHLFCCKNCGYKSNDDRIGAMNLYRMGIDYLVPDTVTAE

SEQ ID NO: 40728 - protein, 210 aa, unknown
  TnpB Polypeptide
MPTGQDKIGVDLGLKDTATCSDGTKLEAGRFYRDMESKLAVAQRAGKKKRVRNIHAKIANRRKDALHKFSRHLVNRAGEIYVGNVKSSSMVKTKMTKSVLDAGWAMLKTMLEYKCDNACIVFKEVNEAYTTQICSCCGCISDSSPKGRAGLRIREWTCSECGVTHDRDINAAKNILAVGHGRPVEGIPALKGGEDVKRHSLLENSMIITI

SEQ ID NO: 40729 - protein, 410 aa, unknown
  TnpB Polypeptide
VFLITLKAQIHADPQTEAVLKDAMFCATKVYNGLLWHLRKEYKETGRVNVSRKNLNRILKELPRSKGYYSMSVQLTRDEVREAYKSFFALKRKGLAQHEAPGFRRKNYLSPLKYVQSGYKVEGDKVTLSLGTCREDGVKHVSFRISCRPDVDYERVRKLSIIYDKVSGRIEARLVVEVKARENEGMGRVAVDLGETILMACVFEDSSVILYPGRQIKAIRRYWQKVRANLKQNSRRWRQVAWREKKQVEHLLHIATSHFIAECVQRGVKEVAIGNLNGIRESIDYGDRLNQRLHAWPYRKLISMLKYKGALAGIIVRDDISEERTSITCHACGKVMLSNRRHRGLYACSCGWSAQADVNGALNIFERAYQVSPVKGSSGRVARPAVMSFLLGWHGVAEPKREGKPLRTSA

SEQ ID NO: 40730 - protein, 546 aa, unknown
  TnpB Polypeptide
MAQAYRYELDKPSNDPAISSHVGAKRFAWNYMLYLINEQLRARDQFRIIAQRQGASCDEAISFAEKACAIPYLVELNEKRNKEHEAKIAEGSRKPGEHQPVSEWCLWSMESMRYIWNRVKDEVAPWWQENSKACYESAFEGLAQALKNHFDSKSGKRNGAPVGWPKYKRRSGRQSVSFTAGSGSTAVLDRHHIRLPVIGACRTKESTDKLRLKILAGDARILRATLADEGGKAYVSFGVLVKREAKSHGPINNFSCQVQGHDVGITKFITSSDGSVAENPKAEERVKKKISRYQRHMDRQHRAASPKCFNLDGTHISGTCHWKDRSNRAKENQTRLRKSYAHAARIRKDTIHKTSYHAATTNAVNIIEDLRVEQMGRRGYGKRVFNRAQHDATMAEFRRQLSYKYSWYGSQLWLAAWWYASSKTCSNCKVKRARLSRSARVFKCDSCGLEMDRDLNAAKNLQALAELACTCILAQISTGAPVDWSKVPIRPYGWEPGKNTRNSRECARAGGRKIIGGERKTARSDLQSEVVTAFDREAASPVGVGV

SEQ ID NO: 40731 - protein, 552 aa, unknown
  TnpB Polypeptide
MAQAYRYELDKPSNDPAISSHMGAKRFAWNYMLNLINEQLRARDQLCVIAMLCGVSYDEAIALAEETCAIPYLVELNEKRKKEHEAKIAAGSRKPSKYQPVSEWCPWSMEAMRYTWNRVKDEVAPWWNENSKECYSSAFEGLAQALKDYFDSKSGKRKGAPVGWPKYKRRSGRQSVSLMTGSNGVAVLDRHHVRLPVIGACRTKESTDKLRLKIAAGDARIFRATLVDGGGKAYVSFGVLVKREAKTPKITDFSCQVQGHDVGITKLITGSDGSAAENPHAEEQVKKKISRYQRRMDRQHRAASPKCFNSDGTHISGTCHWKDRSNRAKENQARLRKTYAHAARIRKDTIHKASYHAATTNAVNIVEDLKVEQMGRKGHGKRAFNRAQHDATMAEFRRQLAYKHSWYGSQLWLAAWWYASSKTCSNCKVKRPRLSRSARVFKCDSCGLEIDRDLNAAKNLQALAELACTCILAQISTGTLVDWSKVPVRPFGWEPDKNTRSSRECARAGGHKTKGGDKEATRSVDLDTCPGLRGEEALSFNREAARPEDMCA

SEQ ID NO: 40732 - protein, 437 aa, unknown
  TnpB Polypeptide
VSRRLREIAAPFVAAVPAGARVRTRLRVCAQDEVVLRAVGMHLGSLAGRDLAARCAEGRLGAKGRAESRRERKRALTAESSSRWAGAITRTSEDAWQLASRNLTAERASLTARVRKVEARLAVQAGDKQGRTRGYATAAERHSKAVRLKALKARLAHVERRLDAGAVAVTRGGKNLLRKRNNLAGAGLTEARWRQEWEASRLFLTADGEAAKRWGNETIPLELAGLSAATRDGRLRAAVTRLIAAAKAAGARAVVIEELDFAEARCEGRERTGSRPSRGRRGRGYRRMVAGIPTAKLRDRLTQMASNAGLSVVVVDPAYTSRWSAVHWLPLLREQHPETTGHHAAALVMGRRGLGHRARTRVNGNRTAPADAMRPARTRPRKPPAARPQPGNPPPHVANGSHQATRPDRPTGPRQATRRPRTVRDRPPRNTQLLRSD

SEQ ID NO: 40733 - protein, 439 aa, unknown
  TnpB Polypeptide
MVCGTREAGKISKRGPSAEVVGVFQTWVLPFMLCLFAWGPVFSQSGWLLREVPRLIVKGRSSMPTTFQAFKYRIYPTDEQVEIIEKTFKCCRFVWNHFLEQTSKIYERRQEKMTTFDCMKVLTEMRERWPWLADCGCTAERYAIIDLFEARKAFFRRIKAGEKPGYPKFKGASHPTQSFTTAGTIYLTDDYIQVPFGGQYQKINKLRRGTGRPIEGSPREVTISRSATGKYWASVCCKVERDTLPIVDGEVGISLGLQELAIDSNGVHYENPKHLSKSAKRLAREQRKLSRMRKGSSNYEKQRFKVATIHERVVNQRRDYTHKLSRKLVDENQVIAVEDLNIKGMVKNHRKAKAVADVSWAEFFRMLEYKSQWAGRTFIQIDRFYPSSQTCSSCGYKNAAVKDEKVREWTCTQCGAHHDRDINAAINILRKGKDTCTAA

SEQ ID NO: 40734 - protein, 256 aa, Blastomonas sp.
LGWIPFIPRAVSISDDTATYLKLRYRFWKSRDVQGDYKAGEFVQDARGRWYVAFRSEVDDDLATGNGSVGIDLGLKELATTSEGDAIPALQHYRQYEQQLATAQRAGNKKRVRAIHAKIANARRHHLHEQSTRIARENQLIAVGNVSASKLAKTRMAKSVLDAGWASFRHMLRYKSARRQAVYVDVDERWSSQVCSTCGTMPASRPRGIADLGIREWECSDCRTLHNRDVNAARNILATALEHQRRVGETAALRGG

SEQ ID NO: 40735 - protein, 431 aa, Halorubrum sp.
VEQTFKYRVYPTESVASEARRHINICREVYNHALRIYDSAPNGDKPTYTQLQNKLPAWKRQWTTWSDVNSKCLQMAVRRIFSSLSVLKSLKSKGYNVGKLKWKSPREYRSIVFNQSGFDVDSNTGRTEHATLELSKIGTIDVDYHRPLPEDGNIKEVRLKEEKSGKWYVSVVVDHDPEHPEKPAVEDIRVEDTAGIDLGILKFVHDSDGNAVTPLDESEDRERIEKRHRALSRKQHGSNNWEKARVKLAEAYERLANKRKDFIEKLAHSYTTQYDAVFLEKLNVREMLKQDSNGRNIASMSWSEAIKTFERHGNKNGCHVVTVPPEGTTKRCARCDVESDKALWVREHSCPGCGFEADRDENASYNVQKLGMDELGVDYEVDAVVGLGEAESTPAETALPSGADVNDELSFRLVPAKRVVETGSHGSPDPW

SEQ ID NO: 40736 - protein, 400 aa, unknown
  TnpB Polypeptide
VRSYKVELDLNDRQRTACLQHAGAARWAYNFGLRRKREAYAAGQKTPTAIDLHRELCVLKKTDVPWMYAVSKCAPQQALRNLDTAYTNFFRRCKQGAKKKGFPKFKSRKRGIGSFTLEGAVRATDRTITLPRIGAVRLKECGYIPSGATIKSVVVSERAGRWFVSVRTDEPEALLPPGSEMLGVDVGIKNLATLSDGTVFENPKALRKAQYLLRQRQKAVSRRAKGGANRRKAVQRLARQHWRVACVRSDAIHKATTAIAKRAAVLGIESLNVAGMMKNHRIAGALSDAGLSEFHRQLDYKTKWHGGTVVKADRFFPSSKKCSSCGRVKDTLLLSERVFRCECGNVIDRDENAAINLKNLAVSSTATACCPGGSGQTAVGLVKPLVGQEPNAVQDVVLNG

SEQ ID NO: 40737 - protein, 378 aa, unknown
  TnpB Polypeptide
MRSYKFRLYPTKAQRNHMGKHLVLAKDLWNELLAHNKRTYTDFGKFSTKNTLITMTKQYGLFSQTQQEIAGRIDKSIRRFLKLKKQGKECGFPRFKSIDRMKSLNYPQAGFRLKGKKLYTNPFGEINIRKHREIDGKIKTLSLKRMPTGKWFAVFAVEQSEKEPRKNNGQKVGIDLGLRTLATTSDGIKIENPRHLKNKETELAFIQRKFSRKIRRSKNWKKHKIKVAKIHEKITDTRNDFHHKLSRQLVEKYSLIALEKLNSKNMAEQNYGKHIHDAGWASLTNMLCYKAEEAGCKIIFVNPHNTTKTCNKCGKLQDMELADRTYWCKECGMVEDRDINAAKNILAKATAGMAESNAFGDAEETASMNKEAHDFSRG

SEQ ID NO: 40738 - protein, 318 aa, Thermogemmatispora sp.
MTYRQLRTTYRLSAQSAIRCISKVSDAYKRDKSIKPTFKPEGAMVYDERVMSFKGLTHVSLLTLRGRVLVPFLIGQYQAARMQAIKGQADLIYRQGTFSLAVTLDIPTPDPQETSDILGVDLGIVHLATDSDGESFRGQAVEATRKRSHALRQRLQKRGTKSAKRHLKKLSGKQARFQHHTNHVISKQIVQKARSLGKGIAIEDFRHIRSRTEARLNTSQRSRHSNWSFAQLRFFLSYKAALAGVPLYLVDPAYTSQRWSACGHCAKENRKSQALFCCTNCGMSMNADINAALNIARADVKRPLVSSGSRKESTPLGA

SEQ ID NO: 40739 - protein, 340 aa, Thermogemmatispora sp.
MARSSRRSTRQQVKGQLNAQMACSAIRLVAAAYQSARSNRRPPQRPFQFRRRWALFLIGPRGRDASLRPDGTLPLWTVAGRKPLPYRVPEAFQQRLAQAKTMDSLTVLERAGQLVGRLTITLEVPDPPTACPETRAVVGIDLNETNALVAVDGQKRVLFVSGKAVKVRNRRTVKTRARLQRKLAAHKAQHRDTRRARRVLQRPGRRQRHRTRTFAQTVAKRLVEWAPPQAVPVFERLQVSPSQQEQIRGRALRRRLALWQRGLLRRWTEQQAQEKGLRVAEVNPAYTSQGCSHCGQRGTCRRHRFTWPHCGFQEHADINAARNIHALYCPTGQWAVVNQP

SEQ ID NO: 40740 - protein, 326 aa, Thermogemmatispora sp.
VAAAYQSAQSNRRPPQHPFQFRRRRALFLIGPRGRDARLRPDGSLSIWTVAGRKRLPYQVPEAFQQRLTQAKTMDSLTVLERGGKLIGRLTITLEVPDLPMACPKTEAVGGIDLNETNALVAVDGQERVLFVSGKAVKVRNRRTAKTRTRLQRKLAAHKAQHRDTRSVRRVLQRPGHRQRHRTQTFAQTVAKRLVEWAPPQAVLVFERLQVPQPQQEHIRGRALRRRLALWQRGLIRRWTEQQAQEKGLRVAEVNPAYTSQLCSHCGQRGTRRRHRFTCPHCGFQEHADINAARNIRDRCPVLRGSGLLSTSPEARADEAAGKPLA

SEQ ID NO: 40741 - protein, 351 aa, Thermogemmatispora sp.
LQTITLRLRLHRPTHAKERIYRELTECTTTLANNLVAAGRPKGLTSRTAAQYLPAPIPAAVVNQVLREVAADQKVERFRVLPPCFNNQNLRLRKVGNFWTASFPTHEGRIRVPLATTERQERILEQLGTTVKQGAAKLYCKRGRWYLALSVTVPVAPCAGDRIAGIDMGLRSLAVVNCEGETLFFQGNRAAYVRRRFNALRRRMGKAKALDAIRRMKDTEARWMRDQDHKISRAIVNWCLARGVGTIRMEKLEGIRNRRRRDRRDRGRSLHSWSFYRLQQFIAYKARLAGIRVEWVEPKDTSRTCPRCGHCAKENRNGIWFQCRSCGYRGHADAVGALNISRAISGLAGAA

SEQ ID NO: 40742 - protein, 372 aa, Thermogemmatispora sp.
MDERGVSRNDLQRYCAVLARAYSFVALLNSQARQASADRAWAAISRFYEHCNNKKPGKKGYPRFQHDNRSVEYKTTGWKLEPDGKHLTFTDGCGIGTLRLVGNEKQSVATFPVQQIKRVRIVKRADGYYCQFCVQAQRRIEHSPTGRAVGIDLGLNAYYVDSDGNTVENPRHYRKAEQRLKRLHRRLSKKQKGSANRKKARKQLAKAYLKVSRQREDFARKTANALVTSHDLIAYEDLKIRDMVRNRHLSKSISDASWGTFLQWVKYYATVHAIPAIAVPPQFTSQDCSGCGTRVKKSLSVRTHICPACGLVLDRDENAAVNILHAGLCILFLMAFAGTLGHRGTSESSENASGQSAATRRSPRRKASKWAG

SEQ ID NO: 40743 - protein, 421 aa, unknown
  TnpB Polypeptide
MQLVEQHVISPRDPRFAAIDEAAFAAKNLYNLANYLVRQSFIWEGRYLSFATIYHQVKHTPEYRALPGKVSNDILRQLDKNWRAFFAACEAYREDPSKFVGRPKLPGYKDKEQGRFLLTYDLQAISRRALKRGLFAPSGLPIEVQTKQAHLKQARIVPRAGYYVVEIVYEQPECPPQGDPKLIAAVDVGVDVLAALTSNKVGFRPRLVNGRVLKSYNQFYNKRKAELQAALGHAGTTRRMERLTTRRARRINHYLHAASKTMIALLVAERIGTLVIGKNLLWKQEMNLGRVNNQHFAQLPQARFIEMLTYKAELAGIRVIIQEESYTSKASFLDLDPLPVYDPTHPQDYQFSGKRVQRGLYRAGNGRRIHADVNGSYNTLRKAVPNSFGQGIEAPAVGPVRLDIGAVSPARGAGRHANRTN

SEQ ID NO: 40744 - protein, 549 aa, Carboxydothermus sp.
MTICGEFFPEVYPSFRSQKWSRGEEDPFMTEMRLFCACQRWAFNRLLEGASRDEIKKLGQELFGLNSRYADDARLKAQALLDSQKELLELEIGETENKLSRARKKLGIAMRKLAKAEEKGNAPDIVEKLHLAVKGRNNRVVTLEKKLAELESHRENGTIPKVVFGGRKLWKKVCKGRATQEEWRASRKNRLYSRGDETKGGNPNIKVTYREGEFYLAVTISHLSEKVGEDALGRPKMSRAPRVEGRLWLPEKYRDLVRMWLAMKLPYTVELIRTLEGRYIVYMAFDLGGVREPNFTKGCLAMDTNPDGVALCNVNASGQPEPWPEDFNIPYPGNLGKYEGEFQVITYPNGFLYIRVHDLAYACSFRRDYLIGVLARVITDVAFFLGKPIVLEDLDFGKDGLDTNKKFNRMASNFPFAKMVEAVCRKAVKEGVPLKLVPARHTSTIGYWKYTKRYAVPVHCAAALVIGRRAMDFKERVTKELKQVVVQIKQNLTCKVKPYTPREGRGMTRGVRACLRRLEGKLLQHNGLVPWQQEAYYSVWHDLKKLALS

SEQ ID NO: 40745 - protein, 286 aa, unknown
  TnpB Polypeptide
VENVQPSFNVRCDISSDKKRPSRIYLKDNGKLQIPTIGDIKFGSVRLDFDLSCKKQVANISFDGKYWYLSYTEDVETQVSNLPDYVDGVGVDLGIKTLVTVSDGMTVPNIKTFRRVRILEKRLKRLQRKASRKYLINKCNKHNKTKNIIKLERQIKLIHRSIKNIRINHIRRFVSKLVKKQPQYIAIEDLNVRGMMKNKHLAKDIANCSFYTIKEHLIRKAKERHIAIRLVDRFYPSSKTCSTCGHYKKDLKLSQRVYHCDNCQEKIDRDFNASLNIAKTNRYLLV

SEQ ID NO: 40746 - protein, 413 aa, Hassallia sp.
MYLTQKNQLRNLGKVEFLALKELCRLSKNLYNVGLYNVRQYFFEERKHLRYESAYHLCKENENYQALNTDIAQQTLKVVDRTFNGFFGLIKAVRSGTYQQKVKLPHYLPKDGYFVLIIPRIKVKDGKFKVPMSPAFKKQFGEVVINFPERLNSDTIKEVRIHPKYDARFFEVEYISRSDNEPVETIPDSSLAIDFGLDNLATCVDTNGASFIVDGRKLKSINQWFNKENARLQSIKDRQKIQRLTERQARLYVNRSNKVRDYLNKAARLIIDHCINAKIECLIVGFNLGMKQDINLGSRTNQNFVQIPFFSLRNKLKSLCERYGLQYKEQEESYTSKSSYLDGDNLPIYNADKPATYQFSGKRVKRGLYRSKEGHLINADANGAANIGKKSKQNGFTGLSRGCLAQPLRIKVY

SEQ ID NO: 40747 - protein, 359 aa, Hassallia sp.
MLLSIKTKLKLTPEQKTVMSKHVGIARFTYNWGLATWKNLYQDGYKPNKFLLKKFFNNEVKTALEWIKEKGICQKITQYAFDQLGAAYDRFFKGLGGCPKFKRKGQNDSFTIDAGGKPIPVGGLRTKLPTIGWVKTYEGLPHTTTTKLTISRIADDWYIAFAYEVKTEVTPKYVEVVGVDIGVKELATLSTGVVFPNPKAYKKNIQKLKRLSKVHARKVKGSNNRYKSKIKLALHHAKVSNIRKDSLHKITNHLCKNHAVIVIEDLNVSGMMQNHKLAQSIADCGFYEFKRQLEYKSKKFVSKLVLADKWYPSSKTCSNCGCKKESLLLSERVYSCEHCGHVMDRDLNAAINLSRLAKA

SEQ ID NO: 40748 - protein, 571 aa, unknown
  TnpB Polypeptide
MGGLRQIAAPFVAAAPAGARVRTRLRVSPADAAVLRAVGSHLGSLAGRDLAARCAEGRLDANGRAVSRRERKRALTAVASSRWAGAITRVSEDQWQLAGRNLHAERASLRARVMRIEARLAVPAGQKRGRTRGYATPAERHEKDLRLRSLKARLARAERRIAAGAVSVTRGGRGLLRQRANLAAAGLSEQKWRAQWQAARWFLTADGEKDKLFGNETLRWHPDERWLEIKLPAPLAHLANQPHGRYRLPGPVEFTYRGDEVAAQAATGAVRYDIRFSPASGRWYLDASWKTAAGPVPALEELRRHPVVAVDVNAGHLAVAVVAADGNVTGVPFTVPLDLAGLPAATRDGRLRNAISGLIATASDHRARAVVIEDLDFAAARAEGRERHGSRPSRGRRGREFRHAVAGIPTRRFRDRLVQMAANAGLHVIVVDPAYTSRWGAQHWLAPLRAHHPDTTGHHAAALVTGRRGLGHRARKSATGNQPAPEEAARPARARTRKPRRQGPHPGSPPPHEAPGSHPGAKTRLPHRTTARDQAAQHRPGPPDSQDYLLPSRLETVTAGSVPRKLRSGSR

SEQ ID NO: 40749 - protein, 367 aa, Escherichia sp.
MRRFAGACRFVFNRALARQNENHEVGNKYIPYGKMASWLVEWKNATETQWLKDAPSQPLQQSLKDLERAYKNFFQNRAAFPRFKKRGQNDVFRYPQGVKLDQENSRIFLPKLGWMRYRNSRQVTGVVKNVTVSQSCGKWYISIQTESEVSTPVHPSASMVGLDAGVAKLATLSDGTVFEPVNSFQKNQKKLARLQRQLSRKVKFSNNWQKQKRKIQRLHSCIANIRRDYLHKVTTTVSKNHAMIVIEDLKVSNMSKSAAGTVSQPGRNVRAKSGLNRSILDQGWYEMRRQLAYKQLWRGGQVLAVPPAYTSQRCACCGHTAKENRLSQSKFRCQVCGYTANADVNGARNILAAGHAVLACGGCQQTG

SEQ ID NO: 40750 - protein, 378 aa, Bibersteinia sp.
MLIRKAFKFEIRPNGEQIRKIKQFCGCSRFVFNKALAWQNEQYEQDNHHKFSYTKLANLLPQWKKELVWLKKSHSQVLQQSLKDLESAFKNFFQRRSDFPKFKKKGVKESFRFPQGCKIEQKNDRLYLPKIGWVRYRNSREIVGEVKNVTVSMKCGRFFVSIQTEFEQEIPTHKGGEIGIDMGVARFATLSNGEFFEPLNAFKTYKGKLAKLQKQLKNKVKFSKNWQKLKAKISKLHHKIANCRKDFLHKISTKISKNHAMIYVEDLQVANMSASAKGTAEEHGKNVKQKSGLNRAILDQSWFEFRRQLDYKTQWRGGFLVAVPPQNTSRTCPCCGHTAKENRETQAHFECVKCGYMENADVVGAMNVLTRGRAIVQA

SEQ ID NO: 40751 - protein, 406 aa, unknown
  TnpB Polypeptide
MRATVTAKIEAVTPKGDEGLLIEFLKTYRDSVQLIIDEIWGLSEIPSWTELHNMFYNRLVKYGFRAHHVSEIYKRAKEVVESTRKNNGSKPVLKKLTARIHTLDYRLDLNTKTIKIAVLHDKWVELKLKWYSYLNKYLDGSWRPGEIVVSYRYGRFYVYITFHKDIVFKEYSTIMGVDLNFNNITYTIVDLSSNLVSIGVIPFRGFSRALHYRKLAEKLQRRHPSNWRFLKWARRVRARWLSKARSILVDTAHYVSKRLVEIAREYNAVIVFEDLEEIKENNNGGKRLSWMKPLWCYRRIQEYTEYKALLEGIKTIYVNPAKTSKKSPNNRKIKFINYRFVELGDTVTSRDVVASWNLALKGLKRMKGSRVKWSPDSPRSEAMKTRAKRGNPEAKKYLKTTTAIHK

SEQ ID NO: 40752 - protein, 458 aa, unknown
  TnpB Polypeptide
LRRLCRQHRLEICRGACEHDHGLDQRGDRRRRDDGEGRRIFIDSDVETTRQASRRDGIWRRAAFGRQRLLSDKSWLVEREGDLQCNRRLVRLRQQQCARTHQSRARTKQLEKTFGCVRFVYNKCLEEQTRRYKVGEKFAFRIDMNNYCTRELKEKYPFLRDADKFALTNAICHLDKAYKRMFRHEGRHPKFKSKRRSRKSYTTNLSNGNIKVFEAKIQLPKLGRIKAVIHRIAPEEYVLKSATVLMERDGSFYVSVLYEYDEVNNSSMGNEIVGLDYKSDGLFVSSDGECCNMPKYFRQSEPRLAKAQRKLKNKVRGSNNWEKQRRKIAKIHRHIANQRKDFLHKKSTEITNRYDIVCVEDLNLRAMSNKGFGNGKATLDNGYGMFLIMLNYKLRARCKKLVKVDKWYPSSQLCSSCGHRKEMPLSERTYKCPNCGAVIDRDMNAAINILNEGRRFLE

SEQ ID NO: 40753 - protein, 391 aa, unknown
  TnpB Polypeptide
MKIIKYTYKFRLEPTDEQKTLLNKHFGSVRWSYNYFLNQRKQEYLNNKKSITYNQQSKFLTELKTNDGTEWLKEVNSQSLQYSLKCLDQAYQNFFNKRTQFPKFKSKRNKNSFTCPQFVKNDDNLLFIPKFQEGIEMIMERKIKGTIKKATITKTPTGKYFVSILTEMEYTPVSKTGLSVGIDLGIKDFLVLSNGTKIKNHRFLKHYERILKLNQQSLSRKTSKSNRYEKQRIKVARIHEKITNSRMDLIHKTTINLIKQFDTIYLEDLNVKGMMKNHKLSKAISDVCWSKFIDTLEYKAEWNDKSIVHIDRFFPSSKTCSKCGWINNKLTLKDREWICPKCGEKHDRDFNAATNILNEGYRINISVGTTDYERGDQIRPTSVGVICETLK

SEQ ID NO: 40754 - protein, 363 aa, unknown
  TnpB Polypeptide
MVKFMLLTVKARLIVDAEQHDSLLRTMEKFNEACNFISDFAFSNRIFGKFHIQKHLYYEIREKFGLSAQMTVRAVGKVTESYKVDKKTLHAFEPHGAIVYDDRILSYKSADEISILTLEGRTNVGIRYGEYRKLELNRIKGQVDVIYKNGKFYLMIVIDLPEEELRFPDEALGVDFGIVNIATTSDGKIFSGKKCTETRLKYSKIKAKLQKVGTWDAKKHLKKISGRERRFKKDVNHCISKDIVQTAKDTNRSIALEDLSGIRERTTVRKAERESHEKWAFLELRTFVEYKAKLLGVLVQLVDPHYTSKQCSVCGYTSKNNRKTQSSFVCLSCGHTENADINAAKNIMFRAAINQPNALCLPI

SEQ ID NO: 40755 - protein, 392 aa, unknown
  TnpB Polypeptide
MLKGFKTEINPTEEQKQKINQSIGICRYLYNSYIAKNQELYEPLNQEKINKKQTFMSANDFDKYINNEVKILDEYTWINLCGSKARKKAICNAETSYKRFFKGRGKFPRFKKKNKSDVKLYFPKNNKTDWIVYRHKIKIPTLGFVRLKEYGYVPTNAKVKSGTISCKAGRYYVSALCEIKEYNDYSKSNNEGIGIDLGIKELAIVSNIDKSFKNINKTSRVKKIEKKKKRLQRQVSRKYEMNKQGNKFVKTNNIIKLEQNIRKLNNQVTNIRHNYLNNITSKIVKQKPSYITIEDLNVKGMIKNKHLSKAIAQQCFYEIRRQLEYKCRWSNIELRIVDRFYPSSKICSECGYVDKQLKLSDRIYICKECGCVLDRDKNASYNLRDAKLYKVA

SEQ ID NO: 40756 - protein, 394 aa, unknown
  TnpB Polypeptide
MARRRRENSDKEKVTIKGRLIAGDGFTLAKLLYAMRLFRDSIEMAYRLMKKENLKFDETTKRVTKFMSNAHYAYSATKKAMAYLNQERLDLKKPQLYSIGKGCEKGNRNIRLISVDKVLIKIPHADGRHEWIEMEVKFGSRNIPIVEELIELTESDIPYSASVVLRKQKYYLYLHIPLELYAKHTAKVRVSTKAHLMAGFDINPDRVCMVIVDFNGQIRDVKTKHFPEVTLAGFPKSKAKDLRLKTLSELIDYACYHNVKCFIFERIRKIPKKKMKTRSTSRKVSKFAYAELLRHAEIMVKKRNGIFIQINPAYTSVDAIPPKQEIGIGHSHDFRIPFSDKVLKIYKHLSMPMKNLTVIRGVTSRVVFTPIGFNFNNNTSHKTIIGEFSNEKFA

SEQ ID NO: 40757 - protein, 436 aa, unknown
  TnpB Polypeptide
LWNQITYRRRQAYFTEDTDVWDAEYTDLYEDYVPILGKAACQQITRKNSEAWRSFFELLDTYRSEDPSVTEEPSPPRYWGNRDDGYTLHGLVRTDLYTFDWDEDKSTLEFGVGEVLEEKSDFEYQERVTLEVRGNPQWNGDDSRLELIHDDTAGVFRVTHPVRIHPDNLEQQRLDDFTQTLDSENTSHTAAIDVGANNTLALVTSTGESAVYHARPEFERFQKYSERIASLQSALPEDRYSSERIRRLYTKRTRKRDHSRNAAVKHAADWLLEQNVDAVYVGDLSDVLEAHWSSTVNEKTHAFWSHGQLVERITLTLGDVGVSVNKVSEEDSSSECPDCDSPNVQRDSDEFRCHECGLEAHSDVVGAWNLLQEETGPMARPAALRAERRRDASQSSNGRGAYWEWNEHDWTLTDCEEQSRSLDQTRVSEPASSQLG

SEQ ID NO: 40758 - protein, 569 aa, unknown
  TnpB Polypeptide
MQLTEQFHIPDQYHEDCDRLTQLVRKHSQRLLEEEYWSDSHVKGIGRHSGTAYTYIRDDQYDCFENVDEYLYSRFKRCVYQRITSTLLSHNDEHQAFRFVVETVPEQKIEGVGWGELRNHLFREDSSYVEWGILESVVEQLNNYFDMHGRFPECYTELVSCPEPNGTLPYSADAGDYQIHKLSDKDGKIVFTMNAPDSLDTDSYHDWTNHDIEFSHHSRFAELSRRGEVGAPTLHKSEHGYTLDLPVSVPEIETETADDRVLSVDLGVKKQVTAVVIDDTEGQVAPPQFINHKSKQKLFRLATEADGINDRLGNLRRNGKSHTDRFAHLYNEYHHLRQKEKRLREQIQHDAANQLVWMAAKHDCGTIVFESLGQIEAPDASGSLARSISTWARGSLLDKTEYKAELVDIETDMVNPWGTSRHCPRCGDRGKTVKAPDDHTKCRHGGHFYCPNCEYECDRDVVGAVTVGRKHLSQSTMEEAAPVAYTETGTHASFPSSGIDARSTGVQSTAELQDEASGRQTRLTQDCSTACRGESDTGGLQHNQGSNTDRQLSSGSVRQCVLASTPDSG

SEQ ID NO: 40759 - protein, 454 aa, unknown
  TnpB Polypeptide
  misc_feature (389)..(396): Xaa can be any naturally occurring amino acid
MKYTFRYRAYPDRVGLTSDVESHIDIHRQAYNYTRYEYQTLESETHDVGSAYQHHDRLPQWKDEFPVFGEVHSKALQATVKRFYSNLSGLSALKQNGQTVGMLRWKPPREFQSMTYSQSGFKLKDTSGQTATLWLSGIGDIPLRYHRDIPSHATIKEVTIKQETTGEWFVSFGLDLPDDTVPSKPALSEIEPQECVGVDLGITNYIHTSENLTVDTLDLSDEYDRLRREQRDLARKEHGSHNWEDQRRKVAKANRKIKRKVTDFQHKLTTWLVKEYDLVAIENLDVKPLLEDSYNAKNKQDAAWSRFIRLLEYKAELHGTHVVTVNPAGTTKECASCGVATDKPLWVREHSCPACGHTQDRDLNAAKNILNRGLSQIGAGRSESTPMQXXXXXXXXGWDSSAWTPVLASIEAGDSYSPFTFSIPLCKRTPKGSPPSPPVWLRRRYRRPMFLEAL

SEQ ID NO: 40760 - protein, 517 aa, unknown
  TnpB Polypeptide
  misc_feature (416)..(422): Xaa can be any naturally occurring amino acid
MEVRRTVSVSLDVDSDDAALLEDTVDTFLWSAQYVVDHAFQGEYVTTSKTTLDDETYDDVREATHGFNGGLVQAARNKAAEACTSVVARWKNGKKASQPRMTSPHVVSDHRTATFDDDSVSLATTDGRIEADYVLPDTESDTPHAEYLFSDEYETTGAELHRKHGEWQLHIHCKKEVESDTPEQPPTTHGTVLGVDLGVNNLAVTSTGTFWTGDEFDHWRREYENRRGDLQECGTRWAHQNIQAVGRKEDGRFKMTLHRIANELVAEARDHDCSVIAFEDLTDIRERTGASWGHKWAFNRLYEYVEYKAAEDGIEAVQVDPENTSRRCSTCGFTHPDNRDSESFACQNCEYQNHADYNASKNIGLRYLRRNQTGGDGGEPLGVRLHSGMLNVNGEYESPASIEARTGVHAEESHPXXXXXXXVCMGVDSERPAPIWLSPRLRIFFAALRSRSWVWPHAGHECSRTHSGLSVATPQLAHSLVVPAGLTVTTCVPWSSALYSNKRMNRDHAASCLFLAL

SEQ ID NO: 40761 - protein, 355 aa, unknown
  TnpB Polypeptide
MILTYKIRHSRDYSRELVLAKKIADFAIRTRTNTSKDVKHFGLKSAIANQILRKYKRRIIKKATNVKLTIPGQGVKFDPNSRTAEIPCLKLTLNCKYIPTFQKIRQVEIGDIFVHISVEIQEPEMRTFEKFIGIDCNTTGHAAVVAIPHTGKIHKLGKSAIHTHSKYKQIRKKLQRNSKFSLLKKIKNKESRIIKNINHHISKKIVEIAVQTKSGIRFENLKGIRKNKKHSRKFRYSLNSWSYYHIQQLTEYKAKKQGIEVAYVAPAYTSQTCSRCGSLGNRDGKKFQCVCGHADHADVNASFNIGKPVSHCLIDPTRIKNRSQLHKESDLCKGSTDTPQTAMSKMMVTVELTKL

SEQ ID NO: 40762 - protein, 390 aa, Cyanobacteria sp.
VFCLTYEFRLKPSKQQICVFEDWLEINRKVYNYALAQRKHWYKSRSCQVNSCSLHSEYIIPADTPRPTFVSQCRSLTIAKEQHPDLKQVAAQVLQQTLKRLENAFTSMWENNFGFPRFKKVGQLRSFVFSQPGRNPLRNGAVKLPVIGWVKFRSSRDIPEDAVVKQTRVVKRASGWYVMITLQWDVSVPQVTPLAEALGVDVGLLSFIATSNGLCINRPRFFVDLQRQLRLLQQRVSRKVKGSHNWCKATMKVAKLHEHITNTRKDFHWKVAQQLCAQSKTIFVEDLNLVGLSRGMLGKHCLDAGWGQFFSILEQCCFKRGVYFQKVDSKKTSQICPNCGAETGKKDLSVRAHECESCGYTTDRDVAAAQVVLTRGLAAVGQTVKMRERG

SEQ ID NO: 40763 - protein, 444 aa, Bacillus sp.
MFVTHSFQIPYEINLYNELRIMQREATSVWNDIVREANSYYFTTKKWLSKTEIQAVRKQTYNLHSQTVQAIADKYAANRETIRKLRLTDKKAKYPWRKKYYYCIPLKKASMEISDEIIKVKKAEYGSPLVDLLAKKKKRGWNEKFPKKNGYILIPNLTTEDLTKCNYAEVVWRNGSYWFTYSVEVSEKDKSSYEFKAAGGDLGEIHAVSVATEDKSLLISGRSMRSISQFRAKTLAELSKLMSRCKKGSRQWRKYNKARGRIRQKSKNQLEELEHKTTKEAVLFLEEEKVTHFVIGNVSGIEKNTKKDEKKKKKNNKVRRQQLSLWNQGKIKERLIYKAKLRGIKVEETEESYTSQDCPFCGGRHQANGRNFVCSVHKTEIHRDVNGAQNIARKLYPMEVKLMESIIYKQPVWYKHHLTEERRQETKHPKDKPKKAKSIAERTA

SEQ ID NO: 40764 - protein, 370 aa, unknown
  TnpB Polypeptide
MIVKRNYKFRLSPKERHIKRLQETLNTCRFVYNQLLEKRNAHWKEKKKSLTCFDCNGLIKDMELKIKVHSQVLQNVSARVDLAYLGFFRRLKDKTIKAGFPRFKCYDRYDSFCFPQTGFAIRDKKLWLSKIGEIRINLHRKMEGKIKTLTIKKEGNHWYAIFSCEVEVKPEIKKWKRAVGVDVGCVSFATLSDGNVVDHPHFLRQSQKELSDTQSKYSKLKTKPKEDKKKIRVKRQLINLHCKVKDQRKDFLHKLSKKLVSEYSHICVENIKPSQLLNDNWRSVNRSIIDSGWTNFRQMLHSKAVEAGCEVIEVNPAYTSQQCSGCGNIVKKELSERQHKCNLCGLDIGRDLNAARNILRVGMDSFVKAT

SEQ ID NO: 40765 - protein, 380 aa, unknown
  TnpB Polypeptide
VLKSFKYKLNLNKKQREYFDKTFGCTRLIYNLALAAKIQYYQSTKQSLSAYDLINQLKDLKNGYPFLKEVSNMTLQQSILNMDKAYQNFYKGFGFPKFKNKHSSQSCKYNQAIDVNLKEHKILIPKIGWINFYRDKPFNGELKSITISKNTLGYYFTSILVDTEIPKLEQINAEIGIDLGLKHFMVDSNGYKIDNPRYFISAQKNLKKHQRRLSRKVKGSNRYNKQKLKVAKCHYKISNQRKDFLHKLSSKLINENQVICLEDLNVSDMIKNHNLSKSISDAGWSEFVRQLKYKALWYGREIKQIDRFYPSSKTCNSCELVNQELKLEDREWICECGVKHDRDINAAKNILKIGTGNASKNVELLPIGKTVKRSIKLKMV

SEQ ID NO: 40766 - protein, 360 aa, Burkholderia sp.
MILVYRYRVKSLNGLLNKQSRAVNYVWNFCNDTQKHALKWSKKWPTGFDLNVLTTGSSKELGIHSGTINATCEQYAKSGSQHRRPYLRYRGRKSLGWVPLKGRDLKREGDAFRFAGNTFRVFNSRPLPEGKIKDGTNFAQDARGNWFLNIVIEMPDVQARPIRSGVGIDLGLKDFATLSTGEKLPNDQFGRRAAEKLAKAQRARKHKRHIAKLHAKVANARADFQHKLALDLVRRFDYIAVGNVSATKLARTRMAKSVYDASWSSFRNKLRYKAMAHGATFEEVDESGSTQSCSACGSKDSTTRPKGIAGLRIREWACSDCGAEHDRDTNAALNILRCGRASPGVGILPFRERRTSRVSS

SEQ ID NO: 40767 - protein, 383 aa, Cyanobacteria sp.
MIVLEFKARVKSAQSVAIDEAIRTSQFVRNKALRYWMDNPGVGKYDLSKLCKKLAEEFPFAKKLNSMARQAAAERAWSSISRFYENSKKGIKPVGYPRFKKHSRSVEYKTSGWKLLGPKRIKFTDSFGIGELRLLGTYDLARYDEALIKRVRLVRRADGYYVQFCIQVNIQVQSEPSQKAVGLDLGLHYFITASDGSVVEAPQFYRQAEQQLSRANRQKSRKYRKGTKPQSRNYHKARNRYARKHLRVSRQRHEWAKRVAYCVIQSNDWVAYEDLNVSGLVRNRHLAKSISDAGWSTFRYWLEYLGRKYGKVTVSVPPHYTSQDCSNCGKRVKKALSVRTHQCPHCGYEADRDVNAAINILRLGLEYRGAHGNAYAWGDWPSG

SEQ ID NO: 40768 - protein, 499 aa, unknown
  TnpB Polypeptide
VGGCAGRMTQGGTTPRSLPTDGHPNPLQALREEIEERLKKNHRTVRLRLLPSESKHKDLMGIGLTCARLWNELNYEKRQAFFNRELTPEKYYEINKRYYYRYNETLGVNAQAVIQKNDEAWNVFFKQLDLKKQGRLPPNIKKVSPPGYWKDRLTGKKEIHIFVRSDRYYLEPVNEGEGYLVLVDFGLRIRYVGRIRWEGKQGRLEIIYVNGRWFALVPIEVGVDPPKSNKRGYVKPNYKDKKGRIVNPRSIKQRDPIGDKEAFIDMGLNNLFAVTISDGSAMLVKGGTIKSEYYWWKREIATYQSIRDLLRNAGIPTWREYHEKYLKAIYKRDERLRHLYITAIRFLADELHRRGVKKLYIGYPIMLSQNNGNEYNTNIWRYRRIVLWIVDIFMEYGIDVEIVPEDYTSRECSICGNKHKNGRKYRGLYICKKTGKKINADINAALNIARRLGYRIKIAKKIESYHVTHNGVRPLNPLQRANTRDPEVRNPALKGGEGS

SEQ ID NO: 40769 - protein, 354 aa, unknown
  TnpB Polypeptide
MSNEILVPRINSVSLWLLDDHVWKPVNPTKIRINGFGNTFFTSAAINTHRGWVHIDLEPSKEFYKLLARGFKPTSHAKIKLDRKNKRVLFHLSLEKEVEIYKPGNIKPVDVNEDSVAALYEAFAIILETDLAKTTLGYNYRKESIQRRNRSGSRETREAMKKLKEGKKRDYRMKTANMIVRDALRMRGVIVIERISGEDIRVMIARYRNKQLRHRIYQSALKGELNAIIDKAREYGVPVLMVDPRNISKICPINNASIEYGEDRIGICSKGGERWHREVVALINIYLKALEALYEGIAQKGFGVPSIDGSPFLLGSTATGEPIEIPRSLWGRWKSPDATGSKPCGSRSMAIQNK

SEQ ID NO: 40770 - protein, 549 aa, unknown
  TnpB Polypeptide
MRQKPLLNLFFMLAAGPDSTNCAIQGPTMLRRLVAEFRPVVAPDLLLQLPDVPLLRVRQPGVRTLALRPPQGGRDAVPAEEPPAGIARVLADDYRREAWGSPPGLASVDLAHHADDAPAPGRAAGQAELPHQEPVGHGPAVGGGPEQLTAHIIPQRARRRAARGQVLNVLNTSSGASSGDGRFYREIASQGMESVRAIRFRYKPSEELSSLFEEFRLMCNDAIRIAVEQKPKSRFMLIELAYPRLKEYGLHTHYILSACEVAYSAYKNQKRKSTPCVRRPFIKLDSQTYSLNHLIVRIPTRPRHFIYLTLHSSDYQLSFVDDPRLKRGSITLTDSALAIAFTKKTVEISPGGRMGIDVNERNVTWADSSGLVKKEDTSVVAELKERYKALRKKIAQRTSRDIRIQRGLLSKYGRRERDRTAQALHRVTKRIVEHAKANGCTIIMEKLKGIRKLYRRGNGQGSSFRGRMNSWTFHEIQRQVEYKARWEGIPIHYVNPRGTSRKCPRCGSSLTELEGRRLMCPSCKQVEDRDDVAAMNLMACAVPQARPGG

SEQ ID NO: 40771 - protein, 406 aa, Nostoc sp.
VLRAVKVRLYPTPEQQTALSRSFGCARWYWNYALNACVQHYVYSGKTLKMSVYKGLLPQLKVEYPWLKQDCYSSVLQCVAINLDKAYKNFFEGRAKFPKFKSKFNKQSIQYPQSVTVVGDKLKIPKIGEVKAVFHRQVLGIIKTVTISKTVTDKYFASILVESECSDHQLGGDKILGIDLGLKDFAIVHDGEEFTKYSNAKHLKRHKRNLARKQKKFARKVKGSKSRHKHKKLVAKVHERVSNSRQDFLHKLSRKLVNESQIIVVENLHIKGMVRNRKLSKSISDVGWGMFINFLDYKLKDSLGQLVEIDRFFPSSKTCSCCGHVVDELPLDIREWDCRKCKYHHNRNKNASQNMRTEGIRILSIDGGNPVLAESRRSKTKKPQGAKAFVDETGSPHPICTQMGVG

SEQ ID NO: 40772 - protein, 178 aa, unknown
  TnpB Polypeptide
VKFSNNWRKQKEKIERLHIRIADARNDYLHKASTEISKNHAIISMEDLRVRNMSTSAKGTGEAPGRRVRQKAGLNKAILDQGWHAFRCMLAYKLAWAGGVLDLVPPQHTSQTCPECGHVSKENRVSQEIFSCVACGFEENADLVAAINILQRAGHAQIACGDTGLAGGQAQEPSRRAA

SEQ ID NO: 40773 - protein, 388 aa, unknown
  TnpB Polypeptide
MRRAYKYRLWTNANQERELGIMLETHRRLYNYMLNMRIASWECDRLSINYQFQSWCFKGLRQENPYMARLNFSSAQATMRRLDKAYQNFFRRVKAGEAKAGFPRFKGKGRFESIEYPAYGDGIRLNGDRLRVQHVGVIKVKLHRPHEGTIKTATLKLEGDKWFLVLSCDLGDVAVPKSTNPPVGIDVGLESFLSTSDGEHVENPRFLKKELPELRRAGRAVSRKKKGGSNRRKAVRRLRRRHARVRNLRHEHHHKTALKLVRRYGLVAVEGLNVRGMVKNHCLARAISDAGWSGFRSILKSKAESAGVEVVEVDPAYTSQVCSSCGQLVQKALSERWHTCDCGCSLQRDVNAAKNILARGLVRTEPVGANVGHKIKRFPRSRRLQATE

SEQ ID NO: 40774 - protein, 393 aa, unknown
  TnpB Polypeptide
MKEFRLIVNKSIRVALEQGIRSRFRLSETLYSELSRDHDILKLYILSAFGVALSALSARRRHARHEQNADRPYMKRLMARLAKSGYRLDRATGHLRIPVKAHEYLEFDLPLSRWHHSFLDDPTWDLGSLTMVPGKIILTLRREVSPPYEPTSVIALDTNEDSVDGVVARQGEAQLMTVSFGGIRQVQSTHFRRCRRLAFKKAHDRRLARRLLGHEGERERHRVLQRLHRVSKHLVGTALLGEAAIVLENLKLPNAGVWSRKMNRRLASWPRRELHRQIEYKAALAGVPVIKVNPAWTSKTCPVCGARRRDRVGQDFVCLRCDWEMDRQHNAACNILLSALASNEALARAVRFRPGALRDDVVSPLYDRPALRTVAREEPSGVELRGAFQERPS

SEQ ID NO: 40775 - protein, 396 aa, Geitlerinema sp.
MTFRAFRYRFYPTAEQESLLRRTVGCVRLVYNKALAARSQAWEERREKVGYRETSKRLTQWKKEEELQFLREVSAVPLQEGLRHLDKGYTHFFAGHAKPPRFKKKRKGGSATFTKAAFRWRDGALYLAKCNEPLNIRWSRQLPKGAEPSTVTVRLEPSGRWHVSILVDDETVQPLPKSEKSVGVDVGIAHLAITSDGEKVENPRHLTKHYRRLRRAQKALSRKMKGSRNREKARRKVAKIHEKIRDSRNDYLHKLTTRRVRENQTIVVEDLSVKGMVRNPKLAQHISDCAWGDLVNQLDYKCQWYGRTLVKVDKWFPSSKLCSSCGHKVDSMPLSVREWTCPNCGTVHDRDINAARNLLAVGHTVSACGASVRLEGHCSGEQRRKTRKGKKQEPKS

SEQ ID NO: 40776 - protein, 408 aa, Ignisphaera sp.
MVSYSVRGEEPVVVETLKVRAVPEGSYDKLLEFLRLYRDAVQLVVNELWSLNTKLSKKSLHRMFYDKLRALGFRAHHVKQIYTCAQSIVESAKANGGGKPVLRKLTVRMDKYDYRLDLEDKILVLKLHSSYEVKLKLVTSEERIRKFRGWSNYELVVKYVGEGFWVSAYFKKTVKPVKPKTVMAIDLNFDNLTLAVFALNGELIKLKRFKTTLSKVLTHRIWIERIQKRYPKSWRFIKGVRNAIAKHGKRIKNITWDYSHKVGDLTAKLALRYRSIIVLEDLDKLRENAKRDRRFNKELTLWFYRRVQFCIEYEGRERGLRAAKVSPRGTSSKCPKCGSRLVNNGHRTLRCSRCGFIGDRDVVATINLYKRFTLHSKCGEHGVSLNAPEPGEAPSGMRGNKDEAMKIT

SEQ ID NO: 40777 - protein, 412 aa, Sphingomonadales sp.
VIVIITRGYRYKLDPLAEQKDILQRFAGVCRLVYNISLEQRTNWGRKHKISYFFQAAELTRLRAEFDWVRAVYVSCQQQALRDLDQAFKNFFAGRASFPRPRKRGVNDSFRFPGREIETRRLNAKWSAVRLPKIGWIKFRDTRPMRGALKNATVSLDAAGWHISFVREIEHAAPAPRIKTVGIDRGVATTLALSTGETMTMPASLERIEAKKRKAQKIVARRKRGSMRRQRAKRRVANLQAKQARIRRDFHHRAALGIVQRFGIAVLEGLNTRGMTASARGTVAEPGRNVRQKSGLNRAILNSGWHQFATILTYKMEERGGQVVTVPARFTSQTCAACGVVDARSRESQARFRCVSCGHTDHADINAAVNIERRWNTPLLDVEGLHQRPREASTGRGLVVSENPRCSEWGRC

SEQ ID NO: 40778 - protein, 394 aa, unknown
  TnpB Polypeptide
MCRFRLLPSPGQVAGLAEHCRHARFVWNLAVEQQQHWQPGRQAPGYREQCAQLTAARAEYDWLAAGSQTVQQQALRDFAQAMRNFFNGTHRRPTWRKADTHEGFRQVGFKLRHIKRLSRRYGQVWVPKVGWVRFRWTRTIPATVKSYRVNLDRSGRWHIAFAAIPDCVPRPGDGSVVGVDRGVAVSVALSSGELLTVPGLRAGEATRLRRLQLRLARARRGSNRRARTKLAIARLRARETDRRRNWVEKTTTDLARRFDTIRVEDLNVRAMTRSARGTRECPGTNVAQKRGLNREISRQGWGMLVTRLKHKAQGRLELVPAAYTSQRCSHCGHVAPENRKSQAVFQCLACGADPCNADLNAARNIAAGQAVTARGDLGTSRSVNREPRRCSPAA

SEQ ID NO: 40779 - protein, 415 aa, unknown
  TnpB Polypeptide
MEKMMQLVEKHVIKSGHRFFDEIDALCFVSKNLYNAANFVIRQNFIYGWGYLNYNAIYKLMKSHETYKAMPAKVSQQILMVLERNWKSFFEASQAYNESPEKFTGRPRLPKYKDKSKGRNLLVYTIQALGKTALKNGLIKLSGTKIKFPTTVDPALICQVRVVPKCDCYIIEVIYEQQKSLDTLVNSSAIASIDLGLDNLATLTSNQMGFVPLLINGRPLKSINQFYNKRKAQLQSLLKVNRKTSHRIQRLTRNRNQKIDNYLHHSSRFIVDCLVENHVGTLVVGKNAQWKTEINLGKQTNQNFVAIPHQKFIEMLEYKCNLVGIKVLVSEESYTSKASFLDNDAIPTYGESDADSVVFSGKRIKRGLYKSSDGKLINADVNGSCNIMRKVIPTAFANGIGSCVVRALRGSNRSK

SEQ ID NO: 40780 - protein, 527 aa, unknown
  TnpB Polypeptide
MKARSKRSKPKQGKDSSTSKLTSFLQLELPLFAIAESAPQSSETILSDKLPTCNLSTQKQKSSETSVQDSTSKERDCVPYWTDLCREISSRLLLPVVTDSLGLDSSLFSTSSNKTVDKSWFLTKLYTAQNQNLPKIFSQSSILTLVECTGLENTVKRSRKIRLYLTVAQRQLLKQWFGVSRFVYNQTIEYLQQPGTKANWKAIKGGILSSLPDFCKPIPYQIKSIAVKDACKAVSNAKIKFTNGGGISRMRFRSRKDPVQSCYIPKSAVSSSGIYHTILGEASFAEALPPRFGDCRLVFAYGDYYLTVPSNVPRQQVENQGRVVALDPGIRSFITFFSETSFGELGSAANLKIQKLCFRLDKLISKFSKAKCKQKKRMKKAATRIRGKIKHLVDELHKKTARFLVDNFDVILLPTFETSQMSKKAKRRIRSKSVRQMLTLSHYKFKQFLKHKAFENSKVVLDVNEAYTSKTVSWTGEIVHNLGGAKFIKSKLDGRVMPRDWNGARGIFLRALVDTPSLKEHLSDCIC

SEQ ID NO: 40781 - protein, 414 aa, unknown
  TnpB Polypeptide
MKKTYSIRLFPTKEQIDELNELSSIRNDIWNKLLEIEENEYKTNKKILNKFDLNNLLPKLKEKYPDWKKLNSKAIQTISTELFGSYRSFFNLIKKDKNARTPRKIENNEHFHTIVWNQSGWIFKENNIIINKLTFAYKSKIDIIELNIKEIKIKYVRNKWLCDIIVEEEIKYEDKLNIKTKILAIDLGLSKLGTGVDNKGNVIVLQNKSKKINDYYQKQIAKIQNKRSKTKKGSNRNKKLKKVLNKCYHKKNEQIKQTLHIQSKKLANMNYNTIVVGDLTVKNLMSKEGLNKNKKGIRKSFHKSNITMFLQFLKYKCQLKNTNLTKIDEKWTTQLNCLTGKIFKDKIELKDREVQLSNTIIIDRDLNSAINIMKRWFGNHIASMNEPLDFSSVIKKNNLFNETHVFSYCVVHTF

SEQ ID NO: 40782 - protein, 378 aa, Bacillus sp.
MEVKRMMINKAYKFRIYPNKAQAILINKTIGCSRFVFNHFLSLWDNAYKETGKGLTYGICSAKLPAMKKEFVWLKEVDSIAIQSSVRNLADAYTRFFKKQNSAPRFKSKKNNVQSYTTKQTNENIAVVGNKMKLPKLGLVRFAKSREVKGRILNATVRRNPSGRYFVSLLVETEVQELPKTNSYIGMDVGLKDFAILSDGTTYKNPKFFRSLEEKLAKAQRVLSRRMKGSSRWNKQRVKVARIHEYMTNARKDYLNKVSTEIIKNHDVIGIEDLQVSNMLKNHKLAKAISEVSWSQFRTMLEYKAKWYGKQVIVVSKTFASSQLCSCCGYQNKDVKNLNLRKWDCPSCRTHHDRDINASINLKNEAIRLLTARTVEIA

SEQ ID NO: 40783 - protein, 376 aa, Gemella sp.
MLRHKAYKYRIYPTNEQEILIAKTIGCSRFVFNHFLDKWNVSYETTGKGLTYNKCSAELPKMKKSEETAWLKEVDSIALQSSLRNLADSFDRFFKKQNQRPRFKSKSNPVQSYTTKNINNSIEIQDKKIKLPKLGFIKIKNSQNHDGRILNATIRKTITGKYFVSLLVEKEIYPLPKTGENVGIDLGLSDFAILSTGEKIGNEKFLKNLSKRLAREQKILSRRALVAKKSSKKLSESMNYQKQRIKVAKIHEKIANKRRDFHSKLSTEIIKNHDIICIEDLSSKNLMKNHKLARAIGDVSWSEFVRMLEYKAEWYGKTLSKISRWYASSQICSDCGHTSGKKPLSIREWVCPSCGSHHDRDINASINILHEGLRLV

SEQ ID NO: 40784 - protein, 494 aa, Pseudobacteroides sp.
MGMRTIVLKLHKPSKAKQQIINDALLGYNKAFEFLINKAGNCLPELEQRFKVKAGQYNILALSKWIDSNLSQELNKFDVQPFKDSLRLEFAYAMADCLRTGSVCQENVNKEAAFSYFRPIYFCRYDTKRGYCLLYDKEKDRYYVKLYLLNGPNARTAAEANIREGLVHVHKDNKMLERKRRKETHIIVPLSFGKWQERIIKEASKAPECFKTARLLVRDNEYYLAISIEAGESKSISTMAYMGVSRGLKSNLHYTVVNSHGEIIISGEIDTLEKNDDSSGIPLNKLHKAANIITDIAISHKAQIIVQNLSQRGDGLGWSDNDLDQYLPRFKRKDYNRMVSLLEYKLQWKGLPKPIKVSPIGIYYTCCSCGRNSKKNRFNKDLLICSSCGTTMDIDKLGSLNLARKLIDYNTSKIKINIKRVDSGVVFSNKILGLDCFTSYKEDQLLRLKNEIQKIIEDTKLIVKTQDKKAHSARISLIRKLESVENFMDLIEYI

SEQ ID NO: 40785 - protein, 352 aa, unknown
  TnpB Polypeptide
VLLSIKTKLKLTSAEKQLMSKHAGIARFTYNWGLATWQNLYKDGLKPNKYILKKFFNNCVKPELDWIKEKGICQKITQYAFDQLGNAFDRFFKGLGAYPNFKKKFQHDSFTIEPIPVGGVRTKLPTIGWVRTFEGLPNVTTSKMTISRIADDWYLSFAYEQLEQVSLKQHEVVGVDLGVKTLATLSTGIVFENPKHYDQESAKLKRLQKQLSRKKKGSNRRFKARMKVAKQHNRIANLRNNTLHHVTTYLSKNHAKVVIEDLNVAGMMANHRLAKAIADCGFHEFRRQLEYKCKKFGSELMIISRWYPSSKTCSSCGNIQDMPLKERAYNCCSCGISIDRDLNAAINLSRLA

SEQ ID NO: 40786 - protein, 424 aa, unknown
  TnpB Polypeptide
MAKRVVTRTYTASIRNQSQVQDDLNSLGFAASKLWNVGRWVCDRVWSEIDHIPGHNELTAYLKNHERYADLHSQSSQRVLQELAEAFNSWYGKRQNGDQRANPPRYRKHGDDHPRSTITFKSAGFKLDPQYTRVRLSKGSNLKEYWSDFILCEYQTRPDVDLSTVESIQQVRAVWAGNEWELHFVCKVEVETFEAPGEKTVGVDLGINNFAALAYEDGHGELYPLNCLKQDDYYFSKRIARCDDSDSEQAVRLNQKKSARRTHYVHTISKHIVQRCVEEEVGTIVVGNLSGIREDEETIESKNWGSHGNLDLHSWAFDRFTDLLEYKAEMEGITVEQISERDTSKSCSCCGRKRDANRVERGLYACDKCGTVANADVNGAENIRQKVSPNPWSEDRSNGWLAQPSTFLFDKENGAFAPREQLTS

SEQ ID NO: 40787 - protein, 423 aa, Synechococcus sp.
MLTMNYTYRIYPDAAQQAKLRSWLETCRGVYNYALRELKDWIASRKCPIDRCSLEKEYIIPADEPFPSYHRQQNNLPKAKKQFPHLAKVHSQVLQATIRRLHDTWEAFQKRGYGFPRFKKQGQFKSFVFPQFKDNPISGSSIKLPKIGKVPINLHRPIPDGFKVKQVRVLSKVRGTQWYVVVTIESDISVPDAPVHGRAIGIDLGLERFLTVSDGSFQERPKFFRSMQRKLKLLQRRAARKQKGSRNWEKAQIKVARMHHRIANRRKDFHLKTAHKLCDQAQTIFAEDLNVTGLTRGMLRKGCVDAAFGQFLSLLEWVCWKRGVYFAKVNSNGTSQTCPKCFATVSKTLTAREHHCPECGYRTHRDHAAAEMVLHRGLENVVAQGLWGTETACQVVLSGVYDLDKWRGAGMPNREVRKPALYP

SEQ ID NO: 40788 - protein, 418 aa, Synechococcus sp.
MRVLEAKLLYGTPEQYRALDEAIRTAQFVRNKCLRHWMDNRGIGKKELYTLCKHLAQEFEFAQKLNSQARQASAERAWAAISTFYRRCRAGEKKSYPQFKKNCRSVEYKQSGWKLSADGMAITFTDGNQAGTFALYCNSEARQLILHSKINRVRVVRRADGYYAQFCLDMERQEQGEYAGKMIGIDLGLQHFYTDQDGNTVDCPKYLRKAERRLRLHQRRLSRKLRRGSKEQSRNYLKQKQRLGKVHLKVQRQRRDWAMKLARCVVASHDVVAYEDLSVKNLMRNHHLAKSIQDAAWSLFTRWLDYYGKVYGKVVIAVPPEYTTQECSGCGHLVKKTLSTRTHQCPKCGLVLCRDQNAALNILRRALKMLGMEWNGTQGHWGTASKEGTPGETSTSAMEGQPNMVSAVVEPGTRILAL

SEQ ID NO: 40789 - protein, 411 aa, Synechococcus sp.
MTQVLTVSCKLKVSQSQAAKLDATLEAFGQALNWVNQNTPEKVANAVKLQSLCYREIRARFGLSSNLAQQICRRVAYARKVAQQKNRPVKALSLRDANANKGGFATYDARIFSFREKDWSVSLTTVEGRERFELAIGRYQRERLAGSNPKSATLVKRKDGSYSIQICVEAEPSPPQRTGRVLGVDLGRTDIAHTSEGDNWNGQQLNRVRDHYSRLRAVLQRKASKGTRSSRRRCRQLLQRLSGKERRFQAWVNHRISKAIVSRAKATNSAIALEDLTGIRKRVNQQPRSKAERRRANSWAFYQLRQFLEYKARAAGVSLILVPPAYTSQTCHKCLHIHPDPAQSYRSGKKFKCGHCGWEGDADLNGANVIALFGAVVNQPRGSGLFCSLVEQNRLRATESPLRTALAVGVG

SEQ ID NO: 40790 - protein, 408 aa, Synechococcus sp.
MTQVLTVSCKLKVSQSQAAKLDATLDAFVQALNWVNQNTPEKVVNAVKLQSLCYRQIRARFGLSSNLAQQVCRWLAGARKVARQKNRPVKAFKRGFATYDARIFSFREKDWTVSLNTVGGRERFELAIGRYQREQLAGSNPKSATLVKRKDGSYSIQICVETEPCPLQGTDRVLGVDLGRTDIAHTSEGDNWNGQQLNKVRDHHSRLRAVLQRKASKGTRSSRRRCRELLQRLSGKERRFQSRQRCVAKTWVNHRISKAIVSRAKATNSAIALEDLTGIRERVNQQPRSKAERRRANSWAFYQLRQFLEYKALRAGVALILVPPAYTSQTCHRCLHIHPDPAQSYRSGKKFKCGHCGWKGDADLNGANVIALLGAAVNQPRGSGLFCSLVEHNRLRATESPRYTAKAV

SEQ ID NO: 40791 - protein, 589 aa, Synechococcus sp.
VQRLQAFKYELLPNGQQERQMRRFAGSCRFVYNKALALQKERHEQGQKKLGYAGLCQLLTAWRHSADTAWLADAPVHPLQQALQDLERAYSHFFAQRAGFPKFKKKGRSDSFRYPDPKQIQLDQANSRIFLPKLGWLRYRNSRDVVGKVKNVTVSKHAGKWFVSIQTEREVNWPIPQGGAVGMDMGIARLATLSDGTFYAPLNSFKRHEARLRKAQQALSRKVKFSNNWKKAKARLQRIHSQMANARRDFLHKVSTAICKSQAIVCIEDLRVRNMSKLAAGTADAPGKNVRAKSALNKAILDQGWYEFRCMLEYKLAWKGGRLIVVPPQNPSRTCPCCGHVSSDNRQTQAWFECVACGYENNADRGSGPEAFRGSGPEAFRGSGPEAFRGSGPEAFRGSGPEAFRGSGPEAFRGSGPEAFRGSGPEAFRGSGPEAFRGSGPEAFRGSGPEAFRGSGPEAFRGSGPEAFRGSGPEAFLVGAINILARGIQLLRDEGQDTTDAAVGMRVGEPPVSAWMACGSNRTGGRKQEPAETTAQGAIHAQRGRNLRPSGRGGCQDSRLRQLQPLSQRERGVEAMHSPTGNAPLGSIG

SEQ ID NO: 40792 - protein, 414 aa, Synechococcus sp.
MRTAYQYRLRPTPSQVVLMEQWLELLRKQYNYRLAERLNWWEQNRCNINACPLICHLPELKDRPDVYSQKRDLVNTKVRFPEYQAIHSQVLQNCIERVHKAFDRWLKGDRNGKRAGRPRFKGAGRYRSFTFPQMKQDCIQGKFIHLPKIGAIKLIQHRPLPDGFVIKTATITRKADGWYVTLSLQDASVPEFAPEPATLENTIGIDMGLDSFLVTDTGESVPVPQYYRRAQKRLERLQRSLSRKQKGSNRRKKALGRVAKAHLKVANQRKDFHYKVAKKLVSKGKHIAYEALNTKGIARTRLAKSIYDAGWGQFLQILAVKAERAGLRAIAVDPRGTSQDCSQCGQKVPKTIRDRWHSCPHCGLELGRDHNAAINIKYRAVGHPVLKAQETSFTGVTEKPALFRFSGAERFASA

SEQ ID NO: 40793 - protein, 403 aa, Synechococcus sp.
MTQVLTVPCKLKVSQSQAAKLDATMDAFVQALNWVNQNTPEKVVNAVKLQSLCYYQIRARFGLSSNLAQQVCRRVAGARKVARQRNRPVKEFKRRFVTYDARIFSFREKDWTVSLATVDGRERFELAIGNYQRGMLAGSNPKSATLVQRKDGSYSIQICVEAEPPKQQNTDKVIGVDLGRRDIAHTSEGDNWNGQQLNKVRDHYCRLRASLQRKASKGTRSCRRRCRQLLQRLSGKERRFQAWVKHSIAKRIVKTAKSLSACIAIEDLSGIRGRTNRQPRSREERRRSNSWAFYQLRRFIEYKAVRAGVKVVAVPAAYTSQICHKCLRIHPDSAQSYRKGKQFKCGHCGWEGDADFNGAKVIALLGAAVNQPRGSGLFCSLVEQSRLRATESPLRTALAVGVG

SEQ ID NO: 40794 - protein, 411 aa, Synechococcus sp.
MKYNELMSQVLTISCKLKASQSQAAKLDATLEAFGQALNWVNQNTPEKIVNAVKLQSLCYYEIRARFGLSSNLAQQVCRRVAGARKVARQRNRPIKEFKRRFVTYDARIFSFREKDWTVSLTTVEGRERFELAIGNYQRGMLAGSNPKSATLVQRKDGSYDIQICVEKNPPKQQDTDRVIGVDLGRTDIAHTSEGDNWNGQQLNRVRDHYSKLRAALQRKASKGTRSSRRRCRELLQRLSGKERRFQSRQRCVAKTWVNHRISKAIVSRAKATNSAIALEDLTGIRERVNQQPRSKAERRRTNSWAFYQLRQFLEYKARVAGVALILVPPAYTSQTCHKCLHIHPDPAQSYRSGKSFKCGHCGWEGDADLNGANVIALLGAVVNQPRGPGLFCSLVEQNRLRATESPLRTA

SEQ ID NO: 40795 - protein, 387 aa, unknown
  TnpB Polypeptide
MSTRTIALTLRPTAAETVALVRLQRQFNAACNYISGVAWDAQEFNKVRLQRLTYETVRATYGLIAQHTIRAIAVVAASYKADKDARHAFRDDAAVVLDTPRLYRIKHNRANITTLDGRLNVEMGIGGHQRQMLKDAVTCAEADLIRDRKGRWRLMVSAHFQDPPTIATDGVIGVDLGRTDIAVTSEGATFSGAMVTARRDHYARVRRSIQRKASKGTSSTRRRARVIEKRISGRERRFQKDVNHVSSRRIVTRAISSGRAIACEDLTGIRERTNKQPRNKTERRRSNSWAFYQLRAFIAYKCRAGGVPFALVNPAYTSQMCHCCLHIGERSGKRFACVNRACAWQGDADLNGAQNIALLGASVMSPGGPPLCCLYQLGGRATTSPRL

SEQ ID NO: 40796 - protein, 395 aa, unknown
  TnpB Polypeptide
MSRYRLEPSREQETILLRHCSDARFVWNLCVEQESWWRADRGRMPRFAERCRQLTEARADSPWLASGSVIVQQQAIRDHGQAMANFFAGTHRRPSWRKARRDEGFRVVAVSTSDVRRLNRHWGQVRIPKAGWVRFRWSRGVPVGVKSLRVNRDRAGRWHVAFAVIPNPVDGPGTGQIVGIDRGITVSAALSTGEMLKAPGLSAREAARLRRLQRKLARARRGSNRRGKAKAAIARLKTRETDRRKDWAEKTSTDIARRFDIIRVEDLNIPNMTRSAKGTVDAPGRNVAAKAGLNREIHRSGWGLLARRLEDNAPGRVEKVPSAFTSQRCSACGHADAKSRESQADFACVACGFACNADLNAAKNIAAGHAVTARGGVRVAGPANREPQPELLPVA

SEQ ID NO: 40797 - protein, 288 aa, Trichococcus sp.
  misc_feature (271)..(274): Xaa can be any naturally occurring amino acid
MMIHKAYKFRIYPNQEQQILIAKTIGCSRFVFNHFLSEWNKNYKETGKGLNYNACSAELTLLKKEEETLWLKEVDSTALQSSLRNLSDSYDRFFKKQNSYPRYKSKKNPVQSYTTKHTNGNIAIVGNKLKLPKLGLVAFTKSREPEGRILNATIRRNPSGKYFVSILCEVELRPIAKTNAIVGVDLGLKDFAILSDEDKTVFENPKFFRTLEQKLAKEQKILSRRMEQARKDGKKLFEAKNYQKQKRKVACIHEDITNKRNDYLHKISTAXXXXNLHRRHQKPRCDRD

SEQ ID NO: 40798 - protein, 404 aa, unknown
  TnpB Polypeptide
MLIKGVVFRLEGELPHEAKFLFEDFRLAVNSAIRVGLQARVTSRNALTRLAYKDFREQHPRMYAQHLVSAFEVAGSVLKNHRRRIRKGKGNHVPYVRRLFMKAENQAYKLDRENGMIDLPIRAGCHVELRLIVSQYHRKYLDDMSLSLGSLTVLPDRVIAAFRKETPKPFVPESALSLDTNERSLDGVFAEKDTAKAVKAEFPDVAIIQQRHHDRRRSFQKKKAHDRRTSRNLCRREGAREHHRVEYRLHQVANSVLKFAEERRSAIVLEDLKGFKSKRSKELNRRLSMWPRRKLHHIIEYKAQWKGVPVIKVDPRNSSRTCPICRRIKYSRMGAEFKCECGWHLDRHINASINLLQTAISNGMAGGLWFNPGAFQHDVMMILYEPAMAARSEPNGTGGVVGVT

SEQ ID NO: 40799 - protein, 404 aa, Cyanobacteria sp.
IINIIYQYKLEPTKTQSQTMSDWLETSRKVWNYALGERKDWYKSRSCRIDACSIKSEYVIPADTQRPSYVNQAKALTETKKANPDLKAVQSAVLQQVLKRLEHVFTSMWERGFGFPRFKKAGQFRSLTFPQLADNPVQGNRIKIPKIGLVKVRWSRPIPDGFVVKQAQMVRKASGWYVMLTLQCDVDVPSPTAKGNPMGLDVGLQSLVATSDKELTPAPKFFVRLQRKLRLLQKRASRKQRGSSNWKKAQHRVAKLHEHIANCRQDFFYKLAHQLCNRAGMIFVEDLNFLAWAKGLFWKHMLDASFGEFFRILEWVCWKRDVLFLKVDASHTSQICPECGTHTGKKELSQRVHKCHECGHEGDRDVAASQIVAQRGLAAVGHTVKMLDKGLSVSSPMTQESHAL

SEQ ID NO: 40800 - protein, 350 aa, unknown
  TnpB Polypeptide
LVGRADTRVTHRPAVRCGGGGLVLVFRVVDDNRARVHALERDGHTVLATPLPHRLLVEALTPRPFPDTHDLIISHENKLKQIINLAGYNPTPEQESLLRRTLGCVRLVYNKALDARRTAWHEREEKIGYADTSRMLTAWKKTDDYAFLNEVSAVPLQQGLRHLQSAYMNFFNGIGAYPRYKQKRHGGSMEFTRSAFDYQWPYTLRLAKMMDTRLNVKWSRTLPKGAEPTTVTVSLDPAGRWFVSLLVRDDAVEHLPAVDRAIGIDMGLDAFAILSDGTKIENPRYGKRQCKRLRKAQRALARKQKGSCNYEKQRQRIARIHAHEADQRRDFLHKLSTRIIRENQTVCVER

SEQ ID NO: 40801 - protein, 366 aa, unknown
  TnpB Polypeptide
MKLTLKIKLLPTNVQKELLLSTLKEANSACNYISNVAFTKKIYNQFKIHKETYHYTKDNFKLSAQIIVRCISKVTDSYKIDKKTLRKFKEYGGISYDSRILSYKPNNKISIWCIGGRQAMNYVCHNTKYIPFIKGESDLVYKKGKFYLFQTVDVPEEEVEDVEEFIGCDFGQTDIAVLDDGTCYNSDQLKKVRKKYSKVRASVQSKGTKGAKKLLKRLSGREHNFVTITNHTISKQIVAKAKQENKGIAIEDLTNIRKTAKPKSKAQKTELNRWSFYQLRQFLTYKAKLGGVKLIAVPPAYTSQICSVCKHIGTKENSFRKGKKFICQNCGNISDADVNAAKNISSFGGAINHPEKSTLFCSLHFM

SEQ ID NO: 40802 - protein, 407 aa, unknown
  TnpB Polypeptide
MKLTEQHIVKTDEWRDWCVKAKNLYNQVLYYWRQSMFKNIEYFTEYEISGLFAEFNEENFRALPSTTSQQIIRHVFHITSSWKKAKKEYAKNPFKFSGKPKIPKYKKELSEVYFTAAQVKLKGGYAHFPKMIGIAPIKTNIQNIDCCRVIPKSNHFVVEFVYTIEDIVEKEYNNKSLGIDLGMNNLATCLSNTGESFLINGKPLKSINQFYNKKKADLQSKLKPNVYMSKRIKRLTFRRNNLIKNYLHNASKYIIDKVKELDISHIVIGNNKQWKTEINLGKKTNQNFVSIPHSYLINQIEYKAKKAGIKVTITEESYTSKCSFLDLELIKKHKEYLGKRVKRGLFRTSTNRHINADCNGSGNILRKVIGDFEINDSIVRAASAPRIINVFEQNALKSKNLLNFLTN

SEQ ID NO: 40803 - protein, 313 aa, Mycobacterium sp.
LVSSIQIGGTSSCPVSGGFARTNRLENSPDASTEDRRGSGRLLSTYARGRWFVAFSVEVYDSPAPGTRSRPVVGVDFGLCNLAVLSTPVPGISDTHGVIPNPVLYEGSLKKLRRLQRKAARRIGPERRTGRAPSRRWARAMSDVERQHARIANHRAATLHRLTTALAERFEAVVIEDLNVAGMLRNRQLARRISAAGWGELRRQLEYKTCWRGGTLLVADRFYPSSKTCSGCGAVRANLRLSQRTFSCDACGMSMDRDRNAARNLAALAHRVAGGASSPSCGATKNEPAGNPREDGRRGRGYCHGKPLEGNVA

SEQ ID NO: 40804 - protein, 323 aa, Vulcanisaeta sp.
MLRRSIAVELEVTKELNKLLHSVETAYLNIVREVVEYAVKNNVLNATQLHKLFYHKYRDEYPGLHTHLVVQAIRQASEIAKSFVERRRKGLAQKPYPEVRSVSIRFVVTAWSYEEFVKSIAPVRLSLSLLVGRRFEVWLRPHKRFWRYWWRVLTGEARLASTLIIKRKANRWYAVFVFEIKPREEEPKSIISYDINENTVTVNRIDLPSTVDKVADWNRQYMVPELYTIKTDFGRLARRYERIRNVIIEKLKPEFALPSSNYVNVTNTREFRKRVKHLRERVRKVGRVRQIANELTKAPAIIITEELGDNPQESMIEGAVKTS

SEQ ID NO: 40805 - protein, 391 aa, Methanococcaceae sp.
MKRTEIIFINRNPTLDYYAHISKNLYNQATYLIKQSLKENKLLSYYDLNNMLKDSENYKELPTQSAQQILKMVSRDWKSYFKGLKEYKNNPSKFKNRPKPPSFKPKDGSYMLIFTNQQCKIKDGKLRFPRKINLTVPTRLPDNTNIREVRLISILNNYKVEIIYEKEPTTVELNNNKIVSIDLGMKNIITMVNNFGDKPIIIKDNGKGIKSINQFFNKVSSYLKSIYDKQNIKSGKKLRRLINKRNFKVSDWIHKVSRFVVDYCIKNKVSKIIIGYNDDWKQEVSLGKRNNQTFTLIPFKTLIDKIVYKAEEYNIKVVLVEESYTSQMCSNCGVVRKSSRKYRGLYVCSKCGKVLNADINGAFNIMKKVFSTGQNVFNSLNMLLTPKAVYI

SEQ ID NO: 40806 - protein, 485 aa, unknown
  TnpB Polypeptide
MLSTICTPVLPDPVANQTIGELLCQQTAAYNEAVTLLNRGITIRKRSTRKEPHGFNKLLTRWRHGRPVLRNVPYSIHQDGWEQAWEANERVRDQAALRRKRIERAQAQRQPPKKRDVRQHRRTLAHRRRKGNPSLTITEGRRLSAKGHTITFVHRHFGFTIRTKHQNLDRLDIRSMHLVPAEDYAPSVPLAQRQYIAKIQVSVPGDMPDELTAIADPQEILGFDRGRKKPAAASNGAEIRHDLAPDVAQRKADYQRVRAKKKGSNRRRRAHTMAARRSHKRIQRRRAAKHQQVKAILQGARPKAVAVESLQLPNMMASAAGTPEHPGINVAAKRTLNRAIAEASMGETNRIICRESERLGIPVLPVPAAGTSQTCPRCGHREPQNRESQAVFQCQRCNFSDNADFTASRIVRNRAYALYFEPNVTVEEAPTGWLEQPSQRCGQFPLFRIESETKPKCGATALSSNGDQGPAHKAHDRVQILSLVA

SEQ ID NO: 40807 - protein, 538 aa, Marinomonas sp.
MTHRTYQTRLKSLTSETEAALSSYAAIFSKAERTLFAQTFAQGIRPTQVHKSGFQSRFGLTARQYNAILSGQGKVESIKELRKEHIQAARERVKNAEKAVKSLERRLKADRKTKAATVDKTAFKLHHKKRRLVTQQHRLEKKLAEQASGKVSLCFGSRKLFHAQYNLEENGYKNHGEWKQNHGEWKRDWQSYRDRQFLVLGSKDETSGCQGCQLKRIEGQWFLYLRLPNSVLEQTGLNKHIVLPIELPFGEVAIEQALQRGNAISYRFLRDKKGWRVFISTEVKASKIKTIEAQGAIGVDINAHHLAVVEMDRNGNPINKHRINVQTCGKSTHQRMAVIGDAVKQLIAIALTARKPIVLEELDFTRKKRDLKANEDRRYNRMISSFAYRKIIEVIKARCLDHGIEVKDVNPAYTSQIGKHKFSERYGLTPHQGAALVIARRSQNYREQPNREDQTASWLPVRKVQEHVWSYWRKVSRQPVAYATLLSKRKQSRSAAQSEGTDSKMVSNTSGVSDWVLIRSLTVGNTVRPAIWNIFPYN

SEQ ID NO: 40808 - protein, 326 aa, Bacillus sp.
IHTKECDQWIKEVSSKAVKQAIMNGDKAFKRFFKGLSKFPQYKKKKKQDVKCYFPKNNKTDWTVERHRVKVPTIGWVRLKEYGYIPKNATVKSGTVYQRAGRYFVSVLCELEEMATKLALNKIGLGIDLGVKDFATRSDGIVHENINKTIKVKKIEKRLKREQRSLARKFENLKKRGEKSVTNKRVNIDKNVLRVQKLHARLANIRIEYVKSIVTNVVKTKPTFITVEDLNVKGMMKNKHLSKTIAKQSFFAFKTWLLTKCEEYGIELRQVDRFYPSSKLCSCCSQKKADLKLSDRVYTCECGNVMDRDLNAAINLLQAKEYIILT

SEQ ID NO: 40809 - protein, 419 aa, unknown
  TnpB Polypeptide
MLVLEYKLVARKQQETAIAEAIRTVQFIRNKALRLWMDTGARQYDLNKYCAVLAKEYPFANALNSQARQAAAERTAYGIGRYLKADKTGKRLKQISNLKQISKKPNFQKKPNFQKDNRSVEYKTTGWKLSDDRKRITFTDGIGIGEVKLMGTQDLCAYDLKAVKRVRIVRKADMFFVQFSVDVDRSEPTELTGKMAGLDRGLAAFYTDSDGQKVGCPKFLRKAEKRLKREQRRLSRKKKGGRNRAKARVRVARRHLKVSNQRKDFAVKLARCVVASNDVVALEDLQVRNLVKNRHLSKSIHDKSIQDSAWSQFGNWLCYFGKVFGKPVVKVPPAYTSQECSRCGRRVRKSLSERTHVCACGCLLDRDENAAKNILRLGLNYLEDLNYLEETYRGAHGNVEGLPSETPGETVPLLLAQAN

SEQ ID NO: 40810 - protein, 346 aa, unknown
  TnpB Polypeptide
MDELEAVVAYLKDPGFHDAYAIDRMQHGEIVSTYRPCYASIVCKTIRGKLRVYLHLTVEGFPFPKRTKDGVIKHPCGDGIVGCDIGTQTIAYTSDHVVGLENLAERGNSIRCVERQQRLVQRAMDRSRRAMNPDNYNADGTIRKGKKAWTKSKRYQKLQLRYRELCRVSAENRKLAIHEQVHKMRSLGDVFVTEVKNAKKLQKRANPEDPMDKNGKPKRKKRFGRSIKNRCPGYFQAKVQQLFESTGGTYIEVPSDYRASQYDHTVDDYIKKKLSQRMFNLKDGTKVQRDWYSSFLLYCIDLITKTIDRQKCLATFETQLNKEHAMIEEIIRLKKRIMNSGIRVAA

SEQ ID NO: 40811 - protein, 385 aa, unknown
  TnpB Polypeptide
VKKHLKSGASRLERLFREQVVTNLRSWAARVEVMTQTSTKYVSAGWERTVSKSKPASMSPRLALSSTDKGYHKNFSVTPERISLDMVVQGKWVTLHFPTPPQLLEKGRESGVPDIWIDNQNRVMFGFHGKTDPGRPEFSERYVVGVDLGVKNPAAYVVWDTEKKEIVERSLLGQRARSLNNKIKRTQTQVSALRKKDRDEEAVSHREHLSNRRRELSILIAQELSDVSWRYDNAIVSFEDLSHIKNTMKFGRWFRGEVHRRTRDMVEADGGRVFKVNCAYTSKRCHICQTDLDMSDYSQPRCTVCGITHHRDVNAAANIAQRVNVKKACQTRKRHTTKTKRVRKSKCHSKPLKHPGTKNRPTPKAPQNQRKNWFTSTVDWVYPKE

SEQ ID NO: 40812 - protein, 510 aa, unknown
  TnpB Polypeptide
VKYYDTVTRHRFTTEDRADTEQIERDLAQMVTWMAEAEQEVLASTEFHDLALGTLNGDRPTGSLHSWGRNRLPRYPFSFQKHNMNEMLVSNVGSVLEAYAVSVGLFQVMSTHPSATKSDQILSYYRSTYPKAPQPTSGMVRAHLIRYHKKGERKASLPGVSAKLNLAVCDTYFAPKASRDDNDPLSVIVQVKTPSHGVTKIHLRLPENAERFGIGKVCRPTIRLNSKGQVVFDIAIEHEVDQRDTNKFVGVDLGKVEPFVATVIDPENKHRSAPYYTNYKRRLRSLVKKEQWRRDLASHLYERADLYDKYNRTDHADVLRTEAKRVSAKATRIKHEISQCIASQVVKIADRNDAHVSLENLSWLDSHGGRWPHAEIQQRIESAAKRYGLKIVKVSAKDTSRTCSHCGGKTTNNKVTRVGTCSVCGFELNRDVSASREIALRATSPSSRSRERMRSLLRQRQKMRSSAATRQSKPVTALSGNQGHTGTSNEDFEATLMMVRENLDSRGSPT

SEQ ID NO: 40813 - protein, 393 aa, unknown
  TnpB Polypeptide
MMQIAHKFRLYPHKEQESKLLETLDLCRQTYNTLLGELNNQKIIDKVIIQGTIPDIKICNSRFKKIYSKTLQYECYRLFSNLQALKKSKENRKKVGRLRFKGKNWFKTFAYNQSGFKLIHTGKRCQILHLSKIGNIRIRCHRNIKGNIKQIIVKRMASGKWFASIIEEKKEEIKQKPIKKVIGIDMGLVDVIYDSDGNKVANPKHLKKHAKKLAYLQKKISKKKKKSHNKNKWRIKLAKQYEKLINSRNDFIHKLSRYYVDNYDAIGMEDFAITNMVHNHLAKHILDSCWGRFRQFISYKAERAGKMYVPVCYKGTTQRCSQCGTEIRKRLQDREHKCNYCGFEAKRDHNSALEIRRLCLQKIGQGLSESTLVEMEALPSKRQLLSKKQEAPW

SEQ ID NO: 40814 - protein, 397 aa, unknown
  TnpB Polypeptide
MKILLKSYKTEINPTSEQKQTINRTIGVCRFIYNFYLARNKEIYDKEKCFVSGIDFSKWLNNEFIPNNQEYKWIKEVSSKSVKQSIMNADKAFRNFFKGKSRFPQFKKKNKSNVKMYFVKTDSKVIIPCERHRIKIPTLGWVRLKEKGYIPTNPNTHIIKSGVISCKAGRYYVSVLVEQVEQEENIKPQLNKFGIGIDLGIKDFAVCSNGKTYKNINKSSQIRKLEKKLKREQHSLSRKYESYKRLNKNEKEKAIRQNIQKQKLKVQKLHQKLNNIRTDYINKVISELVKTKPMWITIEDLNILGMMKNRHLSKSIAQQKFYEFRTKLEAKCKELGIELRIVDRFYPSSKTCHNCGCIKCDLKLSDRIYHCCECGYTEDRDYNASLNLRDCPTYKIA

SEQ ID NO: 40815 - protein, 345 aa, unknown
  TnpB Polypeptide
VAGEGEEIRATVLGKLDFENGENRALLLYTMRLFRDAVEFAHNLLKKGLSKNQIVKLVTSRVLNNKWYSMSAYVRAKLYEEQQFLKLRKPQLYSVGSSDEGGNRNIKFNSTNSVKIKIPSADGRHRWIWCKVKFGRKHIPVVRRVVEESISYGAGIAIKDGKFFLYMNIPVEIYAREMRKEIKSKVEPKHLAGFDFNTDRINMVIVNEKGEIRDVKNEHFPEITSHGFPKEKAKTARQRALAELVKYAREHGVRYFVVERLEKTGTKTKSKTVNRKIAKFALREYLNQMEILVEKVGGRLIEVDPAYTSIDAMPLAKKLGIDRHTASAYLIALRGLILLKNHKNA

SEQ ID NO: 40816 - protein, 333 aa, unknown
  TnpB Polypeptide
MILTYKIKHNRDFSRELELAQKVAEFAIENRDKLSSKYVSHIGLKSTIACQILRKYGRNKKVKTVSSVKLIIPNQSIKLDNGIIYISSLQLTMPFDRVCEKINQIEIDDVYAYVSVTVKEEIPYVPEVSIGIDLNTTSHCAVVAIKETGKVYKLGKEAYHIHRKYSRTRKCLQKKGLYKVVKKIKHREQNKVKNLNHRISRFIVDLAKQNLGAIYLEKLQGIKNKKCGRSFKYALNSWSFYQLNQFIGYKARLAGVSVFYREPNWTSQICSQCGLLGERKGKIFKCPIGHVEHADVNAAFNHASPSESIVRLQAERDAGKRNTDIRQEATLCA

SEQ ID NO: 40817 - protein, 468 aa, unknown
  TnpB Polypeptide
MAVARHHRSHKARLYPSPVQAMALEGQGHVARALWNLLHEWYTCRRGGIATRPPISDIDRQLRDARVNPLPGWEWLIDLPAQATQQVLKHYLKAWDRYFSGISKPPRFKKRSTHLSVDVPQASALRLARLSRRWGQISIPLVGRVQFRWTRPLPGVSRGHPGRLTGACLIKDPLGWHICFRIEQPVVIVPANLDSPVGVDRGVVHTMALSTGEMLDMPSLLSPGEQRRLRGLERKAARQQLAYKQRAHDPHAVTSRRQRHTYEQIARLRGRQARRRQDWLHKTTTDLAKSHGVVVIEALRIQNLTHSARGTIEHPGSNVRAKAGLNRSILGMAWGKAEHMLGYKCPMQGGLLIRVDPRSSSVECARCGHSSPINRRNRATFRCAACGHAANADTNAARVLLERGLTALSGATPGCGGTAREARLAVPHREPLSAMPASEGDTDGSGASSCETEEDIKPTSTFPALLAQ

SEQ ID NO: 40818 - protein, 508 aa, unknown
  TnpB Polypeptide
MWLVKVFMDGGGMECVRRAVAVEVENPPPELSAVEEQYRRIVEEVAAYVAERGKLEKEKYNELYRRFREQYPLPAQLIQQAMNQGVEIGKSFLKLKRNSRVHKPRPEVRRVSIRFAKDSWSYKKAINSVAPIRLALSLPGGRREVWIKPHRRFWLYWWKVLLKEAELVSTLVLKRRRNKWYAVFVFDLAPKKETPAEVVAFDVNENSVAVARLSLLATVDAVARWNRRYVDPAVYSIKTDFGRLAKRYEAVRNAKLEELKRKYPYAGRDEDGRRQNIADTREFRKFARRLRERRRKEARVRQVARQMTKSPAVIITEELGKNPQEEMIGVEKKKIKKRELRHRITQTPFRKLIRAVEDKARETGSVVVYISPYRNSKVCSIHFTLLKDNGSWHALYCPHGHVVDRDVAAVLNMLWKTTPTGWVKAVWWEVKEVRKRLEKGRGLVPKEAVRMRNPLVTWPVVHAVWTSLGAQKAGNKWPAVLARAAPMTPAQGADEGGTRALPRLKGAP

SEQ ID NO: 40819 - protein, 422 aa, Campylobacter sp.
VTISHKIELIPNNKAKTHFKKAFGCSRLAYNWGLAKWQEYYKQGIKKSHLELKKEFNAIKKEQFPFVYEVSKYATQQPFLNLNFAFQAFFRDLKKAKVSYPKFKKKRESFGSYYIGGDQVSFKKEKYLKVPNLGLVKMREKLRFEGKINSVTISQKANKFFASFSVEINEENFHKTHKKVLNTNNCLGIDVGLKSFISLSNGLQIKAPKPLNKLNRLLVKRARQLSKKQHAKTKQEILQGIKKSNNYKKASIKLNKLHSKISNIRADFLHKLSSLIIRNFNYIGLEDLNIKGMLKNHHLAKAISDVSFYEFKRMLSYKSQYHKRKIIEAPRFYPSSKTCSSCKSIKEDLKLKDRIYHCKECGLSIDRDYNASLNLKYFAQEKIGLVQAEFTPEDLTALLKDLAINNLITSKVETEIQQKSHL

SEQ ID NO: 40820 - protein, 408 aa, Megasphaera sp.
VSDLTKTIKLRLHVSPEQGILFCQMTEHYRQACNFVSQYIFDNQFNLAYQSLNKELYSDLRVLFGLKSQLAQSSIKTAIARYKTVKQQLFQKPYKYKDQDGSWKYITKTLEWLWTPIFFKRPQADLVRNRDYSFVDNGQSLSINTLGKRTRCTFESKPFSEYLDGSWNLGTAKLIELKGLWYLHIPVTKAVEDFQKENVRHVVGIDRGLRFLTVSYDEQGQTEFVSGRKIAAKRHKFLKIRQQLQSKGTKSAKRRLKALSGRENRWMSDVNHRISKTLVTKYGKDTLFVLEDLTGVSFEETNLSKTAKQNCDLRSWTFYQLEQFLTYKAHENRSEVLKVLAKYTSQRCPKCATIHKENRKPHQHLYRCQCGYQSNDDRIGAMNIQHLGTMWIFGENHPRYERKTIASE

SEQ ID NO: 40821 - protein, 409 aa, unknown
  TnpB Polypeptide
MDKTYILPIEQQDLAHRLSRLSGRIYSKTVSTTFKLKQSKDIWLSKNDMEKLIKLYASEFGMHSQSKQGSVQQYYTNLKSFFKSMNKAGNPKPPYRTRKFNKVIYKKSAIKLKDNGILRLSNGRGAIPLKVKTSSLNQRPKYAEIIYHHQENKYKLHIVVDVENKQIDYNTNKTLSIDLGQIHPMVTFDGEQSLIYNGGKLNSFIRFRNKELAKLQTKISKCQKFSNRWKRLNRGKKKLMLKSRNKINDLLQKYSSHLISYCIKNKVSIIVIGDIKGIREKINFGTKTNQSLHQWVYKQLTDMLEYKAKSVGIEVDYQEESYTSQTCPKCNKRHKPTNRNYICQCGFEYHRDSIGAINIYKKYTRGNLDKSSRLEGELTSPYGVRYDSNSISCQVEWNSRPFSSQGVSA

SEQ ID NO: 40822 - protein, 372 aa, unknown
  TnpB Polypeptide
MLQTLLVKLDPSPEQHKMLCETMKRFNEACNHIAETVFAMHTANKIEIHKTVYYPIRDQFGLSSQLTVRAISKVCEAYKRDKSIKPEFRLDGSIVYDQRILSWKGLEKVSLTTLQGRQVIPARFGDYQKVRMNRVRGQADLILVKGIFYLCVVVEVSEESPYDPVGVLGVDLGIKNLAVDSDGEVHSGEKTAQTRGKLDSLKARLQSKGTKSAKRHLKKLSGRMARFSKDVNHCISKKLVAKARGTLRSIALENLQGIRDGVTVRKAQRRSLHTWNFGLLRMFVDYKAKIAGVPVVFVDPRNTSRTCPSCGHIAKANRPTRDDFRCESCGYAGAADHIAAMNIAFGAAVNLPIVAGIHLNLSYKPTISVVGS

SEQ ID NO: 40823 - protein, 407 aa, unknown
  TnpB Polypeptide
MEDGRAIRAVRYRVLPGTQAKARKLNRLAGACRYVWNQVLADQQAVHDMARMFGGHTPFPTFFTLGKAFTDLRNSNGHEWLKELPFGEVRYTLKRQADAWQAFLNGQRGPPKFKGRGGEAGFTVPERARIKGGFIAVSRMGWFRLRRRGGNPHPDGVPKQAVFKREAGKWHCTVFYEVDVAPRADDGSCVGVDRNVGQCALSTGEIIRMPDLSRLEARKRRYQRRLARQARGSARRGRTKAKLAKTSRRVANVRSNWCHQASRRIADAAHAVAIEDLSTKGMTRSAKGTKETPGMNLRAKSGLNRAILASGWHGLERNLKYKAGKVVRINPARTSQTCHECGVVDAANRPSQSTFRCQACGHAANADVNAARNIRRQGLAQLDGEGRWCSRASPMNRQTGGEVRNAA

SEQ ID NO: 40824 - protein, 379 aa, unknown
  TnpB Polypeptide
MVSYKYNIYRSNKTKYLDKMLRECCFVWNHALALQRRFYKLFGKYISVGKMQKHFAKRIKRNLLHSQTVQEILQRLDSSYNRFFKKLAKRPPKFKRAERFNSFVFKQGGYTLNGNTFTINKGEKRFKFSFSRPYEGKIKQVRITKETCSRYSLIIITDYNPLSSYRKTHNGASVGLDFGLKTYLTASDGNNIVSPLFFKIFQNKVKKQNKRLSKAQRRSNNRKRRLFELQQTYRKIRNLRNDFQWKLAHELCKQYDFIFLETLNIESMKHLWGKKISDLSHSEFISKLMYIATKYGVIVHQIDRWYPSSKTCECGFINKNLSLIDRTWCCPKCGSINNRDFLASKNILRKGISELESKNNSSDSNIGVSCVCIQESHTV

SEQ ID NO: 40825 - protein, 494 aa, unknown
  TnpB Polypeptide
MHQIITAKLKLITTPGQWQALREVQLAYRDALNAVSRYAFTQGKTSNVTRLHKGMYAELRARYHLPSQLACSVERQVAATYKGLWTKLLKNVEHRRARITKKRFKGLDQPPHYSSPTVQYTYERDYTFQRNSRVSIGTLGGRISVPYQGYAQHTALIRAGARIGDAKLWYDTPQKTFYLLVSLEIEVPEPTCDHLGEVVGVDVGVRYLAVTSTSTGKASFHPGKQVRHTANHYARLRKRLQQKGTRGAKRRLKRIEQRERRLKLQANHTLAKQIIKRHPHTLFGLEQLTGIRERTKRKKRKRKKNGKGYERISPKARKANRVYSQWSFAELQALISYKAALAGSLAVKVDADYTSQTCPMCGYRSEENRPQKGLLFLCHNEECRYRLHADLVGARNVTMRTLLVRQDWIRTGCLCAPREAQWTLPSEDGATESNVAKTAPHLLPKGQRGQQHGAERPMKFERYKPQVGQLGRIWQRLDCLNPSRGDATPIRRPN

SEQ ID NO: 40826 - protein, 334 aa, Microcystis sp.
  misc_feature (131)..(164): Xaa can be any naturally occurring amino acid
MFVLEYKLRGKPSQYQAIDEAIRTVQFVRNKCLRYWEDNKDVGQKDIYRYTTQLRDEYPFVKDLNSTACQQACERTWTAILRFYNNCKNKIAGKKGYPKYSKRTHSVEFKKSGWKLNRDTKRITFTDGKNXXXXXXXXXXXXXXXXXXXXXXXXXXXXXXXXXXKKFRKNKKQSNNYKKASQKYDKGHLKVSRQREEFAKKLALRLIQSNDLIAYEDLKVKNLVRNRKLAKSINDAGWSQLRKWIEYFGIKYGRLTIAVNRAYTSQECFNCGRLIQKSLSVRTHVCSCGYVEDRDKMAALNILKKATIGHIGSWSSDLNAWGDLSSILVGRNTC

SEQ ID NO: 40827 - protein, 313 aa, Burkholderia sp.
MILVYRYRVKSLNGLLNKQSRAVNYVWNFCNDTQKHALKWNKKWPTGFDLNVLTTGSSKELGIHSGTVNATCEQYAKSRSQRRRPYLRYRGRKSLGWVPLKGRDLKREGDAFRFAGNTFRVFNSRLLPEGKIKDGSNFAQDARGNWFLNVVIEMPDVQARPVRSGVGIDLGLKDFATLSTGEKLPNDRFGRRAAEKLAKAQRARKHKRHIAKLHAKVANARADFQHKLALDLVRRFDYIAVGNVSAVKLARTRMAKSVYDASWSSFRNTLRYKAMAHGATFEEVDESGSTPSPVRRADRKTARRGRKVSRDCE

SEQ ID NO: 40828 - protein, 212 aa, unknown
  TnpB Polypeptide
VEKEHNQHIVGIDRGLRFLATTYDEQGKTSFFNGKTVMHKRDKYQKLRAELQAKGTKSAKRRLKKLSGRENRWISDVNHCLSKTLVQKFGANTLFVLEDLTGVSFERTNLPKTLRNQNSSWAFYQLEQFLTYKAHLNNSEVVEVSAAYTSQRCPKCGTIKKSNRNHKLHEYHCTNCGYRSNDDRIGAMNIQLLGTQYISGQEQPKFELTTNA

SEQ ID NO: 40829 - protein, 551 aa, unknown
  TnpB Polypeptide
MAEGWMAQAYRYELDKPSNDPAISSHIGAKRFAYNYMLGLINKQLRARDQLCVIGMLYGVSHDNAISLAERSCAIPHLVELNEKRKKEHEAKIAAGSRKPGEYQPISEWCPWSASAMLYVWNRVKNEIAPWWKENSKACYESAFEGLAQAFKNHFDSKSGKHKGSPVGWPKYKGRSGRQSVGFTAGSGSIAILDRHHVRLPVIGACRTKESTDKLRLKILAGDARILKATLADEGGKTYVSFGVLVKREAKAHGPVNDFSCQVQGHDVGITKLITSSDGSVAENPKAEERVKKKISRYQRRMDRQHRAASPKCFNSDGTHINGTCHWKDRSSRARENQTRLRKTYAHAARIRKDTVHKASYHAATTNAVNIVEDLRVEQMGRKGYGKRAFNRAQHSAAMAEFRRQLSYKHSWYGSQLWLAAWWYASSKTCSECKVKRPRLSRSARVFKCDSCGLEMDRDLNAAKNLQALAELACTCILAQISTGTLVDWSKVPVRPFGWEPDKNTRSSRECARAGDRKIIGGERKTARSDLQNEAVTAFNREAARPEDVGA

SEQ ID NO: 40830 - protein, 295 aa, unknown
  TnpB Polypeptide
VRLNGNKLILPFSNSYKKDHKPVVITIPPVLLDKKIKEIHIIPKANARFFEIQYIYEAVCIQRNLNKNNALALDFGVNNLVTAVSNEGHSFIIDGRRLKALNQWFNKENARLQSIKDKQQFEKGTTNRQKSLARIRNNRVSDYMSKAARKVIDYCIANDIGTLIAGYNVTFQKKSHISRQNNQNFVNIPYGILRNKLSYLCELNGITYIEQEESYTSKASFWDKDDISVFDADKSKEYRFSGNRIHRGMYETANGFRFNSDVNGALNIMRKSSVVDLSVLYGRGEVDTPVRIRVA

SEQ ID NO: 40831 - protein, 350 aa, unknown
  TnpB Polypeptide
MSVLTYKYRIKDSTSGTQLAKMGGAIHYVWNYCNEVSLLAFRRDKVLLSAYDLHKLTSGTSKDLRLSADTIQQVCTEYVTRRKQCKKIKLKWRSQKRSLGWIPFKAAYIKLRGDTVTYCGYRFRLWLSRPVAGDIKTGSFTQDARGRWYVNLQCAVADVTEPARHLELGIDLGLTNQIACSDGIIYRRDNLTRTHQEALAKSQRANKKTRTKAIQAKIANIRKDWTHKATSAIVRRAHRIVIGDVSSTKLIKTPFTKSTYDAGWGMVRSQLHYKATRLAGVCIEGNAMFSSVTCSDCGARSGPRGLSALGVREWRCLDCGVTHERDVNAAKNILALRTGRGTPIKGIRLL

SEQ ID NO: 40832 - protein, 280 aa, unknown
  TnpB Polypeptide
MLPGSKVSCPTLEKHNKKWFMRFNFEDNVLLNKTPIRNQSVLAVDLGINTCTVCAVIKYDGTVTARKFIDFPVEKDHLSHLLNKIKRLQRRYKGHNTDKMWRRVKNLNTELARKTADEIVKMAVNYNVSAIVFEHLDMNGRKSGSKKQRLHMWNKCTIQDMTTTKAHKNGIRISRICTKYTSRLAFDGSGMVIRGKNAGFKNNKVCRFPSGKVYNCDLSASYNIGARYFIREIEKFYTLKPTSKYISLWSDIQTKVPGVSRRTQNTLSTLKLIHQCINAA

SEQ ID NO: 40833 - protein, 425 aa, unknown
  TnpB Polypeptide
MTNMTLVAESKLYLKDNVSLYTYFDDYSKLFGFLVRRCVHHLRHQLNNESESQYRTNLMLEFNITNRMAKAVIRTAKNQLKLLKESARYQYNNLYKRRRSLCKKITKLKAILSSNSASLKQRKLVKIRLFWTQMKLNKINQLISNGLKLHLTFGTKQLLKTNRTKFLAKRDNQVIYIGDKNETCGNQQFQILYNSKYNRFDYKLRLDNRWVLGFDKYIFGSFVLKNKEAKTDILKTLSYKKSNPLTYRVIKRDDSLYLQIMYRREISDVTRSHHGVLGVDFNKGFISVSEINSDGKLQSLTRYNYLHRGKATKTKTSMLELVSKLVVQAASVGKDIVIEDLVSLDSNKKQERTTSKDYNRMINSLKFGLFKRCLLSKAAKEGVSVHSINPYNTSKIARKSYTNRMKLNVHDAASYVIARRFYQYD

SEQ ID NO: 40834 - protein, 593 aa, Actinomadura sp.
MPASNGRLPRPHAPRSLRRPPGFQRISRSEGYVEMLDNLSEVPARVTTLGRRGPWWLESQRSQGAVTGATVFRRAYRYRLDPTPRQARMFLRSCGARRYAHNWAVDMIYSAFDERRVRTAAGIPVEDLPRALTFATLNNAFNDWKKGRTGPESRLPKWWLDRHPDLEAPEWLADHSWDVYMWAIYEVYDGLHRWFNSRTGKHGGKPLGFLSFKSKRRDSPRFKVAARPNGARPIDYRHVRLPKIGAVHTRDHMKRLVRGIEAGRVKLKQATIRQDRRGAWWIAFSVEESVATPVQPTRRMRHNGAVAIDIGVKALAVLSFGETVLNPRFMDSADRALRQAQRELARRVKGSKGHAAAQRRHARLHVKVAGLRRNYLHHLTSVLAQSFAHIAVEDLNVKGMVASARGTRAQPGRQVRQKAGLNRRIHDAAFAEIRRQLDYKTRWYGGTMAAVDRFAPTSKICSECGWRNPNLTLSDRTFHCGGCGISTDRDLNAARNIARLASEHTDHAFAQGVQAVRLRKPLPGHGQMRHFHRAANLAPRHGHSTIEAALPGLVGQTRRPGSQGPGVPDPHKPSSWQQGAQVQGPQLQSGTAH

SEQ ID NO: 40835 - protein, 331 aa, unknown
  TnpB Polypeptide
LNYYDQANGLSDSKTDYQEEVFSQVLQNVLKRVNRSFKNYFNGFGYPRFQGRNRYNSFTYPQSGFKLETEKLNLSKIGNIKIIQHREIEGKIKTCTIKKDIDKWYVTFSCDIDIPIIPVQIKTKTGIDVGLISLITMSNGSQIEPPKFLRQSEKRLAREHIHLSKKKLRSKNRNKQRIIVAKVHRRIRNQRKDFAHKISRKLVEEYDHIVFEDLQIKNMVKNHHLAKSISDAGWSQLINLTKSKAEYAGKIVERVNPGGTSQVCICGHPVPKKLSMRIHRCPNCGLIAGRDHVSANVIENRSTAGTAGFQACLSNLNREAMKQKATLLVGW

SEQ ID NO: 40836 - protein, 500 aa, Sarcina sp.
VLDIIVYMQKHEVLPLPGKILFRLHVVECVQINHSTICRDTAKEELNGMKTFKFKLYRSKKTRMLHHQLWVACKVYNHVLALHRCYWKLFHKSLSKFTLQKHITKLKKLPRFAFWNDIPSHAIHDITNRIERGYKLFWKNLKNKRKTALPKFKSWRKYRSLSYDMVGSSVISGNVIKIAGGKYKFFKSREIEGMVKLLTVKRDACGDFFVYLVCDTPEVRNETRMGKSIGFDFSFKGTMLVAEKQENDIPGPAFFRMHKDAIAKASRTLSKKKKGSNNREKARLELARLYRRVANQRHDFQWRLARELCRKYSVICLEDLDMKWMQMGHGRKVNEYGFAELNRLLEYVGRQFGTAIVHVNRFFPSSQLCNTCGFQNREVSDMRIRAWDCPKCGTHHDRDRNAAKNIHEEGLRILSDNLHKSVISGSICKESQFNSSRHWPLCYTWIGYRQANGFRREPCYLKSWITSMRCQHSFNAHCSNLTVIATPCRCCQMLKCIVPY

SEQ ID NO: 40837 - protein, 368 aa, unknown
  TnpB Polypeptide
MIKQKAYKFRLYPNPEQMIFFEKTFGCSRFIWNQMLADKIAHYEETGETLNNTPAQYKEKFPWLKEVDSLALCNVQLNLNKAYKSFFRSKFCFPNFKSKKTAQSYKTNNNKGTIALLDGKVKLPKVGWVKVKAHRQIKGVIKSATISKTTTGKYFISILCEEEVLPLPKTDSNLGIDLGLENFAILSTGDKIENPRFLVSLSKKLAKEQKVLSRRGLLAKKKGVKLSESSNYQKQKIKVARLHEKIVHQRKDFLHKLSTNLIKNHDVICIEDLASRNLMKNHHLARAIGDASWTEFVRQLHYKSDWYGKKIVTISRWFPSSQLCSTCGVSSGKKGLSIREWTCESCGTHHDRDINASLNILKEGLSLA

SEQ ID NO: 40838 - protein, 377 aa, unknown
  TnpB Polypeptide
MRKTFKYKVKINKKTEANCFEWLYLCRTLYNLCLEQRIICWRQWRKSLSNFDQQRELPALKSEFPELKKVNGQVLYDVLYRLDRAYKAFFQRLKRGETPGFPRFKGRDRYHSFTLHQNGWKLEGRNLHVTNVGRFKLFLSRPIEGRIKTVTVSRSSTGKWFVSFSCDNVPATVLPEAQKQEVGLDVGISSFLTDSEGAKVENPHFFRESEKKLRIKQRSLARKKKGSRRRARARHQVALVHEKITNQRMDFMNKLALSYLIVYQVVYIEALKIKNMVKNRHLSKSISDASWGMFFTILARKAASAGRQVVEVNPRRTSQDCSGCGAYVPKKLSVRIHRCPACGLVMDRDENSAVNLILRGGALRSGDNVVHRDVRGL

SEQ ID NO: 40839 - protein, 370 aa, unknown
  TnpB Polypeptide
MMIYAKKTDYLHANLVQKAIKRATDDIDNCVDRLAEGENTNKPEYDMFSIVYDKRAATYYRNKISLATVNGRVECEYDLPDNPDGTPHGKYLLNDDYSFSTSTVHYDSEADEFYLHAAMERNIEACSPEKAEDSRVLGVDCNVDDHIAVTSTGRFVGNADYLNHKRREFGKRRASLQQTGTRNAHLTFQRIGDRFGRWSEEYLHRCSKALVGEAQRQGCTHIAFEDLEQIREQISDGRKFQQWAFRELQEQTKNKAELAGIVVETAEPSYTSQQCSKCGTTLAENRNGQHFECLDCSYTANADYNAAKNIARKLALKLQRGQKSPAGGAFCQYALKSGTMTVNATEVASDKYVSAERESTDKPTASAVGS

SEQ ID NO: 40840 - protein, 442 aa, Gulbenkiania sp.
MDMHLKNAVSSMPNIVVVAHRPNYDIRMQRLQAFKYELRPDGQQERQMRRFAGSCRFVYNKGLALQKERYAQGEKKLGYAGLCKLLTEWRNNAESAWLADAPVHPLQQALKDLERAYSNFFAKRADFPRFKKKGQRDSFRYPDPKQIKLDQGNSRIFLPKLGWLRYRNSREVLGALKNVTVSLNAGKWFVSIQTEREVEQPVPQATTAVGIDMGVTRFATLSDGTFYAPLNSFKRHETALRKAQQAMSRKTKFSNNWKKAKARVQRIHSRIGNARRDFLHKTSTAISQNHAMVSIEDLQVRNMSRSAAGTTEQPGRNVRAKSGLNKSILDQGWFEFRRQLDYKLAWQGGWLVAVPPQNTSRSCPCCGHVSADNRQTQARFECVGCGYENNADVVGALNILARGHRVAACGEDVSRARPARATYAASVKQEPTEATHCDSMSQ

SEQ ID NO: 40841 - protein, 463 aa, unknown
  TnpB Polypeptide
MLILTLESYLRMTKLFTFETELKPIHNRDIIDYYLAFKGNYSKIVRYVWQLFNHQDVLMLPINKSKLNTKLQQEFGVLKRTANSIISYVSGRYNSLLELKEFGISKLNSEISELEKDIIELQIVVNNLARKAATNSLTDKQLSKYKNDKSKLVAMKRTLDRKRNSIEKAQRELDGKHLSLCFGSKKLFNQQYLTDNHNKWYSEFVKYRDSVISYVGSKEETACNQPFQLMYDKKHNQFLIQLRKEKAYQANEKDKYLYGQVFFSYGNKELQEALKTKSTPISYKIFMRDNRYFLQATITKKDDNIAKSNNVVGIDFNKGFIAVSEVRSDGNLTNHYQERYRFNQGDATTNDLRTLASKLAKNCKSNNQSLVIEGLNFVKKKTKSSKNKRNKKFNNMIHSFAYKQFSECCERACFKHGVFLTKVNPAYTSYIGKTKYANSMKLNSHTAASFVIARRGLGFKDVA

SEQ ID NO: 40842 - protein, 414 aa, unknown
  TnpB Polypeptide
MRVTVTRAYKTELDLNTRQLTACKRHAGVARFASNWGLARKQEAYKVTGKSPSAIDLHRELNALKKIELPWMYAVSKCAPQEALRNLDNAFAHFFRRCKLKQEGKWRGKVGYPQRKTKKKGVGSFRLTGASAIFPTALQLPRLGRLRLKEREYLPLSGIKVLSATVTEQAGHWYVSIQVEQEQTVPVTNGPTVGVDLGVKTLATLSDGTGIPNHRHLKRRLKKIKRLQRAVSRRKKGSQNRKKAVRTLGKEYRKVGNQRANTVHQFTSRLAKTKSVGVIEDLNVSGMLKNQHLAQAISDVGFAEFRRQLTYKAAWYGCRVIVASRWEPSSKTCSGCGGVDEDLTLADRVFRCENPGCGLVMDRDLNAAINLSKLAGSCPASQNACGEIRSDRGHAVPVKLASAKQEPSTLCASA

SEQ ID NO: 40843 - protein, 399 aa, Kribbella sp.
MSRFRLYPTPTQETALLQHCTHARYLWNLALEQWSMWTRDKGPTPRFAEQCRQLTAARAEFGWLRAGSQTVQQQALRDFTQAVEQFYAGSGGRPSWRKAGQHEGFRIVGTQAARVIKLSRKWAAVKVPKIGWVRFRLSRTAPSAKSYRIKCDRLGRWYLAFAVIPPPIPAPGTGKTVGVDLGVAVSAALSTGDLLSCPVISKSERVRLERLQRRLARCRRGSQRCRRVRVAIAKLHARVRDRRKDWIEKTSTDLARRYDVIRVEDLRITAMIRRPKPKPDPEHSGGYLPNRRRAKAGLNRGILASGWGLLVRRLEEKAPGRVEKVNPAFTSQTCSVCGHCAPGNRESQAKFRCVACGHQANADVNAAVNIAAGRAVSARREVPQLALPKREPQPTASGR

SEQ ID NO: 40844 - protein, 373 aa, Endozoicomonas sp.
MLLAHKIELRPTEQQAEYLDRACGSRRHAFNQLLAHFSQEGIKWSKKAANEKYKALRIEFPWYAEVSQRVTRNTVDDLHNAFTHFFRRVKKGEKPGYPRFKKRGLHDSFALREKPKFDVEGRTLRIEKLNTRIKMREALRFTGIPCQVTISKRADKYFASILVETQDYDPKAQSSESVGVDFGIKDLAICSNGKTFAANQKLKHSLKRLARKQRALSRKTKGSNRRAKAKQAVAKLHYRISNQRLAILHEVSDYLTANFSVIAIEDLNVRGMTKNHKLARAVNDAGFGMLRQFIEYKAELRQREVVIADRFFPSSKTCSACGNKNDAVVLGVQWWDCPSCKAHHNRDFNASVNLDRYGRDTLQLDLKPYTRVA

SEQ ID NO: 40845 - protein, 373 aa, Endozoicomonas sp.
MKTKRAYKERFYPTTEQEQLLAQSFGCTRFVYNNTLRFRTDVYYKDGGSVSHSQAEKRLVSLKSEFPWLSDISSVPLQQCLRDQQEAFKNFWAGRAKYPNFKKRHSKQSIRLTKAAFRLKEGQLFIAKSKEPLNIRWSRELSSEPSSITISKDRAGRYFVSMLCDFEAKPMPIRNKTVGIDLGLTDLFITSDGKKSGNPKFTKRYEQNLAYLQRKLAKKQKGSKNRAKVRLKVARLHAKIADCRMDATHKASRKLINENQVICVENLAVKNMIKNPKLAKHIADANWGEFVRQLQYKAGWADCTVAEIDRFLPSSKRCSSCGFIHESLPLSIREWDCPECKTHHDRDINAAINIKTAGLAGLACGATETGIAA

SEQ ID NO: 40846 - protein, 236 aa, Haloferacaceae sp.
LYPGNALKTDERYFAKEIAKCNSSRSNKALRLRKKRSKRRSHYLHAVTKHIVSECVERGVGTIAVGNLEGIREDDENGGVRNWGDRGNKGLHGWAFDRFANLLTYKAKAKGIAVVAVSERDTSKTCSCCEQKRDANRVERGLYVCRGCEAVMNADSNGAENIRRRLDQAEEVTLNLRSSGDRSSGRVARPVVNLFRQQKSLISALPPDHRSGDVRGEHDPSCGQGTFAQQASSCKP

SEQ ID NO: 40847 - protein, 407 aa, Halopenitus sp.
MNYNYRYRLNPTDALKERLAWTVDTCRQVYNHFLHRLNRGDDTSAYSEQKRLPDLKDWWTDLKDVHSKVLQKVVQRLYDNLSTLRGRKDNGYRVGTLNWKGPDEYRSFTYSQSGFELKNTSGRTRLWLSKLGEIPLTLHRDLPDDADVKTVTVKQEPTGDWYAILGVETPDDPPEKPDELTDVVGIDVGVLKYAHDTDGTAVESPDLGDERERLKRAQRNLSRKEHGSNNYRDQQRTVARRHADLKRKRRDFLHKLSAYYAREYDLVAVENLDAKGLIELPGNSRNRAGAAWGTFLRMLEYKCKRDGTHFVAVEPAGTTKECAACGVETDKPLWVREHSCPACGFTADRDWNAAYNILVRGLKQVGTGCPESTPAETALPTGTTSVPAKRVVETGSPTLNERAKASE

SEQ ID NO: 40848 - protein, 479 aa, Ensifer sp.
VQTISIPFRCCADDAVFITNIRKLYSAAVRSAYANAVAHGVARKQKELRGLVKARHAGGIVDAWVLHCATLEGMDLRRARPDGKMVFGTRAGLERRRKGLIGRDEWRAMRIRPFCSRGDKQFLGNRHFRLALDARTCLFQMYGRKVELDLVAMTGNAGVVLRQAAALAAKKKINLTFRIDATRLHVTIDPDDLPAHPQRRRPVNPLPGRTLGIDLNPNWIGIAAAANTKDPGSVESTKLLDHALVKLDLDKDASPELVRETLAAVCDRAISMARKHRCGTIVLEKGLGKLRSSGRSRSLNRLLNYWARTVFVAMLTRRARLAGIDVLEVWAGYSSTIGNLAFDAPDACASASEIARRGIARLAGIKDVLPALEEGCVSRLWKNGKVPAELGAWQDVHRTIKAAKIGYRRPHPNVPLGARGSDVHGTQLFCGNAVVRLGRRHLPGLLFRVAAAKADKAGRISPSQSWNVAWASAPTEKSV

SEQ ID NO: 40849 - protein, 428 aa, Desulfurobacterium sp.
MKTAKAEKIKQTLKETKERRENQVCRVYQLKLQNLSKKDIEKLDRLFLEAKWLRNFVVADIENRIKDYKYKEVEIKTPEGFDKREIKLLSSQMKQEIIDQIKDDLKSLKKSKEKGNKVGKLKFKSEVRTIPLKQYGVTYKISGDRNRVKVQGIKKKFRVLGLHQIPENAEITKGYLIKKPSGYYLHIVCYLPKEEVEREIREKQIQQPVGIDLGIKHQLTLSTGEKLSWYIPETKRLKRLQKILSRKQKGSRNYQKVKKEIGKEWEYIYNKRQDALNKAISCLKRFSLIAVQDDSIEGWKKGLFGKQIQNTGIGGVTARLRSLATLISVFFVDRYEPTTQTCSFCGYRQEISLSERVFKCEGCGIEIDRDVNSAREILKVAIELLLWMLRIIENGGEGKLLKILPVDGGEVTPVERGISLVEAGSPSL

SEQ ID NO: 40850 - protein, 474 aa, Desulfurobacterium sp.
MSVTTTKKSVVNKLEKASKTFQQFKNLIYLCALEYYQNTKDLKPFLSRTFLEKFVKGKEELLFENEKIKEWKKELENLWKEKIGSDTAKTLVGIVAKEFKTVVGKWKKGEKSDLPKPKKLSSLYSFTLETNPNMLVDKRKLKGKKKSNHVVIRIGKDFGAVKFKIPAGINVKHIKVSWSASGEVTYLISYEVPKSEVILNKEFFLSIDLGVKNLISAVSNKEDLPSFIINGNPLKAFNQWVNKLSAKLQSEGKELEHKKLWNYRKKRINQLFGTVSNFIVALCLKKGIGKVVISDSLTEEYQKEGTKGKRFNQTFRHIPLGKLIQKLEYKCRLAGIEFLKEPETYTSQISAVTGNIEEISGKSKEELTEEDINKLQFTGKRVRRGLFKDLKISKVFNADLNGALNIAIKKLGKSVREKFLKLPNWIDKLSRAVKLTLFPHSKYSASPLFQGIADSSSYLTRGSEGHLLAIANEC

SEQ ID NO: 40851 - protein, 530 aa, Desulfurobacterium sp.
MLSSRVLSIRISGKDRKEKVRKLLFDLAHFKNLWIILIRRYKELYGYYSTDQSILYGLIADKEYSSKKEGKLRKFKEVRENILKDEELTGLLKALKEQKRKVDNNYLLQQVIRSVVKSFNDYRKAYKEYQKNPKKFKGTPKPPKSKKLKFLMNFSVELNVNTFERLEDSILIKLRINSKEFLKVKLPKNFNFEIKSIRLKLFGTDVYADVVYKVETLELRTTGEYTAGIDLGLNNLIALVSTNPNLESLIVSGKEIKAFNQWFNKEKAKLQSEIDTIRNKLSQIEEEEETQNLKQLLTEKLIILKELSAYRKRRIDNDFHKISRKVVDILKATDHKKLYIGKGATESKDGINIGKKNNQHFVSVPFRRLIGLIKYKAEEVGIKALEVEEAFTSKTSPFADILEVRKIGKKYLKAKEKEDKTLLQELLNQLKSLRKAIRKFRGLLKDKVSGAFFNADLVGAYNILRVGENSLRLIEDLKLLFVKLCNPVKFRLIEFFYKVSCGTRKGAGSSSHNAGLSPFDYQSCGNLTTF

SEQ ID NO: 40852 - protein, 354 aa, Desulfurobacterium sp.
MEKELVILWTERIGSDTVKAIVGMVVKEFKSILEKWKIGEKASLPKPRKLNTLYSFTLETNPNMIVDKRKLQGKRKSNHIVVRIGKDYGAVKFKIPENLKVEHVKINWTALRKVTYLISYEVSESEVNLNKEFFLSIDLGVKNLISAVSNKEDLPSFIINGNPLKAFNQWVNKLSAKLQSEGKELEHKKLWNYRKKRINQLFGTVSNFIVALCLKEGIGKVVISDSLTEEYQKEGTKGKRFNQTFRHIPLGKLIQKLEYKCRLAGIEFLKEPETYTSQISAVTGNIEEISGKSKEELTEEDINKLQFTGKRVRRGLFKDLKISKVFNADLNGALNVAIKKLGKSVREKFLKLPN

SEQ ID NO: 40853 - protein, 385 aa, Desulfurobacterium sp.
MQSNRVLNIRISGKERKEKVRKLLLDLAHFKNLLILLIRRYKELYGYYPTDQSILYGLIKEGEYSSKKEEKLKSFREVKENILKDEELTRFLKALKEQKKKTDNNYILQQVIRDVVKSFKSYRKAYKEYLKSPKKFKGTPRSPKPKKLKYLMNFSVELNVNTFKRLEDSILISLRINNKEFLKVKLPKDFDFEVKSIRLKLFGTDVYADVVYKAELPKVEKTGKHVAGIDLGLNNLITLLSTNKDLKSFIVSGKEIKAFNQWYNKEKSKLQSEIDTIRNKLSQVEDEKEGESLKQLITEKLIRLKELSAYRKRKIDNDFHKISRKVVDVLKATDHKKLYIGKGATESKDGVNLGKKNNQHFCINSVQETNRTYQIQSGRIRDKGF

SEQ ID NO: 40854 - protein, 421 aa, Desulfurobacterium sp.
MKKAEKIKKTLKETKGKRKNQVGKVYQIKLQNLSKQDEENLNRLFLEAKWLYNYIVADIKNRLNSTAWKLKEVKIKTPKEIEKREIKTLSSQMRQGIVDRIKHSLKALRKAKEKGLKVGKLQFKSEVRSIPLKQYGITYKISRDRNRVKIQGIKKKFRVLGLHQIPQNTEIANGILVKKSSGYYLYVTCYLPKNEVVEEIRRNRIPKAVGIDLGIKDQLTLSTGEKISWYIPETGRIKKLQKRLLKKQKGSNNYRKIKFLIQKEWEYIQNKRKDTLNKVVSHLKKFCLIAVQDDPIKSWHEGLFGRQVQNTGIGGITARLRNLATLIPVVFVDRYTPTTQTCSKCGNRQKIPLSERVFKCEVCGFELDRDWKSAIEILKEGLRKIKGEGKLLKTLPVDCGEVKPVERATALVEAGSLPLKW

SEQ ID NO: 40855 - protein, 393 aa, Desulfurobacterium sp.
MLYVYRFRLYPKKGQVEFLNRQIGHCRFVYNKLLEIAKESYEKEGKKWNYYEYKRLLPKLKEEFPFLKEANSQSLQEAVKWLDRAFKNFFKGLAKSPRFKSKKRVNSVSIPQHFRIEGDKIKIPKLKTPIKFKKHREIEGKIKSISITKLPSGKFYLNVLVDREIEPLPETDKVVAIDVGLKSFCTLSTGEKIENLRHLLKTEKRLKKLQRKLSGKIKGSNKYLKLQKKIAKLHEKITNQRNDFLHKLSKRIVGDNQVVIVEDLNVKGLLQNGNLSKHIADASWRKFITYLEYKAKLYGRKLIKVNPFYPSSKLCSVCGYKNENLKLSDRRWVCPNCGTEHDRDYNAALNLLREGLKLLKGSLTLRAVGVERPELMPVESASALVEAGSSSFQ

SEQ ID NO: 40856 - protein, 472 aa, Desulfurobacterium sp.
MKTKRAIVFELNHLSIEQEIILGHFTYHAGRLWNQANYLVKNRLAKPDYRDLYNKLKDTSLHLCSLQSRCAQIVLDELSRGWNNFFKFLENPEKFKKKGIEIVRPPSYVNPETPHRVVTWDKTGFKIEGSRIRLSLSKSLKEHLLKKFGFSPDYLWIETGYKDLENLKVLNVQVVPYKSYGQVSFKLVVVYEKETPEVEPKGDKVLAIDYGVSNFATCVVEGNPISYIIDGRGLKTLLRKKLKKIVNLQSKLDNLKNKGLPTIALEKKLHRLWKSVKNLLRDFAHKVSSLIKRLAVLSRVKTVVIGKVQESKNKENDLPDLVNQMFKLLPHGKVTEYLTYKLKEVGIEVRLIDESYTSVADSCDSEAGVTKGSKGNGRRVKRGLFLSSVKGLINADVNGARNILRKFKKRWFDLVTGLKKVVKIRIYELSKGISESLLYVGIGVEGSVNLPGGIRVGITYQTPSEAPSYRAE

SEQ ID NO: 40857 - protein, 523 aa, Desulfurobacterium sp.
MQSNRVLNIRISGKERKEKVRKLLLDLAHFKNLLILLIRRYKELYGYYPTDQSILYGLIKEGEYSSKKEEKLKSFREVKENILKDEELTRFLKALKEQKKKTDNNYILQQVIRDVVKSFKSYRKAYKEYLKSPKKFKGTPRSPKPKKLKYLMNFSVELNVNTFKRLEDSILISLRINNKEFLKVKLPKDFDFEVKSIRLKLFGTDVYADVVYKAELPKVEKTGKHVAGIDLGLNNLITLLSTNKDLKSFIVSGKEIKAFNQWYNKEKSKLQSEIDTIRNKLSQVEDEKEGESLKQLITEKLIRLKELSAYRKRKIDNDFHKISRKVVDVLKATDHKKLYIGKGATESKDGVNLGKKNNQHFVSIPFRRLIELIKYKAEELGIKVFEIEEPFTSKTSPFADIFEVKRIGKEYLKAKEEGDKDLLKELLIKLKKLTQAVRRRRGVLKDKVLDKIFNADCVGAYNIIRVGENSPRLIKDLKLLFIKLCNPIRFKLTDFLYKVSCESLCECRGIAGSSSLLSRVESF

SEQ ID NO: 40858 - protein, 397 aa, Desulfurobacterium sp.
MNMKLQRTLKLVLKPTEEQKQTLLETIEQYKFAYNYTCKVGWSAKTWNGIELHKLTYYTVREKTSLPSQLVISARVVATESLKSAIKRKKKGLKSKCPQSNNPAIRYDRRSYTVWLEREEVSLATVKGRQKFKVKVPDYFKQYLDWRVTSANLKYDKRLKKFFLNITCEKEFPDVEPVNYFVGVDLGLRNLAVVSTPDGKINKFFDGGHIRAVSERYFALRKRLQSKGTPSAKRHLKTLSQKEKRFRTAINHRIAKEIVSLVPAGGVIVLEKLKGIRKRIKVNKQNRRWIHSWNFAQLQQFIEYKAQAKGIRVVYVDARYTSQKCSRCGHISRSNRIDQSHFVCKHCSYSLNADLNASRNIVKNYLASLQRGEVGTGSGISLPVGRCQPSQCSGATW

SEQ ID NO: 40859 - protein, 428 aa, Desulfurobacterium sp.
MKTAKAEKIKKTLKETRERRENQVCRVYQLKLQNLSKKDIEKLDRLFLEAKWLRNFVIADIENRTKDYKYKEVEIKIPDGFEKREIKTLSSQMKQELIDQIKDDLKNLKKSKENGNKVGKLKFKSEVRTIPLKQYGVTYKISGDRNRVKIQGIKKKFRVLGLHQIPENAEITKGYLIKRPSGFYLHVVCYLPKEEVLKEIEEKRIPQPVGIDLGVKHQLTLSNGEKFNWYIPETKRLKRLQKTLSKKEKGSKNYQKINHLIKREWEYISNKRKDIHNKVISYLKRFSLIAIQDDSIKSWKDGLFGKQIQNTGIGGITARLRNLATLIPVLFVDRYEATTQTCSFCGHRQEILLSERTFKCESCGREIDRDVNSARNILKTAIEQLLWMLKVVERIGEGKLLKTLPVGSGEVKPVERVIALVEAGSLPL

SEQ ID NO: 40860 - protein, 385 aa, Desulfurobacterium sp.
MLYVYRFRLYPNREQVEFLNCQIGHCRFVYNKLLEIAKELYKKENKKWNYYEYKKLLPKLKEEYPFLKEANSQSLQEAVKWLDRAFKNFFKGLVKFPKFKSKKRVNSVSIPQYFKIEENRIKISKLETPIKFKKHRSIEGKVKSISITKLPSGKFYLNVLVDREIEPLPETDKVVAIDVGLTHFCTLSTGKKIENPRHLLKTERKLKKLQRKLSRKVRGSNKYLKLQKKIAKLHEKIVNQRNYFLHKLSRKIISDNQAMIVEDLNVKGMLKNSNLSKHIADASWRRFISYLEYKAKLYGRKLVKINTFYPSSKLCSVCGYKNGNLKLSDRNWKCPNCGTEHDRDYNATLNLLREGLKFLKGSLRFASGRGGTPRTNARGECERIR

SEQ ID NO: 40861 - protein, 477 aa, Desulfurobacterium sp.
LLLTLSISITKKSIYNKLEKASKTFQQFKNLLYLCALEYHKNTKDIKTFLSKTFLEKFVKDREKLPFENENIRNWKKELVVLWTEKIGSDTAKALVGVVAKEFKSILEKWKKGEKASLPKPRKLNTLYSFTLETNPNMVVDKRKLQGKRNSNHIVVRIGKDFGAVKFKVPESLKIKHIKINWSASGEVTYLTSYEVPKSEVILNKEFFLSIDLGVKNLISAVSNKEDLPSFIINGNPLKAFNQWVNKLSTKLQSEGKELEHKKLWNYRKKRIEQIFGMVSNFIVTICLKEGIGRVIISDSLTKEYKKEGTKGKRFNQEFRQIPLGKLIQKLEYKCKLAGIEFLKEPEPYTSQVSSITGNIKEITGKDKKEITEEDVKKLKITGKRIKRGLFKDLKLNKVFNADLNGALNIAIKKLGKRVREGFLKLSNWIDKLSRAVRITLFPHEKYSLSLFKEIRDSSSCLAKGSEGHLLTIANEY

SEQ ID NO: 40862 - protein, 532 aa, Desulfurobacterium sp.
MLINRVLTIRISGKERKEKVKNLLLDLAHFKNLLILLLRRYKELYGYYPTDQSILYGLIKEGEYSSKKEEKLKSFREVKENILKDEELKRFLNALKEQKKKTDNNYILQQVIRDVVKSFKSYRKAYKEYLKNPKKFKGTPRPPKPKKLKYLMNFSVELNVNTFERLEDSILIKLRINNKEFLKVKLPKEFTFEVKSLRLKLFGTDVYADVVYKVELPEVEKTGKHVAGIDLGLNNLITLLSTNKDLKSLIVSGKEIKAFNQWFNKEKSKLQSEIDTLTNKLSQTEDREKAENIKKTLAEKLIKLKELSSYRKRKIDNDFHKISRKVVDVLKATDHKKLYIGKGATESKDGVNLGKKNNQHFVSIPFRRLIELIKYKAEELGIKVFEIEEPFTSKTSPFADIFEVREAGKEYLKAKEKGNRELLKELLVKLKGLTQAVRRCRGVLKDKVLDKIFNADCVGAYNIVRVGESSLRLIEDLKLLFVKLCNPIKFKLTDFLYKVSCESLCGGIAGSSSLLGRVESFDYQLCGNLTTS

SEQ ID NO: 40863 - protein, 437 aa, Desulfurobacterium sp.
MKRIVKVKLYPTKDEKRKLKEIQLRCSYLYNRFNYILRQQYFSFGKVKVTDGILYKLAKGLPEYKALPSDIAQEVLKKLLEDWKSFLKLKKQKEKGELPPHIEKVNPSKYKKDRKRNLTLPMDIYIKTDRSYRLGNYSFEMTVPKDLSRKRLKIRAKYSVSYENIKGFGRAEIFYKAGEWWCYISVNLQNSETKPVGEKTAGIDFGIRNFLTLAVETDKGIEVFQFKSRELIKDYKRWNRKIAKYQSLLNRSGAYTSKRLQKLYVKRDRRLKQSINSMLNRVVEICISRGAKEVYVGNLTGIREDKNFGKLNILLHNFWVRAYVTKRLEEKLTEAGIGLKPIPEYNTSSRCFKCGSSVKRPHQHYVICPKCGKLNADLNGAVNILKRGKKLSSLKIISFYHFKWVRGRVSSWMPVVTGQADKPACSLLLETTKSLSF

SEQ ID NO: 40864 - protein, 388 aa, Enterobacteriaceae sp.
MKRAYKYRFYPTAEQAELLAQTFGCVRFVYNSILRWRTDAYYERQEKIGYPQADKRLTALKAMPEYAFLRDVSAVPLQQAIRHQQDAFKNFFAGRAEYPAFKSKRHKQAATFMNTAFRYRDGRLYMAKSATPLDVHWSRPLPSAPSSINITRDAAGRYSVSCLCEFERKSLPVTASTVGIDVGLKDVFVTDSGFKSGNPRHTARYASRLALLQRRLSKKARGSKNRAKARLKVARLHAKIADCRLDALHKATRKLINENQVVCVESLRVKNMMRNSSLSKAIADVGWGEFVRQLRYKGEWAGRSVVAIDPFFPSSKRCSCCGFTLQKMPLNLRKWHCPECGADHDRDVNAARNIKAAGLAVLAHGEPVNPAPLKAAQVRLSEVGILVL

SEQ ID NO: 40865 - protein, 347 aa, Escherichia sp.
VKRLQAFKFQLRPGGQQECEMRRFAGACRFVFNRALARQNENHEAGNKYIPYGKMASWLVEWKNATETQWLKDSPSQPLQQSLKDLERAYKNFFRKRAAFPRFKKRGQNDAFRYPQGVKLDQENSRIFLPKLGWMRYRNSRQVTGVVKNVTVSQSCGKWYISIQTESEVSTPVHPSASMVGLDAGVAKLATLSDGTVFEPVNSFQKNQKKLARLQRQLSRKVKFSNNWHKQKRKIQRLHSCIANICRDYLHKVTTAVSKNHAMIVIEDLKVSNMSKSAAGTVSQPGRNVRAKSGLNRSILDQGWYEMRRQLAYKQLWRGGQVLAVPPAYTSQRCAYCGHTAKENRLS

SEQ ID NO: 40866 - protein, 486 aa, Escherichia sp.
  misc_feature (279)..(282): Xaa can be any naturally occurring amino acid
  misc_feature (410)..(413): Xaa can be any naturally occurring amino acid
VKRLQAFKFQLRPGGQQECEMRRFAGACRFVFNRALARQNENHEAGNKYIPYGKMASWLVEWKNATETQWLKDSPSQPLQQSLKDLERAYKNFFRKRAAFPRFKKRGQNDAFRYPQGVKLDQENSRIFLPKLGWMRYRNSRQVTGVVKNVTVSQSCGKWYISIQTESEVSTPAHPSASMVGLDAGVAKLATLSDGTVFEPVNSFQKNQKTLARLQRQLSRKVKFSNNWQKQKRKIQRLHSCIANIRRDYLHKVTTAVSKNHAMIVIEDLKVSNMSKSAXXXXRIANIRRDYLHKVTTTVSKNHAMIVIEDLKVSNMSKSAAGTVSQPGRNVRAKSGLNRSILDQGWYEMRRQLEYKQLWSGGQVLAVPPAYTSQRCACCGHTAKENRLSQSKFRCQVCGYTANADVNGAXXXXTSQRCAYCGHTAKENRLSQSKFRCQVCGYTANADVNGARNILAAGHAVLACGEMVQSGRPLKQEPTEMIQATA

SEQ ID NO: 40867 - protein, 217 aa, Archaeon sp.
MKSGCIMHKSYKYRLYLNKEQRVALEATLDTCRHLYNTSPDSRKLQAELYQLPIEKHRIKVAKVHRHIRQQRADFHQNLSNKLVEKYDFIAFEDLKIKNMIRNHHLAKSISDVSWNMLQSFTAYKAEWAGKIVTFVNPENTSQECSSCGKIVKKNLNIKIYKCPYCGLVLDRHVNAAINILHRGLKKVGLRYTDFMPVRGLTQAPPMTKEAHGFSRG

SEQ ID NO: 40868 - protein, 239 aa, unknown
  TnpB Polypeptide
MPSNRFIYIGYVWRNRSSPGEYQTRPDVDLSTVENVQQVRAVWASDEWELHFVCKVEIEMSEEPGEQTVGVDLGINNFAALAYEDGHSEVYPLNCLKQDDYYFSKRIARCDDSDSEQATRLHEKKSARRIHYFHTLSKHIVQRCVDEGVGTIVVGDLSGIREDEENSEAKDWGKHGNLDLHSWTFDRFTDLRRSCLTRKLVRSHLKNTSRRKPQYPNAGILALQGGEDVNVRRSVYSTP

SEQ ID NO: 40869 - protein, 278 aa, Pseudonocardia sp.
VEWPADRDGCRWDSVTGEHRVYLQGVGHVRVHRHRPIAGRVKTLSVKREGRRWYVIVSCEDVSAAPLPPTGRAVGIGLGVASFVTTSDGEQIDNPRHLRAAADQLAEAQQALARCQRGSNRRKQARARVAALHGKVRRQRLDHAHKVALALVRRHDVICHEALRIANMARSARGTLAEPGRNVAQKAGLNRSILDAGWGVFLSILTAKAESAGRTLIAVDPANTSRTCPSCGHCGAENRVTQAAFRCLRCGLDTHADLVGAVNVLRAGLARRDAAPAA

SEQ ID NO: 40870 - protein, 296 aa, unknown
  TnpB Polypeptide
MSSFIWKRHIRIFFRDPKTGFPRFKSKHHSRNSYTTNVVNGNILVESKKIRLPKLKWIAMKKHREPAEGLRLRSVTVSMEPSGKYFASLLYEGYSCENQAAVSDYSTAKILGIDYAMQGMAVFSEKIETEEAGFFRKNEKRLAREQRKLSRCVRGSHNYELQKKKVARCHEKIRNQRRDHLHKLSRKIADSYDAVAVEDIDMKAMDQCLHFGKSVQDNGYGLFREMLDYKLAWQGKKMVKVDRFFPSSKKCCKCGRIKKELKLSERVYHCECGNEMDRDRNAAINIREEARRMFTA

SEQ ID NO: 40871 - protein, 409 aa, unknown
  TnpB Polypeptide
MMSNEMILCERHLIKTNHPFYDECNKLTFLAKNLYNATLYYQRDSFFNKDFKSYYDVNRVFTHTNQKDYRALPAKVSKCVQQLVDKSFKSYFALVKKKQSNDYSRSIRIPRYLNKTNGRCVVPYSKDALSLKNEGFVKFSKTDIVIKTKVSRENIKAARIVPRGNHFVIEILYKAAMKPLKSDKAKRVAFVDPGLNNLMTVTSNCFNPLIFNGKPLKSINQLSNKTIAELRSKLSERGLRTSSLLQSIYSKRSRRLTDLLHKITTRLVNHLDSYNIDTVIFGHNIGQKQDINLGKVTNQNFVQIPFTQLMHLLKYKCELRGIKFIETEESYTSKCSFLDDESICKHSSYQGKRLKRGLFETSSGTLINADVNGSLNIGRKYLTKVNMYTKELHEDLVRFIVNPKVVTIK

SEQ ID NO: 40872 - protein, 388 aa, unknown
  TnpB Polypeptide
MIKSIKVRLHPNNKQLTKLFQYSDCARFAYNWAINREQENHNHGNKFLSDNDLRKEFTQLKKREDYRWLTQVSNNVTKQSIKDACNTYKRFFKGQSKYPKFKSKKRFKPSFYQDTIKIQFTDTHVKVEGFSMSKRRNKQKLNWIKLSEKGRIPTDCKYMNPRFTCDGLHWYVSVSIEVPDTFNNATNDGVGIDLGLKDLAICSDGNKYPNINKTQRVKKLEKRKRRLQRSISRRYEFNKKGSSYCKTRNIIKGEHELLKVIKRLTNIRRNHLHQTTSEIVKRKPSFICIEDLNVSGMMKNKHLSKAIQQQGFYEFRRQIQYKSEWNNIPVIIADRFFPSSKLCSCCGMINKDLKLSDRIYKCDCGNIIDRDYQASLNLKHYGENVLNL

SEQ ID NO: 40873 - protein, 92 aa, unknown
  TnpB Polypeptide
MLVRENQTICVEDLNVKGMIRNHKLAKSIASVSWAKFFEMLEYKASWYGNELHRVPTMYPSSQTCSSCGYRNPRMKKSEHSYLGVPEMPCSS

SEQ ID NO: 40874 - protein, 493 aa, unknown
  TnpB Polypeptide
METTLRTSFKEDANPVAYSLIDMSAWCVGDVVGDAFKKLYVTKEPEKVVKGWLHREGFSHRQAHGIIVEIKSRINSQAELQKADIVKCERKIRDFNKQLKSKTPVMPVKWLENQIAKWTRRKAKVEANLARDIPSFCFGSKKLFRQQHHLEENGLTFEQWQEAWSQHRHEQLLCVGSIGENRGNSECQVIEHHVEGTVKNPELHCVVQLKLPPCVCDSWVDIPLVFKYGADKLEPILQALETANDHCLAWRFIINRERRTVWAHVSFTELTLPARTVPDAVLGVDMNEDFLEASVVSRKTGNRIWFWRDEFKGKSAQETRDNLCKILGNYMALCQAMNWAFAYERLDFEGKKAKFLGARMNRMLSEWLTGHYSETIERNAARCGVLAVSVNPAFTSVIGDLKFSTGYGWSRHQGAAVAIARRAMGYSERARSVKPEATAELAKIRKPHVWGVWARAKPAARVGKSGKVVVPAAKAGSPKGMVAACGPSPPLGA

SEQ ID NO: 40875 - protein, 493 aa, unknown; identical to SEQ ID NO: 40874
  TnpB Polypeptide

SEQ ID NO: 40876 - protein, 406 aa, Kaumoebavirus sp.
MREELGNLIKGIPNSRVLYPFCGEGTVDLNCRIKSEPDWLGDTIIRCKKVVLHLEDHQRNIIEGWFEVYRQVYNFTLKCIKGKEKVSFYDLRKEVKGKFPKGLVNLVKKSKIPANTVDGAINDVVKARKIAISNILVGNIKHFRLRPKKISKKVNTIVLESNAFSDKCDSFCTRALGKKIRSTDIIQGIDKTCRLTWKKGYINPFILHVPEDRPKLIVKNKREMCSLDPGIRTFQTLYDTERYVEIGKRAAKKLEHHLDRIHKNKEHQKEKWYKKLSNRLYDKIKHTIDDLHYKTANFLCRSYKKIFIGDMSTKGIVRTGGNLNGSTKDLTHILSHYTFRMRLIEKAEQYNSEVIVVDEAYTSKTCGGCGKINENLGGAKRFNCSCGINCDRDLNGARNIMIKGLY

SEQ ID NO: 40877 - protein, 374 aa, Kaumoebavirus sp.
LGDTIIRSKKVVLHLEDNQRNIIEGWFEVYRQVYNFTLKCIKGKDKVSFYGLRKEVKNKFPEGLVKLIKESKIPAHTVDNAIHDVVKARKAAISNILVGNIKYFRLRPKRISKKVNTIVLEASAFSDKYESFCISVLGKKIRSTDILQGIDKDCRLTWRKGYVKPFVLYVPEDRYKVVVKNKREICSLDPGIRTFQTLYDTERYVEIGKGAAKNLEKYLDKIHKGKEHQKERWYKKLSNRLYDKIKHTIDDLHYKTANFLCRNYKKILIGNMSTKGIVRTGGNLNRSTKDLTHILSHYTFRMRLIEKAEQYNSEVIVVDEAYTSKTCGGCGKINENLGGSKIFTCSCGVNCDRDLNGARNIMLKGLYELIESNE

SEQ ID NO: 40878 - protein, 401 aa, Okeania sp.
MRTAYQYKLRPNSDKIATIELWLELLRRQYNYRLGERFSWWDENRCPVNACPLVMPIPQLRDHPDYYSQKKDLVNTKDKFPDYKLIHSQVLQDCIKRVKLAFDRWFKADENGRKLGKPRFKGKGRYRSFTYPQIKQDCIEENKINLPKIGNIKLIQHRPIPEGFQIKTATISRKADGYYVTLSLEEKSIPALTTEVEPTLKNTLGIDMGLKEFLVTSEGEFVPIPHKYRKSQQRLKTLQKRLSRKKKGSKRWLKAVKAVAKQHKKLADQRKDFHFKTANELLSKAEVIAHENLNIKGLAKTRLSKSINDAGWGQLLSILTVKAGNAGQKTIAVNPKNTSQDCSNCGEKVPKELNIRTHCCPHCGMVIDRDLFAFAQHPVGKHDLGNAAINIKNRAVGPRRL

SEQ ID NO: 40879 - protein, 380 aa, unknown
  TnpB Polypeptide
MSNKLVRTVCVKLDVGQHDAVLTATMRSFNEAATWIAQVCWSEKISNTTTVHHRVYQETRTRFGLGSQLAVCTRAKAVEAIKAGKQRMKDTCPTFGARGAVRYDARTYRLMSLDHVSLNTLASRVVCRLLPGPRQHALLVDPAWVTSGADLVWRDGTYYLHITQNQDAPATTASGGVLGVDLGMINLATDSDGQTFSGGKVKGLRAHYHSRRAVLQTVGTKSAKRRLRQVKRRESRFQRDVNHGISKTLVAKAATSCKALSLEELTGIRDRVHVRHEQRYQHHSWAFAQLREFVSYKAAAVGVPVVLVDPRNTSRTCSLCGHCAKGNRHSQAAFLCLSCGFAGNADWNAATNIASRASVNRPIVSPATRREGQAPLFRAG

SEQ ID NO: 40880 - protein, 329 aa, Streptomyces sp.
VRKVYDLALAARTEAWAHLQAAFAGFFGKRAQYPRFKSRKKSRKSAEYTTSAFRFRDGRLILVKMAEPLDIVWSRPLPEGSVPSTVTASQEAAGRWHVSLLCEEPVLQPLPAPETAVGIDVGLHHLLTLSTGEKVANPRHERRDRIRLAEAQRQLARKAQGEGANRAKARRKVAKVHARIAGRRRDHLHKLTTRLVRENPTTVIEDLAVRNMVKNRSLARAISDAAWSEFRSMLEYEAQWYGREVIAVDRWFPSSRLCSACGILLDKMPLDVRTWTCVCGTTHDRDVNAAKNIPAVGLTASVCGADVRPQRSTPGGRSATKQKPLQRKR

SEQ ID NO: 40881 - protein, 386 aa, unknown
  TnpB Polypeptide
MYYTRRLQITHDKEICDILSQESGRLYSKTVKFFWRTVRKKDIWLKPSHLMRLFSSNRMHAHSADASVQQFFNALSSWREVRKTVPTAKPPSKLKQYCAVVWKSSTIKNKWGKLILSNGKIIKPLIIDWKYDLTPVLVTLRWHGTGYELIFCYAQDTPENNYTPEVPVGIDLGQIHIAATSEGTILNGRLLRSVRQGKQRSCSILDDRIKQRKEGSKRCKKLINAKRKLCKKTTYKSREILHKLTTGLVIYLKNKGYNTLVVGDLTGYRVDNNCGSIRNQENHSWMYALISWYLKYKWESFGLKYVAQEESYTSKTCPSCGNQKKPTGRNYKCKCGFVGHRDLVGATNILRKYLGTFKDFPVDGLMARPIGVRYKPHFYVAQGFKI

SEQ ID NO: 40882 - protein, 406 aa, unknown
  TnpB Polypeptide
MSMTTMQRVERYIIDCHDDRWAVIDQVAWRAKNLYNAANYRVRQAYFASGQHLNYNAMEKHFKQRDLLPDQQLPLKVVQQVLRQVDHDWQSSFASRAKWQAQPELFQGEPRLPKYKDKQKGRSLLVYSKQAISKVALAAGYIEPSGLPIRIKTAQRKVNQVRIVPHSHHYVVEVVYTAETKPALVNPDYVLSLDLGIDNLAALASNQPGFLPLLVNGRPLKSINQGYNKELARLKSALPAGQHTSKRIQRLTHKRNCRVDAFLHRVSRRIIEIMRLMGLGTLVIGKNDGWKQGVALGKRTNQTFVQIPHARLIAMLTYKAQAVGIAVLTTEESYTSKCSFLDGEPICKQARYAGRRVKRGLFRAGDGRLINADVNGAYNILRKVIPNAFGNGIAGAVVHPVRLPAV

SEQ ID NO: 40883 - protein, 400 aa, unknown
  TnpB Polypeptide
VTIIAHRIRLDPNNVQRTWLERCAGTARFTYNWGLARWKDLYKTGKKPSWQLLNAELNARKKTEFPWMRELPWKITNGALADLGVAFVNFFRRVKVGGQNPGYPRFKKRGRCREGFAIDGRELRFEGKRVRVPKLGWVRVRTPLRFPGKICSARFSKRAGHWYVSVQIEIDESRWSYPHPCETQAAVGVDLGVRDLAVLSDGTKIEAPRALRKHETKLRQLNKELSRRTKGGKNRQKTKAKLGRLHERVANVRQDVTHNLTAQLVRNFQWIGIEDLAIKGMARTRLAKSVMDAAMAEVGRQLGYKAPLAGSTVIVADRWFPSSKLCSVCGLVYTDLVLGERTWVCKGCGTEHDRDDNAAENLKQLAVAHTVTACCPGSAGVLLDAKLPVGQESSSCVNYG

SEQ ID NO: 40884 - protein, 418 aa, Sulfolobus sp.
VKSDDHLVRTVMLSLKVNSEVYTRLKEVEEEYKQILEDAIDYGLRNNIKSFTRLKAGIYRQERARHPSLPSHYIYTACEDASARLKSFMRRKKEGKTYTDKPELRNVTVHLDDHLWRFSLGEVRIATRKGWVSLKPFFTKLFWKYYNKGWALASESSFKLCKGNVVKLYPVFKKPLPKPYDVKGFIPVDLNEDNVSLLLDGKPLLVETSVKKITLGYAYKRKRISEGRSTKDRDVKRALKSLKERFKKLDIRRKLAKLIVTEALREGKGIVLEDLPKNTPEKMVQDIKDKQLRDRIYKSAFASLKNAIVEKAKEFGVPVLLVNPAYTSSVCPIHECKIIYPPDGSSAPRVGMCEKGREEWHRDVVALYNLLKKAGYVSPMPLGSKESHDPLTVRLGEWLRAKSLHLTLNVNRMMGMTV

SEQ ID NO: 40885 - protein, 433 aa, Halorubrum sp.
MEDVIRTVKIKLDVPDERCDDLHQTKEQFLHCANTTAAWAWRHPDEHCVTSKQQAETALYERLREETALTANLVQKGIRRAIEATKSGVARLKKGEATSQPHFDAWSVVYDKRSATFSRDHVSLSTVNGRVECEYVLPDDPVGTPIDKYLRNEDYEFRMSTLQYDRPTESFYLHARMRRTERDEFERSTAASDTKHRTVLGVDLNVDGSLAVTSTGSFIGNADEMNHRRREFEKTRGSMQQTGTRSAHLSIQSIDDREHRWMRDELHCASNQILDEARDHGCTHIAFEDLTDIRDRLARAKRFHVWAFRRLYEYVEYKAELLNIEVEPVSPAYTSQRCSKCGFTHERNRRSKHQFACQKCEYELNADYNASKNIARKLLKRLRSGQMSSSGGAPCQCALKSGTLNLNGEFIASVGSTAEGESTDKPTCEVVGD

SEQ ID NO: 40886 - protein, 335 aa, unknown
  TnpB Polypeptide
MLVRYRYRINPTGAQRQALARACGCARVVYNDALAERRRAYQAVERISDTEVQHRVITRAKRTPERAWLSEVASVALVQACQDARRAHRNWADSRTGKRKGRRVGHPRFRTKHGRQSIRLTRNGFAVRGSKLHLAKAGQVGVRWSRELPSAPSRLPMVPRTAGIDLGLVWLATIAASDGAIEAIANPRHLRAAERALARAQRRLRRRQMGSKSRAKARRRVAVAHRKVRNQRADYHHKLALRLIRENQTIAVEDLAVAGLARTRLAKSVHDAGWGTFLRLLEAKAAQYGRRVVKIGRWVPTSQTCSACGHRDGPKALGIRVWACPTLQDGSRPGR

SEQ ID NO: 40887 - protein, 454 aa, unknown
  TnpB Polypeptide
MTAALQAYQFALDPTPEQDAALRSHCGAQRYAFDWGLARVRANLGQREAEKSCGITGDDLTPSLPWSMYSLRKDWNAAKDRVAPWWAENSKEAYAAGLANLAAGLQNWKDSRTGKRKGPKVRFPRFKGKRAGLSCRFTTGASGLAGPGRRHVQLPRIGVIRTHESTRKLARHAERGTARIRSATLCHRRGRWLVSFPVEITRQDAPAPARPDLVAGVDLGVRSLAVLSAGEVVPNPRHLEPAQRELRRMQRQSARRRGPDRRTKAVPSARWRKTQARIARLHAAVASARRDGLHKLSTRLTGTYGTVVAGDLNVAGMMSSRRLARHVAGAGMAGFRRQVCCKAAWRGGRVVVADRWFPSSKTCPGCGAVKTRLRLSGRTFTCGQCGNVLDRDLNAALNMAALVSSRSWRATVNEPDGNPCKTSAVLAAGTATGRPMRSTPCREATAHDTSSRVS

SEQ ID NO: 40888 - protein, 436 aa, Dictyobacter sp.
MQLVELHVIDQKDGRYTAIDAACFASKNLYNAALYEIRQAFIKEGKYLNYGAMDKRMQSHEAYKALPAKVAQQVLRLLEKNWKSFFEALKASKEDPSKFKARPRLPGYLHKTAGRQVLIYTMQAVSRSKRTLGRRIIQPSGIALHVKTRQDPDTIAQVRIVPKSGYFVVEVVYEPAPKGVAIDPTLIAGIDVGMNNLAALTSNKPGFVPVIVNGRGIKSTNHFYNKRRAQLQKSLGRTGSTPRMQTLTNTRNRRIEQDLHHASRFLLDVLVADGIGTLIIGKNDGWKQDANLGKRTNQHFVQIPHARFIAMLTYKAERVGIRVILTEESYTSKASFLDRDPLPTYKKGETTEHQFSGKRIKRGLYRAKDGRLINADINGSGNIVRKVAPNAFGLDGVEDGKSRVHLPVVHPVRIVIPRMNPKMKVHSGLVSGFARV

SEQ ID NO: 40889 - protein, 420 aa, Brasilonema sp.
VLTFTYEYRTNPTKEQIRIIEHTLNVCRKVWNFALNERKSWINSRKCQVNACSLHSEYIVPADEPYPNYNVQAKALTLAKEEYPELKTVNAQVLQQVLRKLETAFIDMKRKGMGFPRFKNRYRMRSFVYPQLGKTQFIQGSQIKLPQIGSLKFVKSREIPDGFVVKQARIVRKASGYFMMLTLECNVNVPSPLPTGHPVGIDLGLDKFAATSDGGLIERPRFLKTLHRKLKLLQRKLKNKHKGSNNRHRLNQRVARLHQRISDTRKDWHFKLAHKLCNDAGMMFVEDIDFRVWAKGMLGKHTLDASFGQFIEILKWVSWKRGVFFEKVNKDYTSQVCPQCNAHTGRKELQDRIHSCPECGYTTHRDVAAAQVIRNRGISGLGRNLDENACGDGLTGTGNGLVKSQKSRKKGGEASLKSAS

SEQ ID NO: 40890 - protein, 479 aa, Caldanaerobacter sp.
MIVIQAKLIFLNQEDKQIVLDLMRRWSSCMRYAYKRLLEGYDRKTLKRDLQGVFDLNSRYVDDAIMKAKGVLESSKQLGNNPKKVIFGGRDLFKKLQKRHINGKEYQKLKTKWQEKRKGNLYSRGDKSKKGNLNTRIDVKENGTFLRINVGERKYVYARIEAGYKKNKRREELLQEIAESNIPYSVELKLKNGSIYAYFAIEEEYPEIIKITKEKGVIGIDVNAYPDNISWAEVDEKGNLISYGNMPMPELASGSKDKKEYFRWQYAHEIVEIAKEKGKAIVIEDLDIREKGKRGDYSGRKSRRIRHSFSYKSLLSKIKALAKREGIEVIEVDPSYTSIIGMLKYAPQYMITKDISAAYVIARRGLGKEEKIPDNYIKFLNTLTEKELEELRYHIKKTLKNIHLKKKHLREINKAIKFLQSLESESEKVLRPLYGTSFSAYDFWRVLKVAVVTPLSPEKVLRDFSALKGLLIQGKWRGP

SEQ ID NO: 40891 - protein, 396 aa, unknown
  TnpB Polypeptide
MRLVERHIIKDNRFEDICRKSGLLYNYVLYNVRQGIFSGDYLKEYEFSAKLGRENQFDFRQLPSTLSQQVVGQVFKSVKSWIRSKKDFEKNPGKYNNHRPRLPKYKKGKKQNMIVFTTSACRLKEDGYIHFVKNITQPIKTNIGGNKLCQVRIIPQATCYVVEVIYEKKEQDLSLNKDNVLSIDLGLNNLCTCISNIGISPFIVNGKIMKSFNQWYNKKKAKLMSFIGDRGSSNRINRMTCYRNCWISDKMHKISRYIVDLCKSSNIGTIIIGQNKGWKQEINLGKKTNQKFVEIPFSKLIDNISYKSKLVGIDVVTHEESYTSKIDHLSFEEMKHRDIYSGKRKRRGLFQSSVGKLLNADINGAIGIGRKVFGDSYVNEIIGSGLAFNPVRVNIL

SEQ ID NO: 40892 - protein, 405 aa, unknown
  TnpB Polypeptide
MEIKQTIQILIEPDEDLRETLEAFRQVKQSLSNPCFNAGDPLNQIELHRSSYSSVAGKVNSQMTCSAIRLVAASYITAKRNGHKIDKFFNFKRRHALFLIGKKGRDADFRKDGTLSIWTVSGRKRINYTVPEYFKPFLREAKEIDSINVVDRKGRLIGLVCLALEVPDPKGIHPVGVDLNETNVLVAVDADNQELFIPGISHSVANTKTRKTKKRLQRKLSSRKAEKRDTRSVRRLLKRLARKQSNRTKTFCQTVAKQFVSWCPEDSVIVLEDLKIPKVSKKMKAKKGVQRRLSQWARGTLTTWINSNAEKRGILVVKVNPAYTSQDCSRCGLRGIRHRHKFLCPSCSFSAHADLNAAVNIRNRYTVLRHSGALSMAPEALPTSTVQVHSGEGKLTRYRKVSGSN

SEQ ID NO: 40893 - protein, 439 aa, Acidimicrobiaceae sp.
VTSPHTAPTVVTQAYTFALDPTAEQVSALRSHVGGSRFAYNALLALVQANWDENRAKKESGLTVTNDDYVSTSHFGLLYLWAEHRDELAPWWGENGSSTYNDAAQRLSKALTNWRKGRAKFPHFKRKGQGGSVRFLGNVVRLADSHHVRLARIGEVKTYESTRKLFRHLERGTGRVVAATVCERSGKWRVSFTVEVTRTLLATRTPERVIGIDVGITTLYTGATPDGTQVLEVANPRHFPRAEQRLAHAQRIASRRQGPKPGLASSKRWKKANARVQRIHATVRYTRGNLIHETTTMLAKNYDVIVVEDLNVAGMVKNHSLAKHISDAAWGEFTRQLEYKTTWYGSTLLRVDRFYPSSKTCSRCGTVKATLSLDERKYHCETCGLTTGRDLNAAINLARQGLPATSSGTGCGGEVRPGCLDNQAHPVEASTEAPTVVGA

SEQ ID NO: 40894 - protein, 455 aa, unknown
  TnpB Polypeptide
MLETKYRDGNRRDEKNSRIREKRKETLLRRKTQEAKTFELKLDRSKISRERLSLLKRLFLEAKWFTNYVIANGVTNFKPHKDYKIDKVYIKVNNTFEEREIRVLSSQMRQGIIKRLQDNIRGLAELKKKGVKVGRIRFRKVVHSIPLMQYGITYTINREKKMMHIQCLRGFKVLGLEQIPDDAELTTANLVERNGDYYVYVTCYIPKQNNDDEITTNNKNNNNSKKNKNDSKNKKAIGIDLGIRDQITFSNGVKIAYSIPVSKRLRRLYHWFSRSKFNSRNREKLLLKIKREFYKQSNMKRDVINKVTHYIINNYDYIVFQKDDIHSWQKLFGQRIYETSIGELRNALKKRRKASTPIEVDRFIKTTGVCPICKTTVELKLSCREFICPSCNSLHDRDVASAIVIKNEGLSLWNVGETPEDEHTSASSMLEYFSRIPHVKVSVSMNREAPSFRKG

SEQ ID NO: 40895 - protein, 573 aa, unknown
  TnpB Polypeptide
MSTKTIILQVEPSEQDTELLTQMSIESARWMNKVFHKLYADKRNGKWEQFGVDKEWSGNKGGTYGTLIKWQENKECWKVNDRVMYPIFVCKDSSYYVYAQPSLVSVGSMQSLGTKVATVWSNFLNRQVKMKGLPHFKPTVMFQVGKDKFEIKDGKIKSIKLNKNIRLKVKDSDDPTYIERLKRLVFFITKCISWSQVEIKQKDDGKWYAYIPVAVEFPRWKYSPDKVMGVDLGIANLMTSAVIENMKDLPTNVVMIPGGNTFQKLERIQARVRGLRSKKDKGNSNTQKVLERLKGKKTQVQRSIIRQSATKLVKLAKENGVEGLAIENLRSMKVYSGKGSGKRNRLLTNWAKGESASFLQWKANEYGLRLLMIDPANTSRKCPVCGYISNRNRLTQSNFTCVKCGYHNHADIVGAINIAREGLHDRNPKYWGVSQSTSPVGETGTDSNVGRRVDSTSNSVGESLNPLTVKAEQIDGGLPSNVTTETSLNPTNGCYKADNIGSSRRNLSGEIRSETCSSQKIFPDGGRQNIYKEGESSTYVTTPCPEGSRTDSGIEEKRERPENLMSKTGGSRK

SEQ ID NO: 40896 - protein, 323 aa, unknown
  TnpB Polypeptide
VTGAVSRYLPISKARRKKKRESPEYRDHSGNVCFLRERWKKMRTVSSYGVEIRKQNIPARQTMEIYRQAVGYLTEIYAQVWEELRKIPETKKRFNTAEHMVHMTKKNTARFDFDLRFPKMPSYLRRSAIQHALGSVSSYETRLGQWKETGVLSGRPKLTCRNHAMPVFYRDVMYREGAEGKDEAYLKLYDGHDWKWFRVYLKRTDMEYLRRNWKGKKTSAPALEKRHRRYFLRFSYTEEVTLTQTPVKEQIICSVDLGINTDAVCTIMRSDGTVLGRRFIDHPSEKDRMYRTLGRIRRFQREHQVSPMTEIKTEDPSEKQIHS

SEQ ID NO: 40897 - protein, 396 aa, Anabaena sp.
MQAISVKCKVVVPVELRVEIDRTLRGFADACNQILEVAKREKCWNTNKLHHKAYKPVRESTGLKANHVCQAIRRVIGNAKAVKQIHKFRPTSISLDARTFQYIEESQTVGITLMCGRVKFKMSIGGYQIALLRGQKPTSATFCKSRKGDYYINICVDIPTDPMGKTPRVIGVDLGRRDIATTTTGKSWSGEQIQNTRDRYSKVRANIQSKRTRSSRRLLRRLSGREQRFQKWLNHHISKQIVSDAKSNNAAIAFEDLTNIRESLNQKPRSETERRRTNNWAFYQLRLFTQYKASIAGVPVVLVPPAYTSQTCSRCHHVHPVKGKSYRSLKSFKCGHCGFEHDADINAALNIAALGVCVNNPEVPGIACLLEGQLSLFPIGGENWDKAYTDRSRRCR

SEQ ID NO: 40898 - protein, 402 aa, Salmonella sp.
MKRLQAFKFQLRPGGQQEREMRRFAGACRFVFNRALALQNENHEAGNKYIPYPRMASWLVEWKNATETQWLKDAPSQPLQQSLKDLERAYKNFFQKRAAFPRFKKRGQNDAFRYPQGVKLDQENSRIFLPKLGWMRYRNSRQVTGVVKNVTVSQSCGKWYISIQTESEVSTPVHPSASMVGLDAGVAKLATLSDGTVFEPVNSFQKNQKKLARLQRQLSRKVKFSNNWQKQKRKIQRLHSRIANIRRDYLHKVTTTVSKNHAMIVIEDLKVSNMSRSAAGTVSQPGRNVRAKSGLNRTILDQGWYEMRRQLEYKQLWRGGQVLAVPPAYTSQRCACCGHTAKENRLSQSKFRCQVCGYTANADVNGARNILAAGHAVLACGEMVQSGRSLKQEPTEMIQATA

SEQ ID NO: 40899 - protein, 422 aa, unknown
  TnpB Polypeptide
MERITLSQKIEIYPNKEQIKELRKYFGYRRYCYNRAIRVQKEMYKEWRDFKSTLTETEIKTTEVKKILMEKYPSFYNLRKRINTELKGWESLYHNRIRQYAAADVTDAVKKALNPKMPNHKFPKYKKKKNEKQSISIPIKVVDKKCFVPRPKNKESKLIGWIRMSEGIRWKGDRADVSTISYSHGKWYLSVTIKLNEDEAKKERDRYKFRFGERTGVDVNIRHFDYKNSFNEYMQVLTLNKRMEQLHKQISYYQKMLSKKKYKNKSWKTSKSYKKTKAKLDMAYRKLLGQQEELINQFVHYLHSQYKEVVIENLDVNSMKMNKKLCRSLHKSMFGRFKIKMATKVQSSRLKLYLADQFYPSTQRCSYCGMVKTGKDKLGLSGDRHGNGHNEYKCYYCGEEMNRDENAVDNLIQYPETSYYKK

SEQ ID NO: 40900 - protein, 345 aa, Enterococcus sp.
MKLSVLKAYKFRIYPTEEQKQFFIQTFGCVRFTYNQLLKAKMEELTTNAEKEKLTPAKLKKEYPFLKETDSLALANAQRNLERAFRNYFQKRAGFPKLKTKKNVWQSYTTNNQQHTIYLVDDQLKLPKLKSFVAVKRHRPINGQIKSATISARNNTEFYISILCVEEIQPLPKNQRKIALVYHPEVLVEANAQLPFISANAIKSQQKLARAERKLNVKAKAVKRKKMVLSHARNYQKQKGKVSQLYRAHRDQKKEYIDQVTFHLVKQYDTIFLERLIDETCRSTGNFSVSDWHQFIRKITYKAEWYGKEVRFISLSAKDCQKMTQMLRVIESETNWEERQGSPRG

SEQ ID NO: 40901 - protein, 398 aa, unknown
  TnpB Polypeptide
VKLVEIHKIKKSSKYFNLLTDFCKESNSLYNQALYNAKQSLYKNNKWLFYNDLNLVCKNQPIKYNNYIKLPRQCSQQVLKLLDKNLKSYLNSIKDWSKNKSKYQGMPKLPNYRKSGGLFQLILTNQQCKLKNNNMIAFPKVFNGLTLKLRKEYVNKINQVRILPKINCFKIEIIYEIDDAKLKDNQNIAAIDLGLKNLITLVYSNNKHPMIYKGNQLLKLNHDFNRKKNKYQSILAKTQKKKMSKRLLNIYNKRNNQIEDQMHKISKSIIDQLLENNISTLVVGHNVNQKQKSKLKNFVVLPIFKLIQLLKYKCKLNGIKLIEINESYTSGTSFIDNEKPIKNNYNKNRRVKRGLFKTNNGQLINSDVNAAYQIIRKYNNNIEIEYDNKIFNPQVMSA

SEQ ID NO: 40902 - protein, 387 aa, Mycobacterium sp.
LHSLAAKDGNGALRPKTDEAGRLVGLQWGAGFVVGIASPARTGRRGKEQQAELAEIKALIVAGKVLSTRIVRTVIAGRDTYRMQLVCDGQPTRRHPVGDGRVSFDLGPSEIAVSVQRSDRTWMGWIEPLADRIRLNTVRLRRRQRRLDRQHRAGSPGCFRADGTHKTGGCDWRQRSRTAKRTTTDVAEEHRRLAQHRKTLHGGLANRLLAHGADVACEKLDYVSWQKNFPRSVRDRAPGLLVERMRRKAESAGGNRLYEFNTTTTTLSQSCLCGNRKKKPLSQRGHRCECGIKEDRDLLSAYLGLHVRTGADGLDRLDLQAANDGWPLHRHDVDGRRGLAVAVSKRRGRRHPPSRRSVARIKARRALKRQSRSARTSTTDQPTAIAA

SEQ ID NO: 40903 - protein, 364 aa, unknown
  TnpB Polypeptide
MRAYKYRLYPNAMQRKDMQTHLWFSKNLWNDMLELTKQTYADYGKFSSMNALNELAKTSGLYSQVSQDIFRRLNKSIYGMVARRKKGIDAGFPRFKSMDRIKSLTYPQSGFSLNGKKLKVSPFGEINIKLHRPIEGAIKTLTLKREADKWYAILTAESPSAIPKENNGEAIGIDLGLMTFATLSSGKIVKKPKHMKVYEDKLAEAQRNLSKKKLRSKNRKRAKLHVSAIHSKIANTRKDWLHKAANNILSQYSLIALENLDVQGIAEEHGKGISDAGWSIFTNILSYKAEGAGCKVVFVDAANTTKMCSGCGEMVKKELHERQHNCPYCDLSIDRDHNAAINILNRATVGQTGSNACGDGSYAV

SEQ ID NO: 40904 - protein, 401 aa, unknown
  TnpB Polypeptide
MQRTYKFRLYPSKAQEKELCSHLWISKELWNKLLDATIRKYDGEKKFPTKSEFQVMVKDSGLYSQTAQGIAHRLYRAVRAKVKAKKEGKKWGFPRFKSFDRMKSLYYPQNEIGFSLNKKLKVTPFGEINIKKHREIKGAIKTLTLKRESSGKWFAVFCAEQEPEQPKMNNGGRIGIDLGLMTFATLSNGEKIANPHHLKRHEERLAFFQRELSKKKKGSCHRKKAKKEVAKLHEKIANTRLDFLHKTANRLLSAYSRIAMEKLASREMIMHGHGKGINDASWGIFTNILAYKAENAGSKVVFVDPKNTSKECSGCGQLVDKTLWDRQHDCPSCGLSIDRDINAAINILTRATLRTTNRSQDSREQRLTTTVGMTGSNACEDGAMVPSVKQEAMTLPQGRSG

SEQ ID NO: 40905 - protein, 251 aa, Geitlerinema sp.
VRGTQWYVAITIESDVSVPDAPVYGRAIGIDLGLERFLTASDGSFQERPKFFQSMQRKLKLLQRRSARKQKGSQNWEKAQVKVARMHHRITNRRKDFHLKTAHKLCDQAQMIFAEDLNVEGLTRGILRKDCVDAAFGQFLSLTEWVCWKRGVYFATVNPNGTSQTCPSCLATVSKGLGIREHQCPECGYRTHRDHAAAEMVLHRGLENVVAQGLWGKETACQVGLSGVYDLDKWRGAGISNREVGKPSLYP

SEQ ID NO: 40906 - protein, 410 aa, Geitlerinema sp.
MRTAYQYRLRPTVSQVALMGEWLELLRRQYNYRLGERFSWYEQNRCDITDCPLICHLPELRENPDFYSQKRDLVNSKTLFPEYRQIHSQVLQDCIGRVKKTFDRWLKGDCNGKRSGKPRLKGAGRYRSFTFPQAKQDCIQGKQINLPKIGWVKLIQHRPLPEGFKIKTATVSYKVDGWYVTLSLEDSSVPTLTPEAPSLENTMGIDLGLKSFFVDDSGREEPIPQHYRQAEKRLKRLQRSLSRKKKGSNRQKKAIKRVAKAHLKVSNQRKDFHHKVASKLLSQGKHVAHEKLNIRGIARTRLAKSTQDAGWGQFLQILAIKAERAGLLTVAVNPSGTSQNCCGCGVKVPKILQDRIHVCPECGLTLDRDHNAAVNIKYLAVGHSVNKAQETPDGLPGVTEKPTPDTSVSV

SEQ ID NO: 40907 - protein, 395 aa, Geitlerinema sp.
MPQVLTVSCKLEVLPQQVEKLDAVLSAFAKCCEFVNAQTPEKLTNQIAVQSLIYKEARAHSGLSAQMTIHAIRRVCANRKTAKQKGRPVKGFAPTSATYDARTFTFKESGWIVSLTMLKGREKFRLHIGNYQKHLLQGQNPKSATLVKRKDGSFYLQIQLESEPPEISETDEVLGVDLGRTDIACTSEGSKFSGKEVTKVRDQYSRVRASLQRKASKGTRSTRRRARQVLQRLSGRERRFQAWLNHTISYRLIQQAKNNHQAIALEDLTGIRERTNQMPRSKTERRRSNSWAFYQLRQFLTYKGVKFGVSIRFVDPRYTSKTCHCCKVIGNRQGKKFECLNQNCGWIGDADVNGAKNIATLGRIVNAPRGSEMMSCSLQDVVLRATESSVPLRAG

SEQ ID NO: 40908 - protein, 390 aa, Geitlerinema sp.
MEKAFSYRFYPTFEQENLLRRTLGCVRLVYNRALAERTEAWYERQERIGYAETSSKLTEWKKQEDLQFLNEVSSVPLQQGLRHLQTAFTNFFTGRTNYPNFKKKRNGGSAEFTKSAFKWKQGQVFLAKSPEPLNIRWSRRIPEGAEPSTVTVRLNPSGQWYISLRFDDPRNLTLEASNQSIGVDAGITSLVALSDGEKVANPKHFDRHYRRLRRAQKALSRKQKGSRNRDKARLKVARIHQQISNSRKDHLHKLTTRLIRENQTIAVETLAVKNMVKNPKLSRVISDAGWGELIRQLDYKALWYGRELVKIDRWFPSSKRCGNCGHVVERLPLSIREWDCPKCGSHHDRDVNAAKNILAVGHTVSVCGATVRPEGSKSRKAGARKQKPKS

SEQ ID NO: 40909 - protein, 412 aa, Geitlerinema sp.
MLTRRITYRLYPTRQQESTLHYWRKLHCGLYNAALANRKTQYQKFNHAVDYFEQQNSLPAFKEVWPEYKELGSHALQATLKRVDLAFQRFFKKLGGYPRFKASRRYAGWTYPCKSGWKAETSGLHGSLNLSNLGSLKMRGQARTWGKPTTCTIFWRHGKWYASITVQCEPARSTGEGSVGIDLGCKEAITLSTGEQISKPEFIRQGDIQVKQASKKLRRKRAPNRTKRIKASRRWTRERQKVSKLQRKVARQRENWIHQVTSHIVSRNSLVAGEKLNVKNMTRKGKSKTRQKAGLNRSILSVGFGMIGQFLDYKLAEAGGFYVESPTQQLKPSQRCVKCWELTPKTLSDRVHVCANPHCNHVEDRDVNAAQVNLAWARGKELASSVAESSSSTACGSMRQLGAKKRQKPQAS

SEQ ID NO: 40910 - protein, 455 aa, Geitlerinema sp.
MKYTYQYKALPTTDQKLELNLWLRICQYWYNRQLGDRFDWWEMNRSPVNACPLVASLPKLRDRPNYYNQKKYLPGLKKETVTVEWSGEALDFSRVPANTLQEVCKRVDKAFERFVAGDSNGNRSGKPRFKPQSRYRSMVIEGAGLELHSCSVGGRYLYIKVPKIGLIKIRSHRHLPDGALLKQLQFIKKNDGWFVNLRLEDPAVPAITPDSILPTWENSLGIDAVLHEQDYLATSEGVKLPSLKALRKSQHKLTRISQKKNARKRGSKARRKLAKREGRQHQKIARCRKDFQYKTAHKLVRTGKKVFFHEDLNLKGLSRRNAPKQDETGAFIPNGQSAKSGLNLSWADAAFAQFFQILGHIAEKAGAVVIAKNPAYTSQLLSYRDEVIFTDTTIRNYWDESEKLLVDRDVNAAINVKRVGLDVFPTIKRRKGNIAIVGSITDVTSKEVLRILRNA

SEQ ID NO: 40911 - protein, 307 aa, Geitlerinema sp.
LQTAFTNFFAGRTNYPKFKKKRNGGSAEFTKSAFKWKNGNVFLAKSAEPLNIRWSRRLPEGAEPSTVTVRLNPSGQWYISLRFDDSRDLKLEPSNQSIGVDAGITSLVALSDGEKVANPKHFDRHYQRLRRAQKALSRKQKGSCNRDKARLKVARIHQQIFNSRKDHLHKLTTRLIRENQTIAVETLAVKNMVKNPKLSRVISDAGWGELIRQLDYKALWYGRALVKIDRWFPSSKRCGNCGHVVERLPLSIREWDCPKCGGHHDRDVNAAKNILAVGHTVSVCGATVRPEGSKSRKAGARKQKPKL

SEQ ID NO: 40912 - protein, 377 aa, Geitlerinema sp.
MEAVKTLKFKLYQHKRNRHLKRTINAAGVIYNHCIALHKRYYRMWNKHLSCAKLQAHVAKLRKRDPFWQLVGSQAVQDICQRIDKAYKLFFKHHGKGVRPPGFKKVRRYKSFTLKQAGYKFLGGNRVKIGERVYQYWNSREIEGKVKTLTIKRTPLGELFMVVVVDSGEEFESDATPRKIAGFDFGLKTFLTCSEGFKIESPLFFRQSLKAIQKASRNHSRKQKGSRGREKARKNLVRRYEDITNRRQDWFWKLAHTLTDQFDVLVFETLNLKAMQRLWGRKVSDLAFREFLSILESVAKKKGKWVTYIDRWFPSSKTCSGCGHILESLDLSVRRWRCPACQSVNDRDENAAVNIKQVGVSTWGVGDVSQALPAISA

SEQ ID NO: 40913 - protein, 439 aa, Geitlerinema sp.
MGSNCIYIYYNCGVKLAYQYKLLPTYEQRCRMDKWLDMLRCQHNYLLADRFDWWEMNRCPVNACPLVCSIAEPRKKPEYYSQKRSLVSLKQEREWYSDIHADVLQDMVKRVDLAFARFIKGDKNGKRSGKPRFKGKNRYRTFAYQRVKPDCIQGNQVTLPKLGEVKFIQHRPVPEGFVIKRALVTKKADGWYVTLTLEDKSVPEQPVVEVEPTEANSIGVDAGLEYFIACSDGTTKQPPKFYRQSEDKLVKLQAKRDARGKGSKSRRKLNERIAKLHQRIARQRKQWHFETAQELIDKADVILVEDLKISNMSRRNKPKQGEDGTFLPNGQSAKSGLNKSFADAGIAGFLNEILPYKAAKAGRLVVKVNPAGTSQHCANCLNRVPKELSDRWHECPHCGASMPRDVNSGILIKKVGLGIRLTIKRESGATRRRSPRRTA

SEQ ID NO: 40914 - protein, 363 aa, Micromonospora sp.
LEALARGLKNWADSRGGARAGRVVRFPRFKSRRRTAPSVRFTTGAIRVEPDRMHVVLPRLGRLKLHESARKLARRLDNGTARIMSATVRRGGGRWHVSFTVEVERAERAPARPRSVVGVDVGIKHLAVLSTGELVDNPRHLAAAHQRMRSLGRALSRKTGPDRRTGRRASKRWERAAARAGRAHARVAHLRRDGLHKLTTRLAREHATIVVEDLNVVGMLANRKLARCVADAGFAEIRRQLAYKTGWNGGRLLLADRWYPSSKTCSGCGTVKTKLALSEREYTCEACGLVIDRDRNASLNLAALAAEFDTVGSGPVAARGADQKTRVRGQVATKREPGTASAGQTGTVPPQGRTTNRVFAKAH

SEQ ID NO: 40915 - protein, 321 aa, Methanobrevibacter sp.
MGEYIRGVVVKLHVTPEQEVLFKQNYGCTRKTHNELLNKYKAKYGDSNKIPTKNELNQFLNESKKELPYLEETESTSLQQARDDLHKAFKNNFKSKRHNTPKFHSKKKTRPSFRQTIRKDKRPVENNTLTLRKHGKVTFSTSIEYLDLLNSPNTKFNNITVYYDGLNHYAAFNIETDAPEQLPLTEEYIGCDINSNKNGWLVTSERQKEFFDVDHDNQMIKHVNKLMSKCRKGSRRWKKLEKRLQKWYNKRTNQLNDYIEKLTYNLVKEYDTIVFEKNYSTIKILIGGEQNMIFPLSRFIKRLKDKFQLYTQAEHATTADT

SEQ ID NO: 40916 - protein, 709 aa, unknown
  TnpB Polypeptide
MKRKVLILLICGIFLASCSVKTADKGNAEKVDVSSSKDVTKNDNKSEEEKNEYLKKITYSNLLDKATQEEVQKELKNAGVSEKNIKDFLEGVNYFNNIGQNKTFVKEGFKTTEELSPTYDQAEIQEQWSKKSPKFVGQNCRITSYELMRDFISVGKPEIKNTEQLFIDEDALNNFPIKVFTDSERNQFESLFSAINTENTKDVSVHVKKVKEDWAKKNIKFTNENKISLVSVFFHSLITPEESFLFIGHVGVLVPTSEGKLMFIEKLAFQEPFQAIKFDNRSQLNDYLMNKYDVEFDQPNARPFIMENDELLKGYRLNPNNKQLTKLFQYAGSARFAYNWAISREEENHKQGNKFLSDMDLRKEFTQLKKLSEYKWLNEISNNVTKQAIKDACNSYKNFFKGQSKFPKFKSRKHSTPSFYQDTIKIQFTNTHVKVEAFSMSRKKNKQKLNWIKLYEKRKIPTDCKYLNPRFTYDGLYWYVSVSIEVDDNTDNTDNTDNTILLSNEGIGIDLGIKDLAVCSDKNTYKNINKTQKVKKLEKKKRRLQRSVSRKYCKNKKGDNYCKTSNIIKREKELLKIIKRLTNIRHNYLHQTTSEIVKRKPSFICIEDLNVSGMMKNKHLSKAVQEQGLSEFRRQIEYKAKWNNIPVIIADRFFPSSKMCSCCGKIKKDLKLSDRIYKCECRNIINRDFQASLNLKIYGENVLKQQSVA

SEQ ID NO: 40917 - protein, 365 aa, Bacillus sp.
MTKRTYKFKLVPTAEQQKKIIETLSLCRWLYNTCLEQRIYEYKTHKKSISFYAQKKELPILKKELPIFKTVHSQVLQDVLERLDKAYQAFFKRLSKGEKAGFPRFQGKNRFHSFTYSQSGFKLNGKFLSLSKIGDLRIKCHRQIQGKIKTCTIVHKNSRFYVCFACEMTEAVSELKTNQSVGVDLGVTHLAITSDGQFFDNPKHLQKAERRLKQLQRAVSKKKKGSNRRQKAVRLLAKWHEHIANKRRDTAHKVSRQLVSNYDLIVFEDLNIQDMVKNRHLSKSITDSAWRKLIQFTQYKAENAGKEVVCVNPYNTSQICSSCRHIVKKTLAERLHKCLCGYEIHRDVNAAKNILQLGLQQKQTT

SEQ ID NO: 40918 - protein, 501 aa, unknown
  TnpB Polypeptide
MERVRRAVAVEVESPPPELYAVEEPYRKIVEEVAVYVAERGRLEKEKYNELYHRFRMQYPLPSQLIQQAMNQGVEIGKSFLELKRDGRVHKPHPEVRRVSIRFAKNSWSYRKTAASAAPVKIAVSLPGGRREVWIKPHRRFWFYWWRVLRKEAELASTLILKRRRNKWYAIFVFDLAPEREPPAEAVAFDVNENSVAVARVTLLSTVDAVAQWNRQYLDPAVYSIKTDFGRLAKRYEAVRNAKLEELKQRYPYAGGDEEERRQNVADTREYKKFARRLRERRRKGGRVRQIASEVTKSPAVIITEKLGKNPQEEMIGVEEKRVKKRELRHRVKQTPFRKILRAVEEKAREVGSAVFYVSSFRNSKVCPIHFVLLKNGGGWHTLHCPHGHVVDRDAAAVLNMLWRVTPAGWVKGVWWDVKEARKRLRKKVVPKEVVRKTNPIIPRPVAYAVWTSLMALKASDKWPAVLARAAPMTPAQGADEDGARAPPHGRPPPGRRSDLC

SEQ ID NO: 40919 - protein, 383 aa, Butyricicoccus sp.
MADNNRTVFYNTIKVPLYPDAQQKELFQKTFGCCRYIWNQMLSDHERFYFETDAHFIPTPAKYKKQAPFLKEVDNQALIQEYNKLSQAFRNFFRNPAAFGYPKFKCKKTDRNTFSACNHVMGNSATIYITRDAVRMTKAGLVRAKFPRRPRSGWKLTRITVERTKTGKYYGYLLFACPVQPPKPVPPTEERTIGLKYSVSHFYVTDNGVCADPPHWLRRSQHKLAAVQEKLSRLQPGSQNYQDLVQKYLLLHEHIANQRRDFLHKESRRIANAWDAVCIRNDSLQAISGKMGGSVIHDTGFGMFREMLRYKLARQGKQLLEVDRFTPTTKVCSVCGSVNEGLSPRARRWTCPACGAMHGRGKNAAANIKVQGLAQCQAPQAIC

SEQ ID NO: 40920 - protein, 411 aa, unknown
  TnpB Polypeptide
MEYSHRYSAYPTQQVAVQLERHIDIHRQAYNHTRYEYGNVDADNVGSAYKHHDRLTDWKDEHPVFAELHSKALQRTVTRFYQNLTNLSRQKQNGRKVGQLKWKSPREFQSMTYSQSGFELKNTSGRRATLWLSKIGDIEIRYHRPIPDEANIKEVTVKKETTGDWSVSFSLETDDTNLPEKPEVDSLDASNSVGIDLGIQDYIHTSDGTIVEWLDLDDEYERLRREQRNLSRKEHDSANYEKQRKEVAQIKRHIQRKVLDYQQKITTWLVTEYDAVFVEDLNVAGMLQGSGNARNKQDAAWRQFIELLEYKADLYGCHVEQVEARGTTKECAACGVETEKPIWVREHACPSCGFEAGRDANAAMNVLQRGFSELGLEWPESTPVETALPTDTDDIHEVSAKRVIETGSLGA

SEQ ID NO: 40921 - protein, 415 aa, unknown
  TnpB Polypeptide
MITVETLSIPKSKKEKIKQAGRETRKRHSLMTCTTIDAKIVDDSLSQKQKDILSSLFLEAKWFYNDMISFMESNNISSYDTTKKHVSVRMGKNNDSYDERKLVSLSASMKQKMKSNIQSSLKSLAELKRNGHKVGKIDYTKSVKSIPLRQYKKDFSILSSTSLSIAKVGKVRVRGLHQIPQGADISNATLLHLPDGYHIHITIYTPYNIDVDMNLPVCGLDFGIKESIATSDGETFHAVYEITSRIKGLQRKLSRQHEGSNNYCKTLDKIRREYQKIDNLKKDHAYKIARYLLDSYSVIIMQDENISGWHKGLFGKQVQYGILGRIKKILVHSDQVAVLNRFVPTTQYCPECGRLNKHSLEKRTYHCMCGYSYDRDIHAAKNMIELFNKGNDSLVKKYSPVERGSTPVEHDTSSD

SEQ ID NO: 40922 - protein, 411 aa, Ktedonobacteraceae sp.
VIQLNPTPEQARTLKTTLEQHTACYNAVAREGFTTACSNGVELHKRTYYPLRAAYPNLPAQLVCAARVRATESVKSALTWKRKHEQSYRKKVAKAQKQGKEPPRLKPVRCPQSKLCSIRYDHRSFWVKWETSTCSLATVHGRMELPFTVPDHLTQYIGGKVCSADLCFHHHRYFLHIVVSLKTPERKPSHEVIGVDLGLTRPAVTSHRRFLGERRWKEQERRTFRIRRQLQKKNTRSAKRHLKKLSGKQFRRQKDHDHVLSKRIVQNTPDGATIVLENLKHIRETSKMGRGKQNKNVDRKRRLHSWSFARLYSFLEYKAEARGIQVVKIDPRHTSQTCSRCGYQHRANRRSQSLFLCRQCGYSLNADLNAARNIRDKHLACLASFGRSQASGSQSTGLSFPPSGEEQAPAL

SEQ ID NO: 40923 - protein, 380 aa, unknown
  TnpB Polypeptide
MTRRFDAIRATVSMNIALTNALLVFAKNYLEGIRHVLYWLKEKRINPNKRNILSIIHKELYNILKSYNLSSKIAEDCYRNALSIYKGWYNNPNKGRFPRIFKPTIWLTPRLSYNVNFERMIVKISKIGEFKILGYPRNYKEYLSWEMKEARLVFNNGKAFLKIVFEKFAQKIEPKGSIAVDINMKAIVIGKDDNNYVKIPTRINEMHHYKSLAESLQIKYPKRWKENKNIKRRIITFHIKAKNIAEDFARKVGKRIVEEAIKMNANVIILENLKNMIKSVKKLPKEFRDKLYLMQYRKIQYWIDWQARKHGLLIDYVFAAYSSIKCPKCNNKMNEVSYRWYKCNCGYENDRDIIAIVNLNGRGSLSLSTAPQMRDVAPNQ

SEQ ID NO: 40924 - protein, 155 aa, Bacterium sp.
QDDNQMIALEELTGIRERTNTLPRGKRERRLSNSWSFYQLRQFMTYKAIKFGVKLVLVDPRYTSQTCHNCLHIHPVRGESYRSGKKFVCDHCGWVGDADLNGAKNISAIGAVIVNQPRGSGLSCKLDVRVGRKTEYMQLNLFDISRASESSHLSR

SEQ ID NO: 40925 - protein, 308 aa, unknown
  TnpB Polypeptide
MAQSAIIRVIGNYRTVKESLGDPWKTKRPLQYTSSGYDLVWNRDYSILSDGRLSVNTLKGRVKLQVDWKGMPEQYRHGRFGTARLLKKRGKWMLLIPSTVELTDPQRPQNVMGVDLGMRFLATSYDSSHKTTFHSGKEVTHKRAHYKALRTGLQKRGTRSVRRRLKSIGNRENRWMRDVNHQVSKALVDECEQPTLIVLEDLKGIREATERVGKSRRYVQVSWAFFQLRQMIEYKALKAGHSIMLVDPAYTSQACPRCGLVRKANRKHRAHEYVCAGCGYRSNDDRVAAMNIRRLGYAALVESQTGTS

SEQ ID NO: 40926 - protein, 400 aa, Gammaproteobacteria sp.
VKRTLYKTKVLRLRLKDKHAKLLRDLAGEVNFVWNYCNELQITMFNRERRFLSGYDFAKFTRGATKEGLHLHSQTVQAIAEEYATRRRQFRKVRLGWRKSTGSRRSLGWIPFKKTAIQAAHGQVKFAGQWLSLWDSYGLEAYEIRAGSLCEDARGRWYFNACVAVPIAEPRSKAGHEVGVDLGLEDLVATSDGEKVLAPQFYRGLEPKLAIAQRAGKKDRVRAIHAKIANRRRDSLQQFSTHLVRAYDIIYVGNVSAAALVKTPLAKSVLDAGWSAFRTMLRYKCDFAGATFAKVDEAFSTQTCSVCDSRSGPKGIAGLGIRVWTCCECGTVHDRNVNAARIILAAGRRRLAEGIPALLGRGRTSTHPHSSALPGGSGAFGRRSSICLSGFAIDVKPYWA

SEQ ID NO: 40927 - protein, 540 aa, Firmicutes sp.
MQLTRTINADKRYYLDEDEIQNVESLIQTMERFNNIKIQLYNCLYDKSFLKRGPLLEETYSSWLKRNYGTTDYYNCAIYTYASSVLSSQKELNRLYQRTKEKDIETRNQKIKRTQEELEKKQGIKSSLRTYFKSGIWERPYPKCRITMERNQIFLPNGTYFPAEEYERKIERSIRRLKTRIALLESSKKRAIQRLEWLKKFPPKRIVFGGRKQYQKKDNPKVDREQWKQEFFESRHASMSLPGRHTSKNCNFLVRKEERNLIVKCMDGKETVFKQFHLARQQELWEEMLQAKKQERKAICYNFQLKREKTGRRYLIVSVTLLLENKYCNESLEKGCVSIDLNYDHVAISELDEKGNRLEGTVIRFSPELKTKGQISEKIGRVMAKVGRYCAERKKPLIMEDLDTTLAKHGMKYGCKKKNRHASLFAYRKMTTCLENQAYKQSFGIYKINPAYTSQMGKFLYLRPFGLSIHEAASYTIGLKGMGIREKLLPDERLLVLLSEKAKEQLKNGTDIVSIIPAWKQLTKAFRGVSPHSFYRELPY

SEQ ID NO: 40928 - protein, 213 aa, Vibrio sp.
LILNHIGLNWLQINLSQATLSPELLISKQMMTTTLKNTGSNGLTVDNPKYLKQAKQKLTRLQRQLSRKKKGSVRWKKAKSRLNNLHGSIGRQRMDFAHKTAHRIANESDIVVFEDLNVAGMQKFNGKMVADNIMGLISDLTKYKVELRGGIHHEIGRFERTTGVCSVCGQHHKLTLKERHFTCVSCGTFSDRDYSSAIAVQKIGESDLITMTG

SEQ ID NO: 40929 - protein, 400 aa, unknown
  TnpB Polypeptide
MYSPNASGHFFEISTQSTLFFINFSILDKIIYICFVKLTLKIKLLPSESQKRMLLDTIRTANSACDMVSEVAWDKKVFGQFKLHSLCYYPVKEAYPLSSQMIVRCISKVADAYKLNRKTKRVFRPLGSISYDSRILSYNLVKGQVSIWTIGGRQKIDFTCHNPDYLSYIQGEADLCCIKGKFYLLQTIEVPSEKEVDAEEFIGADMGITDICCLSSGEKFSSKNLNAYKIKQQKIRSSLQSKCTKNARRVLKRLSGKERRTQTVINHTISKQIVELVKQNNKGVALEDLTGIGKSLDKFSKKQRGLYKGWAFRQLRDFITYKSQLQGVKVVVVDPRYTSKTCHVCNCIGNRSSKIFKCETCGVFDADINAAINISKVGVAINQPENSTLFCALGLKTPSL

SEQ ID NO: 40930 - protein, 349 aa, unknown
  TnpB Polypeptide
  misc_feature (304)..(321): Xaa can be any naturally occurring amino acid
VRKINRAVKIRIYPNKEQITQIEKTIGCSRFLYNRMLADKIRYYQEEKKMLKNTPAGYKKEYPWLKEVDSLALANVQLNLEGAFRKFFREPGVGFPHYKSKKHSRKSYTTNMVNGNICLQDRFLKLPKMQPVKIKLHRMIPEGWKLKSVTVSREPSGKYFASLLFDCENQTAEKRQAEKFLGMDFAMHGMCVFSTGERAGYPMFYRNAEKKLAREQRKLSRCEKGSRNYQKQKKKVALYHEKIKNQRKDFQHKLSHSLAEDYDAVCVEDLNLKGIAGGLHFGKGIQDNGYGQFLSMLGYKLEEXXXXXXXXXXXXXXXXXXAYADIRRKSWHYQNGYTYANVETGWTGM

SEQ ID NO: 40931 - protein, 368 aa, Psychrobacter sp.
MKTLKLRIKDKHVNQLNKLAGSVNYAWNYINALSFEHLRRTGKYFWAYDLSQYTKGSGEYLGLHSQTLQAINETHAKSRKQFKKAKLNWRTNRPDAKRKSLGWIPFKKSAIKYLRSRQTGKKALKSTIQLSLCKGQKLIIDVFDSYNLSLYQINTLKIVQDSRNRWYACITVKDFPRQASGKGSVGIDLGLKQSATTSNGDKLTTKQTQKWAKKLAIAQRAKNKQRVKAIHAKIKNSRLDAIHKFTTQLVKDNALILVGDIKSRSFTNSMTNLAKSTYDAGWFELKRQLEYKCKHAGCQLEIVNESYTTQTCSYCRQISDSSPKGRAGLGIRGWRCAECGTWHDRDINAAKNILAVGLDRLAVAIPSV

SEQ ID NO: 40932 - protein, 479 aa, Oceanobacillus sp.
MAVYRTLQIWVKKGHRMHLYFQNMCQNAKNMHNTTNFYIRQVFTGLKQEKELQPLQKEVLESLQTHLPAINANQLKAYQRRSVKEQEKAKSEQKEIKCHLFEMPSKDHPYIPYSFLDALFKSMKQTDYQSLPIQSSQGIMRTVFQNWKAFYGSLREYKKNPIKFKARPNIPSYCRLKEKEVVFSNQDCVVKAKKFLKFPKTKLCLNIGKLGYSEGKLKQVRVVPKYGHYVVELVFQVPIEVEKKESKNRFLAVDLGIDNLATIVTNTGKRPMLVKGKNVKSINQRYNQLKAYHASILRQGKQSNEGSFTSKRLEKISRKRFLQIKDLFHKASFQILKIALEEDIDTIIIGKNKDWKQHVTIGKRNNQSFTNIPHSLLIQMITYKAEKHGITVVLTEESYTSKASFLDNDDIPVYGQKHKIAVFSGKRIKRGMYLSKNQERIHADVNGAANIMRKIFKDAFHHDFASIDALRRPVSLIVK

SEQ ID NO: 40933 - protein, 403 aa, unknown
  TnpB Polypeptide
MVMQACKGRLYGGGLGAVARIGGQCRAVWNLFLAASAERYKAEGKFVFYAEMSARLPKLLKETPLTGLPHRAAQMTVQRLDRALKDCAKSKGKARRGFPRFKKYADRSDAFSFVGREVRLEPGRIRLPKIGWLRVRGMTLPTGADLKQVAVTQEPNGWHVSVQFEAAAKVYAAPTLPEVGIDGGLIHLATLSDGTRIAHPRLARKATKRLRRLNRERDRRRKGSANRRRTVARLARAHRRLADARKDAMHKATRKLVDTYSGFAVEDLSLRGLMRTRLGGSLADAGLGGFLRTLRYKAEWAGRPWRVHGRFARSTGVCPGCGHVGGRLALSVRTWACESCGAIHDRDVAAAQVILGGAVGRVTAEPAERRKRGLAARGGGRAQARSSHGGPPANVARATGSAQ

SEQ ID NO: 40934 - protein, 407 aa, Hydrococcus sp.
MIYVVGRLRKIMFVLEYKLKGKAKQYQAIDESIRTVQFVRNKCLRYWEDGQNIGQKDLYRYVTQLRKEFEFVKALNSTACQQACERTWTSILKFYANCKNKIQGKKGYPKYSKSTRSFELKQSGWKLDRDAKKIAFTDGKNIGEFKLIGSRDLYYFQDFQINRVRVVKRADGYFCQFLLKLDVRDIVPQLKPTQKCVGIDVGLKYFYSDSNGSTIVTPNYYRKSEKRLKKLNRRKSKKFKKGNLQSNNYIKAKKQYSKRHLKVSRQREEFAKEKALRLIQSNDLVAYEDLKVKNLVRNSKLAKSINDAAWSQFRKWIEYFGVKYSRLTIAVSPQYTSVDCFNCGKRIKKSLSVRTHVCECGYCEDRDINAALNILKKATTGHVGSWSEQLDRNAWGESTSTLIGVIQ

SEQ ID NO: 40935 - protein, 423 aa, unknown
  TnpB Polypeptide
MPIVRTSPVLLSKANEGKLDILHGFLEEYRRVVQCTIDHAWDNRLIFGERVLDIQNDRLELPSFLPVACLPEMDTPLSGRAIKCATTQAMSMLKAALKRRVKDIAWLSKLDGTPAPRILMQRLSRPLVKPSAAGVSAELNSICAKLVWTSETSFDGWLVLSSLGKPFGKLHLPVNRHRHLNRLAVGTQLASLLISETRADVRFAMESKTKSSLAVRVVGADTGLKTVLSLSDGQTTPEIDCHGHSLQSICHELARKKKGSKAFGQAQDHRKNFINWSLNRLNLSTITEIRLERVKHINYGRRSSRFMQAWTNADIQRKVLMMAEDQNVSVKLQSSAYRSQRCSCCGMVRKANRKGKVYSCKGCGFVCDADLNAARNHEQDLPPIPDAFFRTGKNTGKGFYWKSTGCSLSTGVEFAVPSSNCQA

SEQ ID NO: 40936 - protein, 400 aa, unknown
  TnpB Polypeptide
MNRTNVIQLKPSKSQKGILNELMLLSSCVYNETNYLIRQQFFNKEKISYFYTLQQQLQNTENYQMLGRSYALPRIQVYSETNSSRFKLIKSKTQKKVGLPKYLKNRKTNTTIPSYLIIDGCQYSIKKDYVTIPLSRKFRKKYNIKHFKIKYNGVLKWNGKQKRGQIKFEDGQFYLNQSVQLKDKKLIKSKIKAGLDLGIKKLLTVYLNNGEDKIIGRNRFYKQWKYLTDLISEEKSRLSLQNKKTSNKLKRMYRKRSKFQNNLYNNLVAKMFRFLIKNKVSYLAIGDIKNIRDSGSKGKKVNQMINNYWSFGLLLKKIENKAEEFGIEITLETEEYTSRTCPLCFNNEKSNCKDRIFICSDCGFVEHRDVVGARNILTKSLYGSIESIHQDEAVLLEAVK

SEQ ID NO: 40937 - protein, 400 aa, unknown
  TnpB Polypeptide
MSALPTATPPTVASPPALATRPAVLTYRFRLEPTPAQIGRFWQYAGARRWAYNWSLRRRQEHFNVTGKTLSFADLCAELTALKSQPETGWLRTINAQLLQQGVKDLCRAFTNFFEKRANCPKLRKKFRHTPTFRIPQGIGLPSSNHITLPGIGDVLMRQSREIIGVVKSATCKWECGHWFVALVAHQEIESTPKAALTEENTIGIDLGLKDACVTSDGEIIPALRSYRKTQGQRRKAGRVVSRRKGAKKGEKPSNRFKKAKATAARIDRKAANQRADFLHKLSTRLVRDHDGLVIEDLAVKGLAKTKLAKSVLDAGMGAFRRMIEYKADRASKTVVVIDHWFPSSQLCSIEGCDYRHRTLTLSDRSWTCPQCGAIHQRDVNAARTIKAEGLRVYRTWTQN

SEQ ID NO: 40938 - protein, 394 aa, unknown
  TnpB Polypeptide
MRQAFVSRLYPSRTQERTLESILTTTRFFYNDLLAERKEAWEKRGEAVGKTAQLRRVKERKATNPYAAPVHSHILQVVADDLDKAFQAFFRRVRTGEKPGYPRFRGANRWTSFGLKELGNGFKIDGRRLKLSGVGRIPVRWHRPLEGTIKTVRISKKAGKWYASFSCVVPDKEPLPTTGASIGIDVGLTHLLTTSNGDTVENPRWYRAEQAALRVIQRRIARRQKGGSNRKKVVAQVQRQHERVGNQRKDYLNKLVSGLVKTYDVIAIEDLRITNMTRNHHLSKSILDAGWGYLADHLTRKAACAGREVRLVDPSYTSKTCSGCGERFAQEITLAVRWVTCGACGLSLDRDHNAAINILKRARNASDRQPAGTPPLGVNVVGLPTCVAQEAAPF

SEQ ID NO: 40939 - protein, 379 aa, Paenibacillus sp.
VLKAFKYRLEPTTQQAELFAKTFGCVRKVYNLMLHDRIESYQKHQETGEKIKFKAPAQYKNEFPFLKEVDSLALANAQLHLNTAYRHFFQQPASGFPKWKSRKNPVQSYTTNNQKGTIAIQAGRYLKLPKMKPVRIKLHRQPEGVIKSATISRTASGKYFVSLLCETDIPPKPQTGSVIGIDLGLAHFAIFSDGTKVPNPRVLAQTAATLAKAQRKLSRRAQQAKKDGHLLSESRNYQKQRILVAKLHEKVANQRNDFLNKLSTDLVNNHDVISVESLNVKGLVRNRRLARSLHDVSWSSFLSKLTYKAAWYGKQVVQVDRWFPSSQLCSACGHPGGKKALHIREWSCPSCGVHHDRDVNASLNIRTEGLRLLQGTGVR

SEQ ID NO: 40940 - protein, 369 aa, unknown
  TnpB Polypeptide
MKLVANIKLKPTQEQAVELRATLERCNEACTWLSEQGFAAKQTRQYDMQKLFYRDLRERFSLTAQVAIQCIKKVADAYKVGKPDTVRVFRKHAAQPYDDRILSFKADDIVSIWVLSGRAKIAHVCGDHQRELLKHRKGEADLMFVRGKWYLACVCDFDDPKLLTPDGVLGVDFGIVNIATDSLGNQHSGAATEAYRARYAKRRATLQRVGTRAAKRRLRKMSGRQKRFHKHENHCISKSIVSTAERSGLGLALEDLTHIRARAKASKEQRKRLHNWSFGQLRAFVEYKAKRAGIPCTTVDPRYTSQECGECGYIDKRNRKSQSEFRCRACGHSSNADLNAAGNIAGRVAANRPMFAHQCVPGAVESPRL

SEQ ID NO: 40941 - protein, 382 aa, unknown
  TnpB Polypeptide
MRRFAGACRFVFNRALARQNENHEAGNKYIPYGKMASWLVEWKNATETQWLKDSPSQPLQQSLKDLERAYKNFFQNRAAFPRFKKRGQNDAFRYPQGVKLDQENSRIFLPKLGWMRYRNSRQVTGVVKNVTVSQSCGKWYISIQTESEVSTPVHPSASMVGLDAGVAKLATLSDGTVFEPVNSFQKNQKTLARLQRQLSRRVKFSNNWQKQKRKIQRLHSRIANIRRDYLHKVTTTVSKNHAMIVIEDLKVSNMSKSAAGTVSQPGRNVRAKSGLNRSILDQGWYEMRRQLEYKQLWRGGQVLAVPPAYTSQRCACCGHTAKENRLSQSKFRCQVCGYTANADVNGARNILAAGHAVLACGEMVQSGRPLKQEPTEMIQATA

SEQ ID NO: 40942 - protein, 391 aa, unknown
  TnpB Polypeptide
MKVRKAYLYRLYPNVGQTEKLTWTLNRCRELYNAALEERREAWRLCGVRVSYYDQKRQLPAIKEVRPEYKQIGSQVLQDVTARLDKAFQAFFRRVKAGVDPKKVGFPRFKGTYRYNSFTLSQAGWTLAAMDSGRLYVVGIGHLKIKWSRPVEGKIKTVTIKRDADQWYVTFSCEVERDPASVADKPAVGIDMGLEYYATLSTGEHVENPRYYRKAQATIAHCQRAFERKRKRVKLKDGTHRYGKNRARAGLRLKRAHRHVANQRKDMQHKAANAIVRTYGAVAVEALSIDTMSKRPAPRPNGDGTYAPNGAAAKAGLNKSMTDAAWGQFLAILRCKAEEAGVVVVAVNPRGTSQTCSGCGAYCPKTLADRWHTCVAAGCPCNGTRTRRVTS

SEQ ID NO: 40943 - protein, 426 aa, unknown
  TnpB Polypeptide
MKRLQAFKFELMPNGEQQRQMRRFAGSCRFVYNKALALQKERHERGETKLGYVEMAKQLTAWRSSAETAWLKEAPVHPLQQALKDLERAYSNFFAKRSDFPRFKKKGQSDSFRYPDPKQIKLDQSNARIFLPKLGWLRYRNSREVLGEIRNATVSCRAGRWFVSIQTEREVEQPIPQGGAVGIDMGVVRFATLSDGAFVEPLGSFKRHERALRRAQQSLSRKVKHSRNWRKAKIRVQRLHARIANVRADFLHKLSSAISKNHAVVCMEDLQVRNMSKSAAGTLEQPGRNVRAKAGLNKAILDQGWYEFRRQLDYKLAWRGGCLVLVAPQYTSQTCPRCGHVSADNRQTQACFACAACGLENNADVVGAINILSRGMQQLRDEGRDTLHACSGMAQAVSPDGLWIESRLGSQAGTRRSEPGVDPCHA

SEQ ID NO: 40944 - protein, 509 aa, unknown
  TnpB Polypeptide
VRYYDTVTRHRFTTENRVDVEQVERDLAQMIAWMAESEREVLVSQEFHDLALKVLAGGRPTGSLNSWGRKRLSRYDFEFQRHNMNEMLVSNVVGTLELYAMSVGLFQVMSTHPSIVKSDLILSHYRGAYHDAPQPTSGIVRAHLRRYHLKGERKASLPGVSAKLNLAVCDTHFAPKAFREDVDSLNVTIQVKTPSYGLIRLYLRLPENTDRFGEGKVCRPTIRLNSKGRVIFDVAIEHEVQQRDTNKVVGVDLGKVEPFVATVINPKDKHSSAPFHANYKRRLGSLVKAERKRRDLASHLYERADLCEKHNRDQHAQVLRTEAKRVGAKATRIKHEISQCIASQIVSIADQNDAHVSLENLSWLDALGGRWPHAEIQSRVESTSKRYGLKTIKVSARDTSRTCSRCGGRVSNNSKSRVGTCTTCGFSLDRDISASREIALRAISSTRNRDRMRSLLRQRALERSSTVTRQSKPVTALGGIQGHTGTSERKTEATLMMVRENLDSRGSPT

SEQ ID NO: 40945 - protein, 413 aa, unknown
  TnpB Polypeptide
MADGTGTSFRVLANPWKETVRDAMADIRASCESAKVKAREAVPRHTADEQERRRLYGLLKGDRWASDPYLARIMRKHWRRGHSHIDNQIVVRADQYTTWTLAEGGNVWLAVPGLERRSRVAIPLNTTVAPSGTLRLILRGGRVEVHYQVDDSSLKSSNRPCGTRSIGVDKGYTEVLTDSDGQHHGTDFGPLLTAQSDLRKRKGQARAKLRAVSDRAIEAGDRAKAERIERNNLGTAKRDRQAARWRTLVRNITYQAVNDVVDKADVVVAEDLSKPFTGRKKLGRNTNRRLAAWTKGLTARALHDVPERRGSALVLVNAAYTSQADPRTGLLAVRRGGRLHLPGGVVMCADHAAAINILHRASDPDITLHTPYTRVRQILQERADRQRTRLPVQDSSSHLGGERNIQTPMRKSA

SEQ ID NO: 40946 - protein, 386 aa, unknown
  TnpB Polypeptide
MLRAYKTELNLTPEQKHKINQTIGICRYIYNFYLAHNKEVYEQEKRFVSGMDFSKWLNNEYLPNNPEFAWIKSVSSKAVKQAIMNGEKAFKRFFKGESKFPNFKKKKRQDVKAYFPKNNKTDWTVERHRINIPTIGVIQLKEKGYIPTEALVKSGTISMQAGKYFVSVLVEVSDVCQNNMPKTKGIGIDLGIKDLAIVSNEKTFKNINKSSKVKHLVRKLEREQRRLSKKYENKKKRGEQSATYSANITKQVKKVQSIHMKLTNIRKDYTNKVVNEIVKPKPSHVTIEDLNVSGMMKNRHLSKVIAQQNFYYFRTKLEYKCRLNGIELRMVDRFYPSSKICSCCGNSKKDLKLSDRTYVCKECGLVIDRDLNASINLANAEIYKIA

SEQ ID NO: 40947 - protein, 370 aa, Gemmatimonadetes sp.
MLSIFVNMKLTLQIQLLPDVATGQKLKATVARFNEAANYLASKAYERTLANKFALQKLYYSDLRRQFGLSAQMAIRCIAQVVEAFKRDKTVQPSFRPTAAMPYDQRLYSFKGIDRVSLLTLEGRVLVPMLMGNYQREQFGYAKGQADLVLRKDGKWFLLVSVDVPDGTPIPTTDFIGVDLGTTDLAVTDDGETFSGDTVENVRQKMHDLKKSLQQKASALVKQGKRPKNVRRKLSVISGRESRFRRNTNHIISKRIVEKAKDTGKAIALEDLEGIRKSQKRFRKPQRAKLSGWSFFQLRTFVEYKAKRAGIRIKPVDPKYTSQTCAECGHCEKGNRHTQASFRCKVCGHKDHADRNAARNIRARALCQQA

SEQ ID NO: 40948 - protein, 717 aa, unknown
  TnpB Polypeptide
LVPTCHNTLYPLQGGIPRERVYDSWLILFDIPNPTRNNADTPTMKPQLATAPCVARSGVTPDGVIVPAKTLFERVEWLANITRGVAQQILVEHWNPESFNILNNGVGSDGRELPSQAAIAVRRLGWNPNTPTDVYVPDRVARCGWEQAMRLLKSAHYRENATRVIVESWPERAGFAIKHQQRRTRGEWEQLEKAETLLGVKLDKTTIRNQTRAIAKFAREYERLPTHLTELEQPPHVSQQVILSPTDKQLVSLTRVGDHRIALCVKLPLVANPQKRGGWERVVFEFTIGEHVPPNAVLKLPTLRLKNGRVLIDLAWEHPLPIPLARTGKRHRGHSRAVAVDWGVNTLLTAVTGNIDSTRAQNPIVRSDGRVYTFDGRGPALKLHRLREQTERLSTKIDHLSRLIEHTPTPRAVSVGLVAQVEQLQAERDHVSARRTNLSREIAWASACWLVDLAIAQKASVIYMEDLRSMEARGLGKRQNARCSNQVRGIVLTALRHQAAKHGITVVVVPARGTSKQCPRCLQTLKHVRAPNRLSEPGHAWAFCSHCGLSANRDHAAAQRVLSRGLAAQHSAHLDASKHWQITRVVDVPVRVTRTKRAAHRKAMGLPPKPHHGRLGKTGSTMKQSSRPNGRGSFGGVPSRRTVPATSPLGLVHRPAGPSPGSATRHVVVQSGNTFAMVPQRSRAPSKRARRAAGRGFHPMMHPTLVPRTSWRTLPVP

SEQ ID NO: 40949 - protein, 442 aa, unknown
  TnpB Polypeptide
MITISHKIELVPNNKQKNYFRKAFGCARLAYNWGLAEWQRRYKEGDKVDAYGLKKAFNAIKKEEFPFVVEVTKYATQQPFINLGKAFKKFFEDLKKGIVSYPQFKRKKDNEGSFYIGGDAVSLSDINLNSKNFKNISHNEKQKRQYLKVPNLGWVKMTERLRFIGKVNNVVISQQGNKYFASFSVQITEDEYKRTHLKACSDKANRKAGIDLGIKSALILSDGVAVDNPKPLKNNLRKIKRISRQLDKRVHARNKQERLEGKKKSNNYRKLSVRLSNAQRKVANIRRDFTQKVTTILTTHYAHIALEDLNVKGMMQNHRLAQSVSDVAFGELCRQIEYKSMLNGIKVLKADRFYPSSKTCSICGHIKQDLKLSDRTYHCSNCGAIIDRDYNASLNLLSLIIKKQIGADYPKSTPEDLTALLFRFVRNGIATSKVETGRQHKL

SEQ ID NO: 40950 - protein, 414 aa, unknown
  TnpB Polypeptide
MQLVEQHIITKSDPRFQSIDEMALASKNLWNLANYYVRQSFIFGRIYLNNKAVYHLVKTSDAYKALPRKVGNQVLIQLDMSWNAFFEAAEAFRKHPEQFTGQPRLPKYKHKTEGRNLLVFELGAIWKTHLAHREIAVSQLGWLVETKQNPKHIKQVRIVPKADHYAVEVVYQVEAKPAHVDKDLFVALDPGVSVLAALTSNKPGFSPRLVPGGPLKATNQLYNKQREHEQKHLAKGKEQRFTSRRLDQITTKRNRRVMHYLHTASRRIIDLLVEEGIGMLIIGKNPFWKQEVELGRKHNQEFVHIPHAKFIEMLTYKAELVGVTVLLTEESYTSCASFLDRDELPRYDPSQGSEQEDKPRFSGRREGRWYRVKGRAPIHSDINGCYNIGRKVFPTAFNGRGIEATAVRPRRLAV

SEQ ID NO: 40951 - protein, 393 aa, unknown
  TnpB Polypeptide
MHLTERHIIKNNEELDKLCFNSKNLYNKALYLVRQHYFKTKNYLNFFGVNRLMIESKDEDYYALPTRVSNQTLRLLDKNFKSFFALLKKKQNGKYNKPVRLPKYLNKEGRYIAVFHKSSISKAYFRKGIIKLSSLSIEIPTKKANESNLVEVRVLPRNNHHVVEVVYKVEQKEPKSDNGRYASIDLGLNNLATVSSNVVEPFIINGRPLKSINQYYSKEKARLQSHLKGNKKTSKRIKSITNIRNNKVKDYLHKSSRKIVNFLVSNKISTLIIGYNEEWKQNINLGRTNNQSFTNIPFYTFINQLDYKCKLEGINVILTEESYTSKCSFLDNETIEEHENYLGKRIKRGLFRSAEGKLINADLNGSLNILRKVVGDFSYPIEVCSTPLRVTLK

SEQ ID NO: 40952 - protein, 248 aa, Clostridiaceae sp.
MKIKFHRKIPENMIIKSATIRESASGKYYISILVEYEEKIRPVTPAEKVLGLDYSSKALYVDSESNRPDYLGFYRQTEEKLNKAQRKLSGRKKGGENRRKQRLKVARLHEKVANQRKDFLHKLSRQIANACDAVVIEDLNMRGMAQGLHLAKATNDNGFGMFKTFLAYKLAEQGKSLVVIDKWYPSSKMCHVCGEKNKELTLSDRKWQCKKCRAVLDRDVNAAINIRNEGCRILGIEERTIGRMGIAW

SEQ ID NO: 40953 - protein, 233 aa, unknown
  TnpB Polypeptide
MPNTCAIDFGIDNFAAIVCEDGSSAIYKGGAVLSSCQWFHKRRACLTGIMTKGHVLKCASSRQLTDLSYHHANFVKDQCHKISRHIINYCLGHRAGTLVLGINRLWKQRIRIGKQSNQSFVSMPIALLRELIAYKAMDAGIKVVEQEESYTSKADVTAGDYIPTYGLDDKNAIFSGKRQKRGLYRCESGTLLNADCNGAANILRKAFPDIWKATSDFSFLAAPMVVGFHQLNP

SEQ ID NO: 40954 - protein, 465 aa, Acidimicrobiaceae sp.
VASRPTIPIFSHTGEVLSRAVTFQFALDPNAQQRILFAKCAGARRFTVNHHLARVKVNLDARSAEREVLSESGDTCEPSTLSLSWSGFSFINEFNAWKNGQSVDSPVNEDGSRGLAWRHELPNDIFECASVDAARALENFSASRRGERSGAAVGFPRFQAKGKVTPSFRLRNRATPGRAPASQPIRFSDPAHLRLPKFGPVKVFGPTRKVRRMIDLGRFHIYSATLTQRAGRWTVSLTGVAAELHQAERSRTNRHADPVGVDRGIISLCVAADANGVFFESFEGVTTLKQALGKLKAANQALARTTPGSKGRQRARARLAKTHRKVVNTRRHLVHQASGTLVDRCQILVIEDLNVAGMVRNRHLTRSISDAAMGELSRQLLYKARWHGVEVRVADRFFPSSKTCSGCGEVRNDLDLSTRTYSCGACGLVIDRDLNAAINLSRWRPREHSAVTPLVPTRAALLSTA

SEQ ID NO: 40955 - protein, 277 aa, Trichormus sp.
ITFTDKKGIGNLKLIGTRDLNFYQLEQIKRVRIVRRADGYYIQFSVQLDHKYTVKPITPSQKAVGIDVGIKYFLADSQGNIEPNPQFYRKGEKQLNLLNRQKSKKYKKGQPQSQNYHKARNRYARKHLKVSRQREEFVKRVALRLIKSNDLVAYEDLNVKGMVKNRHLAKSISDAGWSKFRQWLDYFGYKYGKITIAVAPHNTSQNCSNCGQRVQKSLSTRTHICHHCGFTEDRDINAAINILQKGLSTVGHTGAYTLGEFDPLASLEQSCEVKIGL

SEQ ID NO: 40956 - protein, 403 aa, Trichormus sp.
MTQKAFKYRFYPTPEQETLLRRTMGCTRLVYNLALSARTQAWYEHQERVGYIETSAMLTSWKKQEDLQFLNDVSSVPLQQSLRHLQTAFSNFFAGRTKYPNFKKKHNGGNAEFTSSAFKFRDGQIFLAKSPTALDIRWSQQLPQGIEPSTITVKLSPSGRWTVSMLVDVEIQKLPESLTQVGVDLGITSLVALSTGEKISNPKSFKAKKAKLRKAQKALSRKQKGSNNRHKARMKVAKVHTEVSDARHDFLHKLTTRLVRENQLIAVEDLSVKNMVKNKKLAFSISDASWGELVRQLEYKCDWYGRTLIKIDRWFPSSKRCGNCGHIVEKLPLNVREWDCPKCQAHHDRDINASKNILAAGLAVSVCGANIRPDRLKSQGQLQKTRKACLERSRKGQKQKPKS

SEQ ID NO: 40957 - protein, 426 aa, Nocardia sp.
MELAKAFGCARVVFNDALTLRRHAYENGLPFITDGELSKLVVTQAKNTPGRAWLTEVSAVVLQQALADCCTAYRNFFNSLSGKRKGRKVAAPRYRSRKDNRQAIRFTRNARFTITGTGRLRLPKIGDVKVAWSRRLPSDPSSVTVIRDAAGRYFASFVADTEPEPLPESDTETGIDLGLTHLAVLSDGRKVTAPKFLRRVERKLGKLQQDLSRKQNGSKNRAKARVRVARQHARVAERRRDWHHKESIRIIRENQAVYVETLAVNGLTRTRSAKSVHDAGWSAFVAMLEYKAVKHGRYFGRIGRFEPTSQVCSACGVKDGPKPLHVREWTCQGCGVVHDRDVNAANNILAAGRADRLNACGGKIRPHSGVARPGETGSHRSAACAVQEKIPHLQMAEHVKTSNCSLPEQLTTVDGKSRPPLDPDRA

SEQ ID NO: 40958 - protein, 467 aa, Microcoleus sp.
MEMFLTAFAPVFRLAATETVNQLLACSEFNKSKWNTYLQATYSINKRHANGIISYSKGKVDSAKQHRSLHIKTLTGKTKSIEVWLPKAEKKLKTANKFYSKKNWPGSTVGCNFPLSCSLKHKGTNWQNLRFQIHNKKRKLFLIQNKLAILKVAPIKVFVPHNQIFLVGSKDETLGNGIAQWNGSTLKIRTPACLEESFGKNVSAEIGNFDRNINRLPTCGAKTWHLFKKDHKWKVAVSFTPSPVESQSFDRAYGCIGIDMNPGSIGWACIDIDGNLKSSCQIALQMGLPNGAQQAQIVDACLQLVTLALLYQCPIVCEELDFSDKKQRLGEKSRKYARMLSSWAYNEFYKQLNAILANRGIELITVNPAFTSIIGLFKYLKMYGLASDESAALVIARRGMRLSEKLPDSITAYVEVNSDKHVWSQWAELNRKTKQSGMVNRRHDYYIVSNWSFLVNPELSGREAFAH

SEQ ID NO: 40959 - protein, 380 aa, Photobacterium sp.
MLRATKVRIYPTQEQAEFLIAQFGAVRFAYNKALHLKTHMYRKHGVKLNTKKDIKPLLSVAKKSRKYHWLKQYDSIALQQSVINLHQAFDNFFNPKLKAKYPQFKRKHGKQSSYHCVGVKVLDGAIKLPKMKPIEANIHREIVGTVKSITLSLSKTGKFYASILVDDDIDAPALINTVSKVTGIDLGLSHFAIESNGKKTANPRYLKRAEKNLKRKQRQLSRKKKGSANRAKARLLVAKCHEKVANARADFQHKLSRTLVDKNHAVIVETLKSANMMKNHKLAKYIVDASWHSFVIKLEYKLKEKGKHLVKVDQWYASSKTCHCCGYKMEEMPLSVRKWDCPSCGTTDIDRDLNAALNLRDKGILELKAAGRSFLLMEAA

SEQ ID NO: 40960 - protein, 274 aa, Photobacterium sp.
MLRATKVRIYPTQEQADFLIAQFGAVRFAYNKALHLKSHMYRKHGKQSSYHCVGVKVLDGAIKLPKMKPIKANIHREIIGTVKSITLSLSKTGKFYASILVDDDIEAPALIHTVSKVTGIDLGLTHFAIESNGRKTANPRYLKRAEKNLKRKQRQLSRKKKGSANRAKARLLVAKCHEKVANARADFQHKLSRTLVDKNHAVIVETLKSANMMKNHKLAKHIADASWHSFVVKLEYKLKEKGKHLVKVDQWYASSKTCHCCGYKMEEMPLSVRK

SEQ ID NO: 40961 - protein, 400 aa, unknown
  TnpB Polypeptide
MGRGGIVRRAYVFRLRPTARQHAALAACVDAHRELYNAALQERRDAWSHSRTRIYYGDQSAQLTAIRAARPDMDVWSFSSQQATLRRLNKAFAGFFRRVKTAKPGVKPGFPRFKGKARFDSVEWPKDGDGARWLREQKRVYLQGIGQVKVHLHRQVVGRGKTIQVKRCGRHWLLVLSCEDVPTNPLPATGRQAGIDVGIASFATTSEGECVDNPRWGRAADDRLTAAQQRLQCAKRRSKNRDRKRETVAARHRKIANQRKDFHHKQARQLVARFDLLVVEDLKIANMLRRAKVPDPDNPKQFLKNGARAKSGLNRSISDAGWGRFVSILRAKAEEAGRIWIEVDPRHTSDGCEKCGYAAAENRVTQAEFVCQRCSHRAQADEHAARNILRAGLALRAQAA

SEQ ID NO: 40962 - protein, 405 aa, Halomonas sp.
MTTVTRILHATSPGLSRLLAMCRTMGFIRADLWRRYGALGTVGKSASAVRKEITQGGWHTDLPLDGTVRAESTKDVINDILTYKAAAKHKVRRAVAARTTDETERKRLYTLLKQDKWLEDTYLHRMMRKHFRHGKSQCSNQFVVRSDKHSERIIDGQLVITLHLSKKVGGSITLYTTTSGKNVSLEKKNLRVIVREGKVEIHYAYEKPPGRPHGDKVMGVDKGYTEAFTDSQGQHHGESFGQVLTAYSHQVSATGKARNRLHALEKKHRAAGRIAKAERIRANNLGKKKQVARRQRTQQHLRTIAYQAAHTIMDEAALLASEDLTQPIAGKVQWRDYNRRMSHWAKGGGLANAARNVLARLDDPDITRYMPHGEVKRILLGRFSGATERQEARVVCQHGMSTGCG

SEQ ID NO: 40963 - protein, 390 aa, Bacillus sp.
MRKLKKAYKIEISPTQEQKSKIHQTIGVSRFIYNFYISHNKEVYEKEGRFVSGMDFSKWLNNEYIPNNEDKAWRKSVSSKSTKQAIMNGEKAFKRFFTGVSGFPRFKKKKNQDVKCYFPKNNKTDWTIERYRVKIPTLGFVRLKEYGYIPKNAIVKSGTVSQKAGRYYVSILCEVEETKVKPKLEETGLGIDLGIKDFAICSTGEVHENINKTDKVRKLERKLKREQRSLSQKYENLKKRGETSVTNKRANIDKNILRIQKLHARLSNIRLEYIKAVVNTLVKTKPTYITIEDLNVKGMMKNKHLSKAVAGQCFYTFQTWLLAKCKEYCIELRQVDRFYPSSKLCSCCGHKKVDLKLSDRVYTCECGNEMDRDLNACINLLQAKEYTILT

SEQ ID NO: 40964 - protein, 522 aa, unknown
  TnpB Polypeptide
MFVSLQFKLELQKEYKEKLIQLMRKQSSAIRIAYNMLKELEKEKTKNPHAQIYQRLRQLFPELPTKYIDSAIYKAKQYPTDKPVVFGGKRLFEKLCKNHLTGKLRERLRKQWRELRQGTLISIGSKADKGNRLARFEDLNGQLHLRINTGNRGFIYAKVLREPSNSKDKWITFMAMLLESWQTQSYFPYTVELKLRDGEVYGSVSFELPIPEVRYTKENGVIAVDTNASPIHLAIAEVSKTGELLSYQTISLHNLLGLSQNSKDHQEWILAHQIVDLAIQRNKAIVIENLKKLKRGMRGDGKAKLRKILHQWNAKKFLQKLKRVAMLKGVEVIEVNPAYTSVIGMLKYAPQLNIDKDIAGAYVIGRRALGFREDMPENYERLLKDKAYLGFALKRYEEREKELRELIEKESNEYKRNALKSELRSVEDAKKLLTNLLQSLQSEPSSCEGAYGRNPERGRVAKTTLQSAWLVLKVALLFPILGRVLPRDLSPLKPLLVEGVWYRVRKGLVPLEAGGTVPIRDF

SEQ ID NO: 40965 - protein, 310 aa, Lyngbya sp.
LKRSFGSEIQQLNNLPKAKKEFPILSKVPSQVLQQAIKQLHKGWEYFQKRGFGFPRFKKYGQFKSLLFPQFKENPVTNLHIKLPKIGAIPINLHRPIPKGFAVKQVRILRKADFWYASISLQCEVSVPDPTTHGHPIGVDVGLKKFLATSDGVLVHPPKFFKELQSKLKSLQRRLSRKQKRSKNYEKQRLKVARLHHQIDNTRKDFHYKQAHALCDAGDMVFMEDLDYRIMAKGMFGKQTLDAAFGQFRAIVKYVCWKRGKFFAQVDARGTSQECPECGGEVKKDLSVRIHDCPPKWIQNRPRYSSGSKY

SEQ ID NO: 40966 - protein, 409 aa, Lyngbya sp.
MRVVERHIIKSSNKYWKEIDELAFKSKNLYNLANYYCRQRFFETGKSLSLTDLYHASKSSEAYRALPTKVSKQIIKRVTSTWRGYFQSHKEWRKHPNKFFAEPKIPKYKDKQKGRNVVIYSNESVYKPALKNGICHLSMSNIKIPTKVEKVVEVRIVPATCCYLIEIVYERPEEQSVNSDYVAGIDLGIDRLIALSTNKPGVRPLLINGKPIKSVNQHYNKLKAKYQSYLTGARRTSNKIESLTYYRHRFVDNYLHQTSRIVVNYLVEHNIKTLVIGKNDNWKQKVNIGKRNNQQFTQIPHSKLVQQLTYKCQLVEVKVIETEESYTSKTSALDLEEPCKQQAYKGKRVKRGLFKSSCGKVINADINGSLQIIRKYFPEAFTVEEIVSCAVQPLLVNPVRRTKQLFSTV

SEQ ID NO: 40967 - protein, 389 aa, unknown
  TnpB Polypeptide
MIMQLRTYKYRIYPSSKQKVRLINNFKACKSAYNELLALKKDAYKFGKVSISKYDSDAFLKNKFTDIHSQVKQNVSDRNDKAFKNFFRRVKDPKEKQKGFPRFKSRVNSITFPQSGFKLLSDKRLKLSKIGSVPIVLHRVPKGIIKTLTIKVNKANQWFVFFSCEQTDIILKHPSKEEIGIDVGLENFATFSNKEVIENPRFLIKSERKLAKFQRRFSKKKKGSVNRRKAKHVLAKQHLKVANQREDFLHKLSRTLTLNYSKIAVEKLNIKNMLKNHNLARSISDASWNTFIQFLSYKAVTCGGQVIQVDARNTSKKCSNCGTIAEMPLSKRKFLCPNCGLSLHRDLNASINIQSRAGLVQTYTPVDDYVRPSFEKAIVCEAGTINNNS

SEQ ID NO: 40968 - protein, 459 aa, unknown
  TnpB Polypeptide
MAKAHKTIKQKLCYKSAHRSYFAMTRSLFNQVASFYFEVIVAHPALLELSSKETLTALETLTHATRDHPHPVMPLNRSVCATIPAVFRRAAIHAALGSARSFTTRLEQWRKQKQKAQNHGKKYSMRPPVPPRRWNTSVTLYSGQWKERTQQSIMLKLWTGSSWAWIKCGIQGLELPPEWERGSAQLVRHGVHWWLHTPCEHAFPTPAKAEQQVTTNAQTRLCSVDLNITHNLAVCTILTVEGTVVATRFIKGGRQLHGLRKRQLGRIARNRSKTGIIVEGEQDNAALWEKIRSLDEESAHLVSHRIVEFAQHYQASMLVFEHLGHFKPCKGTYSRRGNEKRSYWLRGKIFTYSKYKAWNEGIVTCRVSPRNTSRDCARCGRLVVRYDAGKPAEGYTPGAPLVYCPQCHMRGNADRNASIVIGKRLLARYQQSLSQEKPHAPLATERPVKTGGVRRSQDA

SEQ ID NO: 40969 - protein, 402 aa, Escherichia sp.
VKRLQAFKFQLRPGDQQECEMRRFAGACRFVFNRALALQNENHEAGNKYIPYGKMASWLVEWKNATETQWLKDSPSQPLQQSLKDLERAYKNFFRKRAAFPRFKKRGQNDAFRYPQGVKLDQENSRIFLPKLGWMRYRNSRQVTGVVKNVTVSQSCGKWYISIQTESEVSTPVHPSASMVGLDAGVAKLATLSDGTVFEPVNSFQKNQKTLARLQRQLSRKVKFSNNGQKQKRKIQRLHSCIANIRRDYLHKVTTAVSKNHAMIVIEDLKVSNMSKSAAGTVSQPGRNVRAKSGLNRSILDQGWYEMRRQLEYKQLWRGGQVLAVPPAYTSQRCACCGHTAKENRLSQSQFRCQVCGYTANADVNGARNILAAGHAVLACGEMVQSGRSLKQEPTEMIQATA

SEQ ID NO: 40970 - protein, 373 aa, unknown
  TnpB Polypeptide
MPKIQTVPHNRLFPTKEQTRKLEDTLETCRLVYNSLVNDRAFQYETAKASVGRYEQQKMFPQWSKDFPEVKAVHSQVLQNVAVRVDLAFRAFFRRVKAGETPGFPRLKGKGQYDSITYPQSGFKIGDSTISVSMFGKPVQIKAKLHKPVVGTVKTCTVRRYGSKWFVCFSVEQEDDFLPKSTDAIGLDAGLNSFLALSNGEFVANPRFFRRDEKALAKAGRKQAKTKKRSKERRKANKVLARIHERVRNRRHDFVHQNARRIVNRFGVIAVEKLNVKGMLGNHCLAKSISDAAWSMFRTILTSKAESAGRDAKGAALREVIAVNPAYTSQDCHKCGFRGKKKLSERWHLCPMCRASLDRDTNAAINILALATS

SEQ ID NO: 40971 - protein, 374 aa, unknown
  TnpB Polypeptide
MAKFNAACNALSQRAWDTQTFRAFDLHKIAYHQTRADFGLPSQLTVRAIAKVCDTYKTDRSQLHTFGPRGAVVFDARCFAMKGVSSAELTTTQGRHSFSLAHGGKQREQLSQGTTGEADLLFADLLFVDGAYYLSIAVKFPDPPKADVSGGVLGVDLGIVELATDSEGQSYSGEPVKAVRCRVREHRRQVQKKKTRSAFKRLQKVNRRASRFVRDVNHCISKSLVKKASVLQKALSLLQKALSLEDLSGIREHSNGFNKTIFNKTMRWQMGNWAFADLAAKIVYKAAEVGIPTITVSRPFVDPRDTSKTCSACGHCERGNRKSQASFQCLSCFQCLSCGLSMNADANAARNIEARGELSAALMFHPTSPCAANG

SEQ ID NO: 40972 - protein, 467 aa, Streptomyces sp.
VTDSAIDPAVRVTGAEAKRVKREVLGIADRRKHHKRRATPLKSRDKEAGTQQRVYRFRFYPSPVQAAQLASTFGACRWVYNEGLALRAGAWEKHRVSVGFAETCRALTGWRRAEGTSWLGEVSSTVLQQALRHLEGAFSRFFRGSAKYPQRKRKHRSRDSATYVRTGFRWMEDPERPGTGLVTLAKQSEPLDVRWSRALPAGTLPVKLTITRDRAGRFFLSVLMEERIDPLPPVFLPGTTEPKAAGLDLGLASLVTLDDGTKLDHPRLLKKYEDELARLQRGLHRKRRGSKNRDKARLRIARLYALMGDVRRDMLDQFTTHLVRENQVLVVEDLSIVTLLCPAKGKGRRRKARLSRSILDAAWGELLRQLRYKCAWYGRTLVIVDRFFPSTRRCSSCHTKGPRLDVSVRAWKCAECDVVHDRDVNAAVNLRDEGMRLYWLAASALPPGRVPPPVIKASELEDCLLTA

SEQ ID NO: 40973 - protein, 398 aa, unknown
  TnpB Polypeptide
MKTIYKTYKFRMYPNIKQQELLHKYFGCVRFVYNYFLNERKEQYQETQKSDNYYEQAKKLTLLKKQDEYSWLKEINSQTLQHSLRHLESAYLNFFRGNAKFPKFKSKKDRNSFVVPQFCSINGNSISLPKFKSNIKIKKHCEVNGNVHSMTISKDCDGKYYVAILTEQQYEPIEKTNKSVGIDLGLKDFVITSDGKVYKNHRYTKKYERKLIKAQKYLSRKRKDSNSYENQRRKVVKIHKKIANSRNDMLHKVSTELVRNYDIICCENLNVKGMIKNHKLAKHIADVSWGTFVNFLEYKCSRENKTLVKINRYFPSSQTCSECGYINQNTKDLSVREWNCPKCGKHHNRDLNASINILREGLKTLSAGTVDYTSGDDVRLACKQLSVKLEAHKSLVCE

SEQ ID NO: 40974 - protein, 399 aa, unknown
  TnpB Polypeptide
MLINRAYKYRIYPTKEQTILLEKHFGCCRFIFNHFLALRKQAYLENKESLSYLKLSAKLTKLKKQPAYLWLKEVNSQSLQQTLRNLDIAYNNFFAKRGKFPRFKSKKDSKNSFCVPQFLSIKKDKLYIPKFKEGIKFKRHRKFDGKICFATISKTCRNKFFISIIVEEDYTPKTKALNSIGIDVGIKDLVITSDGVKFSNPRFLEKNQKKIKYKQRQLSKKVKGSKSRDKQRLKLNMYHEKVKNCRSDYIHKITSKLVNENQVIIAENLSVIGMMKNHYLANSIASVSWGELFRQLDYKCKWNNRTFYQIDRFYPSSKTCNNCGFINQDLTLADREWECPSCHTLIDRDVNAAMNILKQGLNDLTNLGLGAKSKSKQKRVEAFSLEKSVKPEAYVFRRG

SEQ ID NO: 40975 - protein, 275 aa, Ruminococcus sp.
MGIDEGPSTIAAVSESSVFLEELSPKCKDYNKQIASLQRKIDKSTRVTNSDRFNEDGTAKKKTKSLPPWKFSKTCQRNKAKVRELYRRKTEYTKCQHETLLNSMIKDSSIFINEPMDFKALAKKARETKRRDKASVIKNADGTEKTVYKYKRKKRFGKSITDRSPSFLIARLKQKCEQYGMIYLETDKWKYKASQYNHVLDDYIKTALSERFKSIGAITVQRDLYSAFLQSCMNTVEKPDRKKCIQLFDNFVKMQNDLITEMKASGKSYPACFGF

SEQ ID NO: 40976 - protein, 434 aa, unknown
  TnpB Polypeptide
LLEAVKVALAPSLAQERLLASHAGAARFAFNAGLAHVKAGLDAGEKPEWHFFSIVNWWNASKNELAVDADGKPWWSENSKEAYCSGLRSLASALSNWSKSRKGDRKGRKVGFPKFKSKAGSAPRFAYTTGFKLIDGDPKALKLPRIGRVHCMEDVAKRVGDGRVLRMTVSQRAGRWYASLTVEREDKPVAKPLKGGAVGVDLGVKTLATLSDGTVIENHRYLRKSERKLKKAQQALSRKTKGSNRRAKAKAKVARIHAHVANQRLDGLHKFTTWLSRKYSDISIEDLHVAGMVKNHSLAKHIADAAFGEFRRQLEYKAARTGARLRVVDRWFASSKTCSGCGSVKAKLSLSERTYRCDSCGLVLDRDFNAAINIQVAGSAPETLNAHGATVRRCGGNSGRATRVAVKCEPSVRRPGAVSLGAGDRKGALQTSVN

SEQ ID NO: 40977 - protein, 481 aa, unknown
  TnpB Polypeptide
MSCWLAGGVGVCCVAGLLSSPILCYGKFNCWQVSENGFGGDCQMGSYEAVKVRLDPAPRQERLMVSHAGAARFAYNVGLAHVKEALDSGEPADWSHYALRRWWNANKDELAVNQTTGEVWWNQNSKEAYSGAFRDLAQGFSNWSKSRKGQRKGKRVGFPKFKSKNTTMRFAYSTGFTAPTASDPYGLKLPRIGRVHCMENVHKRVNGAHLVRITVSRRAGCWYASLTVERELTAPATVPASAPKGGVVGVDLGVKNLATLSDGTVIPNLRALGTRLKALRKAQKALSRKVRGSVRREKAKGRVARLYARVADARADAMNKATTMIAGSYSVVCVEDLNVAGMVKNRSLSRSVSDAALGEFRRQLEYKTARSGAALRVVDRWYPSSKTCSNCGIVKAKLPLSERMFNCDACGASIDRDLNAAINIRVAGSAPETLNARGGDARRTDLVSGNADPCEARTKQSPTGGVRLGAGLGNEAMQFRR

SEQ ID NO: 40978 - protein, 493 aa, unknown
  TnpB Polypeptide
MFINQKNILIRRIHKLSNSLWYPINLNNNVFNFNEYNKPIHNLNKFYNLNDSWFDNEFLLNSDIKNNYEPNNSQIPTCKITKTIKVVLKPNNNQIKLINEYFDIYRYFYNRTIDFIEHKKQYNYKIVKRDFKTVKFTFDESTKKYNLSDNDMKKFIIPDWVVNKNIPKRIISNSIIDCCNAYKSNLSKLKNKSITKFKMNYKTKKDNINCLNITKDCFSKDNSLFSSFLGKGKNKLKGFYYTTKHKWFLLTKNEYTGNPKSRIKINIDNININQDCRLNLINNKYILFIPITVDSNKCINDGIISLDSGIKTFQTGFSNKNYCIKIGNEPINKLNKYKNKCDRLKSLIDTITDKSIKNKLQEKLKITNLTIRNKIDDLHWKTINYLTTTHSHIILCDFQTKSISSKAYKTTNRNLYLLSHYKFKLRLQYKCKANGCKLDIVNESYTSKLCSKCGYCKDNLKLSRVYKCNECKSVIDRDINGARNIYINYLGSE

SEQ ID NO: 40979 - protein, 389 aa, unknown
  TnpB Polypeptide
MIRAYKYRFYPNQKQSELLENTLGLCRRLYNAALQQRIYAHRNGKTLHYTNQQNELPTLKRGMEAYQSVHSLVLQDTLHRLDRAFKAFFNRANRKRRKEKIKAGFPRFKSRRRFNSFTYTQSGSKLLANGHIYLSKIGRLRVFRHREPRGKVKTITVKRDRVGDWFVVVVTEMPDIHPRKVNTAIGIDLGLKNLVTVSSGETVDPPRLLRRSENRIKRAQRNLSRRMKGSRNREKARIRLAKLHRKVSRQRDDFLHKTSAWLVRMADLLVFENLNITEMVKNHALAKSIGDASWGKLVQYTSYKAANAGKMVELVDPRGTTQKCSRCGTTVRKSLSERVHQCPTCGLLLDRDLNAARNILNRRTVGWGTAESTPVEIVPIPPSGGEHSR

SEQ ID NO: 40980 - protein, 392 aa, Streptomyces sp.
VGQAQALAEMLQDHCSLYNGALQERRDAYRHVSRTTVRYGDQSAQLKEIRAFDPERQGRWSFSSQQATLRRLDKAFAAFFRRIKSGDTPGYPRFRGLNWFDTVEFPKDGDGCRWNSTPHDPVTRVRFQGVGHVRVNQHRVVVGKIKTVSVKREGRKWFVVLIAERERPEPLPVTGSVVGIDLGIANFLADSGGEFVPNPRHGRNAAAKLEAAQRALTRFPRICRGKRTRNHERAVEKVSKLHGKIRRQRLDHAHKTALWLVRSHDFIAHEDLKIRNMVRTPAPKPDPDQLGLFLPNGAAAKAGLNKSINDAGWGVFLTILTNKAESAGREVIAVDPRNTSRACPECGHIAKENRPTQETFHCVACGHMAHADTVGAINVLRAGLARRNANRA

SEQ ID NO: 40981 - protein, 465 aa, unknown
  TnpB Polypeptide
MDNSLLAVRDINHNYIVIERGKKMRTVSSYGVELRKQNIPIRQTLDIYRSAVSCLIEIYARTWDELAVITEPKKRFNTAEHLVHTTKKNEARFDFDLRFPKMPSYLRRAAIQHALGSVSSYKTRLKLWEKMDQKGGTPKLVCGNHAMPVFYRDVMYREDTEEKDGAYLKLYDGHDWKWFRVSLSHTDMEYLRKNWAGKRAAAPVLEKRYRKYFLCFSYTEEVPLTKAPVKEQIICSVDLGINTDAVCTIMRPDGTVLGRKFIDFPSEKDRMYRVLGRISRFQREHGSVQVKSRWAYAKRLNTELGRKVAGAVTGYAEENHADVIVFEYLETKGKISGRKKQKLHLWRKRDIQKRCEHQAHRRGMRISRICAWNTSRLACDGSGTVVRDPGNHSLCTFQNGKRYNCDLSASYNIGARYFIRELLKPLPATERSLLEAKVPSVKRRISCVYADLRELFSEMELLRAA

SEQ ID NO: 40982 - protein, 313 aa, unknown
  TnpB Polypeptide
LGAAFKNFFARIKEKRKSEKVGYPTFKSKKRGKRSFRLNNDKCKVDGHSFYVPRLGWVNMAEKLRFQGKIMGAVISKVADWWRVSIAVDVELPAPVQFQKPSVGVDLGISTLATLSDGTRFENQEPLRTDLHKLKRLHRALSRRKHGSHRWWKGKRQLARCYCRIANKRTDVLHKMTTQIAKTYCLIGVENLHVKGMVKNRHLALSIADVSMGSTLRQLAYKSAWYGGQVVQVGRFYASSKTCAECGTVNHHLRLSERTWVCHGCSTSHDRDWNASKNIEFEALRLVGAGPLGRPVVATSGVIARGQDVRPGC

SEQ ID NO: 40983 - protein, 434 aa, Anaerovibrio sp.
MMIRSLRIKLLPNNKQRTKLFQFAGASRFAYNWALDRQMANYYGGRKLQSDCELRREFTKFRNSGEVPWLLEVSNNVTKQAIKDLCIAYRNFFRKQKKAGYVKFSPKKLAHCASIGKKLTVYDMNGHPKFRSKKNGDFSFYQDNMKIQFMNTHVKLESIADSKRRNRQRANWVRLAEKGRIPIDGKYTNPRIIFDGENWWLSIGIRIARKIKPMRGLKFSCKQLKQLFSGGIGIDLGIKDLAITSDSDKVRNINKTNVIKKLKKKRRRLQRQVSRKYQMNKKGESYCKTSNLVKSEKRLLRINHRLANIRGNHVHQATAAIIKRKPSFICLEDLNVQGMMKNKHLAEKVQEQNFYEFRRQIEYKAHWARVKVVIADRWYPSSKTCIGCGYVKKDLKLSDRTYICPHCGNVIDRDFQAALNLKRYGDAKISKSAS

SEQ ID NO: 40984 - protein, 367 aa, unknown
  TnpB Polypeptide
MIAGRAVLIKLPRDKCDVDYIKRLMALTNLVYRGYEVWVPDMPRTIEHQLYGFRDFKESLVFGVTPKRWFARTWMPLKTLRVYGDGSMKGDRKAPVVLDFRGSVIRLRQVCKNESGYSIELPMPSWVVDRIREGGDVKYAMIGLKNDKPYLALVAERVVKPYQPSGYRLVVDVNAWNNGVAYGIINPNNKIAEYSTLRPNLRLIDTWYHRAEKLSKELGKLKRLGLGSTPEAKRLRREIKALRRKVYAYLRDFAQKRARELALKALRLRAEVLIDDMIEESRRELIEEKIPRGLRKVYLAETRRFVKLLITQLQWYGVPYRFERLPSTICPVCQHELTQEEGRVMVCNNCGFKAPRDKVPMHWAVRL

SEQ ID NO: 40985 - protein, 465 aa, unknown
  TnpB Polypeptide
MSAQQIIKTVVQYSCPLMNNERSSLNETGKVFNGARNYFYSRFSSVKSLVKVTKFYDTRNSLMKENLKNLIKIPARYWKLALANVLSNFKTLLENIRLKIRKASRNNINLNEEDKHYINTVIKNVNYLTDVLMLKKQNSYLYENFKVNFKRLNSLIRRYYRRYKGKVPYSVKKNFLILDSDLYKYKKGKIKISTLTKRKRVIVELRDEREFKGNLILKWNEKLAIYGTVKTPAEYKAIPKNPVAIDKGYNTLITTDSGRKYGTEYKFINTELIEKQIKKNSQRQRIFNYLKKLEKKGKLEKIDNIKKYNLGNKKQNRLSNRIKERSKSYINREVNKFFENEKPSEIIKEDLTWEKIGSKKRGKGFRAKISRWEKGYLDSQIEWKALQRNIKITNVNPAYTSQICHLCKNFGKRNGEIFECEHCNTKYDADINAARNIKLRKDIKKITLYTSATNVKTYYENIKKL

SEQ ID NO: 40986 - protein, 417 aa, unknown
  TnpB Polypeptide
MVNQVTRAYVVSVRNHQQVRDDLDSLGVAASKIWNIARWTCDRIWDETGTIPDDDVLKAYLKNHERYADLNAQSSQAILEELAEAFDSWYTLRGSGDEKANPPGYRKHGDEHPRSTVTFKEDGFKHDPDHNQIRLSKGRNLKDGKQDFILCEYGADPDVAVQNIQQIRAVWTGSEWELHIVCNVEIDDPEPPGDRVAGIDLGICNFAAVAVRDDALLYPGGALKEDDYYFQKERAKCNDSFSRQAQRLDRKRDKRRTHFFHAVSTDIVGECAARNVGAIAVGDLTGIREDADWGDHGNLDLHGWAFDRFTEMLEYKAAERGISVERVDERDTSKSCASCGTTDDSQRVERGLYVCDECGLVANADVNGADNIRQKVLPSLALDGGDRDNGWMAQPAVRLFDKSTGRVAAQEQVTREP

SEQ ID NO: 40987 - protein, 353 aa, Rhodococcus sp.
MLARSFGCARGVFNDALRARQDAYAAGVTLSDTDVQKQVVTAAKKTPPRAWLAEVASVALVQACQDARRAYRNWFDSMSGKRKGRKVAAPRFKSRKDNRQAIRLTRNGFSLRPNRKLYIAKVGELEVAWSRELPSEPSSVSIIKDAAGRYFASFVVETTDVLLPECDAEVGIDLGLTTFAVLSDGKVIESPKFFRRAERTLRKTQQSLSRKQKGSKNRVKARIRVARAHATVAGARKDWAHKQSTVIIRENQAVFVEDLCVTGLARTRLAKSVHDAGWAMFTRLLEEKAARYGRTFVKVDRFYRRVSCARCAGRGTARNRFRFGSGSAQRAGWSTTATSTLRRMSTRPDVRSG

SEQ ID NO: 40988 - protein, 176 aa, Helicobacter sp.
LHKISDEITNQYYLIGVETLNIKGLMRTYHSKNLANASWGKFLAMLEYKAQRKGKTLLSIDKFFPSSQLCSYCGVNTGKKHEGITKFTCHHCQTTHHRDYNASINIRNYALGMLDERHKIKTDKSRVGIIRTDYAHYTNERIKACGASSNGVISKYGNILDLASYGVMKQEKAQSL

SEQ ID NO: 40989 - protein, 452 aa, unknown
  TnpB Polypeptide
MSWLVKRTNTFTVRPLSDSGEQLLRDLLDASAALWNEVNYERLMRYNDEEGYKSEDTFEADTGHLEGKYKGVLGAATAQQVIRTNTEAWKSFFRLKEQYYDPEDTTITDHPEPPGFRGNSDEGRELRTAIRNDTYTIEQGNRSRIEILVGQELKNEYGLGYRERLQLELCGQVAWADWEKQGRLNLWYDEIEETFRASQPVTVPDGKRETPLADETAALDIGANNLVACTTTTGQQYLYEGRELFERFRETTRRIAEVQSKLPEKCHSSKRIQRLYRKRTRRRDHAQEALCRDLLERLFTEGVDTLYVGDLTDILESHWSVEINAKIHSFWAFRKFIDRLAQTAEEYGIDIEVQLESWTSQKCPNCGSTCRTTRHKDTLTCSCGFEGHADLTASKTFLEQQITDSVRLMAQPVRFEWDDHVWSELPRSHRPKEQRTDPSTVQYSGNIASGNT

SEQ ID NO: 40990 - protein, 418 aa, unknown
  TnpB Polypeptide
VVVVRNIQVKLDVPEDDYSVLDETFEQFRYAAQYVANYGWADDPTEIVIDQGDLNAATYDDVRGDTNLHSNHVQSARSLAADALISCQNQLFEPGKTASKPTFRGNVVVYGTRTITYNDEHYTLATVDGRVRAEYVTPEDDKDTPFECYWYNDEWERREATLHKRDGDYYLHVAVAKEPDTEASTVENRAVLGVDLNVDGSLAVTSTGVFLGNADYLNHKRNEYERRRGSLQQTGTRSAHLTIQNIGDTFARWSDDYLHRVSKAIVQEARRHDCSAIAFENLENIRERISNASKFQQWAFRTIQEYTEYKAKEYGILVETVDPAYTSQRCSYSECGFTHEDNRHSDEFECLQCGKELHADYNAARNIRWRLVQHWLKSGAGRANCQVALKSGMLNANGEFTPAASIGQSGNPLASPPL

SEQ ID NO: 40991 - protein, 295 aa, unknown
  TnpB Polypeptide
VLPDETAGTPIGDYLLNEDFEFRMSTLQYDRFKDEFYLHARMKRATEDGEDTRSNSDTQNENPTVLGVDLNVDSSFAVTSTGAFIESADYLNHRRREFEKTRVNLQETGTRSAHLTIQQMNDREHRWIQDVLHTVANEILREARRVDATRVAFENLTGIRDRMVHAKRFHAWAFRQLYEYVEYKGEAEGVAVEQVSPAYTSQRCSKCGCTLEENRASKHEFESKKCGYELNADYNASKNIARKLAKRLHPGQKSSGGGATYQLALASGVLNLNGEFHDTGPAAAEGKSTDKPHSQ

SEQ ID NO: 40992 - protein, 493 aa, unknown
  TnpB Polypeptide
MTGLVSEIRGISAYATYVVRNDVKLADGLAQASAIQPAATGRQAGIKMPDFLATGRTGRSRKERLLRYNVVTSYRSWQERVKAVNGESSKYVSQGWKRTMNATPPSYGEDYINLGATDYNYALVENDPFDDGEIILKMVIQGKWYRLFFDFDNQRFTEGKVTLPVVKVEDGKPVFIFSVVTDNPVIQFSSEYTIGVDVGISDYATVVVRNTKTGKITRQTTLSQRVHSLWNSVRASEKQVKQLREKARSLSLYDRQGRMAALDEADLHRKAASRKKRELAILAAQEIAYLSHFFDNAVVAVEDLSWISNTMQNGYWNRGAFVQWLTHYVSQNGGWVVTVSAFNTSQVCHKCGSEVTHPKHKVSQCAKHGIMDRDVNAAENIAARAVPKVEKARKTKAKNPQLQEKQTPLKTPVARCSLKYPGRDRTKHAPTPKRKKKCQGVKTFSSPARAQATYLGARVLADCNTYCGGVTETSKAAIKQGNMTYICRLRDLN

SEQ ID NO: 40993 - protein, 391 aa, unknown
  TnpB Polypeptide
VKRTYKFRIYPTKNQERSLIRWINICRIFYNDCLTERRDAWKTCHKSITYYDQAKQLPDIKMFDDDLRYVHSQVIQDVLKRVDKAYQNFYRRVRNGDRKPGFPRYKGKDRYDSFTYPQNGFKIKDGGLILSKIGGIKIKQHREIEGDIKTCTIKRDVDLWYACFSVELPDTPKKEKIESVVGIDLGLKSIITTSDGEKIDPQKHLRKSEEKLNREQRKLSRKKRGGANRTKQKRIVGRVHRKIRNQRADFNHKLSRKIVDNFDLIAFEDLRIKNMLKNHHLAKSIADAGWYQLQGFTTHKAEGAGKYTILVDPKGTSIECNVCGYRVEKTLATRVHECPECGLIEDRDINAARNILKRGYDCLPQELREVTPVEMFVGTSVKQEAPCNSWE

SEQ ID NO: 40994 - protein, 410 aa, unknown
  TnpB Polypeptide
MIRSSKSTLKFSNKNKLDKIDFFIEEYKRVSKIFIDKLLDLEKVPTLLPKELTSDVETWLSARTIQCLGKQTSGIVRGTKVKQQRRLFIINKFKEQGKFKKARKLQKIYNNINQNKPNIENLECELDERFVKIDSDNKTSFDIWLTLTSLGNKLKIGIPIKKTKHFNKILKNGKLKKGIRLSKNEITFIFDLEEPKKVETGNVVGIDIGKTDLFYCSNGIKSKEDNHGYSLDKIINKISEKKRGSVNFRKSQTHRKNFVNWSINQLNLNNVKQINIENIKNLRKGFRTSRKLSHWNYPQILDKLEDRCNLLGVQVNRLNPTYTSQRCNKCGWVRKSNRTKKKFRCGTCSYECDSDYNASVNLSFNLSLIGEQERLKQNNRTGFYWKVLDKESIVPCTQKTNNIDFCNERQ

SEQ ID NO: 40995 - protein, 411 aa, unknown
  TnpB Polypeptide
MDVKCFETKIIENKLKNNQYNKLKEIYKQAKYLANDIIGSDDIFAYDTKIKQVKVQWTDKDGVEQSEFRTIEDLNAQVKQSILTGIITDICNLAKAKKKGLKIGKLKFKKEIVLLNFKQYKGNWYIKSGNNQLHLAGLGKIKVSGLDQLPKNVTEFGPAKLIRKPSGYYVQITCYSNKPELPQIKEEINSTNIIGIDMGIKDHIVLSNGEKYNFNYDIKKIQKSHQELSRKVKGSKNRYKQLWRLKKKYEELMNKKVNDTNQFVSDLTKRFKLICVQDENIRGWKSGLFGKQVHGSILGRIKSKLNKLSTTLIVPMNKPTTKLCPKCEKLNILSLSDRTYECSCGFKEDRDIKSARTIVCMALNNYVPTERREFTPVEILTSGLTDKYELLFSEAKLELLKQEAHESLAHG

SEQ ID NO: 40996 - protein, 341 aa, Calothrix sp.
MWGKHLNCAKLQSHIAKLRKRNQFWQLVGSQAVQDICQRIKKAYQLFFKHNKKGVKPPGFKKVKKYKSFTLKQAGYKFLGGNRVKIGSRVYQFWKSREIEGTVKTLAIKRTPLGELFMVLVVEDVSPEVEVKTGRIAGFDFGLKTFLTCFSSGDATRTGGTTIESPQFFKQSLNAIKKASSQHSKKLKGSSNRERARKNLVRKYEDISHRRRDWFWKLAHELTDRFDILCFETLSLKGMQRLWGRKISDLAFGEFLEILEWVAKNKSKQIVFVDRWYPSSKTCSSCGHILENLDLSVREWRCPSCQSVNGRDENAARNIQMVGTSTIGLGDVSRVVPAIAV

SEQ ID NO: 40997 - protein, 426 aa, Calothrix sp.
MSNYGCQQILIHPDKDLKALLEYVCTEANNLINCGVYYSRQYYFKTGKFPSKADLHKQLGTVQRNKHYQALYSDTAQQILTSVAESFKSFVGLLKGIKKGTVTQKPRLPNYRKSGGLALATFTGRSLKLKDGMIRFPLGTLVKTWFGVDGFYLPMPTNLDFKSIREVRILPRNRCFYAEFVYQSDDAVCQVDKSKVLGIDHGINNWLTCVSNIGTSFIVDGLHLKTLNQWYNKSVAKIKENKPQEFWSNRLAAITEKRNRQMRDAVNKAARIVINHCIDNQIGSIVFGWNQGQKDGADMGKNNNQKFVQIPTAKLKNRIEQLCEQYGIVFIETEESYTSKASFLDNDVLPTFGAKPERWKSSGIRTNRGVFKTGTGIKINADCNGAANIIQKVAVMAGFNLAGISRGCLSQPKKVLLWTLQKSQCL

SEQ ID NO: 40998 - protein, 403 aa, Calothrix sp.
MQKAFKIALIPSHNQEVLINKTIGCARFVYNRFLALRKELYATEQKTLNYNTCSQELTLLKKEIEWLKEVDKFALQNSLKNLEAAYKNFFTDLKKSKKKKGVGFPKFKKKYGCKQSYKTNLTNGNIQIIENRLKLPKLGWIKFYKSQDITGKLVNVTVTRTSSGKYIASILCETEIEKYPHVTQNIGLDLGIKSYLVTSEGEVIENPKYYRLQLKKLRKANKKLSRSTKGSSNRVKAKIKLARIYERITNLRDDFLHKLSTRLIKENSIICIEDLRVVNMVKNHKLALSISDASWSKFVTMLEYKALWHDRIVQKVGTFYPSSQTCNCCGLINPLVKDLKLREWSCPSCNSYNLRDKNAALNILSEGLRLLTAVGTPEVIKNACGELVSPEVIPAQFDEAGIA

SEQ ID NO: 40999 - protein, 419 aa, Calothrix sp.
MLKVVKVRLYPDAQQQQSLAQAFGCCRWLWNYCLNLMNQTYKETGKGLSGYAVKKIIPQLKKEYEWLTSTYSQCLQQVCLNLGVGFNNFFEKRAKYPRFKSKHSKQSIQYPQNVKIADDYLSLPKIGNVSAIIHRPIDGKVKTVTISKNCSNQYFAAILFDDGKDKPESNTQGKAIGIDLGLTDFAVTSDGSKFDNPRILNKHQKNLKLKQQQLSRKQKGSQNRIKARKKVARVHRKITNCREDFLHKLSRRIVNENQVIVVENLNVKGMMQNHCLAKAIHQVGWGMFCTMLKYKAEMEGKIYQEVDRFFPSSKTCHACLNQVGSLPLDVRFWTCENCHTKHDRDVNAAINIRDEGLRILTSGTGGKAMKCGHGGNPHEQLHQEACCPDVSRSKGGRKKSTTALSVGQEAYTVPSGQCR

SEQ ID NO: 41000 - protein, 403 aa, Calothrix sp.
MQKAFKVTLIPNHNQQVLINKTIGCARFVYNRFLALRQELYTTGQKTLNYNACSQQLTLLKKEIEWLKEVDKFALQNSLKNLETAYKNFFTDLKKVKSKKNVGFPIFKNKYGCKQSYKTNFTNNNIQVIENKCKLPKLGWVKFHKSQNITGKLVNVTITRTSSGKYIASILCETEIKKHPQLTKNIGLDLGIKSYLVTSTGEVVDNPKYYRTQTRKLRSYHKQLSRTVKGSSNRAKAKIKLARTYQRITNLRDDFLHKLSTRLIKENSIICIEDLRVANMVKNHKLAMSISDASWSKFVVMLEYKAIWHDRIVQKVGTFYPSSQTCNCCGFVNPLVKDLKLREWNCPSCNTHNLRDKNAALNILSQGLRLLTAVGMPEVVKNACGELVSPEVIQAQFDEAGIA

SEQ ID NO: 41001 - protein, 441 aa, Calothrix sp.
LDADYGAVLKQVASNFCDADFSPKQNGQPSLGRGIKASKFVISMKTLKFKLYQHKRNRFLKRSINAAGIIYNHCIALHKRYYRMWGKHLPSAKLQSHIAKLRKRKEFWQLVGSQAVQDICQRIEKAYQLFFKHNKKGVRPPGFKKVKKYKSFTLKQAGYKFLGSNRVKIGSRVYQFWKSREIEGTVKTLTIKRTPLGELFMVVVVLTKFDGTETDPADFALDEGSKPEVEVKTSKIAGFDFGLRTFLTCSNGAEIESPQFLKQSLKILKSASRHHSRKVKGVSFGDATRTANRERARKNLVRKYEDISNRRRDWFWKLAHELTDKFDILCFETLNLKGMQRLWGRKISDLAFGEFLQILEWVAKKKNKLVVFIDQWYPSSKTCSQCGHVLEKLDLSVREWRCPSCQSVNGRDENAAKNIQAVGASTVSLGDVRQASPAIAA

SEQ ID NO: 41002 - protein, 425 aa, Calothrix sp.
MLVFEAKLEGLKEQYQLLDEAIRTARFVRNACIRYWMDNGRCYPAGTLSANKSGDPPNALPHKGIGRYELSAYCAVLAKAAEFPWVSKLNSMARQASAERAWSAIARFFDNCKKSKPGKKGFPKFKKEQTHGSVEYKTTGWCLSDDRKFITFTDGFKAGTFKLWGTRDLHFYQLKQFKRVRVVRRADGYYAQFCIDHQRVERREPTGKTIGIDVGLNHFYTDSNGETVTNPRHLRKSEKSLKRLQRRMSKTKKGSQNRIKFRNKLARKHLKVSRQRKDFAVKTARCVVRSNDLVAYEDLMVRNMVKNHRLAKSISDASWSLFRQWVEYFGKVFGVVTVAVSPHYTSQNCSNCGQIVKKTLSTRTHICLHCGHTQDRDWNAARNILEKGLSTAGHVGTNASGETDQYLGGETPPSKSTRGKRKPKK

SEQ ID NO: 41003 - protein, 430 aa, Calothrix sp.
MNYGCQQILISPDKNTKALLEYVCTEANNLINCGVYYSRQYYFKTGKFPSKVDLHKQIGTIQKNKHYQALYSDTAQQILTGVAESFKSYVGLVKGIKKGTVTQKPRLPNYRTSGGLVLATFTGRSLKLKDGLIRFPLGSLVKTWFGVDGFYLPIPTNLDFKSIREVRILPRNRCFYAEFVYQSPNVVVNLDKTKVLGIDHGLNNWLTCVSNVGTSFIVDGLHLKSLNQWYNKSVAKIKENKPQGFWSNKLAALTEKRNRQMRDAVNKAARIVINHCLDNKIGSIVFGWNQGQKDGANMGKKNNQKFVQIPTAKLKNRIEQLCEQYGIEFIETEESYTSKTSFLDNDVLPKFGAKPEGWKSSGVRTNRGLFKTGTGIKINADCNGAANIIRKVATMTKFDLVGVCRGCLSQPKKVRLWTLQKSPRLQTGEA

SEQ ID NO: 41004 - protein, 384 aa, Calothrix sp.
MKTLKFKLYAHKRDRHLKRTINAAGVIYNHCIALHKRYYRMWGKHLNCAKLQSHIAKLRKRSPFWQLLGSQAVQEVCQRIEKAYQLFFKHNKKGVRPPGFKKVKKYKSFTLKQAGYKFLGSNRVKIGSRVYQFWKSREIEGIVKTLTIKRTPLGELFMVIVVDEGSKPEVEVKTGKIAGFDFGLKTFLTCFSSGDATGTDGTKIESPQFFKQSLNAIKKASKQHSKKLKGSSNRERARKNLVRKYEGISNRRRDWFWKLAHELTDRFDVLCFETLNLKGMQRLWGRKISDLAFGEFLQILEWVAKKKNKMVVFIDQWYPSSKTCSSCGHILEKIDLSIREWRCPLCQSVNGRDENASRNICAVGASTVGLGSVSRALPAIAVRA

SEQ ID NO: 41005 - protein, 425 aa, unknown
  TnpB Polypeptide
MIRAINIRIYPNKMQRIQIHKTIGCSRFIYNQMLAERKNIYEQLKQNKEALKKHTYKTEKEYKAQFPYLKEADSIALQASREHLFEAYQSFFKGLKKGYNVGFPHFKSKKGKENYTTKQTNGNIKIDFERKKLKLPKLGWLRFNDKREFSEKIKHATVKKTKSHKFFVALTLEAQEDVKEVKEIHEKDIAAFDMSAKHFLVNYIIKMENPRFYRLEQKKTKKLNKELSRKKIGSRNRAKARLRLARHYDTLCNRKKDWTHKLTRKLADTFDAIILENLNTKGMQKFSSGLAKSITLDFSWYQFTTYLHYKMEWLGKHFILVDRFFASSKLCSCCGWKNNNLTLQERAWTCLDCGTSHDRDENASLNLKQEGMRILQKEKKITIIHDDTSTVGTTGSHAFGDYVRPKEMLQSLFGQFSRKKESITL

SEQ ID NO: 41006 - protein, 417 aa, unknown
  TnpB Polypeptide
LQELRRKPFYQALTRAEQYYVACLLKSTGGMFFDMLDGRVPKPPAFPKSIQGSVAHAGALCAKVRATVRKLSRHLPVHGQNRSCVLAPREGYHPLRKSAPGDADGISIITAIPRRTVKVRVKGRGPIKKTIVLVRDGDRFFLHLSVPLKVKPLEKVPSAPAGYSHCTALDMGFTEVFTDDGGRQYGGGLGVLLTRMARELDDHCRKRRALWAAYRKAGPRKRQRLLKFNLGKKRWESRRERARREVENLINRALNHLLASRPSDVYLVEQFAESFDYSGMSREVRRRLSGWMRGVIADRLAFKVAERGARLVYVPANYTSQRCPVCSFVRRDQRSGDRFHCKHCGHKAQADGNAALNLLLAAHEPKIKRGMTCAQVDTVYRTEYEKKCRTEGKTPLPRRLRTSKRSAKGTCQKGNVK

SEQ ID NO: 41007 - protein, 460 aa, Acidithiobacillus sp.
MEKIIRTDRWSLVASQEQRKMARETVSLYRDYCRALIGVLWVHQREILAAQSPVAGVERLIHATKKNQNPKYTFFDKRFPKLPSYLRRAAIMAALGQVSSFSTRYVQWQSGRRKRRDASPPRRTGENELNPPLYRGQCILFDEDFSQAKIKVWSGTDWIWITLKIAAKRQRHEAPKNKALSPCLLADGKGLRLAVPFEMTVQYLYRKTMQRACGVDLGINTTATASVITPDGTVIARQFFHRGMDIDRRDKDLVQVRNKARLTMGKGGKLCEGFCRGLYRKARHRNREMAQSISREILAFAQSHGAEVIVLEYLKHFRPRAGRKRSTLRQRFHGWLHQLLARRITDRAEEAGLAVDFVNPAGTSKYAFDGSGPVKRDARNKALATFGTGTGKQYNADLNACYNIAARFFAKVLGLTGRKAQACDRGKSSATQPRTPVTLSTLWLYAQNNVLESEAPTTAT

SEQ ID NO: 41008 - protein, 353 aa, unknown
  TnpB Polypeptide
MYNYMLDLQKKRYEAGEKHLSAFSMIKLITPLKQQEGYEWLCRVSTTSMQRVCQDLANAYENFFSKRAKFPRFKSRKRSRASYPVRETVYFIDGKTQIEKIGKVVYQTNYDLPQGRGHKFSNPRISNNNGKWILTVGIECESQAPELTDKPMGIDVGVKDLAIVAFGEDQIVFHNINKSKRVRNLSRKKRKVQRTISRKYRTNGSYSKTKGIEKYERILKTIHYKLANIRSNYIHQSTHKLVSMLPKVVCVEDLNVTGMMKNRHLSRAIQEQCLGEFLRQMEYKCAWNGIELVKVDRFYPSSRTCSCCGEIKEDLKLSDRTYVCPHCGLVIDRDYNAALNLMKYAASQTRAAA

SEQ ID NO: 41009 - protein, 388 aa, unknown
  TnpB Polypeptide
MPRRLIAAFKIPAPSSMNEKAAELNKASAKIHNKTLSLFKSTFCVGEVIFRSTRILNRLWYSNTSMHFSVRKKNPDAKPPFRAKQYMPTIWKVSAIHIKNQQLVFSNGQGNRPFVIPIPSSLDLSCFAIKLAKLVWDPKNHHYYIHLSVEVDGRALEPGDSVVAVDLGVVHPFTAFNGHEVRIWNGGELNSKLQYKHKRLAGIQQVLSRTKPGSRKHKKLLRAKQRVLRKLSNQITDILHKITSSFVEWVRQSGARVIVIGDVGGIRNKVKYHVKANQKIHDWKFRKITSMIEYKAKLAGIEMKYISEEYTSQTCPVCGHRRKPSNRHFKCPVCGFEYHRDGVEAINIHKKYLSYGRVVADLAPAIGVKFNPHLRGPGVSPWKLALSQ

SEQ ID NO: 41010 - protein, 441 aa, Acidimicrobiaceae sp.
VTITASTSVVVTQAYVYALNPTPEQISMLRNHLGGSRFAYNALLGMVKDNWDENRAKKEAGTEVTKDDWISTSQIGLLYLWAKHRDELAPWWPQNSSSTYNDAAQRLSMSFTNFRTGRAKFPQFKRKRQTGSVRFMGHVVRLVDTHHVRIARIGEIKTYESSRKLYRHLDRGTGKIVAATVTVRAGKWCVSFTVEVTRQIPVTRKPDKIIGVDVGITTLYTGATTDGKQVFEVANPRHLQRAEKKLAHVQRIASRRQGPRSPAAPSKRWTKANTRIQNVHAGVRNARKNLIHETTTMLAKNYDVIVIEDLNVAGMLKNHALAKHIQDAAWGEFARQLEYKTRWYGSALICVDRFYPSSKTCSQCGTVRATLSLDERTYHCETCGLTLGRDHNAAINLARQGLPGTSSGTGRGGEVRPAQQNLVATAHPDEASTETPPEVGA

SEQ ID NO: 41011 - protein, 362 aa, Paenibacillus sp.
MLVHKAYKYRIYPSVEQQQLIGQMFGCCRFVFNYFLSLWNARSEETGNGLSYNACAAQLPALKGEHEWLKAADSIALQSAVRHVADSFNRFFNRQNRQPRYKSRKNPVQSYTTRQTNGNIAVNGNQLKLPKLGWIRFAASRPLEGRILSATIRLNAASKFFVSIVCEVDVQPLPEANKTVGIDLGLKAFAVCSDGLRVENPRAFRRYERKLAAWQRRMARRTKDGANWQKAKRQVALIHEKIAHVRHDFLHKLTTKLVRENQTIHIEGLRVANMLRNPRLAKSIADASWSEFRRQITYKSEWYGRQLKVADSFAPTSQTCHVCGHVHPEVKNLTVREWTCPVCQTLHDRDENAAHNIEQMAV

SEQ ID NO: 41012 - protein, 403 aa, Succinivibrio sp.
MPVVAQKIEIKASNKFKTYCRKAFGVSRFAYNWCVERFTKDYQQYLTEWSVYNRKLKEYSSSPLLHTQMPVKPKLPSAIGYKYKNDFNSKKKELYPFTKEVTKYASQQPFINFDRAVSAFIKAGVKGKRKKGLKDCFPKYKKKSYSSGSFYIGGDQVKVKTSVSCSRRLENKSQKQYLKIPKFGYVQLKEKLRFEGYINSVTISQRGDRFFASFSIKISQEEFDRTHKAAVQNKTAVGIDLGLKSALVLSDGMAIKAPKPLKKSLLRLKRLQRQLNRKNHPRTKGDKTKVSKNYIKQSKRLNKLHLRIHNIREDFIHKVTTALVRNYEYICLEDLNVKGMMRNHHLARAISDIGFYRFKSVLMYKALNFNRTVVVADRFYPSSKTCSRCGAIKENLTLKGQSL

SEQ ID NO: 41013 - protein, 400 aa, unknown
  TnpB Polypeptide
MKAYRFRLYPSAEQEVILNEQLELCRELYNSFLLERRYAYRGSKKSLNYTQQANEMPGLKNTFEEYRDIHSQVLQDVARRVDRAYKNFFRRIREKNHGKMQKAGFPRFKPAERYRSITYPQSGFRIMENGHLKLSKIGRIRMFNHREIEGEIKTLNISRDGTGKWYASFSVKQENVALHADRTGNSIGIDAGLLHLVTMSDGTTVEPPRFLKKGEKRIKKAQRNLLRKRKGSKNRKKARINLSKQHGKVKRQREDFAHKLSNRLVRNNDLIAFENLSIKGMMKNHHLAKSIADASWSTILQYTIYKAESAGREVVMVDPRNTSRECSNCGYKKKELKLSERTFRCYSCGYEIDRDLNAAINIHNKGLKKVGRGTPEVTPVEIRALPERATQIAEAGSPVR

SEQ ID NO: 41014 - protein, 365 aa, Clostridiales sp.
MANKAYKFRIYPNLEQKVLFAKTFGCVRFIYNRMLADKIKYYERTKQKLNNTPAQYKKEFEWLKEIDSLALANAQMNLQTAYNNFFRSPKVGFPKFKSKKSNKNSYTTNCVNGSITIESGYIRLPKIGFVKLKQHRQIPSDYKLKSVTISKTPTGKYYASVLFEYENQVQEKAPHNFLGLDFSMHELYKDSNGNEPAYPRYYRQAEKRLKSEQRKLSLMQKGSKNRDKQRVKVARIHEKVANQRKDFLHKQSRQIANAYDCVCIEDLDMKAMSQALNFGKSVSDNGWGMFTAFLKYKLEENGKRLVKVDRFFASSQICSCCGYKNADAKNISVRAWVCPKCGTRHDRDRNAAINIRNEGMRIVFS

SEQ ID NO: 41015 - protein, 446 aa, Beggiatoa sp.
MKKAKKVTRIAYSEDINQAKYDALNEIAKRCGTIRTEIWRSYGSIGGLGAKFRPVRDGWIAEGLIKNLPQRIWRATLSDSLDDIKANREAAKGKVVRHIFRNIDDKDKRKELLKKLKNDSVWINDSYLRRLMRQYWKHGKNHTFNQIVLEPGSYKCFSHNGKNYIEVISLKRGSRIAIPVGTNYSITGQIRLILREGQVEIHYAIDNSGERACGTIELGIDKGYTEAFVDSEGEFYGKGLGEVLSKESDSLKKKYQRRNKIKAVLEKLEQKNPKKAQNIRKNNLGRKKLNRRSRRHQAKVKTIVFTAVNQVVNKAKTVVCEDLTKTFKSKNYGKNANRRLSGWVKGLMADAIEIVASRRGSTVVMVNAAYTSQACSQCGCLGKRTGNKFHCTSGCRAVMQADHNAAVNILARLYDKELHRWLPHLMVKQILLERCRRPAETAQPVV

SEQ ID NO: 41016 - protein, 415 aa, unknown
  TnpB Polypeptide
MEQFRLMTNDCIRIGLHFQKENHDNIPSMRKLSLLAYKELKNRYPTLYSRYSLCAISKAAGILSARRKSLRRGFPARAPYLSKQMLTSCYGFKIQGNNLVIHVGQKSTQPIPLNNHTMSVLSNPSAPRVRSFTVTKNSLSLCIRSEVKETEPKQIRGVIGIDRNESNITFGNKDGITDAGMTKAILIAASTRSVIKSFRRNDNRVRKRLASKYGERKSERVRKLVHRVSKAVVKEAKTSSYAIAFENITGIRRLYRRGNRQSRSLRARMNSWPFGEFKRQVEYKAAWEGVPVITLTRGETRGTTMDCPRCGERLQVPIRGDKEHYRQLWCEVCKRWRDRDLVAALNISHRGWLRFDHSEGEAGEAVKGNPRNDGSFHEPVFLRVDASKLGQTSNIWLDRTHFRHLRKYVEANPEN

SEQ ID NO: 41017 - protein, 388 aa, Okeania sp.
MFCVKSLYRAVKVRMYPNPEQTQKLNQVMGCSRWWWNYALNLCNETYKETGKGLSRVALNKVLPKLKNSEETKWLKECYSQVLQSTTLNLTKAFKNFFEGRAKYPRFKSYQGRQTCQYPQNCQVVDKGVKVPQIGVIKSSIHRLFDGKLKTVTIAKTPTRKYYASLLFDTELETPEVVVTGKVVGIDLGLKDFCITHDGDKTSKYANPKHFKKHQKNLARKQAKLARKKKGSKSREKARTLVAKVHERISNTRQDFLHKLSRKIVNDNQVVIVENLNIKGMVSYGMLRKRNHNLAKSISDVGWGMFINFVNYKLQQKGGLLVEINRWFPSSKTCSNCLYQISEMPLDVREWTCPSCGTHHDRDENASKNIRAEGIREISVLEGLLLFA

SEQ ID NO: 41018 - protein, 431 aa, Streptomyces sp.
MGQQDSQQGLVKRQFGHRARLALDPAQVAVLDAQGHAARTTWNLLHGWWLMLPKAKRTLAAADAVIREGRRELDWLGVLPAQAAQAVLKTYFQAWKNCWEGRAQAPEFKARFRTRMSIDIPQGRDLHVVRVHRRWGMVNIPKLGRIRFRWTKDLPVGKHADKGNRITGARLVKDALGWHIAFRVTALAPAPGPHPGTEVGVDAGITVPLALSDGGTAEHGPWLSKKEEARLLHYEQRAARRKSHRKKGERTSRRLHKTYDQIARIRATAKRRREDWQHKTTTALADTYGTVVVEALHITNMTKSAKGTAEQPGRQVAQKAGLNRSVLGEAWGRTVHLLAYKLARRGGLLAEVPAPGTSQECAQCHTVTPGSRRNQAEFVCNNPACGWEGNADTNAARTVLHRYRTGHALVPAAGRAVVRRATNGVKPATAR

SEQ ID NO: 41019 - protein, 269 aa, unknown
  TnpB Polypeptide
MKTYYFFLKFGCVTLWHDNYLFSLLDLLYLISHYCYNVSIALQGKLKSVTITQEPDGKRYYSILMEYPKPQAATRSAIQDGIGLDYSMPNLYVDSNGASPVFPKPYRTMEPKLARAQKKLSRKKPGSKQYEKQRMKVAKLYAKSKHQRKDVLHKLSCTLTDTYDLIAIEDLDMSAMKQALRFGKAVSDNGWGMFVSMLTYKAERKGKLLVKVDRWFPSSKTCIACGHIHKELKLSDRTYLCPVCGHAMDRDEQAAKNILNEAKRMTGAA

SEQ ID NO: 41020 - protein, 345 aa, unknown
  TnpB Polypeptide
LLEYYYDSTVKANKQPLFTIEIVYTVPTSEKRKNNKSLQLFYRTKVIHKINRKTNKIAIIETEELAEARYTEEFLQSVAGIDQNLDQLAVGYVSENGETNAFTYDIKYLKSINQYWNKQKAKLQAEISFQKQLLWELKYAKLDFYKIFLTEYSVSRLIESEEIRLKKLQNKIKQITTKRNHKISNYTHQLSRKLINHLSQLGVKNIVYGKNVNFKKEINLGKVTNQNFVNIPFNQMIERIRYKALLSGINFMTVEESYTSKTSFLDEEKLHSYKANRPKKGYNFLGNRFIRSLFQTKKGYVIHADINASFNIIRKVSGDGYAIYNFVDKASIMGSTPKRWKIKIQ

SEQ ID NO: 41021 - protein, 349 aa, Thermoprotei sp.
MARRRWENSGEEKVTVKGRLIIEDGFALAKLLYTMRLFRDSVEMAYRLLKKEGLSLNETVRRVTRFISNAHYAYSAAKRAAAYLNQERLDLKKPQLYSIGRGCEKGNRNIRLASVDRVLIKIPHANGRHEWLEARVKFPSRYIPLVEEAIRLAENGSPYSASVVLSKGKYYLHLHIPLELYANHTAKVKVSDKARLTAGFDINPDRICMVIVDADGNIRDVKTKHFPEVTLAGFSKSKARDLRLKALSELIDYACHHNVKYFVFEKIRKISRRKMKTRSASRKVSRFAYAELLEHAKVMVEKRGGVFVQVSPAYTSVDAIPLSRKLGLDIHAASAYLLAIRRLKSISDY

SEQ ID NO: 41022 - protein, 262 aa, unknown
  TnpB Polypeptide
MRAFVSVVTEMDFVNDGPRRPGEVGIDLGVARTVTLSDGTVFQLDVESIKKHEKQIAVLQRQLCRNKEARQKLAKLGKANPFDKREPSRKRRRLKAKIQNHHRCIRNIRRDFMLKTAHTIAQNYGGVAMEDLKLKNMTKSAKGTVEEPGKNVRQKTGLNRSLARVAPYAMRMAIHWAVFKANGRLILVDPKYTSQTCPICGCTSSSNRPSQAHFGCQKCGYTANADVVGATNVLKKSRTGSVRPCSELGNKTATGTVLFVAS

SEQ ID NO: 41023 - protein, 563 aa, Prochloron sp.
MPHRGKHHKSFRSRKKHSETGIGTEKYEQLELPLVIDDTTSTPSLIQTAIQESESSTPESAHISKSQTLNGKPTICNPCSQTQNLSRKLDQDSTTNAKGFYPFWDKSCQEMSKKLWSATKTDLSGLVETLSSGSINKKIANSWFSTFVTYLQNEKWLRISLPSSMSSVAGSMDSESTNLLSKKIRVYPETALAKTWFQWISAARWCFNQAIAILKKEKIGKYDLRKTVMNMAPSWVIKTPYNPRQLAVFQAYEAHKAARKSGGNAKFRSVREPVKSIRFQKNNWRKGTFYPTQTKGLRFKANEPIINKMHHEPTLVLDRGRWFICYAIDVPKLEPLNSELAIALDPGVRTFLTGFDGQEIWEVGLEDMGRIYRLASHLDRLLSRIGLSKGRQFKRLRYCLRKAAQKIRVKIRNLVDELHRKAANYLCTKYKVIFLPTFEVKNMVKRGKRRLSTKTARKMVTWSHYRFKQTLKHQAAKYGCVVVDVTEEYTSKTCSKCGHIHVKLGGNKRFACPSCGHNIGRDLNGAFNILLKALRDTSTSGVIASFQIVPYSETSSNCKIFPG

SEQ ID NO: 41024 - protein, 405 aa, unknown
  TnpB Polypeptide
LKLTKEQERLAWWYSKVSRNFWNLLVDIDKRNNKGEFDEFLSQKGNKTYHSNFYDREVYHLTQSDYLNLAKIVVGKNYNEDQEEWSWYYQPNQSFIYNFLSRELVKIRRQSKGKLNFRSIDKIQPNFNIRCDISANKKRPSRIYLKDSGKLQIPTIGDVRFGSVRADFNLSCKKQVANISFDGKYWYLSYTEDVETEVEELPEFTDGIGIDLGIKTLATGSDGTIIPNIKTFRRVRILNKRLKRLQRKVSRKYCINKCDKHNKTKNIIKLERQIKLIHRSLRNIRINHIRKFVSDLVKKQPQYIAIEDLNVKGMMKNKHLAKDIANCSFYTIREHLIRKAKERLIAIRLVERFYPSSKTCSNCGHYKKDLKLHQRVYHCDNCKEKIDRDFNASLNIAKTDNYILA

SEQ ID NO: 41025 - protein, 425 aa, unknown
  TnpB Polypeptide
MANITLVAESKLYLKDNTALYTYFDDYSKLFNFLVRRCVHHLKNKLNGEKESRYRTNLMLEFGITNRMAKAVIKTAKKQLKSLSEFARYQYNNLYKRRRSLFKKITKLKAILLSSSTSLSQRKLTKIRLFWTQMKLNKVNQLISNGLKLHITFGTKHLLKTNKVKFLAKRDNQVIYIGDKNETCGNQQFQINFNSKYNRFEYKLRLDNQWVSGTNKYIFGFFVLKNKEAKMHILKTLSEKKSNPLAYRIIKRDNDLYLQIMYRRETSDVTRNTYGVLGVDFNKGFISVSEINSSGKLTSLTRYNYLHQGKTTKTKTSMLDLVSKLVSQAINVGKDIVIEDLASLDSNKKQEKTASKNYNRMINSLKFGLFKRCLLNKATKEGVSIHTVNPYNTSKIAKANYTDRMKLNVHDAASYVIARRFYQYN

SEQ ID NO: 41026 - protein, 340 aa, Salmonella sp.
LTWLELPILAGSLLTGARDRVHRPFRPAQHQNQRLRGQNDVFHYPQGVKAGQASNRLYLPKPGWMRYRNSREVTGEVKNVTPSQPCGKWYVNLRTEYEVADPVHNTGTMVGLDTGVTKLATLSDGTVYQPVNRFKQASASWQKQKRKIRRPHSHMANIRRNHLHKVTSVISKNHAMIVIEDLKVSNMSKSAKGTAEPPGRNVRANSGLKRSILGQDWYEMRRQPEYKQHWRGGQVLAIPPAYTSQRCACCGHTAKENRLSQSKFRCQACGYTANADINGARNILAAGHAVLACGGRVQSGSPVEAGTHRGEAGSGLNAAGIPVLQGGGCQKIASATVPAG

SEQ ID NO: 41027 - protein, 549 aa, unknown
  TnpB Polypeptide
VKNVYLTQSNVIRSLSKEEYAMLREMCQYSNNLYNVALYNIRQYYFQEKKFLKYEENYHVCKENENYGLLQAGVSQQILKVADRSFKSFFNLIKKAKSGEYRFKDIKMPHYREKGGMFNLILSTNAINVKDGFLTIPMSRGFSKRHGHKQIKIPFPTRLKEKNIKEVRICPVYNGRYFKIQYCYLQEKEPQDVSPDNVLAIDIGLKNLATCVTNTGTAFIMDGRKLKSINQYWNKQKAYYQGIADKQRQKKTHINEIQVYKFRYHKQSLNGMFQYSDSFVFNDKYLCLVPGNTDALVIVDMETGKEKIVYDVVDPEKESYISGTYADRYIWLCPFESRYLVRVDIEDGNVMRYKWKYGKQDFDGVCAVDNKLYFAPHKATVCLSINVQNMQESKLDISDIKSVNDKFQGIFKIDNELWCMPFTAKYFLRYNLQNKKVTKYIGNNHKLFENWEWNTNNFMPVDFGEKVMLASCFMNGFLTYEVEEDQFVNNELNFSTDRLEEYYEKCLQYGVLQEQFKHEIIIEREGFLKNYCKSIIKSYNCTEKVINKE

SEQ ID NO: 41028 - protein, 393 aa, Actinopolyspora sp.
MLSGRRYRLKLTEAQVAQCEEFGNLCRAVWNTALDQRRQYRKRGAWINYNEQAGQLADAKTEHKWLKTAPSHILQQALKDLDRACRDHGTFRVKWRGKQRWNPSFRFPVGKLIEVERLNKRWGRAKLPKLGWVRLRMTRQLGGTVRSATVSRDGREWFVSFLVDDGKQTPGQHAIPNTSVGVDRGVVSAVATSDGKLIDREFTTPGEAERYRRLQQKLARQKCGSANRRERDRRGDFCSQVAADLTDRNALVALEDLRTQNMTRTASGTTEKPGRNVSQKSGLNRAILGKGWHKLELALHNAARHTGSEIVKVPAAYTSQTCAVCRNVDPNNRNSQAVFRCTGCGHTAHADVNAAVNVLAAGRAVAACGDLGAGRSAKQEPQPASTPVEIPRL

SEQ ID NO: 41029 - protein, 440 aa, Butyrivibrio sp.
MKIYSTYSVKIKQYNHIFSETVTIYRDAVNFLMDVCLAEWDLVYAIKGNQAQMMYVESLCHKTKENSSPKYDFDSRFYKMPSYIRRAAISEAIGKVSSYKSNLANWKLTPTGKKPTLNNCGYVYPSLYRIGMYNLTGDYSAQIKIYHNNTWNWLSISLRKSDMDYIYHRCNGRKMCAPTLQKRGKEWFLDFPFEEKATLIDTNNLVVGVDLGLNSACTCCIMDSKGTIYGRRFLRLPSETDRLNHAVNRIKKAQQYGNRKMPRLWAKAKGINDDIAVKTANFIIETAVMYNADTIVFEHLDLAGKKRGSKKQKLHMWKAKYVQSMVTDKAHRLSMRISHICAWGTSRLAFDGSGRVLRGKDADMPSYSLCKFQNGKTYNCDLNASYNIAARYYIREIFKSCSVTDRLDIEAKVPQCSKRSTCTLADLISLNAVLDNILVA

SEQ ID NO: 41030 - protein, 360 aa, unknown
  TnpB Polypeptide
LYPTEEQAEQINKTLDCCRYVYNHMLERRIKAYKRRKESFSYIGMQNLLPGMKKYLPWLAEADSQALKYTCRCLDDAYKSFFKNGRGFPKFKSKHNHNQSYTTTNAKSIHVSDKAIKLPCLGWVPYRKSRNIEGEICNATIRRSASGKYFVSILCKVEIEPKPCIDTVIGLDVGLKSFAVDSNGQEYQNPKYLRKAEIRLRREQRKLSRRQHGSANWEKQRIKVARCHEKVSNRRNDMLHKLSTTLVNENQIICVEDLNVKGMLRNHHLAKSISDAAWCEFFRQLEYKSAWAGRVVVKVPTFFPSSQTCGNCGFQNKEVKDLSVRHWTCPMCGCTHDRDINAANNILKKGVGLLAMPAAS

SEQ ID NO: 41031 - protein, 476 aa, unknown
  TnpB Polypeptide
VQLRYSYRLDPQPRHRAALAKAFGCARVVFNDALAARQQAHQAGEPYLTDAQLSARLTTAKAAPGRAWLSEVSAVVLQQALADLNAAYRNYFASLQGGRKGPKIGPPRFRSRKDARQAIRFTANARFKVLPNGRLRLAKVGDVPVRWSRPLPSPPSSVTVIKDSAGRYFASFVVQATPTALPRAQPVVGIDLGLAHFAVLSDGTKIASPRFLRRAESRLRRAQRALSRKREASRNRDKARVRVARVHARVADTRRDFRHQLSTALIRDNQAVAVEDLAVSGLGRTRLAKSVHDAGWSGFVAMLEYKARLYGREFHKIGRFEPTSQTCSACGVKDGPKPLHVRRWQCGACGAWLDRDVNAAINVAKAAGLAVTACGAQVRPGPTLAQRGEAGTHPKPRRKTAWQAGIPAPQGRRGSQISGCPADPRDRRHAHVHALPAGTRRARGPGHRRGLRDRPGHGAADGVAGGAGGDPRPGGT

SEQ ID NO: 41032 - protein, 544 aa, unknown
  TnpB Polypeptide
MAGRYFSSTSSTARVASGDLASAETSPASMFAPKALDAICCPSALSAAVTSLVVVVFPFVPVTRTTCRPRASSESRSGCSRSPMTPPMTDPSPRPARRDARPAAPPTVVARRARKGRLCRRDGGLLVLRMDAASAPLHLPENVGGTRYRVRMSRYRLLPSPAQEAVLRDHCAQARYVWNLAVEQQSWWRPGRVSAPGYLQQCRQLTAARAAYDWLAAGSQMVQQQALRDFAQAMTNFFSGTHREPSWRKAGRDEGFRIVAVKPGQIRRLSRKSGQLWIPKAGWVRFRWSRAVPAARSYRVTQDRAGRWHVAFAVIPPAIPVPGSGRVVGIDRGVTVSAALSTGELLTAPRLSPGRQRRLRRLQRRLSRAGRSSARRLRVKRAIARLRARERDARKDWGEKISTDLARRFDVIRVEDLRVANMTRSARGTRADPGRSVRAKAGLNREILASGWGLLVRRLQDKAPDRVEKVNPAFTSQRCSVCGHVDRNSRESQAGFCCTACGFACNADVKAAKNIAAGHAVTARGRPGLPGRANREPQLALLPA

SEQ ID NO: 41033 - protein, 377 aa, Burkholderia sp.
MDIKRAYRFRFYPTPEQAAMLARTFGCARFVYNHMLRMRTDAWDQRQERIGYHETSAALTALKKTPEHGWLNEVSSVPLQQALRHLQAAFANFFVKRAKYPNFRRKDGAQSVEYTASAFRWDGTSLKLAKMEAPLAIRWSRRIPKDAKVTTVTVSKDTAGRYHVSMLCDDVVSAKSASTGRVGIDLGLTDFVVLSTGEKIAAPNAFRKNEARLAKLQRRLARKQKDSANRRKARLKVARMHVRTADSRRDFLHKLSTRLINENQVIAIESLAVRHMQKNRRLAKAIGDAGWSEFVRQLTYKAKWYGRMLIGIDRWHPSSKRCSDCGHTVAKLPLKIRTWACPGCGIAHDRDINAARNVLAAGLAVSAHGESVSPMSL

SEQ ID NO: 41034 - protein, 754 aa, Streptomyces sp.
MQGRYRSLLRRLRRGLRAGRARPRRSWPGCGSHRRRRWHSRVRKPRRMLTVNTLCRNLITKTKSTCITKTGSAGSDLLHLSHTSRTYRGGHAATVQLPPVPRLRPAHRAGKGVRVCSRRVQRCGARPQGRPHRGRGIPDRRGTLQETDHPGQTHRRAVLAGEVSVVVLQQALRDVEAAYRNFFHSLKGERKGATSGAPRFKSRKDNRQSIRFTANARWSITDSRRLNLPKIGAVRVKWSRTLPTIPSSVTVIKDAAGRYFASFVIDTDPAADAARMPDTDQTVGIDLGLTHFAVLSDGRVIDSPRFLRRAEKQLKRAKRELSRKQKGSKNREKARLKVARIHAQVADARRDFHHQLSTQLIRENQAIGVEDLAIKALARTRLARSVHDAGWAQFVRMLEYKAVRYGRTLVKIGRFEPTSQVCSACGANDGPKSLNVREWSCTTCGTVHDRDHNAAKNVKTAAGLAASACGAPVRPGETPAQRNEAGSHGFSPEPRAAWLNGVRERRPESSGFNPRSKSRALLPRHVVHGADVAVRRVHGHEADLARTLGSGVDSELGVDVEVALHPAGRPDQLGHVGAVGGLPVVVEGAAEGVGLGDGVRGALEVVRRFLGGRRAGLQGEEAPVVRAGDGVREALRDVDDQVELAVPAEGRGVGVAAGLGQVGAVGHREGGVVRRDGDRRRAGRAAGAVDGRHVDDDLVRRRVVEDTRGGCPGGQCGGEQSGYGAAQEESTSHGFLPCRRVGGVLRSAPAVRPA

SEQ ID NO: 41035 - protein, 410 aa, unknown
  TnpB Polypeptide
VKKVKQRHKASTDLLRLLDEFRRMVNVCIAIGIEENVSSLKTLSLKSYHRLSRDILGYYGLCAISAATGILRNYRRAVRKNPQTRFPHARKLMLTTCYGFRIQNGLLRLPVGPRHYIYIKLNNHTLQVLSGLNARSITLTPDTLGISYAKETVEIKPEGYVGVDRNLDNVTVAPTDGTVKAFDLSKATMIKADYRCVKSRLKRNDARIRTEVFSKYGESQRNRVQPILHNPSKRIVEEAKTRRYGIAMEKLTGIRRLYRKGNFQSRNYRARMNSWSYGELQRQIEYKARWEGVKVIYVPARDTSKRCSICGYKTLESTQRRLWCPHCGAILDRDENAARNIAAGGLRFSPNGPPGEAVKGNPTTTVILRVDGGKLSPTTTNYSKAALRGLDRTSISYADRSDARSSSETI

SEQ ID NO: 41036 - protein, 376 aa, Bifidobacterium sp.
VSTTPVKRVYRFRFYPTPEQKDLLRRTLGCCRKVWNMGLDARTQAWTERRENLSYAGTCLLLTAWKKQDEYSYLSEVSAVALQQSLRHLQAAFRNFFNKTADCPRFKAKRDGGSATFASSAFTWKPESRELTLAKMAEPLPIRWSRTIPRRCAPSSVTVSLDPAGRWHVSILVEETVKSMPEDGGQVGIDMGLEHFAITSDGEKVDNPRYLKRALDKLERAQQNLSRKKKGSNNHEKARLKVARAYVKVRDCRDDFLHKLSTRIIRDNQTVVIEDLAVKGMSRRCAAKPDPDNPGRYLPNGQAAKSGLNRSIMDAGWCRFRLMLEYKAAWYGRELTVIDRWYPSVPGLPRVRSEHGQEGPGCAFLDLPGLWHGPGP

SEQ ID NO: 41037 - protein, 366 aa, Streptomyces sp.
LRSRARKPVRRQGGPASSSNHHRFYPTDAQAAELSRTFGCVRKVYNLALAARTEAWTLRQERVNYNVTSAMLTACKKTEELAYLNDVSSVPLQQALRHLQTAFTNFFAKRAGYPRFKSRKRSRKSAEYTTSAFRFRDGKLTLAKMAEPLDIVWSRPLPEGATPSTVTVSQDAAGRWYVSLLCEDPAVKPLTATDTAVGVDAGLDHLLTLSTGEKITNPRHERRDRARLAKAQRALSRKAKGDGDGANRARARRKVARIHARIADRRRDNLHKLTTRLVRENQTIVIEDLTVRNLLKNGHLARAISDAAWSEFRSMLEYKAQWYGREVIAVKAAGLAVSVCGAGVRPQRSIPGGQSAMKQEPLRREP

SEQ ID NO: 41038 - protein, 384 aa, Streptomyces sp.
MKLVVQVKLLPTPEQASALEATLLACNRAATHASQVAFAKDLKDRNGLQKEVYAELKARFGLSAQPVVRAVKKVVDAYAALRASLRAGNLGPSTCKRYRAAVGTSIDFRPEAAQPFDDRCLSWQYDARTVSIWTVAGRMRGIRFACSPDQLKTLTAHRKGESDLVCRGGKWFLIATCDLPDPEVYEPVDWIGVDRGIVNLATTSDGTNYQGRRLYRYRRWQARKRAELQRKTSRSARRRLARRKRKEQRHATHVNHRISKEIVSVAQRTGRGIAVEALGGIRERVRLRRDQRGTLSSWPFHQLGQHLAYKARRAGVPFLEVDAAYTSQRCPRCGHTERANRSARDHFRCRRCGLAGPADVVAGVNVRDRARSAWVLVTAPAPSP

SEQ ID NO: 41039 - protein, 561 aa, Streptomyces sp.
LRAIAPPFTVAAPSGARIRDRLRVDGADEKVLTLVGQHLGRHQRADLTERVTIGLVPVKDNRRAERKKKLTGVSSSRWAGAMTRASEDQYQLSMRCLYDERAGLRRAIGKITRRLAVPCGQQKGRVRGYRDRGERFQKQRRLQALRARLAVVEQHIAEERPSVVVGGRRLAKTRHHLADAYLTAGEWRERWEAARLFLTADGESGAPHENYTITVDPADGSVTIVLPEPLRHLANAPPDRYRLACTVTFHHRREEWLDRVTAHRAVRYDIVRDPVRGRWYLDASWSAAKTLLPSPQEIRTAGGRMLAVDLNAGHLAAYALDPYGNPVGEPITVPMELTGPASRRDGRLRAAVTSLIKLARTHHCTGIVIENLGFTDARQTGRETMGRGRRGKAFRRTVAGIPTARFRDRLRGMACHQGLVVVAVDPAYTSRWGAQHWQTPLNDQSKTIATRHHAAAVAIGRRGLGQRIRRRPGVTAPDRRIGQRRATGQTASVPRPRGTTSPPRTTGTPHQGDKTRRSPSDQLVPLPAPTTVRGAPGTRHHPPGPERIESAGTGQPHQERC

SEQ ID NO: 41040 - protein, 370 aa, unknown
  TnpB Polypeptide
MLKAYKYRIYPNKPQEEQIHKTFGCCRFVYNQTLAYKKEKYEQDKQSMNKISCNNYCNQVLKKEYEWLREVDKFALTNSIYNMDSAYQKFFKEHAGYPKFKSKKNPKRSYTTNFSNGNIEVDLENNKIKLPKLKWIKAKIHREFQGQIKSATVSQVPSGKYFVSVLVETEHAPLESTGCIVGIDLGIKDLLITSDGKKYDNIRTTKKYEKKLAKEQRKLFPKIKGSSNWNKQRIKVARIYEKIFNIRKDYLHKISHELVDENQVIVSEDLAVKNMVQNHNLAKAISDCGWYELTRQLGYKSDWNNRQYIKIGRFTKSSQPCNVCGYVNTDTKDLSVREWTCPVCGTKHDRDINAAINILNEGLRLLNEVV

SEQ ID NO: 41041 - protein, 329 aa, unknown
  TnpB Polypeptide
MQLVEQHVIDRNDPRFAVIDAAAFASKNPYNLALYEWRQAFIHEGKYLSYTEVFHRVKHSEAYRALPSKVSNDILRQLDSIWRSFRNGMKEWYKHPEKFTGRPQIPKYKHKAKGRFLLIYDKQAISGGRSKNGFKEGIIKPSGLSIIVKTQQKHIDQVRIVPRIGFYVVEVVYEKTVEQASVNPEYYVGIDIGMHNLAALTSNKPKFQSVIINGRPLKSINQFYNKRRAQFQKKLGKTSTTKRMERLTSKRNRRIDHYMHQASRYIIDLLMKERIGTLVIGKNDGWKQECEMGKRNNQNFVQIPHARFISMLTYKAELVGITVKITEES

SEQ ID NO: 41042 - protein, 411 aa, Sanguibacter sp.
MGWLAIGEVGGEMTLQGFRLELAPTPEQAGRLSAHEGLHRVVFNHCLARVKAVMDQRAAERSYGIVDADLTPVQSWSGPGLEKYWRETAATYPWFAGERMSSRVPKEACRSLAAALSNWSTSKAGARRGRKVGFPGFRRRKDGGRFRMDSDRIHPTGARAMHIPAVGVVRTREDATWLTGRLAEGRARILGGAASRVAGRWWVSFQVEVDRTDINAHHRAPTDGPVVGIDLGIKTYATIASSDGTVVEVANPRHLARAQRKLARLNKALARTQRGSANRAKAVRKVAQVHLDVAHARADFGHKFTTELARTKSVIVVEDLHVAGMVKNRRLARAISDAGWATVLHQLAYKAAWYGSRLVVADRWFPSSRLCSACGVINTELTLADRVWTCPCGIVHDRDVTAARNLLGLVA

SEQ ID NO: 41043 - protein, 501 aa, unknown
  TnpB Polypeptide
MESIRRAVAVEVENPPPELYAVEEPYRRIVEEIAAYVAERGTLVREKYNELYRRFRELYHLPAQLIQQAINQGVEIGKSFLALKKDGRVHKPRPEVRRVSIRFAKDSWNYKKAISSTAPVRLALSLPGGRREVWIKPHRRFWHYWWKVLRREAELASTLTLKRRRGKWYAVFVFDVAPKREPPAEVVAFDVNENTVAVARVSLLATVDRVATWNRQYINPTVYSIRTDFGRLAKRYETVRNAKLEELKRKYPIAGRDEEERRQNVTDTREFRKFVRRLRERRRKEGQVRQVAREVTKSPAVVITEELCKNPQEKMIGLEEKKVEKRELRHRIKQTPFKKLIRAVEDKAAEVGSVVVYVSPYRNSKVCPIHFALLKNGGGWHALHCPHGHTVDRDAAAVLNMLWKITPEGVVKGVWWDVKEARKRLNKGIVPREAVRKVNPIVPRPIIHATWVSLMALKASSKWPAVLARAAPMTPARGADEDGARTPVNRPSGRGGGQLVR

SEQ ID NO: 41044 - protein, 534 aa, unknown
  TnpB Polypeptide
VYFWEGALAKNQTYRAFVARLSHVLDLNGEILDDTRVLARLASEVRDISAYATYVVRNDEALADELARITAVQPAVAGRRAGVNMPDFLASGKSGRSRKEWLMRHNAVTACRSWQERDKAANGESSKYVSQGWKRTANGSAPLYGVDYVNLGAVDKQYAVIENNPLTDGEIVLKMVIQGEWYRLIFGFDNERFTEGRVTLPVIKVEDGQPVFIFTVVTDNPVVQFSGDYTIGVDVGINNYATVVVRDTKMGRIVYETTLSQRVHSLWNSVRASEVQVRDLKAKAATLLHDRQGRMSALDEARLHREAASRKKRELAILAAQEIADLSHPWGNAVVAVEDLSWIANTMQNGRWNRGALVQWLTHYVSQNGGWVVAVNPANTSQLCHKCGANVTHPTHKASVCPEHGVMDRDVNAAANIAARAVPRVVKARVTRAKNRKLQPQVPLRTPVARNSLKYPGRDRTKNKPTPKRKNHRRTVREVNLPLRPARAQAHSLEAGVLADQSACSAWGPVRRHSNKETRPTKVGYVALFDTVFW

SEQ ID NO: 41045 - protein, 516 aa, unknown
  TnpB Polypeptide
MQRTIKIKLNPTQKKKDEIVSTIAIYKETVNNFINKFSGYKYLDKLNYKYLYKPENKDLRIASSYSTNALAYAVTLLNKRLDLIRKECKARIYNHIKDKEERHYLFYLLKQPKYIEAIMLRKKFVVDKEFKVRQEYLNKYLHRILRHEFKNNNIPELKKPLLRTDVVTANIQEYKNPIKFSHVLKLSTINKGKRVVIPFNPNKWARKFFNKRKGCFIVCPDAQGNLNLHIPIEEKPKKNNNTQEISIDKGFRKLIVDSNKEKYGEDWHELEKKLDDKFQKKQKQRNKLYALRTELHKKLAETKDKKIYKKIKHLEKYNLGKKKFNKNKVKTKETIKNNVNQTVNKFISKNPKLKTIVLEKLDRFDNGRKYSKKSNRLLNNWKRGFLKNKLIFISQLKSLELAYQNRAYTSQECSNCGYVHRDNRQGERFICIKCGFKEDADVNGALNILSRKYDQEISLYTPYKQVKEILLKRYSVGAIKPPRLEKLNLNGCGSYKQPIQEQNIILATGGESSLSS

SEQ ID NO: 41046 - protein, 572 aa, unknown
  TnpB Polypeptide
MGTKARGKRKSPHKKTPTFLLELPLIVEAGQAARQRAHLEAGRQFYNAVLSAGQRRLRQMRADPAWQVARAIPRTHIQERSAAFSALRERYGFSEYAFHGLARELRVSWLAEHLDAVLAQTLASRAYRALNRVCVGQARRVRFKSRGRGLSSIENKRNDTGLRFVLETPEEGQSGYLVWHDDRLTALIDWKDPVVSHALAHPVKYARLVRRSASSPRAKGADREGDRYVVQLVLAGIPYHKPKHTVGRDTVGLDLGPASIAIVPREGEARLEPLCAELRPDARAMRRLQRRMERQRRAANPEHYDERGRPTKRGKGAPRWKQSKGYQATQRRKAARERRLAAHRKSLHGRLAHQIAAVGHTIITEKVSYKSWQKRYGKSVGLRAPGMLIAHLKRTVASTGGTLHEVPTRSTKLSQYCHGCGTFVTKPLSQRWHQCQCGIGPVQRDLYSAFLAAYLDPADPIPSCARYQRYWEGAEARLQAAHERVKERANEGQVLPRSMGISRAGARLPKSLSEATQELLFLSRRGKVEAWKHRLEPPVLQPGEPSGIESLSHSTILFSGLFLASSSCPLLP

SEQ ID NO: 41047 - protein, 427 aa, Escherichia sp.
MHQENTMLPRRISVSLFTDQSIIWPVKRLQAFKFQLRPGGQQEREMRRFAGACRFVFNRALALQNENHEAGNKYIPYGKMASWLVEWKNATETQWLKDSPSQPLQQSLKGLERAYKNFFQKRAAFPRFKKRGQNDAFRYPQGVKLDQENSRIFLPKLGWMRYRNSRQVTGVVKNVTVSQSCGKWYISIQTESEVSTPVHPSASMVGLDAGVAKLATLSDGTVFEPVNSFQKNQKTLARLQRQLSRRVKFSNNWQKQKRKIQRLHSRIANIRRDYLHKVTTTVSKNHAMIVIEDLKVSNMSKSAAGTVSQPGRNVRAKSGLNRSILDQGWYEMRRQLEYKQFWRGGQVLAVPPAYTSQRCACCGHTAKENRLSQSKFRCQVCGYTANADVNGARNILAAGHAVLACGEMVQSGRPLKQEPTEMIQATA

SEQ ID NO: 41048 - protein, 390 aa, unknown
  TnpB Polypeptide
MIKSIKVRLRPNNKQLTKLFQYANCARFAYNWTINREQENYNSGNKFLSDNELRKEFTQLKHQKHSWLKQVSNNVTKQAIKDACNAYKLFFKGQCRHPKFKSKKRSKTSFYQDTSKIQFTDTHVKVEGFSMSNKRNKQKLNWIKLCEKGRIPPNVKYTNPRFTYDGLYWYVSVGIELPNSADIPTNEGVGIDVGIKDLAVCSDGYTYKNINKTHNVRKIEKRKRRLQRSVSRRYEKNKKGSSYCKTRNIIKRQKELLKVSKRLTNIRHNHLHQITSEIVKRKPSFICIEDLNVSGMMKNKHLSKAIQQQGFYEFRRQIQYKSEWNNITVILADRFFPSSKLCSCCGAIKKDLKLSDRIYQCDCGNNIDRDFQASLNLKNYGEAVLQQSIG

SEQ ID NO: 41049 - protein, 249 aa, unknown
  TnpB Polypeptide
LSILVDGDLIHKGLQDSDNCVGIDLGVKDFIITSEGEVFNNLHFKKNEIIKLNKLQKQLSRKQKGSNNRNKARIKLAKVYKTINDRKQYYLHYVSNSLIDENQVICMEDLNVKGMVKNHKLAESILEMNFGEFRRILEYKARWYNRKIVFVDRFYPSSKTCNCCGYIFKKLKLSDREWTCPNCGKLINRDYNAALNILDEGLRIIGCSTPEFKLVDYPTMDDRSEMNLKSSDRVKQEVNKEQSSNLFKF

SEQ ID NO: 41050 - protein, 246 aa, Acidobacteria sp.
LRLYLELIFIRFRGPQALKHRYVCFSVERDSVRLPESSEEIGMDVGLDSFVALSNGQEIDNPRHRKRGLAHLCRAQRRLSRRKRGSQRRRKAAVLVAQAHRKIRNQRAAFHHDLNLSRRLVKRYGLIGVEDLNIKRLSRGRLAGPVHDAGWNAFFAKLWYKAASAGRELVKVDARGTSQVCVCGAAVPKTLAERWHACPVCGLSAPRDVVSAQVILQRARIGRSRHNVEDVVSCVPREAVAFQATG

SEQ ID NO: 41051 - protein, 277 aa, unknown
  TnpB Polypeptide
VSLPIVFGERQRQRIEEAFRGEWQITTVEMVKRDGEWYVHFVLERTVEVFDKPETIIAIDRGEHNLAVAVAISVNNPDKPMKGQFWRGEEIKRIRGLYGHIRRRLLKKKLLKKVKELKGKEKRKVSQQLHIIANQIVAYAKQFPKPVIVMEDLTGIRDNFHKPRELNRRFHSTPFRKLQAYIEYRALLEGIDVVYLGKKLVRNTSKTCHRCGHVAQVKGRIYKCPKCRMKYDRDLNACINIARSVMSSAGWGRSEPPEPANEAGGEKPQLNAGSLAL

SEQ ID NO: 41052 - protein, 395 aa, unknown
  TnpB Polypeptide
LAVLRARLAVAERALAAGRPSITRGGKRLWHTRNHLDAADMSERQWRERWDAARMFLTADGEAGKAGGNETIRVDAEGRLRIKTPAALVERFGSHVVIVEPVRFSHRGSEWAARISDHCAVRYDISYDPARGRWYLHASWTTIPEPAPDIEDLRTGRVLGVDLNDGHLAACVLDASGNPIGEPLSIDVLTAGLAASRRDGRVRAAITALLDHAQARNCDAVVVENLDFADARAVGRETLGRGRRGRRLRYSIAGIPTAKFRHRLVGMACRRGIAVIAVDAAYTSRWGNQHWRTPLQQQTSDPATVTSHHGAAAAIGRRGLGLAIRRRPAGPRNRQRTVEGTPPARPDHQPSTTQRRRGSSGPPTRPPMRHAGPPENTHHSGQDRSGRTGITPAHS

SEQ ID NO: 41053 - protein, 374 aa, Lachnospiraceae sp.
MADVKTNRAIKYRIKPNKAQEQLLQQTFGCVRLVYNHYLGDRKDAYDNNGTSLNYYDNTNDLKRLKKELPFLKDVDSISLQQCLRHLDTAYKNFFRDKKVGFPRFKSKKNNHKSYSTVCVNENISIESKHIKLPKIGKVKMVCHRPVPDDWKLKSVTVSQEPDGKYYVSVLFEYVTSIVEVPSKTILGLDYSMSSLYVDSDGNSCGYPKFYKQALDRLAREQRKLSKMEKGSNNYYKQRKKVARLHKHISNQRKDFLHKQSTEIANRVDTVCIENLDMRKMSQEYNFGKTISDNGWGLFTNYLEYKLRDRGKHYVKIDKFYPSSQICHCCGFKNEEIKDFAIRKWTCPKCKNEHDRDVNAAINIRNEGIKYLSI

SEQ ID NO: 41054 - protein, 466 aa, unknown
  TnpB Polypeptide
MLLTYKIKHNRDFSEELQKARQVAEFCIKHRTQNQNLDSLPTPESVSYDYNFPVSPFHSKQLGNYEINQKKRQRKRMKANSLSVSDLVPMSDFLYPGDVKHIGLKSTISSQILKKYSRNQDLKSVKNVKLIIPSKAVSVLKKEKTLIIPCLKLLLNYHFSNNFNKISQIEIDNIYAYVAVVFPNEEPKSSEHYIGVDLNTRGHIAVVADPESGKVWKLGKMRYHIHKKYENIKKRLYDMGKYKQLKAVRNREKNIVNNLNHKISRKIVNVALYNGCGIKLENLKGLRKLNAKIGDTENGEKNKHENKKRERKRDKSRNKEINEKSIKNKSKLLKRLYLSEYSLNSWSFHQLRQFIEYKARLLGVEVAYIDPHATSKKCSCCGHTGNRHSKQFECPHCGHVDHADVNAAFNIALTSKSNGQFSAERDAEKGNTDPPLRILDRTIFSKRIARKETSPQFAWEVCQFLA

SEQ ID NO: 41055 - protein, 466 aa, unknown; identical to SEQ ID NO: 41054
  TnpB Polypeptide

SEQ ID NO: 41056 - protein, 441 aa, unknown
  TnpB Polypeptide
MTNSSAICAASSSAPRDPDVQAGEERSAAARRQLGVKMTRMILVYRSYYDQQNDLPEIKAVRPELVELGSHALKQTLRRLNLAFQAFFRRVKTGQTLGFPRFKANKRFSGFRYPDPTGWKLMQCGKRGETLRLGSGKEAMSIRLRGQHRFWAEAKSNDLTLTGKNGEWFASVTLRVPETACARERTDGQHRGIDFGLTDWATFDDGRKIANPRWVRTELPRLADLQQARKRKGSLRYHRLGRQMARLHAWIANLRREFVHQETTKLVRTCAVIATEELATKNMSRSARGTIEQPGRRVRQKAGLNREILSVAFGMAHRQRSYKAAEAGARLHLANTRQLKPSQRCAACWEMVPKTLSQRVHICPHCGQSAPRDQNSAQVVLIDALELNTTPGTCVAARWKPLSAARPASRSPRPAKPTLQQRKAFSSGRVHTTHVVQQCAA

SEQ ID NO: 41057 - protein, 364 aa, Deinococcus sp.
MHHTHHTHHVIRVDRSAYPQLKQAVASGQLQPSAEQLDVMTHGQVYRPAGPLLTAQMLVHDRELQLGHLAIAGEFYRLPEAEYTSIITASLGVYRQYPDVYPLLTALLTPMTPADETSWWQDVRGAAVQGRQLASGADMVDDIWTPTAWLRDRTRLIRLGGEWFVVLYVAQPPRRAVPEGHDVIGVDIGLHPLATAAWGQQHAVTWSLAQPAVPAGESAEVRTLAEVLTYAAARAALEDLMVQVLPQAGTLVLETIGYAQFRGDFTVAARRRAVADWHQSWGPQRAYARGIRVVRVPAAFTSQTCSACPAHTLGTRQGPTFTCPQGHVLNAHINAAKNLVRCYWGLQARARRRRAPAAPGVVRP

SEQ ID NO: 41058 - protein, 292 aa, unknown
  TnpB Polypeptide
VCNFVVPTVAADRTKRLWQRFTLHHAVYDKIKAKFPDLGSQYACNVIRSVSAAYKTELAKHPAQLKSEDKKLKTLVFRHPSVHVDKNTLTFFPDGTVSISTISGRIRARLCPGPFQKELLASGKRKECNLVLHPRRGRKEAFWELHIAVESQGCSGEEHLKNLKADEIMGIDVGENNIAAVSTGRIWKAGALKDKRDRYMSQRKRLQRNGSQSARQHLKKASGRERRHVTHVNNVVSKEIVQEAAKRGIKLIALEDLTHIRDHIKAGKRIRSRLHRWSFRELQEMIVYSFVC

SEQ ID NO: 41059 - protein, 180 aa, Halorubrum sp.
MDDREHRWMQDELHRASNQILDEARDHECTHIAFENLTDIRERMAGVKRFHAWAFRRLYEYVEYKAEMLDIKIEQVSPAYTSQRCSKCGFTHERNRRSKHRFVCQKCEYELNADYNASKNIARKLLKRLRSGQKSSSGGAPCQCALTSGTVNLNGEFIASVDSTAEGESTDKPTTSVVGH

SEQ ID NO: 41060 - protein, 394 aa, unknown
  TnpB Polypeptide
VSRYRLFPSAEQVVVLVEHCRHARYVWNLAVEQQQHWQPGRCAPRYNEQCAQLTAARAEHEWLAAGSHTVQQQALRDFAQAMRNFFNGTHRRPTWRKTGVHEGFRQVAVKAHHVERLNRRLARVWVPKVGWIRFGLSRPVPEGVKSYRVTCDRAGRWHIAFAHAPQPIPGPADGSVVGIDRGVTVAAALSTGEMLHVPGLSAGEAKRLKALQRRLARAERDSHRRARTKRAIAKLKAREADRRKDWVEKATTDVAHRFETIRIEALDVRAMTRSARGTVEQHGVGVAAKRGLNRGINRSGWGLLAARLQHKAVGRVEQVQAAYTSQRCAVCGHVAPANRKSQAVFECQACSTGPCNADVNAARNIAAGRAVTARGDLGVGRSTNREPQLCPPIA

SEQ ID NO: 41061 - protein, 443 aa, Hyellaceae sp.
MLTMNYTYRIYPTTDQQVIMLEWLETCRRLYNRCLRDLKDWINSRKCSLYSCSLNREYIISPDISFPSYLEQKRQLTQWKKTNSHYQAVHSQVTQDCVKRLHNTWEAFKSKKFGFPRFKKYGRYQSFLFPQFKENPITNGKIKLPKIGEVEINQHRPIPEGFNVKGVRIASRARGTIWYAVVTIQCDVNVPNLIPFGRGIGIDIGLESFLVTSDNLRIEPARFFRDLQSRLKVLQRRASRKKKGSKNWESAQLKVARLHHQITNTRKNFHFQTSHLLCDQADMIFVEDINFKMTARGFLGKQMLDGGFGQFRNLLSWVCWKRGKYFQAVDHKYTSQICPECNTHTGKKELSERVHNCPECGYRTTRDHAGGRVILNRGLESIAKARFEWEASHSKAAASTDGLSGKEIACQVVLSGVSCLDKWRFGTGISSSRGLEASTLSEG

SEQ ID NO: 41062 - protein, 408 aa, Hyellaceae sp.
MKARYNYRIYPKQSQLTPLAKAFGSSRVVWNDAWWLYKNAERNKLDRPTKISNLVITQAKKTEERSWLSEVSSVVLQQSLRDLQQAWDNYFSSLKGGRKGKAVGRPKPKKKHSRQAIRFASNAFSVHSQSVYLAKIGHVKVVFSRPLPSQPTSVTVIKDTTGRYFASFVVEIPEQIAYAERYPLGPQTSNSCGIDLGLTHFAILSTGEKIENPRLHKKMLKKIKLANRRLAKAKRDSNRRKKRKLRLAKLHVKVKDARTDFLHKLTTRLVRENQALAVEDLNVAGMVKNRKLSRAISDAGWSKFKTMLEAKCDKYGRDLTIVDRWYPSSQICSCCGKSGGKKELDVRQWQCLFCNTTHDRDLNASINLSRWAGGQSDQYKNERGASVSQAKLAVCGEALTNPIQLTLF

SEQ ID NO: 41063 - protein, 625 aa, unknown
  TnpB Polypeptide
MIYLIGVKMMRRTVTESVRLTFQGKLLEVAKEDRVKIDDLMKRFQSAKRTAFKRLVEGGKKSKEIEKELVEKFILNTVYSRSAISDAEAIIDSQRELLPFYIANYEGKIRKSKKKLEKCRSELKRKSIFSRIKKYEGKKDRLKQHLENGTMPKVIFGRRNNFELLINGGITREEWRDLRTNQVYSKGCAFMKGNQNLRVTYEEDEKQFYLWINYPSSEKGKRGKKQKYALFIPDPFKPYILPCLETVRKRFGKRKEVVIAAKKPHTVRMIRRKGEYYVYITVEVSCPGEIVSNACEKGLLGLDVNTKGIGAVIVLPNGNLRAHRWFPCHELFYARSEKRSHLVGNLLVKVFRWAKRFGVNTVVSEGLNRFKKDHDTNAKYNRATHNFCKEKLLKTVKSRAVKENFVHIEVFPAYSSIIGEIKYRKMYGLSAHEAAAFVIGRRGLGYNKENIPKELKKSLKPEGRRRWKDDADPLASICHLWGGLWKNVSKIKNTFFETTKEIPLNFRGFFRHLLIKASGADSALQLALSYIVKKGETEVEDITELLSGFRSYLDNLISSVLENAEELCESRSTSRKQQLCGVVDFINIREFSNFKGLRFEESSLKGSKSLKRLVEAFGGVFELRG

SEQ ID NO: 41064 - protein, 392 aa, unknown
  TnpB Polypeptide
VDTTRCYKLRIVPTREQEKSFVHFAGCRRYVWNWALSRKREVYKATGKGIGYNALAAELVKLKKSDAPFLKECHSQVLQQTLMDMDKAFKAFFEKRSRFPKLKSRKRSPHAFRIPQNVSVIDGHVSVPKVGLVKARIHRPMEGTIKSATIKQETDGHWSVVFVSHIELPDFPPSCDQPCGIDAGLSSFLTLDNGTKVEPPQFYRKGQRKLRRLQRKLSRCQKGSKNRAKAKARVARQHHKTASRRSDFLHKLSHGLAARYDALCLEDLNLSALVRTKLRGHSKSWTDAALGNFLRMLDYKSLWNGGQVVKVGRWFPSSKTCHACQGIQSLDLSDRQWTCVHCGVVHDRDHNAAINILSEGLRVLNHQVTAGSAETQNASGEGVRLVTTSNPC

SEQ ID NO: 41065 - protein, 382 aa, unknown
  TnpB Polypeptide
MIERRFIVGHKDRGAIMFRGYKYRIYPNCAQAAVLNQMFGNARFVFNWALMMNLNNLQTEQRTLSPFLIMKELTRLKEIPGYEWLNVSVIQSLQQSIVNQSNAFKRFQKNKSGFPKFKSWHNPRCRVGFPQNTRIDFNGNKISVLKLGWIKARISRGFNGKIKSSVIEKTPAGKYFISLTVEFPNPIVKQKAINPSTSVGIDTGMKTFATFSDGRIIENPRHIHAHRKRLSILHRRVNSKIIGSANRIKAIRVLAVLHSTIANRRTDFLHKVTTDLARNYETVVCEDLDLPAIIQKSYFSRGFSDLGLGQFYVLLKYKVEQRGGNFIKIGRFKPSSKMCYCGHIEHGLKLSERKWTCKQCGSVNERDLLAAKNILKYGMSIY

SEQ ID NO: 41066 - protein, 390 aa, unknown
  TnpB Polypeptide
VFRYRAYPTRAQEKRATEWGNALRFLWNLAHEQRLMGLARTDKRYPTGFDQMLELTDLRRELPWLADVPRNACAQLLTELDKAWQRCFKRLAHRPHWKRKGCNLLGITEPHSKSWRIIGNNLRFPKLGDMRIVVHRPVEGKPKTCALRRDGDQWFILAVCEIEIPEPTARTAPVVAIDRGVTHTLADSNGNLTLNPKHYERSMKRLAHAQRVVDRRKKGSKNREKAKVRVMRLHRKVRRQREHFLHVESARLAKSHGVVVIEKLNVQGMIRGNCARGIAGAGWSQFSWMLRYKLAWSGGTLLEVPAHYSSQTCAGCGHVDARSRRGERFCCTGCGHVDHADVNAAKVLLTRANRSGLPVEGSALEATRRSRKELVKLRVSRRSPLKASAL

SEQ ID NO: 41067 - protein, 432 aa, unknown
  TnpB Polypeptide
MGMRTKKHSHPQLAIRMQMKPRPIFTDLCTCAKNLYNRATYEVRQEFFKTGKWIQYISLYHRLKHEPVYLALKDISDSYLPQQVLRQVEQIWRSFFNGLKAWKTDPTKFQARPREPRYKPKNGLHMLNFPRPQVRIREKQILFARNLMVRGFPTFSLGTLPLTAETCVGARLVPYYDRFVVELLYEVQVHPFPTTDSSSPRAMGIDLGLNNLVTTSDGLLVKGGVVKTINQWYNKQLAHYRSIAATHNQQFSTHRIQSLQRGRMNRLQNFFHQTSRRIITYCLQHNIDTLVIGYNARWKQHCNLGKRTNQSFVQIPFLKFVQMLEYKAKLVGMTVVRVNEAYTSQQCSQCGYVDKRNRKSRGCFCCRKCGHHLNADYNAARNILQRYINRSQVIPTVSSPSSVAHLPDSGCVTHPVQNYLLNSCLTNQVITP

SEQ ID NO: 41068 - protein, 477 aa, Moorea sp.
MKYTYQYRLTPTTQQKITLNQWLRICRFWYNRQLGERFDWWECNRSSINACLLVCYLRELRDQPNYYSQKKQLPILKKESVKVKWYGEELDLQQVPSLTLQEVYQRVDFAFSRFVSGDSKGKRSGKPRFKSGSRFRSLVFEGGGLELHSCSVGGQYLYLKIPKLSIVKVRMHHYLPDGAILKQAQFIKKYDGWYVNLRLDDQTVPKLNPDDIIANWDNSMGLDAVLYQDDYLATSERKKLPSLKSFRKYEARLAKVSKRKANKKKGSKARRKLAKREGREHQKIARARKDHAYKNADQLIRTDKKVFFREKLNLKGLTQKNKPKQDHMGNYLPNGESGKSGLNKSWLDAAFGQFFSILEYIAEKSHRPRRGNLGVRTQEAGALVIEVNPAYSSQLLSYRDEFVFTDCTIREYWDEFEKVLIDRDINSGINLKRVGLDEFPTIKRRKSMPVVVDSTTNYTSKQVLSILRGLEKPPLYA

SEQ ID NO: 41069 - protein, 405 aa, Streptomyces sp.
MQLRYSFRLYPSAGQRMALTKALGCARVVFNDALRVREEARAAGLPFVTSGELSKQLTTSKRTPERAWLGEVSFVILQQSLRDLDAAYKNFFDGLKGKRPKMGPPRYKSRKDNRQSIRFTANASWRITAGGKLRLPKVGDVPVRWSRALPSTPSTVTVIKDAAGRYFASIVVETEPTKVLPEVDAEVGIDLGLGHFVVLSDGTKVDSPRFLRRAEKRLKKAQRELSRKQNGSANRGKARAKVARAHARVADARREFHHQLSTKLIRENQAVAVEDLSVKGLARTRLAKSVHDAGWSAFVNMLEYKAARHGRTFIRIGRFEPTSQVCSVFGVKDGPKPLNVREWTCGACGAVLDRDINAAVNVAKAAGLAVTACGAQVRPVPVPAQRGEAGTHRHPQMRVVGIPVL

SEQ ID NO: 41070 - protein, 366 aa, Methanosarcina sp.
MNVDRTIKLKLSVSEEDKEYLKKTITLFNTVFNEVAKYGFEHKTHSKVSIHHATYKDIREKYPELPSSLVQGARDIACEALKGVELKLLPVAKPFSSIRYNQRVITYYLQYGRVSIATINGRVKATFNIPGYYQEYVNWEVRSSTLKYDAIKGAFFLHVIFRTESPEPSGNKVLGIDRGIVNIAVCSNNVFFNGNQIKNVRGKYAHLRKQLQSKGTKSAKRLLRKISRKERRFVTDTNHCISKTIVNMPFDIFALEDLTSIRVQNRKGKAFNRKLNSWAFYQLAQFLEYKVETLGKRVIYVDPRFSSQKCSKCGDIRKSNRNGSSYHCRDCGFQIHADLNAALNIAQAGISCLSRVSVNNPNVATI

SEQ ID NO: 41071 - protein, 220 aa, Thioalkalivibrio sp.
MGIARFATLSDGSHVEPLNSFKKHQQRLARHQRAMSRTVKFSNNWKKAKARVQRIHTRIANARKDFLHKASCQISQNHAMIAIEDLQVRNMSRSAKGNSEQHGKQVKQKSGLNRSILDQGWGEFRRQLEYKSAWNGGFVIAVPPHYTSQTCPCCGHASKDNRQTQAKFACVECGFEENADVVGAINTLARGHRVLACGEMVQSGRSMKQEPTEATQAIAA

SEQ ID NO: 41072 - protein, 405 aa, unknown
  TnpB Polypeptide
MNLTEKEIIYSTDERFRLIKELCHLSKNLYNASLYDVRQYYFETKSYRTWQSQATIFTKNNNSDYYALQSHLAQQVLMQVGRQFISFFNSKSNKKKHIPKYKDKNSFNVITFPKITISRKIEFDEASQLYIYTLCKRSYNLKIQSTKPNVKMVKFVYDEANNLIKCFKIYEIEQTKLKSDNSRYFSIDPGLNNIVSIYNNIGIRPLLYNGRPIKSINQYYNKTNAKLKSELPTNVKTSKRLKQLAFKRNNKIDYEMHKISTHIINEAIKNNISKIFIGINIGWKNEIKIGRRNNQNFVNIPHTKLFNQLLYKGLLNGIEVIFTEESYTSKASFFDKDELPIYGENDNYKFSGRRISRGLYKDSKGNLWNADLNGGGNIMRKVSDKAYKNIRKTEEMMKRPILITL

SEQ ID NO: 41073 - protein, 420 aa, unknown
  TnpB Polypeptide
MRRKTKETENPIPTITRAHKIRIYPNKHNQEVFQRYYDYQRSVWNRAIDERNAQYKIYKEMKATGLYTQKELSKNYYPNTNNLRKMEKFDWENNFHCRVREIQFDNLCQAWDNYFNPNMSNHKKPKYKKKKEIETHKTLSLRNVRIRGKWLLLPKSLKSKPEYRFTKIKMAESLKFNGRITDDFTVSVENNKWYVSIIVETPLEEKAAFYNKSTGIDVNVGSIDYLKKDGQNKEYSKFYLLPKSLLRQYDRIKYYSKLINKKRNKNPYYVNSKSYKEAITKLNNAYTKAYYIQEANLNNMVKYFFTNYSRIVIEDLDVNSMKMNKRLCKSLHRNAFGRFKRKMINKAEEYNVEFVLADRYFPSTQTCSECGHVKTGDEKLFLWGDKYGNDHNTYVCYHCGTIQDRTENAILNLNYYGKQR

SEQ ID NO: 41074 - protein, 393 aa, unknown
  TnpB Polypeptide
MKAYKTEINPTPSQIELIHKTFGCTRYIYNKFVFENLENLASNKDFVSAFVFSKRVNNDPNTPTWLKEVPSKAIKQAIIYADRAFKDYFSKRKDKPKFKKKGSSDSFYLIGTIKVERHRIFVPKLKWLRLKEFGYIPNNISSVTISMKNGRYYISCLCKDEVDKRIPLSDYNMGIDFGLKDQFITEDRIIPSINKSLRIIKLEQRLRREQRKLSRKYEANMIDKIYYKTGVKKGQLKSYKLLKPLSECKNIQKQKLKVALIYERLARIRTEYNRKSLRSLVLERKPSSITIEDLAVRNMMKNRHLSKAISKAKWYQSRLYLETLCKNLGIELRLADRFYPSSKLCSDCGFKYKDLKLNERFWTCSNCGSKHNRDMNAAINLGQCKDYTVLTSG

SEQ ID NO: 41075 - protein, 474 aa, unknown
  TnpB Polypeptide
MKRTVKIKANCSNNEDEILLIGTVQRNIKNYVWARYSGISSLLKQSGWTIRDELIQKNLLSSKITKTFSRVAVENSASIIKTNWLLTKKKVKKAIAQNENLTDEDRHYLYLCLKHTPTLYGILNYKKVDYRAECLKDLKIDVHRLNNLLRRYVRRYNTKPHTNKANIIIDSNLYKFDSNNKNFSFTGKKKNSRIAITLIGNIPKLKGTLELVKNQKTNQYYLHVPLDRIVAKKNMTEQSEILGLGVGITDLITLSNGSVYGANSAELFYTLSDNLVNKNRSRLFSYKRKLEQRILTEQDLSKKSILESKLKNLEENNLGSKKRNAKIGKYKSRIVSHINCELNKMVKEEDLKEIVREDLNWSSKKKNKRNVSRKQQNRFSTWTKGVLLERLSVKLAEKGIKETIVNPAYTSQVCCKCNHLGDRKGKEFKCSNCKLSIDADFNASINIKKRKFIKEINIDTPYKEVKKYYENLPV

SEQ ID NO: 41076 - protein, 553 aa, unknown
  TnpB Polypeptide
MKKKSKDIVFRMYKTKGPDLLLPLYSILQGELDRILSTSTYVEALSKIELKYKNENGEEQSKLNGMLWKEIHEIIGDSLKGKVPDAWYIRILYHNIISLLKSRQEQIKIYEILKSNQYKIDNTLRDKLVQENLYPTNAYLETLAAAKDIPVLPKRKTFILDFSVSDKQMFRVGKNSNAYEIKIHSKKEVKDYNLETGWISFEMYLPTYIRESFTGKTAKPQFYWDYNRNEFVCAIPCEIKKLPHEYENIMGVDLGKIKVYSATVVRKSGSVSDEYIPTEELQNLVDKLKRMNQHINSVYEKRKRSSKYGNFTERQARRKLDYKHSRNKRTKLQFAIARLVAVEVVNIAIKEQCKEIHLENLSWVKSSGGKWNFSQIQTCIEEVAELFSIKVVKVSSKNSSKTNPVTLEIGKISSRDVIFKDGQKVNRDQLAGLNLALREPKKVKQRKIKTLNIRDSAVIQRQSRRFNNYLMKKSVLPEIKSKRKIHKEFLRSKQASSKPDLIKKEDKKIVMFSHDKAKSDFAIVSVYKSSNFKLEYYFTNNLQFKHIYTNLLQ

SEQ ID NO: 41077 - protein, 414 aa, unknown
  TnpB Polypeptide
MKLFKGGKNMNLTEKEIIYSTDERFDLIKELCHLSKNLYNASLYDVRQYYFGTKSYRTWQPQVPFFTKTKNPDYYALQSHVASEVIKQVGRQFISFFNNKSNQKKRIPKYKDKNGYNIITFNNLTISKQVEFDEVRQIYIYTLCKKSYNLKIQSTKPKVKMVKFVYDEENDLIKCFKIYEIEQPKLKKDNSRYFSIDPGLNNIVSIYNNIGIRPLLYNGRPIKSINQYYNKTNAKLRSELPSDVKSSKRLRQLSFKRNNKIDYEMHKISTHIINEAVQNNISKIFIGNNLGWKNGIKIGRRNNQNFVSIPYTKLFNQLLYKGLLNGIEVIFTEESYTSKASFFDKDKLPKYGESDNHKFSGRRIRRGLYKDSKGNIWNADLNGAANIMRKCSDKAYKGIRKTKELMKRPILITL

SEQ ID NO: 41078 - protein, 483 aa, unknown
  TnpB Polypeptide
MDQTVSQKPQPQRDEEKKKRTRKKKSKQTITRAVPHIRLSEANPGKLAALDQLVVVFQALCQQYVTLWCTTEGSPDRYATPVFASQLSERWQRVAMQQAAGIAKSWRTNRQAAYDAYLEELADYAEAAARAESSGIPISPKRTEPVWREWKVPELRVPSIQANANVVVIEPSEDSTFEYWLRISTLDKGHPLRVPVKLAAYHKHALKEKKLNTSTTLCKRNGCWWLTLSFDEEVPLQTEEDAPLVGVDVGIANFLTTSTGKQYGTFHGKLARRHKRDREKRRRKAKLRACLKKKGVTTLPSTSSVTGQRLTRHVRQEINRAVALLIQDHASARILYEDLSVASMRFQARFMNAYLYASNLAHIPEQIKWATATRGMAAHTVKAAYSSQECSRCHYVDRANRPNQQTFCCVRCGYQDHADHNAALNLASRWGDQELAACQKKDQIKALLLKRHEECKQLFGLAVVQPAVQLGVWDDPPASTDVA

SEQ ID NO: 41079 - protein, 397 aa, unknown
  TnpB Polypeptide
MIKSFKYRISPTPRQELKLLQTLTTCRFLYNNSLSERINKYKESKESISYVEQANNLTQNKNKYQQKVHSQVLQGTLKRLDQAFSNFFRRVKTKKLKAGFPRFKSDNNYNSFYYPQSGFKITNDQKRIKLSKIGEVKLKYSREVENIKTCIVVRDADQWFVVLTSKVENNKETNYNDKEVGIDVGISNYLTFSDGTTVENPRILKSLEKKLAKEQRRLSRKQKWSNNRQKQKLKVIKVHRKIKNSRNDFLHKLSTNLVKDYGKIVFEDLNIKGMLKNHKLAKHISDCSWYKLIEMTRYKAESAGCEFVLVNARNTSQICSNCDSIEKKTLSERVHKCSSCGLELDRDHNAAINILNRAGTARINAFGGNVRPSLDSLNQNLAVSMKEESPPNQALAR

SEQ ID NO: 41080 - protein, 398 aa, Archaeon sp.
MMLRTYKYRLEPNKEQKEKLEATLDTCRHLCNNALGRRKLQAELYRLPITKQWITVENQINALPKQKQDNEYLSNVHSQILQDVLRRVNKSFTNFFRRVKNHEQPGYPRFKGSNRYNSFTYPQTGFKIVGKKLELSHVGKVNIKIHRSLTGKLKTCTIKRDIDVWYACFSVKIDDSLPEKKVIKSAVGIDVGINPLVALSNKEKTKPPKFLQQSEHKLAKEQRKLSRKQKESHNRNRQRIKVAKVHRRIKQQRMDFHHKLSRELVVQYDFITFENLKIKNMIRNHHLSKSISDVSWNMLQSFTAYKAEWAGKVVTFVDPKNTSQECSSCGKIVKKNLSIKVHNCPYCGLVLNRHVNAAINILKRVLIKVGLGYTDLMPVRGLAQDTPMTQEAHDFSRG

SEQ ID NO: 41081 - protein, 118 aa, Helicobacter sp.
LGKVSYPRFKRKREYQGSFYIGGDQVKIIQGDKKDYIKIPNLPKIKMTEKLRFKGKINGATITQRGNKFYVSIQTDITQEEFNRTHKPIANNHTLGIDTGIKAFASLSNGYRYKHPSP

SEQ ID NO: 41082 - protein, 373 aa, unknown
  TnpB Polypeptide
MKLTIKAKLLTNPEQYQSLKATMETFNTACNYISQRAFQSKTFNQVKLHHVVYRKAREKFPELSSQFIVRAIAKVSDSYVAEKKTLHKFKKYSAVVYDQRLLSFKRLSITSINSVNGRLKVPFIIGNYRSLEGKSIKGQADLTFENNKFFLNIVIEFPDGTPYSPKGFLGVDRGIVNIAVDSDGNTFSGKQIDKVRERLTKIKSALQKKGSKSAKRHLKKIGKKQSRFQKNINHCISKKIVTIAKGTKRAIVLEDLSGIRSRQKVRRADRQRFGNWAFYQLDNFIKYKAMIAGTPIFYIDPRNTSRTCSVCGFVSKSNRKSQSIFSCCNCGYTVNADFNGATNIALKGSINNPIAVHIPIVIPLSPGTASRLL

SEQ ID NO: 41083 - protein, 210 aa, Lactobacillus sp.
MILSNGQKVNMVHFDTDARKQIRVWERKMARRRRNALKEIAFDKHDKVLFPRTSLRQFPRYQQARRTVAKLKRQVSDRRNDKLQKLTTQLVQDFDVIVVEKLNTQGMLKNHHLARAISNAGWGKLVTMLQYKCDWYGKQLIMVDPKYTSRICSACGQKNHQFDGLSQHEWLAVREWQCPTCGTHLDRDINASQNILQRGLAQITPIKALA

SEQ ID NO: 41084 - protein, 555 aa, unknown
  TnpB Polypeptide
VLRLRHCAGGAARPGGGLHAPGVRPVRQERETAGGPQRAWHGSCAHLQRGRILRRVCPPDRHGRGAGRRSPGCRAGSRRLGERCGRAGVLMARFAIPDGWTVQAFQFALDCTPEQAACVRRQFGGGRYGRNWAVRTLKQDLTRYRATGEQTGAPSLAGLRKRWNRVKDSECVDADTGQVWWPQISKEAFADGIKAAVDAYWNWQASRAGNRAGRRAGFPRFAKKGRDRDRVTFTTGAIRVEPDRRHVTLPRIGTVRVHQNTRRLARLIAKGRARILAVTVSRRGTRLVAAFRVLIQRPIQPRVADPASRVGVDVGVRVLATVAGQHGEVIERVPNPRPLEAALKELRHLSRERSRRTRGSRRYTQTQQKITRLQRRVASIRGHHLHHLTTRLAKTHGEIVVEGLDAAGMLRQKGLAGARARRRGLSDSALGETRRQLACKTGWYGSRLVIADRWYPSSKTCHACGHVQEIGWTGHWTCTGCGTSHQRDDNAAINLARYEPPVTGDSALGPVRAAVKRGADRKTRPCRAGGDETRKGPSQQAEKQPRDGVPMNEPL

SEQ ID NO: 41085 - protein, 405 aa, Herbidospora sp.
MEFGKLLLVSRYRLSPTRTQEAALAEHCGHARFVWNLAVEQHSFWKPGRKSAPGFAEQCRQLTGARAEFDWLRAGSIVVQQQALKDFAQAMANFFGKTHKRPTFRKRGQGEGFRVVAVKPDDVRRLSRNVGEVRIPKVGWVRFRWSRAVPKGVRSFRVTRDVAGRWHVAFAALPDPIPAPGTGDVIGVDRGVAVSVAFSNGGMANAPTPREEVKARLLLLLRKLARARKGSNRRGRVRAAVAKLRARETDRRKDWIEKTSTDLARRFDVVGVEDLKISGMTRSARGTIGAPGKNVRQKAGLNRGILAAGWGRLVKRLEQKAPGRVVKVNPRFTSQTCNACGHRTPENRESQAEFRCRACGQQANADVNAARNIRDIAAGHAVNARGGDRGAGPVKREPQLVLLSG

SEQ ID NO: 41086 - protein, 409 aa, Herbidospora sp.
MGFDTPFLSVTFGSLPVMSRYRPAPTPAQEAALAEHRRHARYVWNLAVEQHSGWKPGRKSPPGFAEQCRQLTEARAEYAWLRAGSIVVQQQALKDFAQAVTNFFGRTHKRPTWRRRGRHEGFRIVAVKADDLRRLSRHVGEVRVPKVGWVRFRWSRAVPGSGEAVGVDRGVTVSAALSSGEMTNAPVLRETEKFRLLRLLRMLARAKPGSNRRRKVKKAAAKLKAREKDRRKDGVEKTSTDLARRYDMIAVEDLNVSAMTRSARGGIEAPGRNVRQKAGLNRGILASGWGHLVERLEHKAPGRVVRVSPAFTSQTCNACKHVARESRESQALFRRVACGLQCNADVNAARNIRDLAAGHAVNARGGDRITGPVKREPQLVLLSARDEVESLPSGRGGCQVQVSTRLRHA

SEQ ID NO: 41087 - protein, 431 aa, Actinomadura sp.
MNTWCYIAEVKLVMQVKLLPTPEQAAALDATLHTCNSLANRVSAVAYEKRVFSRAGVQKLVYADLKAAGLSAQPALHVIRKTADAYTTLHAQIDAGLLGGQRSRRRRQAESKPVMFRPDAAQPYDDRCLSWQMDARTVSIWTTAGRVQGIAFTGKPSQLKTLAEYRKGESDLVFRGGVWFLYTTCEIPEADQFDPVDWIGVDRGIVNLATTCDGTNHQGKSLNKYRRAQARRRAELQKKKAAGSRSAARRLTRRKAREGRHAANINHAIANKIVADAQRTGRGIALEELSGIRDRVRLRRYQRATLSTWPFHQLGTAIAYKARRAEVPFLEVDPAYTWQTCPRCGHVARGNRPSRDHFCCRRCGLAGSADHIAAVNVRQRARTAWVFVSMPDPPLAQRAGDATPARQPAATGSATKRERPSCKLGPSRPRS

SEQ ID NO: 41088 - protein, 474 aa, unknown
  TnpB Polypeptide
MSSWNKTAATGERCVIELPLSYSRHQHDTLDKMFRIANNMKNNLIAWYSRQLTEMMRTRIWRSNQKVLADLYSEYVDEVETLEKLQEKISRKKKNAGKKKAVRLFGKDEQQLAYLQSRVDEFTEKKKALCVLRNEIIRRYGFSKADFEKQMKKYRKSYQTLIGSTVAQKIADSVWAMFDAKLYRNGKDISFSPFAQFAAIEGKSNKTNIVFDKEKMAVTLGGGSNKLCIRVKRSRKDPYGYEKDALSRRVCYCRIIRKAYPEGWRYFLQLVLEGPPPVKVKPETGELLHAMGKGCVGLDIGPQTLAFSANKDVGLEELAEGVQLAQDEIRRIKRSMDRSRKDSNPKMFTADGQIVRKNKLPAECLNSRGRRIWVKTNRYKKMEILLRSLYRKQAALRKHMHRRMANQLLAMGNEFYVEIGTPILEFIPPLHPVPLSMVTANAHLLKFFPKRCIIRLLLKKSIFVFRTEKRTRIF

SEQ ID NO: 41089 - protein, 405 aa, unknown
  TnpB Polypeptide
MLVRSLVFHFEGTLPNEAKFLMEDFRLAANNAIRVGLKSRTTSRNSLCNLVYYDFRKRHPNMYSRHIVSAFVVASSVLKNYRRRLRQGLPAKIPYIRKLFMKTDNGSFKLDRKNGILDLPIKAGCHIKLKLILSDYHRRYLDNESLSFGSLTLLPDRVVVTLRKHPPALYAPESILSLDTNERSLDGILVKDNQINEIVKAEYPEVAVIQETHYRRRRKIQKKKSHDRRKSRELCSKEGKREHNRIDYRLHQMANAVLSFAEGNKSSIVLEDLTGIRPGKGREFNRRISAWPRRKLHQIIEYKAAWKGIPIIKVDPRYSSRKCPACGRIQDSRRGTEFVCECGWHINRHINASINLLKTAAPERVAGGLWVGPGASQHDVVMILCGRKTVRSEPNGTSGVIAGGH

SEQ ID NO: 41090 - protein, 243 aa, unknown
  TnpB Polypeptide
LARTISSPVPRPLVPSTSTTIENCSDGSARRLTKSPAYSRNCPRVESPESRKTKSSGRLREGRYSSKRIRRLYRQRTKRRDHAQNALVRDLVERLYDEGVATVYVGDLTDVLETHWSVRVNEKTHNFWAFKKFIHRLSCVCEVYGISLEAESEAWTSQTCPECGDHEETVRHGDTLTCPCGFEGHADLTASETFLRENSDTEVRPMARPVRFEWDDHDWSGKSHPHESPKEVRTNPQVASVDR

SEQ ID NO: 41091 - protein, 413 aa, unknown
  TnpB Polypeptide
VKTPRSKSADTYRVRKRNETVQALTMVEVSAVLQHKAYEYRIYPDKKQETLIARTIGSSRFVYNHFLELWNKEYEETGKGLTYFACSKLLTKMKRDPETVWLCEVDKFSLQNSLRNLSDAFSRFFKGQNEHPQFKSKKNPRQSYTTQFTNNNITVSGNHLKLPKLGLVKFAESREMKGRILNATVRRKSSGKFFVSILCEEDICEFPKTDSAVGIDLGIIDFAIMSDGSRNDNNHFTRQMEERLRREQRKLARRALAAEKRGIRLSEARNYQKQRRKVARLYEKVANQRNEFLNKLSTEIVKNHDIICIEDLNVKGMMRNHKLAKSISDVSWTSLVSKLQYKADWYGKEVIRISRWFPSSQICSECGHKDGKKPLNVREWTCPVCHAHHDRDVNAAINILAEGLRIRALTPGS

SEQ ID NO: 41092 - protein, 368 aa, Thermoactinospora sp.
MAQIVKRAYKYRFHPTPEQAEELARTFGCARLVYNKALEERTRAYTLEGRRVSYVESSAALTEWKRGDELAFLNDVSSVPLQQALRHLQAAFSNFFAKRAKYPTFKSRKKSRASAEYTRSAFKWRNGTLTLAKTDAPLDIVWSRPLPEGAEPSTVTVSRDSAGRWFVSILVEEQIAPLDPVDTAVGVDAGITALATLSTGEKIVNPRHERADRRKLAKAQRALARKEKGSSNRAKARLKVARIHARIADRRTDFLHKLTTRLVRENQTVVIEDLTVRTMMKNHSLARAISDASWRQMRTMLEYKAAWYGRELLAVDRWFPSSKLCSACGALQEKMPLNVREWECACGAVHDRDVNAAKNILAAGLAER

SEQ ID NO: 41093 - protein, 422 aa, Oscillatoriales sp.
VQLAERHIIKSTEPRFAQIDELAFKSKNLYNAANYVIRQNFIYGWGYVSYNEMNRLMKSHQAYKALPAKVSQQILMVLDKNWKSFFEAVKAYKADSSKFTGRPKLPNYKDKTKGRNLLVYTIQAISSKQLKKGIVKLSGTELLIKTKVDPDRICQVRLVPKCDSYVIEVIYDEPESTAKDNDFAAGVDLGLNNLVALTSNQPGFIPLLINGRTLKSINQFYNKRSSRLQSQLKGRRKTSPRIQRLTRCRNQKVDNYLHHTSRTIVDILVAQRIGTLVIGKNAQWKTDINLGKQTNQNFVSIPHARLIEMLEYKGFLVGIKVIVQEESFTSKANFLGLDPIPVYGKTKTEPVFTGKRIKRGLYKTSTGQLINSDVNASYNILRKAIPNAFSDGIGSCVVQPRRVNPLKVKVKGEGLEASHVYK

SEQ ID NO: 41094 - protein, 431 aa, Dictyobacter sp.
VACAQRESGPQKEAFHRAPTGSPADLESVADVLQGPVERRTASSILLKLWTGARWIWVNVRLLSRDLPDGYEPGSPSLVRHGSHWRLHTPVEKTFTSPGKVAVQLAHAQTRICAIDLNLDHHLAVCTIQTADGSTVATTFLSGGKRVNGRRKWLLGRIARNRRKTGILAENEPDNVALWEKIRHVDEQVAHLISARIVHFARQHQASVLVFEHLGNLKPQKGRYSRRGNSKRAFWMKGRIFTNAKYKAWNEGMITSRVNPRNTSRECARCHGLIVRYHAKQGPEPAGYTPGAPLAWCPACGMKGHADRNASLVIGQRLRTRAHHQEKPRAPLLGPGERDEKSSGVVRSQDANSKGGPSRRRARRHGTGKGMAPPMRITPGWWRPQLFLAHYLCSVSHSNAIYLEQWRTQEWKKPPPFRACGVSLWLLCLSC

SEQ ID NO: 41095 - protein, 376 aa, unknown
  TnpB Polypeptide
METYHLAFKYRIYPNKEQQNLIKKTFGCCRFVYNYFLAYRHDEWTVNHKSISYNKTAKALTQLKKEDKFAWLKEVDSMALQEALQNLDTAYKNFFEKRAKYPHFKTKHNHNQSYRTRNTSNIIRIIDRNKITLPKIGAIKAKISRTFEGRILNATVRCTPSGKYFVSLCVALNKLDKNIALSSNSGKGNIGIDVGLVNFLTDSNGNTVPNPRPLKRMTCKLIREQRRLSRKKPKSKNRNRSRIRVARVHECIVNIRKDFQHKLSTKLINDNQVIAIESLRIKNLMKNHRIAKAIADASWGEFFRMLEYKGNLHEVKVLKVEPFYSSSQICSVCGYQNKETKNLSIREWICPQCGAIHQRDENAAKNILHKALESAI

SEQ ID NO: 41096 - protein, 368 aa, unknown
  TnpB Polypeptide
MYPNKQQIIMIQKTFGCTRFVYNHYLEKRKEEHLTGFDMIKELPNLYPEYPFLKEVDSCSLRCSLFDLEDAFNRYFRHQNNDPKFKGKYGSKRSYRTNYITSTYKGTKYENIKVDLKRRVITLPKLKEVKIRGYRNLEDLPGRIIHATISECSTGKYYVSVLVEVSHIAPKMIPRRVVGIDLGIKDVIITSDGEKIKNEKVIEKYEKRIKRKQRELARRVKGSSNYYKTKKKLSVLFQRLRNARKYFIHQITKKLVLENDIIVSETLKVKEMLEEKKISKFLSDASLSKICNLLKSKAEYYGKRYIQIDTYYPSSQKCSRCGYQNEKVKDLTVRDWICPKCGSYHDRDINASINILFEGIKKCRNEFI

SEQ ID NO: 41097 - protein, 313 aa, Moraxella sp.
  misc_feature (255)..(294): Xaa can be any naturally occurring amino acid
MKTLKLRIKDKHTDQLNRLSGLVNFVWNYVNDLSFKYRQRTGKFFSAYDLNEYTKGSGELLGLHSQTIQAINETHAKSRRQFKKAKLNWRTNNPKAKRKSLGWIPFKQSAIKLLATHQTGKKGLKSTLQLSLAKGQKLIIDLWDSYNLSLYQINTCEIVQDSRNRWYACITVKEYPKQQCGTGSVGIDLGLKDSATASNGDKLQIKQTQAWAKKLSIAQRAKNKQRVKAIHAKIKNTRQDLIHKFTTRLVKDNAXXXXXXXXXXXXXXXXXXXXXXXXXXXXXXXXXXXXXXXXIHYPNLLVLRSNRQQQSKR

SEQ ID NO: 41098 - protein, 411 aa, unknown
  TnpB Polypeptide
LASAELDNFVEENICSSKECKIRRTMIKTFQYRLYPTSPQRKTMETTIETCRHLYNECLAERKNAYEERKENVGKFAQLRKVKTLKETNPYAKNIHSHVLQVAVADLDKTFQVFFRRAKVGEKAGYPRFKGKDRFDSFGFKEYGNGFKVDGRRLKLSGIGRVAIRWHRPLEGRIKTLRIKRSAGKWYAAFACEVDEKPLSATGRSIGVDVGISSLIATSDGRLVENPKWYRDGQAKLRVLQRTVSRRKRGGSNRRKAVHALQVHHELISNQRKDFLNKLANELIMNNDIIAIEDLQIQNMVKNHHLSKSILDGGWGYFAQRLSDKAVEAGRELVRVHPAYTSKTCSGCGTIFEDLDLSVRWIDCECGLSMNRDVNAAINILKRALQNRVGQTRWELTWAVTPCVSQEAPAL

SEQ ID NO: 41099 - protein, 425 aa, unknown
  TnpB Polypeptide
MTSITLVTESKIYLKDNTSLYDYFDDYSKLFNFLVRRFVHHLRHRLNGESESRYRTSLMLEFNLTNRMAKAVIKTAKNQLKLLKESAQYQFNNLYKRKRSLFKKITKLKALLSSSSTSLKQMKLAKLRLFWTQMKLNKVNQLIANGLKLDLTFGTRHLLKTNKVKFLAKRDNQVVYIGDKDKTCGNQQFQVSFNSKYNRFDYKLRLENQWVSGSDKYIFGSFVLKNKEAKADVLKTLFKKKSNPLTYRIIKRDGSLYLQIMYRRETTDMTRYNQGVLGVDFNKGFISVSEIDFSGKMQSLTRYEYLHTGKTTKTKNSMLGLVSQLVSQAVSLGKDIVIEDLVSLDSNKKQEKTTSTDYNRMINTLKFGLFKRCLLSKATKEGVSVQVVNPYNTSKIARASYTDRMKLNVHDAASYVIARRFYQYD

SEQ ID NO: 41100 - protein, 361 aa, unknown
  TnpB Polypeptide
LLEQFRQMLNDCICIGLTENVTSLKSLSLKAYKQLSRYDVASYYKLCAISAATGILRNYWKAKRKGRDVKEPYARRLHLTTCYGFKVRDGELSLPIRAKEHVRISLNQHVQATINGFTLRSVTLTEDRLSIAYANEVQQLQPRGLIGIDRNLDNVTIAATDGTVQQHDLSEATRAKAVYRDVRSHFRRNDVRIRREISGKYGRKQRDKVKQILHHVSKLIVEEAKAKQYGIAMEKLTGIRRLYRRGNWQGRWYRGRMNSWSYAELQNQIEYKAKWEGLKVIYVHPHGTSSKCSICGQKMKPEENRTLRCPSCGYTVDRDVNAARNILAAGTLRFGVVGLAGEAMVAEPAPLQQSAKSMRGS

SEQ ID NO: 41101 - protein, 241 aa, Marinobacter sp.
MACANDRTISTVKRKRTGGEKKIQHRISRYSEKKAQIQNNNSHHISKNIADNTPLIAAFEDLKISNMVRKPKATLCEDTGRWLANGASAKRGLNKAIHSVNMGQIRQFTAYKLKDRGKLMVRVKPHYSSQECSQCGHTEKGNRPSQATFQCQGCGYAANADDNAACVIKQRGITHVRSDAFSIEKTPRTIKVRRKKANKAQELASSGSGDCVSPGIQAVISDALNSRRTRENPCPSETRTL

SEQ ID NO: 41102 - protein, 487 aa, unknown
  TnpB Polypeptide
MDQSVRKTPDKATEEEKKKRKRKKKTKQTITRAVTHLRLIEANPGKLDALDHLVVAYLALTQQYVTLFCEAETSPDKFAVPVFETELSDRWHRVAMQQAAGIAKSWRTNRQNAYEAYLEDMADYAEAKAKAEAEGRPLGPQQKEPQWRAWNTPFLHVPCIQANANVVVVEQSEDSTFDYWLRISTLEKGNPLRVPVKLASYHTSALKDRTLNTSTTLQKRNGIWWLTLSFDEDVPLQTAAEAPKVGVDVGIVHFITTSTNKEYGSFHGKMARQHKRDREKRRRKAKLRACLEKKGVPCEQSPSTSSATGQRLGRFVRQEINRAVNEMIKDHPHARIIYEELNVASMRFKARSMNSYLYASNLAHIPEHIAWATAKRGMAAHTVKAAYSSQECPRCHCVDRANRPNQQTFCCVVCGYNEQADRKAAHTLADRWGDTDLAACRGKKEVKALLLKRHENWKQKNGLVVVQPAVQLGLWDLSQTSTDVAEC

SEQ ID NO: 41103 - protein, 414 aa, Bifidobacterium sp.
VQKPTSAMKRGRRPVDREKTEPMYRGVVVALDPSPAQKKQLVGHAGAYRFAYNCVLRHVLEARNNGDSISWSFYSLRKWWNLQKDTVAPWWRKYSKEAFSSGIESLSRALRTFADSRVGDKGCGKIGFPKFKSKKGGRLHFAYTTGIFGIIENDSYGLRLPRIGRVHCMENVRKRVGNRHVTRMTIFLEAGRWYASLTVQDPETPNAPARSRGKTVRSVGVDLGLKSLATLSDGVVFPNPRALEKHARSLRKAQRKLARKRPGSKRRERQRNVVAHIHRHAANCRNDAIHKTTTFLAKTYDEISVEDLNVKGMMRNHRLAGGLQDASFGEFRRQLTYKCLENGAALHVVNRFYPSSKTCSSCGTVRTKLFLKERVFHCPNCGLTIDRDLNAAINIDVAGSAPETKNARGVLTRP

SEQ ID NO: 41104 - protein, 253 aa, Salmonella sp.
VKRDQANSRISLPKPGWIRYRNSREVTGEVKNVTVSQSCGKWYVSIRTEYEVADPVHNAGSMVGLDAGVTKLATLSDGTVYQPANSFKVNQRMLVTLQRQISRKVKFSHNWQKQKRKIQQLYSRIANIRRDYLHKVTTTVSKNHAMIVIEDLKMKNMSESAVGTVSQPGRNVRAKSGLNRSIPDQGGMKYVASLSTSRSGAVVRCWQSRQRTPVSVVPVAGIQQKGAASRKVNLCVRYVATPQTPMSTALTAF

SEQ ID NO: 41105 - protein, 383 aa, unknown
  TnpB Polypeptide
VAVVHKSIRVKLYPTEEQKILIDKTIGCVRFVYNQTLADCKQLYEQSKRFPTKSERSKNLVPLKEKHEFLKEADSRALQQSVRDFNSALDNFFKNRNHFGFPKFKTKRVSKQSYKTQYSGGWGGADVLDNQHIKLPKLGRVETKHFNMPKEYKLFNIAVEKTRTNKYYASICIETEVQPLPKTGKQVGFDLGLIDLLIGSDETRFERPKFNYRNKDKLAKEQRKLSKMRTKLERAKLNLDECKNYQKQKHKVSKLREHVANCAKDFNHKLSRKLVEEYDFLAFENLNVEGMKKNHHVAYAISDVRWSRLLNFIQYKCNWYGKEFKQVDRFYASSKICSCCGAYHKDIVNSLSIREWVCPDCGTHHDRDVNAARNILTRALSVA

SEQ ID NO: 41106 - protein, 463 aa, unknown
  TnpB Polypeptide
MVANYLPGGMKTTFRFRLYPSHMQERKLLRMVEAGRQLWNDALAHRKRRWEEKRLSTTYSQQCLILTAERRANPLLREFCSQAGQDILKRLDGAFNAFFAHRARYPRFKKFSASGSFTYPQAYNGSAKPDAVRKRLFLSKVGSVKLVFHRQLPSGRERLKTCTVIREPNGEWYASLVYEQDREAPKLITKFVSPVGVDLGLRSLIATTDGVKIAHPQFLGNAEERLKRLQRDFSKTRKGSKNREKARRLLAVRSSKVSRQRADFNHKLSAQLVRSHDLIAFEDMKVRNMVRNHALAKSIADAGWGQLRTFSEYKAERTGKLVVYVPTAYSTQECRFCGTLNQVPLKIRSFDCRGCGRTLDRDFNAAWIVLKRGLAQVGQDMPELKPVETGPLPVPTTGRASPVDEAGTIRGDDSCRPSKKPPLEAHHFQSWEDVTGPCTALPSSHTPEASPERRWACATSLSL

SEQ ID NO: 41107 - protein, 160 aa, Campylobacter sp.
MQKELTILKKQDEYKYLNECASQSLQMALRQLFTAFDNFFAKRAKYPNFKSKKNAKQSYAIPQNIKLDDKKVYIPKFIEGIKAKIHRKLDKDYTIKQAFISKIANEYYIAISYENNKSLPKPKVIENAVGLDMGLSNLIIRSDGIVYKNHKFLQDKENNS

SEQ ID NO: 41108 - protein, 655 aa, unknown
  TnpB Polypeptide
MLLSKKTSIKVSQEYANVIGHMCYAASKLWNVCNYERQHYKEMGMEKYPDWYYQKKSHREDLWYKQLPSQTAQEVCKLLDKAWKSFYALKRSGGIENPRPPRFKQESIPITYMQMGIVHEWDTEKVRLSLPKALKRYMEETYQIHENFLYLENKIFRGMDQIKQLRIYPPEKGECKVIVVYEISEREELSQNGHYLSVDLGLHNLMTCYDSGNGNTFILGRRYLALERYFHKEIARVQAQWYGQQSVKEIKHPVTSKHIRRLYQKKQNSVTDYLHKITRYFAKYCREQGITCVVAGDIRNIRKGKDLGHRTNQKFHNLPYNRLYSMMEYKLKMYGIRFVRQEESYTSQCSPLSPEVEKRYAQPCNRKQRGLYRDRNRKYNADAVGKGIGVAVLDTGIFPHIDFGSRISVFRDFTGVRRSPYDDNGHGTHVSGILAGDGTASGGKYKGAAPGCSIAALKVLDRFGNGSREDVMRAFRWIMEFGSIYHIRIVNISVGTTSRDHKEQTDLLEGVEKLWDLGFVVVAAAGNQGPGAGTVTAPGSSRKIITVGSSDMLNGRKAVSGRGPTFDCVCKPDLVAPGSQVIACAPGLPYSYGLKSGTSMSTPLVSGGIACLLEKDPRLSNVEVKMLLRENAEDMGLPRNQQGWGKFNCEKLLAG

SEQ ID NO: 41109 - protein, 464 aa, unknown
  TnpB Polypeptide
MNNKQHISTLIVKSKPLSVKKIQRLNDLAQKLGKVRDDVWQEFGSMKGATTNFRKMRNEWVAQKKVFGVPAEYWKQTAQDAFHNIELNRAAIMVNVKRDINNKYPNNKLNKDIRKNLYTSLKTGDWVNDKYLCRLFRKYFHRGHNHTDNQLVLGHNRQFRWFENNGTGYIQLIGLGRKEKISVPLHSNYPIDGTIRVILKDDYVAVHYNVKHEYVKPCGTKEIGLDKGYTEAFMGSDGKTYGEGLGKKLSAFSDKKKEINKNRNKLRAIAKNHKDTKKAEKIFNNNLGTKKRSQQQERHRANVKRVVDIAVNQIVDNHGHIVVEDLTKNFKSKKRIDKNQTRRLNSWIKGVLAESLNIISDRRGASLTLINPAYTSQICCLCGAFGKRKGDIFYCASHGELDADINAACNILGRASESQISRFTPYKEVREILQKCCSRSVETIPPGLELHKIKFVSTKSELSN

SEQ ID NO: 41110 - protein, 267 aa, Okeania sp.
MPKHAQQICNGVVESFSSFRELLKLFGKDELANKPKPPNYRKPGLFTVSYPKKWLKLTNEKIRVPLGCKVKAWFGLEAFYIQMASNLDWDSIKEIRILPRHGCFYTEFVYSMKIQSVKLDSGQALSIDHGLNNWLTCVDTQGHSFIIDGKHIKSKNQWYNKQVAIIRENQPPGFWSERLACITEKRNRQMRDAVNKTARLIINHCLENGIGTVVFGWNKGQKQSIQLGAKTNQKFVQIPTGRLKERIEQLCNLYGLQFVETEESYTS

SEQ ID NO: 41111 - protein, 413 aa, unknown
  TnpB Polypeptide
MKKVVRVKLRVTPEQSLALTRTLTLANEVASAVSEVAYTEQVFHRVSLQKLTYALAKTAGLSAQPAIHAIRKVADAYKTLHANAAAGNLGRPGSKRWNRGMGKPVRFRADAAQPFDDRCLSWQHLPTPEQRQDGTHGGTISIWTVEGRLQGIPFVGHPAHLDLLREHRQGQTDLVTHNGDFYLVATIDIPDPDLLDPTGFLGVDLGVKNIASTNDGVRHAGKHVNHVRAKNRHIRQRLQKKGTKSAKRLAKKLSGREARFARNTNHVISKTIVTEAKRTGRGIALEDLRGIRDRVRLRKPQRVATSSWAFAELGEMIAYKARAAGVPVVYVDPAYTSQQCSDCHHVEKKNRKKQAVFICRSCGVLLHADNNAGRNIAHRAEVTWGIVTCPDAVCNTTASGGQNRKPSASAEGG

SEQ ID NO: 41112 - protein, 230 aa, unknown
  TnpB Polypeptide
LIVEDEKEFPVKQVFSEYTTIGVDVGIKNFSVISNGEEVENPNYLKNSLKSSKVLQKRVSRKQNGSKNREKAKQKLAVLHEKITNQRNDFQHKLSFKLVSENQAIAVETLNVKCMIKNHHLAQAIGDSAWSSFVTKLEYKSEWLGKTIRMIGKFEPSSKICHFCGYHNFELTLKDREWKCPDCKTKHDRDINAAINIKKFALIDQNLLETWHQWNAWYLGLGTCSQKRKE

SEQ ID NO: 41113 - protein, 444 aa, unknown
  TnpB Polypeptide
MKRANQFDVRSRSVKEREVFVRWLDASASLWNEINYARRQAFLSDDDESVWDADTGTLEGKYKGVLSSSVAQQIIRKNSEAWRSFFSSNEKYHAAKLDKKPSPPGYWGNEEDGRVLRTYVRNDQYTIEFGDRSRLEVPIGSELKDELGLSRNQRLRVEVAGNPKWSGEQGRLELVYDELTDTFRAFQPVDINDSRLDSPLASHEAALDVGANNLVACTTTTGSRLLYDGRELFERFRETSKQIAHYQSLLEDQRKSSERIDRLYRKRTNRRDHAQDALIRDLVERLYDEGVSKLYVGDIKGILSTHWSPAVNEKTHNFWAHRRFVTRLKSVCEEYGIAVEEESEAWTSQECPECGEREETIRHEDSLACPCGFEGHADLVASESFLRRQTEVGSMARPVYLKWNNHTWREDHNPPSIAETMANEEYTNQSTVTSGNIALGDSDD

SEQ ID NO: 41114 - protein, 377 aa, Thiorhodospira sp.
MEVKRAYRFRFHPTPAQEQTLARTFGCVRFAYNHMLRLRTEAWFKDQKRVGYHETSALLTALKKTPEHAWLNEVSSVPVQQALRHLQTAFVNFFAKRAGYPQFKQKYGKQSAEYTTSAFKWDGKALKLAKMDAPLAIRWSRTLPKVAKVTTVTVSKDTAGRYFVSLLCDDTVSPKPEVTGKVGIDLGLTHFAILSTGEKIAAPNTFRKNEAKLAKLQRRLAKKQKGSRNRAKTRLKVARLHTRITDARKDFLHTLSTRLVNENQVIAVETLAVSNLQKNRCLAKSISDASWSEFVRQLKYKAQWCGRMLVGIDRGYPSSKRCSECGHTVAKMPLSVREWVCPECGNLHDRDVNAARNVLTAGLAGLVCTENVSPVLL

SEQ ID NO: 41115 - protein, 647 aa, Caldilineaceae sp.
VRWPDPYWTASRFRVPTGPPVRGTGPLRSGLVRGRSPPGGVLWWVPAWPFPPDGERDSPSPIGQPLAAALAVGREVAVKGGLAHAHDAADLIDAEGAIPHQFRGAGQHAVVHLALAPALATAGAGRGQAGQGPFSDQVALEFGQGAAEVEGQPAGRGGGVQVLLQRDELHLPFRQPVDLPDQVLQAASQAIQPPHHKGVAGPGMGQGVLQLGTLGPGHRPATGVGVDAFAAGRLQGVDLQVVELLVGADARIADLHGPMVPQTASVPLSELRLWNRFLERMRPAVAVDPAGPPTAVPQTRLPVVLARGVAQQTVQVGRGPLAGLRPPEAGARRRSPSARRAGTWACPAKQVRLRKEGDARHPQWYAHVFHEVPADRVPLLAATGTLGLDRNVGQATDSDGCIYTVPDAAKLEANSKRKQRKADKARERSRRNGQPLSHRGRRICGQLSKPRRKQKRKRQSAACQPNRTLADTAHTVVVEDLDTKAMTGVQWVRWRPRAGTSGRRPALNRGMLKSNWGLLERQLAYKAGALAKVDPAYMSQTCAVCQHADRANRKTQALFHCTACGPTANGDHNAARNILARGSPLVRPAREVEASARRGAFPSGTPTTREPGRQGPMGRPPYRVSTPRYKPHCKQWDKTAPKAALPV

SEQ ID NO: 41116 - protein, 345 aa, Competibacteraceae sp.
MLLMIKTFQYRIKDSGCAAELTALARACNQVWNFCNESQDHALRWNQRWPTYQDLCKLTTGSSKELGLHSQTVQAVCEQYETRRKQFKKRKLRWRGKRSPGWIPFKAVGVQVIDDTVRYAGHTFRFWNRRELPGPVKCGSFSQDSRQRWYVNFVCEVPEAEATTGTKHIGIDLGLKTLATCSDGHKIEAPQWYRRQQKRIAEHQRKRRSRHARNLHAKIANRRKDFLHKESHRLTQECELIVIGNISSSKLTKANLAKSVNDAGWSMFRHFLDYKAIARKVVYREVSEHLSTQTCSGCGSMGGPKGRKGLGVREWVCGECHAVHDRDVNAALNILRLGHQSLALK

SEQ ID NO: 41117 - protein, 344 aa, unknown
  TnpB Polypeptide
MILTFKVKHGRNFSLELKRAKQIAEFALKTKTQSSKDVKQFGLKSAISNQILREFSRNRRLKRVKNVNLIVPHKSIKRELNKIYIPCLKLYLPITFRTDFLDVRQIELDEEYAYISVTIPEPEIKVVTNYIGVDRNATGHIAVVANPSNGKVFKLGKSAQHTHNKYRNIRRTLQKCGKYGKLKAIKDRESRIVRDINHKISKKIVDIAEASNSGIKLERLKGIRNSRHHGRTFNGTLHSWGFYQLENFIAYKSKMRGIPLVYVEPRNTSKECSRCGDIGARQGKKFVCHHCGHVENADVNASFNIALRPSISRFLADRDVRKGCSDTPKTALARTMSTVEPHGL

SEQ ID NO: 41118 - protein, 489 aa, Actinoplanes sp.
MATGAVKRAFKYRFYPSSKQADLLNRTFGCVRKVYNLALAARTEAWYQRRERVNYNATSAMLTAWKKTEALAFLNEVSSVPLQQTLRHLQGAYTNFFAGRAKYPRFKSRKKSRASAEFTPSAFRYRDGRLYLAKLDQPLDVVWSRPLPEGAAPSTVTVSRDAAGRWFVSLLCEDTITPAAGTAAVGIDAGLDSLLTLSTGEKITNLRHERRDRARLARAQRKLAKKEKGDDKKNRVKARIKVARIHARIADRRRDVLHKVTTRLVRENQTIVIEDLTVRNMVKNHSLARAISDAAWRTFREMLEYKADWHDRTVIAVDRWLPSSKLCSACGRLAEKMPLHIRSWTCPCGAIHDRDINAARNILAAGLAVTACGDGVRPQRESSRTGQSSAKQEPRGRPTDSPPLSGRGGCQDRIFNPRPPGGRQPAQEIYDHLYGGEPVEVRGRCRTGDGRAAAVRPDRSSRPRGHRDRHRARADQGGRAPHPDRAAQP

SEQ ID NO: 41119 - protein, 390 aa, Unicellular sp.
MLRVVKVRLYPNTEQQHLLAQSFGNCRWLYNYCLNLMNQTYIGTGKGLSGYEVKKLIPQLKKEHEWLKLTYSQCLQQVCLNLGVAFNNFFERRAKYPRFKSKHGRQSIQYPQNVEVLDGSLKIPKVGIVKAIIHRPIEGKIKTVTISKNCCDHYFASVLFDDGKDKPESNTGGKAVGIDVGLNHFAVTSDGSKFINSRFLSKYEKNLKRKQQQLSRKQKGSNNRNKARKKVAKVHHKITNCREDFLHKLSRRIVDENQVIVTENLNVKGMMKNHCLAKAIGQVGWGMFMTMLKYKAENKGKTYVEVDRFFPSSKTCHVCLNQVSSLPLDVRQWTCKSCNTTHDRDINAAINLREEGLRILTCGTRDKACRQTVSRSNRGRKKSTTTLVSG

SEQ ID NO: 41120 - protein, 420 aa, Streptomyces sp.
MCIRDRGRPGGYRSKHEWFAKTRRLAILEDRYERVRAEREAGQVCVVRGGRRLLNQRHHLTAAKKTPEQWRSEWEAARWFLTADGESGKRHGNETIRVTCDGEVSIKLPAPLAEHANARHGRYVLAARVAFPHRGTQWRDRVTCNRAVAYRIHLDVTRGRWYLDASWTRKDLPVVPLDALRASGVIGVDTNADHLAAWLLDEHGNPTGAPHRFDYDLTGTATHRDAQLRHALTRLLHWATTRGMQAIAIEDLDFTDSTTREKHGRKKKFRQLVSGIPTGKLRARLLSMCAEAGISVIAVDPAYTSMWGAEHWQKPLTSKNRKTSRHAAASVAIGRRALGHAIRRRTAPPHDDRSDRRGHRTAQAGPHDQGREETRPRVPGPRTRCVQPDAVGTRATSASKTVRDAPVEPVWVQDPLLLTD

SEQ ID NO: 41121 - protein, 408 aa, Symploca sp.
MLVLEYKIKAKLAQYRAIDKAIRTVQFVRNKCLRYWIDAPKEAKIKRFDLNKYSTELRSEFPFVKDLNSMACQASAERSWLSISRFYDNCKSKKPGKKGFPCFQKNNRSVEYKTTGWALHSTKRRLTITDKKGIGELKLLGKWNIHTYPVQSIKRVRLLRRADGYYCQFCIDVESIDVQPQTGREIGLDVGLESFYTDSNGYQEPNPRFLRIAESDLKQAQRSIYKKHKGSTRRCKARARYSKKHLRVSRQRNEHAKRLARNVCKSNDLVAYEDLRVSNLLKNHSLAKSIADASWYQFRQWIEYFANKFGKLAVAVPPQYTSQECSQCKRVVKKSLSTRTHICQCGCVLHRDTNAAINILLKAKSRGGHPRSNAKGVATSTLVGATLLEQVATVSLESPSRSVRGVST

SEQ ID NO: 41122 - protein, 407 aa, Synechococcales sp.
MFVVECKIRKPKPNQILAMEEAIKTSQFVRNKVLRFWMDNKGMGKTELFRYNTQLRAEYPFVKDLNSHACQTAVERTLRAINRFYDNCKKQVQGKKGYPRFKKNSRSVEYKVSGWKLLENRNKITFTDKKNIGEVKLIGTRDLNYYQLEQIKRVRIIRRADGYYVQFSIQLDPRDTVKPLIPSQECCGIDMGLKYFLAESNGNIEPIPQFYRKAEKQLNKLNRRKSKKFQKGKPQSKNYHKARNRYARKHLKVSRQREEFAKRVALRLIKSKDLVAYEDLSVKNMVRNRKLAKSISDAGWSLFRRWLEYFAYKYGKIAIAVPPHNTSQQCSNCGAIVKKSLSARTHICPQCGFVEDRDVNAALVILQRGLNTVGHTEINAWGKDTSTLVGAILSEQVTLMNQESPRL

SEQ ID NO: 41123 - protein, 294 aa, Microcoleus sp.
MLQQVLRKLETAFLDMKRKGMGFPRFKNKYRMRSFVFPQMLKNCLQGNTIKLPQLGIVEFIKSREIPNGFAIEQAQIVRKASGYFVILFLECDVNVPQPVAQGFPVGIDLGLDQFLATSEGKLVKRPKFLKIEHRKLKLLQRRLKNKKKGSNNRHKLNRKIARLHQRVTDTRKDWQFKLAHDLALDAGMIFVEDIDFRVWAKGRFGKHTLDAGFGQFIAILSWVCWKRGVHFEKVNKDYTSQVCPNCDRHTGKKALNERVHNCPECGYTTHRDVAAAQVIRFSRIVGGGTLRRH

SEQ ID NO: 41124 - protein, 404 aa, Microcoleus sp.
VFNLTFEYKLKPTTAQVAIFEDWLEQCRRVYNYALSERKDWFKSRSCQINACSIRSEYIIPADKLRPTYASQCKGLTAYRKTSTSLQQINAQVLQQILRRLEKAFVSMWEQNHGFPRFKKKGAMRSFVFPQMGVMPVVSNCIKLPVIGWVRFRLSRPIPDGGIVKQARVVRRVSGWYVMLTIQWDVYIPDIIPHGNPVGIDVGLSNFIATSNGLLIKRHRFFIDAERKLKLLQKRVSRKRIGSNNWKKAHEKVALLHEYVANCRKDWHRKLSHQICNDAGMVFVEDLNLIGLSRGMLGKHCLDASFGQFLKILEQACFKRGVYFQKVDARKTSQICPNCGTETGKKELSERTHNCSNCGYTTDRDVAAAQIVLQRGLAAVGYTVKMLAEGKFIGIPAKQESPRL

SEQ ID NO: 41125 - protein, 523 aa, Microcoleus sp.
MKDRLNQSKMEQGSASTTLSLTNPMEKSVQSSATVESVVPSKKMTLLDKSNSCDSDTQTRKSSKTLALDLTSKEKDCKPYWSDLCAGISSRLLLPVETDCADSDLNFSSSWQNKTVEKSWFSQILFTRANPNLQPIFLPSFTSLVAECTASESTARKSKKIRLFLSPEQKAILKQWLGVSRYVYNTTIKYLQQPGTKANWMSIKTQILNGLPDWAKPVPFQIKSIAIKDACVAVKKAKADFKKTGKICSCKFRSRKNTKQSICIPKSAIGTQGIYYTKLGQSKLKEALPKDFSDGQLTLAYGEYYIVVSEEVQPRQTDNQGRVVALDPGVRTFMTFFSESSYGWLGNDSNLWIQKLCFRVDKLSSRMSQASSRQRKKFKKAADRLKSRIQHLVKELHQKIAKFLVDNFDAILLPSFESSQMVSKSRRKIRSKTVRQMLTLSHYQFKKHLEWKAWEQGKVALTSINEAYTSKTVSWTGEVKKIGGSRTIKDSDGNQMNRDLNGARGIFLRALVDTPWLHSFLAV

SEQ ID NO: 41126 - protein, 382 aa, unknown
  TnpB Polypeptide
MTIVQKSIRVRLYPTEEQEVLIDKTIGCCRFVHNQTLENCKQSYEQTQHFPSQNERIKNLVPLKETNDFLKEVDSTALQQSVRDFNSSLDNFFKNRNHFGFPKFKSKHNLKQSYRTPYNNGNANVLDNKHLKLPKLGKVKTKRFDMPEVYKILNITVEKTDTGKYYASICIETEVQPLHKTGKRVGFDLCLIDLLIGSDGTRYKRPKFDYVNKNKLAQEQRKLSKMRTKLERVNANLDECKNYQKQRRKVAKLHEHIANSAKDFNHKLSRKLVEEYDFIAMEDLNIEGMKMNHGLAYSIIDVRWSKLLSFIQYKCLWYGKDFKQVDRFYASSKICSCCGTYHKDIVNSLSVREWICPDCGTRHDRDVNAAKNILIQALSVGV

SEQ ID NO: 41127 - protein, 417 aa, unknown
  TnpB Polypeptide
MYEERNRKIKEHGKATRERRSQMDCHVISAKVQENRLSKAKLEKLIRFFLEGKWLYNAVVASETLTLEDTSTVQVKVNGSFETREIKNLSSHMRQSVVDSARVNASNLSKAKKKGLKVGKLKFKKECNEIDLKQFGNTYSFKSHNKISIQKIGVLVVNGLEQINLDEVEFANAKLIQKPSGFYINITVYTKKKSQPETSKEILCLDMGIKDQLTFSNGVKVNFYLEESEQLKGLMRKLSRQHKGSNQYKQTLSRIKRIYEHYNNKKNDVVNKLNFVLSKNYIICFQDELLNQWKQKKSKRRFSFGRKVQHGILGRVKDKLKKNSSNVMLESSVPTTQACPECGCLTKHSLDKRKYHCDHCGFENADRDIHSANMMVLLSGYGTYRSLNTDTVSTERMVGLLDSLSELGVVVKTTDSM

SEQ ID NO: 41128 - protein, 553 aa, unknown
  TnpB Polypeptide
MGTPEASQMDFHNYGNANPSKYYAGVFTMYNKEKLAELGYEYSLGDIGITNATTMNVTYKDSRVSEYDNQYGHNYKLVAQGQVVDNFLQFDLHNLGTTESGKTISAHVTVDKWHQSHASATYSFRKIGDMGGYGQGVRTTYEFYDEATGQPINLVRMFGIGDIEAGENLGITSNDKVSSIVPIAPRDAAKGYTPGTHGYASVQQMSEKTAWTFGDEHYANANHTPLPGDPVTVGNNNSTPLAQTISIFSGNKLTASWNGAGGGLDLNSRNVLFKEKPEKITDENYPNPKEPNYEKIPDEPKYTAVPDALPEPTAPEAPTLNTITEPVAPTAPGEAPTEPKKPEDIDVSRTIHYHRAYRLKPVTTKWVDEDGNELKTPKFTYAFKDKLAKEQRKLSKMRTKLERVNVNLDECKNYQKQRHKVAKLHEYVSNCAKDFNHKLSRKLVEEYDLLAFENLNVAGMKKNHYLAYSISDVRWSQLVNFIQYKCQWYGKEFRQVDRFYASSKICSECGTYHKDIVNSLSVREWTCPDCGTHHDRDVNAAKNILIKALSVDV

SEQ ID NO: 41129 - protein, 382 aa, unknown
  TnpB Polypeptide
MTAIQKGIRVRLYPTNEQEILINKTFGCCRFVHNQTLTDCKQSYEQTQHFPSKNERIKNLVPLKEENEFLKEVDSTALQQSVRDLNSSMDNFFKNRSHFGFPKFKSKHDLKQSYRTPYNGGNADVLDNKHLKLPKLGRVKTKRFDMPEVYKIFNITVERTNTGKYYASICIETDVQPLPKTDKQVGFDLGLIDLLIGSDGSRFGRPKFDYLNKEKLAQEQRKLSKMRTKLERVNANLDECKNYQKQKHKVAKLHEHVANCAKDFNHKLSRKLVEEYDLIAMENLNVNGLIKNHSLAYSIADVRWSQLVNFIQYKCHWYEKKFVQVDRFYASSKICSCCGTYHKDIVNSLSVREWICPNCGTHHDRDVNAAKNILIQALSVGV

SEQ ID NO: 41130 - protein, 379 aa, unknown
  TnpB Polypeptide
MIQKSIRVRLYPTEEQEVLIDKTIGCCRFVHNQTLENCKQSYEQTRHFPSGKERSANLIPLKEEYEFLKEVSAVALQQSLRDLDSALNNFFKNRNHFGFPQFKSKHKTKQSYRTPYGNGIARIIDNKHIRLPKLEKVRTKKFLVPDEYRLFNITVERTTTGKYYASICIETEVQPLPKTRKQVGFDLGLIDLLIGSDGTRIERPKFNYVNRDKLAQEQKKLSKMRTKLERVNANLDECKNYQKQKHKVAKLHEHTANCAKDFNHKLSRKLVEEYDFIAMEDLNIEGMKRNHKLAYSISDVRWSQLVGFIRYKCLWYEKKFVQAPRFYASSKICSECGTYHKDIVNSLSIREWVCPDCGTHHDRDVNAAKNILIQALSVA

SEQ ID NO: 41131 - protein, 382 aa, unknown
  TnpB Polypeptide
MTIVQKGIRVRLYPTEEQEILINKTLGCCRFVHNKTLADCKQSYEQTQHFPSQNERIKNLIPLKKTYEFLKEVDSTALQQSVRDFNSSLDNFFKNRSHFGFPQFKSKHNLKQSYRTPYNNGNADVLDNKHIKLPKLGRVRTKRFDMPEVYKIFNITVERTSTGKYYASICIETEAQSLPKTGRQVGFDLGLIDILIGSDGTRYERPKFNCANKDRLAKEQHKLSKMRTKLERVNANLDECKNYQKQKRKVAKLHEHISNCAKDFNHKLSRKLVEEYDLLAFEDLNISGLVKNHKLAYSISDVRWSQLVNFIQYKCLWYGKEFRQVDRFYASSKICSECGTYHKDIVNSLSVREWTCPDCGTHHDRDVNAAKNILIQALSVGI

SEQ ID NO: 41132 - protein, 382 aa, unknown
  TnpB Polypeptide
MAAIQKGIRVRLYPTEEQKVLINKTIGCVRFVYNQTLADCKQSYEQTQHFLSGKERSANLVPLKKKCEFLKEVSAVALQQSIRDLDYALNNFFKNKSHFGFPRFKSKHDHKQSYRTPYNNGVADVLDNKHLKLPKLGRVKTKRFDLPDVCRIFNVTVEKTATGKYYASICIETEVQPLHKTGKQVGFDLGLKDLLIGSDGTRFARPRFDYANKDKLAQEQRKLSKMRTKLERADANLDECRNYQKQKHKVVKLQEHITNCAKDFNHKLSRKLVEEYDFLAFENLNVEGMKKNHKLAYSISDVRWSQLLNFLQYKCQWYGKNFVQVERFYASSKICSCCGTYHKDIVNSLSVREWICPDCGTHHDRDENVARNILNQALSVGV

SEQ ID NO: 41133 - protein, 382 aa, unknown
  TnpB Polypeptide
MAVVQKGIRVRLYPTEKQEVLINKTLGCVRFVHNQTLANCKQSYEQTQHFPSKKERSANIVKMKEEHPFLSDVDACALQNSVKDFDFALDNFFKNREHFGFPKFKSKCVGKQSYRTPGGRSNVGIVDNKHIKLPKLGRVKTKFFDMPESYKIFNITVEKTTTGKYYASICIEAEVKPLPKTNKQAGFDLGLKDLLISSDGTRVERPKFAYVFKDKLAKEQRKLSKMRTKLERANANLDECKNYQKQKHKVAKLHEHISNCAKDFNHKLSRKLAEEYDFIAMEDLNVSGLIKNHKLAYSIADVRWSQLLGFIRYKCQWYGKNFVQVDRFYASSKICSCCGTYHKDIVNSLKVREWICPDCGTHHDRDENTAKNILIKALSVGV

SEQ ID NO: 41134 - protein, 380 aa, unknown
  TnpB Polypeptide
LYNKNRKRIDLPMKRNKAFKFRLYPTYEQEVLINKTIGCCRFVYNKMLAERKESYESTGESISRTPSELKIEFPFLKETDHKALSSEWINLNKAYRNFFRDKRVGFPKFKSKKNDRKSYTTILSKTKAFNASRKFIKLPKIGFVRCEIHREIPSDWKIKSATISQTSTGKFYISVTFEYEVEVTAIILNRNNAIGIDYKSNGFGVTSEGEILSNHRYFRENQSKLSREQRRLSRKKKNSKNFKKQKMRVALVHEHISNCRKDQAHKLSHLIAEKYDVVCLEDINLQNIAQSLNLGKSTNDNGFGMFREFLKYKMEERGKYLIYIDKWDATSTVCSECGTYHKDIVNSLSIREWTCPDCGANHDRDINAAKNILRLGLERL

SEQ ID NO: 41135 - protein, 688 aa, unknown
  TnpB Polypeptide
MTSKKSPQVTPKPTQKSRKIKPLKSKEPRTPKELAPELKEKLLSATIENHEDLHFITPKRLDQLNVISEVPAYTVSTRIVDMKKASKEDLAALPRLQLAFGHMVNHFANELEKKEYRAYLSGSFTKFRDHLKKNHKIPVRELCLHFCYCALQKAFEMQKSSWRLAQESAKSDLMSKPIWSKTSPVQDGEAGSHSNLPRSDDSSRKSGSSSESLKKAAPSAPAVFTADEKEFMLRLLNELNKSFWQLMDGGDIAPKPGEKVRDHKKLCTFIRHLIREHRGTPPRLRNPQSAEVWFDDCTYKFAVAGGTEFFDLTQLRKDENDDPPRLHIPLLGIGPNALRKGSGSGTYKRPTIRMSGSPETGYRFTVQHKLDEKHRRFSPALKKLNEEMAKSGLLRIVALDLGFSEVFTDDDGNRYGTRRERQVTQRGVTKTCVDPSLGDLLIKRSKILYDAGRGRGPLQARARNCTDKVVARRIERCCLSNGTLRKELHANEEAIDSLINHAVNELIKRNPANVYVVERFGEFSYESIPVRVRRWLSGWVRGKIIDALKLKGALFGFEVVEVNCAYTSQRCPVCAHVERANRNGDSFKCRNEDCEAAFDADQVAAFNLLRRAHDTRFDGFLTKESVYKLEREDYEAWCRDHDLPISPDPKLAKREAKPARKVLRRKKASPEELAELVSWAENRGRRHA

SEQ ID NO: 41136 - protein, 526 aa, unknown
  TnpB Polypeptide
MRTIKAYSLSLNRDKWAALYAIAQAYAAEKNDHLWAFGDDLTFANYDRQEQCRDALLDADYETPQGLQGRMWKMALKDAYETVLRNWAALAEELRGRVAGQKDWTGPQKHYANWLLKNEKRLAQLAGGKAPVADHIALSYRQRKGVQNYLRRQIRLWRGQRSRVRIVRSFALDSNMYSLFEDKGRQYIRVMNLQGQKRVVIPLTGKHVISGNIRVILDGARQRVEVHYTAEVDVPASLKGEAAGLDAGLSEVFTDEQGNRYGKEIGEILINDSDQVCDKGRKRNKLYQLEQKARAAGKIQKANNIRRFNLGNVKQRKQRRKMQIEIERQVNTALNQVLDKRQPAQIIIEKLDLRGKTPSKQLSRRVSLWARSTLNDRTEFKASSGGSCRQHVNPAYSSQTCPSCGFVHRRNRNGDRFQCQYCRCRDDADRVAAHNLKARASDPEITLFTPAARVKAILLDRFYARLREAEGEAPKQADGLPGNLKQSRSVSGRTPGTPRRKPKSQPESETTVAIRPLVGENHRAKS

SEQ ID NO: 41137 - protein, 417 aa, Chloroflexi sp.
MSVRTYQFACQLPQSKTDALNMESARIYNAVMVEHWRIYRKKGVWLSQSVAEKLNDNYDADTSKLLHAHSIDAAQQAFYKACKQVHIRRKQGDDHVRFPYKRRRFRTTVWKSSGVYAVENGVMYLSLARGYERLAVKLPSHLIGMAKCHILEVRLVFNKSTFRYSWHVVVEDGVQPEPNGQSIAGVDLGEIHPAVITDGVEACVVSCRELRALHQGRNKRIASIDAKLATYIKGSRRWRKLKARKRRFLAQCAQQQRDIEHKIARSVVDWAQEREIGLLAIGDVRDIADGKRLNKKSQQKIANWSHGTIRKYIGYKAAEVGIEVNDKVSERYSTQTCPSCGQRHKPKGRIFMCPNCGSRFHRDVVGAANIASRYAFDELGRYPTPEPKYRHPVDVRGKRSPFGTGEMARFGENRLRL

SEQ ID NO: 41138 - protein, 316 aa, unknown
  TnpB Polypeptide
VTWKQNGIRHDTKHNRVRLSKGANHKEHPKAWEYILVEYEVRDDVDVENLQQVRAVYDSANDRWELHLICTHEIETPEPPGAETAGIDLGICNFAAVAYSTDEDDLYPGNRLKQDGYYFPKEIATCDDAGSNRASRLHHTWSERRTHFFHSLAKHIVERCVQQGVGRITIGDLEGVREDDDTGEAKNWGRHGNLDLHGWAFDRFTRILTYKAKVEGIEVTAVDERDTSKTCCVCGRTDDSQRVERGLYVCTDCGTAGNADVIGAENIRTEETASNSKSASDMGGDRSTGWLAQPAVYLYDLSNGFRPRDQVVDCKP

SEQ ID NO: 41139 - protein, 180 aa, Cetobacterium sp.
MSELFVSSDNQRADYPRFFRKLETKLAKAGRELSRKVEFSSSWYKAKLKVAKIYQSIKNSRKDFLHKLSRELVTKYNAIILEDLNMKGMSQALNFGKSVADNGWGMFTVMLQYKAMFLGKQVIKIDKWFPSSKTCSSCGNIKDSLSLGERVYSCECGHTMDRDLNASINIREVGRSLLAY

SEQ ID NO: 41140 - protein, 248 aa, unknown
  TnpB Polypeptide
LDAAGRWHVSILVEEAIRPLPTRRNAVGIDLGVDSYAVTSDGETIANPRHYRKLAERLEREQRALSRKTKGSNNHRKAALKVARTHARITDMRRDFLHKLSTRIIRENQTVVLEDLNVKNMAKRCAPKPDPHDPNHWLPNGQSRKTELSRSIMDAGWAEFRRMLEYKAEWYGRQLVTIDRYYPSTQICSHCGAKTGPKGMSGLKVRAWTCPDCGTTHDRDLNAAENILAAGLAVSVCKDGRTGTKVSH

SEQ ID NO: 41141 - protein, 417 aa, unknown
  TnpB Polypeptide
VERHIYKSGSPRFISSKRGLHSVEGKTNKTGIIWKAEKSVFKFAGHTYRVRINKHDDWLTQALQDPTDPAKPRKVKYCRIVRNVRKGKECFDLQLIAEGTSPLKHAYAGKDQRMAIDPGLGSLTYATEDGKIAKVQIAPSADMDHRAMRKIQRAMERSRQATNPDNYEVVDVVRHGKKRQSLKVKSGRLEWRFSKRYEKLRAELAEAHRLAAATRKREHGEVCNWLLGHAGTIIVEDNSFKAFQKGRFGKSIGRYAPAAFYTQLTSKAESAGLQVKVVSPRKLKPTQHNLLTGRFVKHELWERRVQLGDRTGVCWIDRDAAACVNLLYADIDKQTYDPKRIREAVLAGVTAWLDAGVVVIQAREGTTERELRRFRRQGIPSLAVQGLRQKGFRGRSDSKSGAIPEAKSLGYIETFPL

SEQ ID NO: 41142 - protein, 300 aa, unknown
  TnpB Polypeptide
VDEQNHKLILKDFNPEVEFAGRLRWYGKQGRLQIHYDETRNAWHASIPVEVGVEETKTGRKSEHIVRGERKSTQIERPKGNKAASIGLRIDVLASAVMNDGTWLLFKGLRTEEDYFYLEKKIAQVKSLADKTGNVGECEGCAELSREKTRLFKKLTRRLLHLYRSLASYLVKELRDLGALTIYLGYPFDIAQGNGNEFASKWSYRKLMVVVELKVQEYGMKAFEVVEYNTSKYCAYHDVEVARNPRGVIGCPKGHRLHSDLNGALNILKRAVNATVSTVNGPLSFIVDHNTVAPVMRCNP

SEQ ID NO: 41143 - protein, 369 aa, Actinomadura sp.
MARHVKRAFKYRFYPTDEQAAELSRTFGCVRMVYNRALEERTRAWHTEQRRVSYSETSAMLTGWKRTSELMFLSEVSSVPLQQALRHLQAAFTAFFEKRAKHPRFKSRKKSRQSAEYTRSAFTFRDGRLRLAKMSEPLAIKWSRPLPDGAEPTTVTVSLDAAGRWFASLLCEDTIVRPPSVDRAVGVDAGVTSLVTLSNGEKITNPRHGHQERKRLSRAHKDLARKRKGSANREKAKRKLARIHAQIADRRRDFLHKLSTRLVRENQTVVIENLNVAGMVRNRSLARVISDAAWRDLRAMLEYKADWYGREVVVVDRWFPSSKLCSVCGYKAAAMPLHVRAWVCAFCGTGHDRDINAAKNILAAGLAES

SEQ ID NO: 41144 - protein, 391 aa, Bacillus sp.
MLVNKAYKFRIYPNKKQIVLINKTIGCSRFVFNFFLGKQKEIDAYWYIVEEMEQNGQLPTNNWKGKYLNKYETVKSLPELKKHYEFLKEVDSIALQKSVENLADSYGRYYKRQNQQPRFKSKKNPVQSYTTKHTNGNITVVDRHIKLPKLGNVRFAKSREVEGRIISATIRRNPSGKYFVSLATETEIAELPKTNSAVGVDVGLKHFAILSDGKIYSNPKFFHTLEDKLARAQRIMNRRTIGGSNWYKAKIKVARIHEKMANVRKDYLDKISTEIVKNHDIIGMEDLSVSNMLKNCNLAKAISEVSWSQFKTMIVYKAKWYGKQIITVAKNFASSQLCSCCGYKNKDVKNLRLREWECPECHTHHDRDINASLNLKNEAIRLLTVGMTGIA

SEQ ID NO: 41145 - protein, 382 aa, unknown
  TnpB Polypeptide
MPCRVYRYRFYPTPDQVVNLNKTFGCVRYVYNRSLHYRQEAWYVHQENISYPQNSALLTEWKKEPEHAWLNDVSSVPLQQSLRHLQTAYRNFFQGRANYPRFKKKDGRQSAEYTTSAFKWDGESLKLAKQAEPLKIRWSRRFTGKPTTVTVSRDPSGRYFVSFLVDEVVALLPVVDATIGIDVGIKDVVVTSEGVASGNPRHTTKYAARLEKHQRRLARKQKGSNNRRKAKRKVARVHAKMADCRRDFTHKLTTTLIRENQTICVENLAVKNMIKNPTLAKSINDANWGELVRQLEYKAGWYGRTVVAIDRWYPSSKRCSCCGYTLDKLDLATRQWTCPECHTTHNRDVNAARNIKAAGLAVFACGETVIPVVAKAAIGSTR

SEQ ID NO: 41146 - protein, 393 aa, Nitrosococcus sp.
MTEPDSSKIQRSYKFRFYPTSVQRQQLAIEFGHARWVWNTCLTWRGHQYRVHDKCVSGVDFSRQLTFLKKLGAYGWLGEATRDCLMQKLRDQDTAFRNFFAGRAKHPKFKKRAHTQSIRYCFDHRHRGKIKAWMAGQLVLPKLGALKLKWSRRPQGIPKMVTVTQDGAGRYFISFMCEETIQPLPRKPNGIGVDLGVKDIVVTSEGWKSGNPRHLRTYRRLLTKTQRRLSRKVRGSDRWRRQRVRVAKAHARVSNTRQDWLHKLSTALIRQAGFIAMEDLNVRGMMANRRLSKALGDVGMHELKRQLEYKAKWYGREFVQVDRWAPTSKTCSACGTVQKAMPLNVREWTCPDCKSVHDRDINAARNILRLTTVGRTGSDARGGVYQPEVAYGC

SEQ ID NO: 41147 - protein, 450 aa, Lactobacillus sp.
VKTLVRKQKSKKTTLQTFRDIRAKKTEIQYEYLVEKHVIRANDSRYLILDKYAHLANNIYNQALYRFRQSLFKGKWLSYGALDKSFKQSYQQKDCMLYRSMKSVHLAQQILKLVIQNMTSWKKAVKAYQKNPGKFIGRPKLPKYRNKGGKSMVIVDNQTAKLRSNGIVEIPVINNLKIKLQHQDTTKIQQVRIISKNNQFVVEIVYKTNKVIDYKKDNERYLTIDPGLDNAFTLASNVKGFKPVIINGRPLKAINQYYNKQRAQLTKLYDLNKQSRNTKRLNNLDFYRNQKVLGFAHEASKRIVEIALSHELNTIIIGKNKGQKRSSNMGKRINQNFIGIPHQKIIEMIEYKANLAGIVVIQANEAYTSQTSFLDNEEPINQNGDKARKRKGLSPTKRRIKRGLFKSNKGFLINADVNGALQILRKVVPNAFADGIDGIGLVPVKLNLNF

SEQ ID NO: 41148 - protein, 435 aa, Streptomyces sp.
VRLPAGAGRWPRLIHFLNNPDTWHKVDLVRRRDAAAPGGWAYEAHLMVLTGGYASPATRARRAAAAELELVGGIDGNVSNLSVVSFPGTFDPDDGEVKATRVELTGEERVALDRARRKERGRKRALDRSRRAANAKQYGPSKRQQARTERRKQAGLPERNVQVPGGARTANKAGVPKQAYRRDDLSTGYRLTRARLAESAATAAAAKGHRARRIAERIVGGHGPNLVVEDCNVSTWYRLWGKALQATTPGRLITAIGRECEKTGGRLLRACTFTTRLSQTCLCGERVSKTLADRVHTCPACGLVADRDMVSAALAAHVRLTDPDDPSTARLDYVQARTTQILFAQGLQEALSSQPQRGASPSRGRTHAAAHTPGIPGQRASARQSTTDRYRPTPNETRPANQRHKAHVGTAAPVGNAPPGAPLERELVGRHPVTG

SEQ ID NO: 41149 - protein, 379 aa, Cyanobacteria sp.
MKARYQYRFYPTDQQQQRLAQLFGCCRVVWNEALAICKQSEKLPSNNDLQKWVITQAKKTPEREWLSTVSNIPLQQSVIDLGVAYKNFFESQTEKRQGAKMGLPRFKKKNAKQSARFRIGGFSIKGTEVYLAKIGNVKPIWSRTLPSEPSSVTVIKDCANRYFLSFVVEIVAVTMPAMNASIGIDLGLKTFAVLSNGEKVQSPDYSSLDKRIRRKQRKLAKQVKGSKRREITRRQIAKLHNQIADTRKDFLHKLSTRVVNENQVIALEDLNVSGMVKNRKLARAISLQGWREFRGLCAGKSQKMSRQLIVINRWEPTSQTCSCCGYRWGKIDLSIRSVLCMNCGAEHDRDENASKNIEKSAWGIGTTLNGQGATVRLPR

SEQ ID NO: 41150 - protein, 398 aa, Nonomuraea sp.
MSRYRLQLTPAQEAALLEHCGHARFVWNLAVEQHAHWAPGRKSAPGFAEQCRQLTEARAEFAWLRAGSIIVQQQALKDFAQAMANFFGKTHKRPTWRKRGQGEGFRIVAVKAGDVRRLSRSVGEVRIPKVGWVRFRWSRAVPDGVKSYRITRDSAGRWHVAFAAIPDPVPAPGTGEVVGVDRGVAVSVALSTGEMLNVPGLREAEKARLLRLLRKLARAKRGSNRRAKVKAAIARLKARETDRRKDWIEKTSTDLARRFDVIAVEDLKIRNMTRSAKGTLEAPGCNVRQKAGLNRGILAAGWGQLVERLEQKAPGRVQKINPRFTSQTCNACNHIARESRESQALFLCVACGHQDNADVNAAKNIRDTAAGHAVAARGGQPLGEPVNREPQRDLLLVG

SEQ ID NO: 41151 - protein, 375 aa, Clostridium sp.
LIKALNIRLYPTKEQIILMYKHIGCMRFVYNWALSKQIENYKINNKKLSVSELAKELTILKNTKGYEWMYEISNATLKESIRDLDKAYKNFFNGSSFPKFKSKKKSNHVFYTRYDRIYFKEDFVNLEKIGKVKCRVDYDIDLATITKFQNPRIHFNGRVWVLSVGIETSVEKAKLNDFSLGIDLGITQLAITNIDNLDTKNINKTNSVKKLNKRLKRLQRQCSRKYEKNKEGGSYQKTKNIVRLEKKIKKLHSKLKNIRLNHIHQSTSKMVKAKPFRVVMEDLKVSNMMKNKHLSKAIAEQGFNKFINQMKYKCEKYGIEFIQVPILYPSSKTCSHCGYIKKDLKLSDRIYKCSCGFSCDRDKNASYNLANYGLV

SEQ ID NO: 41152 - protein, 181 aa, unknown
  TnpB Polypeptide
MQGMAVFSEEIEMEEAGFFRKNEKRLAREQRKLSGCVKGSRNYVRQKKKVARCHEKIRSQRRDHLHKLSRRITDQYDIVAVEDIDMVEDIDMKAMSQCLHFGKSVQDNGYGMFRNMLDYKLAWKGKRLVKVDRFFPSSKKCSKCGKIKKELKLSERVYRCTCGNEMDRDRNAAINIREETG

SEQ ID NO: 41153 - protein, 455 aa, unknown
  TnpB Polypeptide
MELPDVLHRKLSKDILKIKKAGEIVSAFYLSDKIRISPNKTAIDKLWAVSYACKDVWNWLNGERYDRDKKTNYYQQKKQLPLLKRQHPALKVPSSQVLQEVVKSLNASWQMYFTRHKKGDTDVKPPRFKSYKYFFTQKYPQQGVSFEIDCNILRLAYGRNKSSWIEIKLPQREYDFQAVKNVVVSYDRRDKKWYVSLNRRVQLPEKRVNAHTIYFDPGCKMTLTGIKTDYSVVEYDINPLRDLNLKHYQLVDHLKSLRDTKQKHSRRWRRLNKKISGLYRKIRTQTKHYLHKLVNQILQDHPDTNFKIGNWNKRQTLAATGIVIVDNRINRQVQNNNPVKKLIGYLRYKAIMNAQQVEEFDERGTTRTCSGCGNQQQMPPNKRVYLCPKCGFKVERDINSVLNFLKNDNYAMWHGLGEVLSIASYRFNPVTGANRRIENRSVILNYQDARGLLTP

SEQ ID NO: 41154 - protein, 584 aa, unknown
  TnpB Polypeptide
MIESKSVIKSNRLYLDELKEINIDIQPLIDMFVPYNTAKFRAYNLFYDAVFLNKEKFTRDLENKIKLCLKNEFHFDDYYLSNIITDAKGVIKSQIELQSLYQDQLNDELKAIKTKISSTKKLITKFSTNQKQLIKYNKSIKEDKLLKKWKFKNYPLAHHGMKNPDELDKSKMHFFTYKDEDVDFYTYSCFIDKELKKLRNKLGKLNFAKNRLIEKQKTLTVPKRVCFGSRKLFKSKDTTDIAYKEWKEQLYLHKYSNMLFVGRYDATYGNHAVFYKNNTLILELLKKYTLSTNQKNITKSMKTYLKIPNVVFPHNQKKLDDYLQKQTTITSNTKAKKNQRTYLPLAYQISLHQDGNKRKYIIITAILSLEKKTHVNYDVSTGCIAIDVNVDHLALSDLDEKGNFLGGKILPFNIYHKNNGTVKHEISRVTTEVINYCKEKKKCLVMEKLDFKKKKQNLKYQNKKLCFLLNGFAYKKIYEYLNSKAYRNDIYLYQVNPAYTSLIGKVKYMRLLGISIHLSAAYVIGRRGLGLTDKIPKYLRDLLTVDERKKHQWSQYAIIAKKTANLKKHDFYKKLTYHDILLTT

SEQ ID NO: 41155 - protein, 367 aa, unknown
  TnpB Polypeptide
MLKAYKYRIYPNNEQKIQIAKTFGCCRFVYNQTLAYRKEVYEKEKKSVSKTDCNNYCNRQLKKEYEWLKEVDKFALTNTIYNMDAAYQKFFKEHAGYPKFKSKHNNHKSYTTNFTNGNITVDFGCNRVKLPKLKGIKAKLHRNFIGQIKSATISQVPSGKYYVSILVETEHVELPHIKQNTGIDLGIKELCITSAGKKYENPKIIRKYEKKLVKLQRQLAHKEKRSQNYYKTKKKIALCHEKITNTRKDYLHKMSHELISENQVIVSEDLQIKNMVKNHRLAKSISDVSWYELTRQLEYKAKWNGRKYVKIDTFYASSQLCSACGYQNTETKNLSVREWTCPVCGTNHDRDINAAKNILEEGLRQIA

SEQ ID NO: 41156 - protein, 418 aa, Mycolicibacterium sp.
VGDTAGVGEVLVAKRCVKYPLAPSAAQALVLTRQAGAARALWNLIHAHHTFFESSRRWPSWSESDAAIRQARKDIDWLAILPAQAAQQVLKAYKQAWSNYWNGTHGRPTWKTRRARRAVDVPQARDLNIDQLNRKWATVAIPKVGAVKLRWHRGLPERVTGARVVCEATGWVLVVRGENRVVTPRRRRAERGSVGIDRGVTHTLALSDGSFIDQAGTLTAGEKKRLYRLQRKAARQRAGKRRGHRASGRLLRTYAQIGGLKARQARRRYDFAHQASSGLVATGVAALVVEELRVKNMTRSAKGTVEAPGVNVKQKSGLNRAILDQGWTQILTLLTYKADQAGARVIRVRPHGTSQTCHRCGSTAEGQRENQAMFRCADPACGWAGNADTNAAIVIKQRGQEVALQDVEPNATRQAVKR

SEQ ID NO: 41157 - protein, 402 aa, Escherichia sp.
VKRLQAFKFQLRPGDQQECEMRRFAGACRFVFNRALALQNENHEAGNKYIPYGKMASWLVEWKNATETQWLKDSPSQPLQQSLKDLERAYKNFFRKRAAFPRFKKRGQNDAFRYPQGVKLDQENSRIFLPKLGWMRYRNSRQVTGVVKNVTVSQSCGKWYISIQTESEVSTPAHPSASMVGLDAGVAKLATLSDGTVFEPVNSFQKNQKTLARLQRQLSRKVKFSNNWQKQKRKIQRLHSCIANIRRDYLHKVTTAVSKNHAMIVIEDLKVSNMSKSAAGTVSQPGRNVRAKSGLNRSILDQGWYEMHRQLEYKQLWRGGQVLAVPPAYTSQRCAYCGHTAKENRLSQSKFRCQVCGYTANADVNGARNILAAGHAVLACGEMVQSGRSLKQEPTEMIQATA

SEQ ID NO: 41158 - protein, 607 aa, unknown
  TnpB Polypeptide
VFKKKSKSTSVTRTKAICLSIGELTLSKKNTLLSIREKYITVANDMTSHCFQSDFLNLTDYSPSMITKKYTLPFQTSIPKGFLNKTYIEKARKSVESTLWEQYSRSIKSLCFSIHNIDKENYWSTKQINQAKKKNEVLPKYQYIPLEMENNINENVLNEIKSAFSLIPSTQRLTWLRDIIFNHKTFNFNHIQIDIIHYVYTVIKSRFSQPRFGINDDFSTTIHLDSRIINQYKEKVIHVDQHYKWLIDNTNKHYRLFLAISHPVNHGEKINIPIQLNQALYQRLLNNGEYPNVQSLLLVIKHDRIEVRSTLTKENIETNLEAQFNQLKNSDHIVARDFGYVDTITLSVIENEFNLSFNEFKERLELTKSTTKLLYQDKEYSPKVIEQVQYSGKNFIEKLSQQGLKIDRYKSEIDCLYNKIELLLINIKHHLQLKEEDHINEKLIIKDEFVQQLINKFFKLLNITKHLKTLRRNVYKKIQGIKKSWFGFLSNVEKKLLTTYNATMIVEDLSVMAIEKEKPKYRGKSFNKMINNGSKGQYMRMAKEKFLWNGILEIRIPSFFSSTTCTKHKVVDKNMRKNKLFLCPICNIKKDADKNASDTIASFLLLS

SEQ ID NO: 41159 - protein, 354 aa, unknown
  TnpB Polypeptide
MSELVIKIKHNTDLSDNLKKAIKVANYAIKNRYKLSSANVKEIGLPSAISNQVLRKYGKNKKCKRINPERIKLVAPSQSIKIVDDTIIITPLKLTVTNRSKYKIIKVNQIELDHTYAYVCFDAEDKPKQEVQSYIGVDLNATSHCAVVGNPKTGKILKLGKQAPAIHKKYKALRSKLQSKKLYKKLKQTKGRESRIVKDINHKISKKIVEYAKENNSGIKLEDLTNIRKNKKNSKAFRYTLNSWSYYQLGQMICYKAQLQGIPVAYISPAFTSKNCSRCNIEGNRKGKVFKCACGHIDHADANASFNIAMREPLVETIKTEISGYGLTGKPIRQSRRKKLAAGTLEPPMLQLGE

SEQ ID NO: 41160 - protein, 373 aa, Bacillus sp.
VIKIILILTAKTKLLPTNEQASLLQDTLHANRKALNHASKMAYNSDLPPHFKPLQKLVYADLREQFGLKSQMACNVCRIVAGSYAALEKQGKSTLIEYKRPNQQYSYGHDYAFSKKGLVSVGTLQGRVKVPFITKGLEHYFDGSWKFGSAKLVYKKGKFFLHFAVKKRFDSDSTIKNIVGVDFGMRFLATAIDSNDKHLFKSGKLIKETTAKYVRLRKGLQACGTKSAKRKLQKVSGKENRFMTNTNHVLSKALIQFAGEHSLIAIEDLTGINLKTSIWKRNKYYRLSWSFYQLRQMLEYKGVMNNIKVIAFNPAYTSQKCPKCGNINKNNRNKKAHIFCCTICQYQSNDDRIGAINLRQMGIEYHHKMTQEA

SEQ ID NO: 41161 - protein, 385 aa, unknown
  TnpB Polypeptide
MTQHKGYRYRIYPNKAQIALLSQFFGCCRFVYNRCLSHRKDVYVAEKRNASQYECMRLITAMRHDPEYVWLASCDSMALQESVKDLNKAFVNFFEKRSGYPKFHKKSSDQSYRTRNQGGGIRIEGNRIVLPKLGAVKAKISRLPGGRILNATVSKTTTGKYFVSLCVEEELVPKSNAGGTLGIDLGIKDLYVDSDGYIEPNPKYLAKYEKQLRREQRSLSRMIEANIAGYTKNRKPVWKRPLSECSNIQKQKRRIALIHEKIYNCRTDNLHKASTKLVNENQVIALETLKVKGMIRNHHLAKAISDASWSRLVTMLEYKAFEHGCTVLRIPTFYPSSQTCSCCGYKNPKVKDLSVRSWICPDCGVVHDRDENAAKNILAKALESA

SEQ ID NO: 41162 - protein, 430 aa, unknown
  TnpB Polypeptide
MGKIIKSVKLNILPLTSKKEQMLSELEKKWCDGINHLFETLDTWDVFNLPFTRYNLQNLEYNHIRKRFNMHSQHAVDMMKDAFTVWQNNGRNGINDAPVSFNIPRSGSFKETKHGNPVVSVSTLNGRTGLPVAQDGAWNRFQSFLKNGWNTTMFRIKRNGNNWQVLVSIFKNFSIKGDYDTVIGIDTGSRTLATISIINRERKTLKQIYMGRDIWNKQRDFSIRRSKLQRIRDTAKGDNRFKAIRKLNRLKGYESCFVKTRIYEIANRIIDLAREYNGFIAIEDLKGLKESKMHRKSNRRVKRMPFYKFRVALEQIAGQNNTLVVAINPRHTSQRCSRCGIIRKTNNVVFSCPSCGFECNRDRNASVNIAHVAGNEFFKNKRLISVQKPQISMGDAPVNGHGWKNEKVLSSCLQHAQSSDFKPMALAIGS

SEQ ID NO: 41163 - protein, 378 aa, unknown
  TnpB Polypeptide
VKGVGIIDITITAKIKIYPTNEQIDILNNTMLQIRKALNYISSYVFNNNCLNQKKINEDTYYYLREAYNLKSQMAQSVMKTVIAKYKTNKSNGHDFTLVTFKNLEYDLVWNRDYSILNGVFSLNTIDGRLKIPYEIKGMEKYFDSSYSFGTAKLVFKYNKYFLHIPMTKDYAQTTALEINKIVGIDLGVNFLATTYDSYGKTAFYNGRHIKAKRGHYKVLRKQLQECGSKSAKRRIKSIGSRENRYVNDINHTITKALIDKYGANTLFVLEDLTNVRAATEKVNINNRYVSVSWAFYQFRQLLEYKAKINNSMVIVVNPKYTSQTCPKCGHIEKANRDKKKHIFKCKNCNYQSNDDRIGAINLWRKGIEYIENNSKEV

SEQ ID NO: 41164 - protein, 358 aa, Lysinibacillus sp.
MSQTITVKVKLLPTKEQASILQNMSQSFVYTINSLVSEMVAEKKSTKKSSKDISTDLPSAVKNQAIKDAKSVFKKVKKNKFKVVPVLMKPVCIWNNQNYSFDFTHISMPIMMDGKAIKTPIRALLVDKENRNFDLLKHKLGTLRITKKANKWMAQIAVTIPTSEKTGTQIMGVDLGLKVPAVAVTEDGSARFFGKGIQNKSVRRKFKSKRKKLGKLKKLNAIRNLDDKEQRYMKNQDHKVSRAIVNFAKENNISVIRLEQLTNIRQTARTSRKNEKNLHNWSFYRLAQFIAYKANLVGIKIEFVNPAYTSQTCPKCSEKNKAQDRIYKCKCGFEKHRDLVGAMNIRYAPVIDGNSQSA

SEQ ID NO: 41165 - protein, 96 aa, Clostridioides sp.
VIAVKKAYKFRMYPNKKQQELINKTFGCCRFVYNKYLAKRIDVYKNNKETFTYKQCSSDLTNLKKELKWLKEPDKFSLQNALKDLDNAYKKFFKEK

SEQ ID NO: 41166 - protein, 330 aa, unknown
  TnpB Polypeptide
MVQKNFKSFFKALTLYQKNPNKFKGRPGLPKYLDKQKGRYIAWFTNQAVSKKVFKKTGKIKLSQCNIEFKTKLKSFEEIDCVRIVPKNNHHVIEVVYTIVTPEKLTDNNKYAAIDLGVNNLATIVSNVKKFKPLIINGKPLKSINQFYNKKKAHLQSVNEIRHKIKTSRQVQKLDLKRQNKINHYLHVSSKLIVNILKENNINTLIIGKNDNWKQEVNIGTKNNQNFVSIPHSRFINFINYKCEKEGINVITKNENYTSKCSFLDLETIRKHKMYKGKRIKRGLFISSEGRKINADVNGSYNMLIKVIPNVFDNGIEGVGIHPRVIKILK

SEQ ID NO: 41167 - protein, 373 aa, Fischerella sp.
MKLTLTAKVKIIPDSEQIRLLKETLQAYRNGCNFVSRVVYKTKNLVQASLHTFTYPDLRSTYGLRSQMAQSVMKTVIARYKAAQSNGHDWSKVRFKKPEYDLVWNRDYSLVRGMFSVNTLQGRIKVPFVAKKMEHFFDGTWTFGTAKLVLKKGKFFLHIPVTTAFTDVKMNEVRHVVGVDLGLNFLAVTYNSKDITAFFNGRYIKDKRAQYKRVRQSLQQKQTPSARRRLKRIGNRENRWMTHVNHAIAKALVKQAGKNSLIVLEDLEGVRSATEKVRKRDRWYTVGWAFYQLRQMIEYKAKMNRSTVIAVDPKYTSQTCPTCGHTEKSNRDKKKHLFQCRACGYTSNDDRIGAMNLHRKGMEYLEQELGQHA

SEQ ID NO: 41168 - protein, 479 aa, unknown
  TnpB Polypeptide
MSLTYTKKIQIEFSKKDELILDGQSKICNWLYNQLLDACQKDYNENNNSLKLLEGRNLRNYGVSLKKSHPFLNSVFSSVLKEPSTRLLTAYKSFFKGDTRYPKHRSWRKKWFSLVFDEPNKGWEILKEGRAVSISLGKVPGLPKQRGKKNPSIIGKLKENVELGDGEELKTFSLCKQQGDKFFAIFTIERCSETEIEFKKAMSNYRVQCIKSTKLNEPLPQKPSLIKQERHIPDNIKWISLDPNHKNFFVGVDDEGNSIEFKKLLMINYWDKKIDQLKAKRDICVKQYKTKKSKYGNSYTIHSPRWNKLNSAVNRAYNKRREQIKTALYSIAHTLYDKYDLVIIGDYTPANKHAPFKNMKRSMLNQEQIGKFRSILKWVATKRGKYYLISDEYNTTKECCVCGYMRKRDPHIRSFTCENCGTPLMRDINSSVNIGKKVGYKLNIPLYKHKLQSFTFIGKAPYGAEISWVKINLTLPCLG

SEQ ID NO: 41169 - protein, 535 aa, unknown
  TnpB Polypeptide
MSSKLVKKSYSFYSKELNSTKRELLYKKAIELRDFRNQISQEVCLNLPKFEKMSKFDWINHFRTRLPNCSSADISCTISDVFINYQNKINSFRQKISFKLQKSLGVRYYKKNHKQHKKGDFHSHDMTFRYTRLTKVITYLARYYNDGMLNWLKKNKDVDEKKKQLRTDAYNLLVKYDQRIIKLIKSRRQRVLNKLTEHPIEFKSLSFRSYNEITQPILAQNKNIHSKYNSYITLGAQKTKDGKIHIPVKFDDKHHGTIDDYKTKAKKNDIITTPYIVSFLTNGSIRITLTKDMPDESITNKHNYMGVDVNIKHNLFSTCSGTEIDYDRKIFDGYVKFLKRLDKKKLNKKKYNQGRDLSRNDQTKFDKWKIRIKDTLKRKSNELVKEAIKQNKDHIVMEDLKLMGKMYSRSKEFDGFKYSRLIRLLNLSDLKNIVTSIANKHGLQVSFVQPHYTSQTCNKCGCISRSNRVTQETFSCVDCGSSSNADTHSAINIRDRLESSELRSSLLNMKNGLYSPKKMKKETIKFILYNHYSSL

SEQ ID NO: 41170 - protein, 402 aa, unknown
  TnpB Polypeptide
MSSKTTIKSTKTSIKFSNTNKKNTIKEIISEYKRVMKEFIDILWIIDDTPDFISKKIYSQVDSWFTAALLQNAARQASGIVRQCKGKQVKRKFVINKLISENKLKRARKLQKIYDGISISKPKLNNVGLTLGGRFAIMDFDNQTSFDGWITLKCISKDIRLKIPFKKTKHFNKLLSLGKLKSGIRLSNKNITFMFDVPEIKKKSTGSTLGIDIGLKNVISCSNSHISKINSHGHDLNSICSILARKKGESKGFKRAQAHRTNYINWSINQLNLDKVKQVNIEEIKYLRYKNKTSKKLSHWTYTDIFGKIESYCEEHGVHVLKVNPTYTSQRCSNCGFTRKSNRKGKLFKCSECGYTTDADLNASINISLRLKPIWKKQRLKQMNRVGFYWLVEGQDCIVPVV

SEQ ID NO: 41171 - protein, 365 aa, unknown
  TnpB Polypeptide
MKRSLKFSLGLANTDKLRALDKLSQEYRRAVNYFLKRLFQKKGLSEDFLKLYNSLLSYRYKQCAKRQAFKMFKSWCRSKKKGDKPKLGKLGNPSLVLDYRFIELQKNTNSNLFDYWVKIATLDKGKPILAPIKSYQYAKQYFKNWQLLKGGRILKRNNNWFLELTFEKEAPAKKEKGKVIGIDIGIKKFIVTSENKEYGKDIEKLMDKIQRKEQKSKAFKRALKERDYYINKTVKTLPWNKLKVLIMENIKNIKQNTKKERKLGKLFRSKFQRWTYSQLLKRIKLTAEATGVHLQLVNPAHTSQACSKCGFVHKLNRKNEIFLCRNCGYTEDADYNASKNILKPYLAQQPMVAGSIKAFNGIFVH

SEQ ID NO: 41172 - protein, 569 aa, unknown
  TnpB Polypeptide
MKLRGVKECKGIYGLSRMALVNYEKEGAIKTLTEKKSEGNFITVECLLAFDKDEDKGRVLTLMRKFSSMVRFAYKRLMDGAERKELKKLLSRKYGINTRYSDDAILLAKQTLESCLEREQNPKKLVFGSRELFEQLKKKHLAGKRRDELRQKWEERRYGVLYSRGEKSKEGNLNLRIVNLNNQWHLRINLGNGEYVWARVIRSTKRKTDKWLGFISDIEHAEKTGDWFPYTVRLKLRNGKIYTQFSKEDKFPEVSITKDNGVIGIDINAYPFHLALVHTAKDGNLEKYERINLDKLLEGNSDKRAYLSWQTAHQVVEIAKRERKAIVVENLEKLPKGRRGDGLPKLRQKLQKWIYKALLQKIEIVAKRNGIQVIKVNPAYTSIIGKLKYAPLYNIDKDMAGAYVIARKGLGFKERLPKNYKELLKDADFLSYAIAKIESKIAKIKQEIREEKNEYKRNRLKSVLWKTRKELDTLLRYLRESGESESAAQQTVNRKMERVRGRAQTLQKSWQVLSVALALSCLESLRDFSPLKRVIFARDWVGAAKPNGLVPLPGQGTNALNMYSFVQFG

SEQ ID NO: 41173 - protein, 373 aa, unknown
  TnpB Polypeptide
MILTYKYKLYKTKRLRKIDEIINIAGAIYNHCIALHKRYYKLYGKYLSKYQLQKHLTKLKKLPKYKHYRKVPSQAIQDITDRIDKGFKLFFENKKKKIKTSPPTFKKLSKYKSYTLKQAGYKIENNIIWLNGYKFKFWLSRPIDGKIKTITVKRDNVGDFYICVAIEKEYQKISAASGKIVGIDFGLKTFLTLSDGTKIKAPRHYLNSLKELKKLQRKLSKKVKTSNKYKKAKRKLAKLHRKVANSRRDFFHKLANELAKKYRYIVIEDLNLKAMQKLWGKKIIDYAFSEFVSILEYKTNLIKIDRYYPSTKTCSVCGYVNENITLKERYWICPECKTKHDRDINASINICKVGASTFGIDGVRPAIVRQPSL

SEQ ID NO: 41174 - protein, 371 aa, Bacillus sp.
MAKQNKAYKFRLYPTDEQIKLIHQTFGCVRFVYNKMLAERKETYENLKHDKEALKKVKHPTPAKYKKEFAWLKEVDSLALANAQRNLDKAYQAFFKGHAKFPKFKCKRHKQSYTTNEVNGNIQLMDGHIKLPKLKMVKFKQHRDIPPEYKIKSCTISMTSSGKYYISILTEYEKEIKSKEIHHVIGLDFAMNGLFVESETGKKANYPRFYHQMLEKLAKEQRRLSRKKKDSSNWHKQRIQVAKIQEKVANQRKNFLHHKSKELASTFDAVVIEDLDMKGMSQALRFGKNVTDNGWGMFTSFLQYKLKEQGKQLVKIGKWFPSTKTCSSCGSVREIPLSERIYQCSCGLNLDRDYNAALNIKKEGIRLLVTA

SEQ ID NO: 41175 - protein, 385 aa, Escherichia sp.
VKRRQAFKFQLRPGGQQEREMRRFAGACRFVFNRALALQNENHEAGNKYIPYGKMASWLVEWKNATETQWLKDAPSQPLQQSLKDLERAYKNFFQNRAAFPRFKKRGQNDAFRYPQGVKLDQENSRIFLPKLGWMRYRNSRQVTGVVKNVTVSQSCGKWYISIQTESEVSTPVHPSASMVGLDAGVAKLATLSDGTVFEPVNSFQKNQKTLARLQRQLSRKVKFSNNWQKQKRKIQRLHSRIANIRRDYLHKVTTTVSKNHAMIVIEDLKVSNMSKSAAGTVSQPGRNVRAKSGLNRSILDQGWYEMRRQLEYKQLWRGGQVLAAPPAYTSQRCACCGHTAKENRLSQSQFRCQVCGYTANADVNGARNILAVGHAVLACGEMVQ

SEQ ID NO: 41176 - protein, 467 aa, Syntrophomonadaceae sp.
MQIPKCVKQHSFELDPEVLEELEIISDRYNSVKNYIYSRYSGIKSLLLIQNARKNIRDIWTKDNFAEQWKLPARYWKMALEEAVANIKTEWSNIKLKTKRAVYQNENLTEDERYFILYVLKADKLLYAILNRESFDEPKKLMELEIREKYIFNLICRYIRKYKGDVPYTKSRTFSLDADMYNYKTEDGVLYINIMGLKRGNRLKVKLRDHNIHKGNVKIVLRDNSLEVHKLKYVKQKKATNKEKVVGIDKGYRTLINTSEGNQYGEKLNEMLSEETERLNKINKERNKFYALYRRYKEQGKTKKAEDILQNNLGKKKYNKKKKQHDNKVKSYINCELNKFIDKEKPSEIVMEDLTFVSWKNIFPKHIKRKLSRWIKGYIHERLNYKADLIGAMTTIVNPAYTSKVCSGCGKFGNREGDLFKCECGEYHADINAAINIKKRKFDSEIGLYTPYKQVEKILEKRIKEVV

SEQ ID NO: 41177 - protein, 378 aa, unknown
  TnpB Polypeptide
LGVGRSVRAPRVPRVRTAAAYLPRAQSLGPWRAGCPARDQEDLRRLRRTEGEHPGRDLGEPGSKRRVKAESGPVRFRPDAAQPFDDRCLSWQLDRRTVSIWTTAGRLRGIPFACSPDALETLTLYRQGESDLLHRDGKWLLIATCDVPETEPYEPSGFLGIDLGIVNIATTSDGGIMAGRKLNRYRRRQRALRCKLQAKHTASARRLLAKRRRKEARFARDVNHCIAKKIVTEAERTSRGIALEDLGGIRERVRLRKPQRVALSSWAFAQLGSFIGYKALRAGVPVVYVDPAWTSRTCADCGHAGRRNRVSQALFICRNCGVVAHADRNASRNIAARGKVAWDAGRESRAPAPARDGQRLDAAASITASGAPAASSVL

SEQ ID NO: 41178 - protein, 406 aa, Moorea sp.
MRAAYQYKLRLTKSQKAEAEKWLDMLRYQYNYLLADRFNWYEQNRCAINSCPLVCYIPEPRDNPDYFSQKKSLPQLKKERPWYGAIHSQVLQDCVKRVDLAFKRFLKGDCNGKKSGRPRFKSQSRYKSFTFPSLSKSPISGNILTLPKFGKVKMIYHRPIPEGFKIKTATITRKADGYYVTLSIQDDTVPEILPIASVTNPVGVDMGLKSFLVKSDGSEVPIPQYYRKAQKRLKKIQKAVSRSKKGSKNRKKAIALLGKAHKKVSDTRKDFHFKTAKKLLDNHDLVAHEKLNIKGLARTKLAKSVLDAGWGQFLSILSNKAENAGLITKAVNPRNTSQNCSNCGQKVPKKLKDRIHSCPHCGYTADRDVNAAKNILNLAVGHPVSSKACRATEPLGGVGKKPALSR

SEQ ID NO: 41179 - protein, 351 aa, Symploca sp.
MSQCAEIFNAHVDWALANSTYNKNKAHKQLYHPLRLQYPSVPSALLQTVRDNALEAIKATKFKRIPRKKPTSALRYDKRTMTLRGQQLTLSCIGKRVSLILNIPDYFQEIFETWNFCGATVTYSRQSKQFWVKLVFETDEPPETTGEIQGIDRGLYHQAVTSDGQFFSSSKMRGVQRRYLYNRRKLQQKGTRSAKRRLKAMSGREKRFMKDTNHCVSKKLANQPGVAIFVLEDLSSIRTQKRGKKMNKWLGSWAFYQQEQFLAYKAEALGKRVVHTDPRYTSQKCNICKHIKRANRNKSRFHCLNCGHRTHADRNAARNVRDDHILSSTRQGTEEQASVNAPDVSGENYLA

SEQ ID NO: 41180 - protein, 174 aa, Lachnospiraceae sp.
MKKLLKSYKTEISPTPKQKEFAVLSNGDIYKNMNKTQKLKKLEKQLKREQRCLSRKYEDLKKRNKKKGEATRQNIQKQVLKVQKLHQRIDNIRTDYINKCVSKIVKAKPSYITTEDLNVSGMMKNRHLSKAVAGQKLYEFRAKLQSKCSEFGIELRIVDRFYPSSKLCHECGCI

SEQ ID NO: 41181 - protein, 270 aa, unknown
  TnpB Polypeptide
MRTVSSYGVEIRKQNIPVRQTMEIYRQAVSYLTEIYAQVWEELREIPETKKRFNTAEHMVHMTKKNTARFDFDLRFPKMPSYLRRSAIQHALGSVSSYETRLGQWKETGVLSGRPKLTCRNHAMPVFYRDVMYREGAEGKDEAYLKLYDGHDWKWFRVYLKRTDMEYLRRNWKGKKTSAPALEKRHRRYFLRFSCTEEVTLTKTPVKEQIICSVDLGINTDAVCTIMRSDGTVLGRRFIDHPSEKDRMYRTLGGNMALRRHREDGHIRNV

SEQ ID NO: 41182 - protein, 327 aa, Escherichia sp.
MRRFAGACRFVFNRALALQNENHEAGNKYIPYGKMASWLVEWKNATETQWLKDSPSQPLQQSLKDLERAYKNFFQKRAAFPRFKKRGQNDAFRYPQGVKLDQENSRIFLPKPGWMRYRNSRQVTGVVKNVTVSQSCGKWYISIQTESEVSTPVHPSASMVGLDAGVAKLATLSDGTVFEPVNSFQKNQKKLARLQRQLSRRVKFSNNWQKQKRKIQRLHSCIANIRRDYLHKVTTTVSKNHAMIVIEDLKVSNMSKSAAGTVSQPGRNVRAKSGLNRSILDQGWYEMRRQLEYKQLWRGGQVLAVPPAYTSQRCTCCGHTAKENRLS

SEQ ID NO: 41183 - protein, 393 aa, Chloroflexi sp.
MIRTYRYRLYPTEAQARALDFLLWQGRTLYNAALEQRITVYRETGQGVSYPQQWAYFRDLRHANPETLGQLNATSVQQLLRRLDKAFRAFFSRLRAGETPGFPRFKGRDRFHSLEYRHGDGCKLRFDPRNRTLFYIQNVGEIKVKYHRPVPDEAEIRHVVIKRRAHRWYVCLMLALPDPVVPLHTGPVVGIDMGLVHLLALSDGSTVENPRWLRHSLAQLRVAQRRLARRQKGSARRRKAAAQVARLHERVTNQRRDFWHKLTRQLAETYSLIALEDLTLAFLTTNHHLALSAHDAGLAEFQQLLAYKAEEAGTQVVTVNPAYTSQACSECGMVVRKDLSVRVHVCPNCGLTLDRDVNAARNILKLGVYPARTGPPERNVAGCGARALGSSPF

SEQ ID NO: 41184 - protein, 370 aa, unknown
  TnpB Polypeptide
LHPTKEQEQKLWQSAGTARWAYNWTLARQGENYETGGKFIPDGILRKELTQLKKSTEFNWLNDVSAQISKQAVKDACLSYQRFFKGQAKFPKFKSKKRSTPSFYQRYDKLKYRNGRVVLEKIGWVKTAEPLLEGEYSNPRIKHDGLNWYLTVGIEVETSILNKPVIKSIGIDVGIKELAVISTGEVVKNINKTKEVRRLTRKLKRLQRRASKQYSKFKKKGGEIRYEKTSNLLKLEKEIRLIHKRLNDIRTNYLHQTTSKLVKANPEYIVIEDLNVSGMMKNRHLAKAIQEQKLYEFRRQIEYKCQWYGIRLIIADRFYPSSKTCSQCGRIKKELKLSDRTYHCDCGLHIDRDLNAAINLREYGRNKLAS

SEQ ID NO: 41185 - protein, 462 aa, Mycolicibacillus sp.
MHRRFLVTFPVMSQVVRIRRVSFRGTPVFLGERHGQPVFSGNPEKVATWLCDGFRSRFNQHRAHRRRYVYRDGERLLSDDGSPQLEFLGGDPVTLTDSQAREQFPHLAAMPSLVLQAPAKIENGEWFAATKRRKRRGGAMPRFRSRKRGDLRFTCWFNGGRNAVFHPTGRRSGMVVIRGQNPHGCSRPGKWMLRFHVIVSQPIRDYTSVHVDLAKRSLVFTSPPPTADRSRATGDVGVDRGVEHAAVTSDGEFFDLPDTTKLDHDITAVQKRMAKSRVVAQREGRDWRRGKRYGRLRDRHRRLQARRAAINNDALHAFTRRTAETYGLVICEDLHAEAMSRKGEGRRKGSTNHGIRDARWATLLHQLAYKTGGNTVTVNPAYTSQRCHGCGHIAAENRESQAVFCCVACGHSDNADINAAKNIAAKYHQGWTAPARSRCKTLPAKAGIAAATKRKPPVPAVA

SEQ ID NO: 41186 - protein, 396 aa, Fischerella sp.
MRTAYQYKLRPTKQQAIEIDRWLAMLCAQYNYLLADRFNWYEQNRCSIDACPLVCHLPELRNNPDYYSQKKTLPLLKKTHPWYGEIYSQVLQDIVKRVKVTFDRFLSGDSNGKRSGRPRFKSRDRYRTFTYPQMKEGCLQGNLIKLPMLGTVKVILHRPLPDGFKIKTVSLTRKADGYYVTLSLEDPTVPTVKPDINSESITGIDMGLKEFLTTSEAETVTIPQHYRKSQKRLRVIQKRVSRRKKGSNRRKKAVKQLGRKHKKVADKRKDFHFKTAKQLLSKYDVVAHEDLNVKGLSRTRLAKSMHDAGWSSFLSILTTKAENAGLLVIAVNASGTSQDCSSCGVKVPKNLHERWHSCQCGCSLDRDHNAAINIRNRAQGHRVLKAQSLLSNSRIV

SEQ ID NO: 41187 - protein, 420 aa, Fischerella sp.
MRRQAVKVRLYPTKQQVEILAQHFGCARWWWNYGLNKCIETYKATGKGLSQSGLNSLLPALKKDEETEWLGECYSQVLQSVSLNLSRAYQNFFEGRAQYPKFKSRHHRQSIQYPQKVKQVNDCLKFPGKLAVVKAKIHRLLDGTIKTVTVSRCPSGKYYASVLMEYVDAERRCPLVGDYSTSNDKDKIVGVDLGIKDFAITYDGEKVSKYPNPKHLAKYEKKLAKKQRIAARKVKGSNRRRKATKIVARVYEQVSNVRQDYLHKLSRKIVDNNQVVVVENLNVKGMVRNHKLAKAISDTGWGTFVNFLSYKLERDGGKLVEINRWFPSSKLCSNCHYQINVLPLDIRTWTCPSCGTHHDRDGNAAMNIRAEGIRMLSSSGTGEANANGEEVRPNRGRKPVMRHSSVKLEAHTIPGRVGVG

SEQ ID NO: 41188 - protein, 270 aa, Fischerella sp.
MKARFQYRFYPTDQQQQSLAQLFGCVRVVWNDALAICKQSEKLSSNNDLQKLVITQAKKTDERSWLSDVSNIPLQQSVADLGVAWLNFFDSLKGKRKGKKVGSPKFKKKTQRQSARFRIGGFSIKGEEVYLAKIGNVKPIWSRHLPSVPSSVTVIKDCANRYFLSFVIEVEPIRTDAKNQSIGIDLGIKTFAVMSNGDKAISPDYSNKDRKIPKLQRKLARQQKGSKRREITRLRIAKQHNQLADKYMDIKKQPTLAQPFRGCAAHTDSL

SEQ ID NO: 41189 - protein, 432 aa, Fischerella sp.
MKVSYQYKIKPTREQAKKIDNTLEMLRCQYNYLLAQRFDWYEMNRCPIDRCPISICHLPELKEQPNYYNQKASLVQLKVDRPWYKDIHSQVLQEVPKKVELAFDRWLNGDVKGKKSGRPRFKGKGQYKTFTYTQFKRHHFVTGRRKEKEGRLLLNISTGPQINEGALSLPSFSLAKCVNNKITLSKIGDIKVIVHRPIPDGFDIKTVSVTKKADGYYVTLSLDDKTVPTIKPDFNPDNMVGIDVGLIDFYVASDNTRISAPKHLRKAERKLKSAQRRVSRRKKGSLRRKKAIEKLGRQHKKVADTRKDFHFHSAKKLLDKYDVVAVEKLNIKGLAKTKLAKSINDAGWGQFVSILSNKAVNAGLKVIAVNPSGTSQECSSCGHKVKKPLSQRMHDCPICHASLCRDLNAAINIKARGTHALKAQSMSSKRSH

SEQ ID NO: 41190 - protein, 252 aa, Fischerella sp.
MEQVLTLVCKLNPTPLQSEKLEVVLHAFAEACNYTNQIIKPDVTSKLTIQGIVYEDLRTKFGLPANLAVRACARVGANRKTAKQKNKPVIAFKPTSADYDARIFAFREKDWTVSLTTLSGREHIKINAGNYQRGKLAGRKPTSAQLCKHRDGQYYIHIQLKDEVPDPQPSKKVIGVDFGRRDIAATSNGDSWDGKQLTKTRDKYSKVRASLQQKASTRTRSSRRRCRQSWHGYRGERDDFKRGLTTIDLLQK

SEQ ID NO: 41191 - protein, 155 aa, Fischerella sp.
MHNSLVENLFVLGMVPFGNAKGERNHKLAKAISDTGWGTFVNFLGYKLERSGRKLIEINRWFPSSKVCSNCHYQISELPLDVRTWTCPSCGTHQDRDGNAAVNIRAEGIRMLSSSGTGEANANGEDVRPIRGRKSKMRQSSVRLEAHTVPSGQCG

SEQ ID NO: 41192 - protein, 309 aa, Fischerella sp.
LYNAAVYNRFTQYQKFNHSVSYFEQQNCLPAFKEVWTEYKEINYQALQATLKRVDYTHKQIDAPKFLRNAEQLIKKASKKKRRKQAPNRKKKIKASRRWKKAQTTVSKIIRKVANQRQNWVHHVATEIVSGNSFVATEKLEVKNMTSKAKKGKRKKQKAGLNKSILDVGFGMLRSTIKYKVEQIGGVFVEVPTKKVKPSQTCPKCGHQHKKTLDVRVHECGVCGYVQDRDIAAAEVMLYWAKGNLPGLGTSLLDAESPSSTANTRTHRGSMRQLGAKKRQKSKSIGLEAETQTTGVVGLGSSCRFLFFF

SEQ ID NO: 41193 - protein, 470 aa, Fischerella sp.
LYRTIPVKAKFTDEEKVFWINQCEHANSLINSAIYHAKQNHYSRLEQTDDAFTTYWRGDELLRQWKTYKCNTTYPELDKVLKDSPHYKAMAAQSAQQTLKTVGESIVSYNGLVTAYYKGEVDRPSLPKYRKRGGLAAVTFPRQALNYKDGYFYPSISRDTKPHLLVEIALHLPEFIDSDWVKEVTVRPCLGELWIDWVIDDNKEPIGNNPKLDYMQAWSFDHGGTNWLTGASTRGKSLIIDGRKLKSMNQGYCRLVAKYKQGKSDFYWDSNLDRVQRKRNNQMRDAVNKAARFIINQCLNDHVGNLVIGWNDGQKNGSNMGKRGNQNFVVIPTKRLIDRLKQLCPEYGIVLTITEEAYTSKASYLDGDSLYKHGEKPAGWKPSGQRVKRGLYKSRDGYVINADCNGAANIARKVATQLGLNLAKLGRGALTLPRRVDLFKGLTKSYRKRCVRQACRMASVGLLDPVATSV

SEQ ID NO: 41194 - protein, 432 aa, Fischerella sp.
MQTMLVLEAKLKGKQSQYNSIDEAIRTALFIRNKALRHWMDNKDVGRSDLQKLCAVLAKEFNFATKLNSMARQASADRAWLAIARFYDNCKKQKLGHAFGLGDRGRLNNSCDTPNHQLDYTTKPAPISKIRPRKKGFPRFKKRGHSVEYKTSGWKLSNDRKHIVFSDAFNIGKLKLVGTRDLNFYSIKQIKRVRIVKRADGYYCQFCVDVKRKEQHQHSGSQVGIDVGLEFFYTDSKGRTVENPRLLRKSEKSLKRKQRQVSNSKKGSSNRHKAVKKLAKKHLKVSRQRKDFAVKTARTLVQSNDLVVYEDLQVKNMVKNHHLAKSISDASWSLFTDWVDYYAKVFDTWAIAVAPHYTSQDCSVCGTRVKKTLSTRTHKCHCCGTVMHRDHNAAIMILNKGLKNTVGHTEIQACGQNDLYLGGETPLDKLAG

SEQ ID NO: 41195 - protein, 213 aa, Enterococcus sp.
MEQLKAYKFRIYPTEEQEIFFAKSFGCVRKVYNLMLDDRKKAYEEVKNDSSKKMTFPTPAKYKKEFPFLKEIDSLALANAQLNLDKAYKNFFRDKSVGFPRFKSKKNPVQSYTTNNQNGTVALIDSKFIKVPKLKSLVRIKLHRQPKGIIKSATISRHSSGKYYISLLCKEEIIELPKTNSTIGIDLGIMDFAILSDGQKLIIINSRPKWKRN

SEQ ID NO: 41196 - protein, 500 aa, Chromatiaceae sp.
MSAMARKPEKAQRTYQARLADPDGSLDAALGAYADLYGQAERALFADMAAGCNPAALKSSYLIRFGLTARQFNAIAINLKGKIASIKERRTGLIDEAKARIKKAEQVITKLDQHIRNSKDTDQRRRLSAKRHQKQRRLAKQQARLAQMEADHANGTVRLCFGGRKRFHAQFNLEANGYDSHEAWREDWQRARASQFSVIGSKGETAGCQGCVIEPVGEQRFALRLRLPHAQCQDGEKYRRLELDLAYGAETIHAALEAGQAISYRFQRDAKGWRVFLTTLAKPVQQTSSPLLGAIGIDLNADHLALCETDRHGNPIASATVPLCTYGLDRHQTQAAIGEAIKAVMAFADGKDKPLAIEQLDFANKKAALEEDGPGYARMLSALAYTQIIATLKARAHDAGLEVITRNPAYTSVIGRAKFAERYGLGAHHAAALVIARRALNLSERPNRHARTARALPVRNRARHVWSFWSQVVREQRRMQRAGGRSSDRSRSPPTPRATA

SEQ ID NO: 41197 - protein, 199 aa, unknown
  TnpB Polypeptide
MPRIRKIVSKLALVLLLNIYKRFLVVIEVCYDQCHKISRDIIRFCLEHRAGTIILGENKFWKQNTSMGAQNNQVFVSMPFSLLKNMITYKAEREGIAVITQEESYTSRADITAMDYIPVYGVDDEKADFSGRRIKRGLYRCSNGLVINADCNGAANIMRKAVPDAWNGTESFEFLALPEVSGFHELNPKSNSVRGIDAV

SEQ ID NO: 41198 - protein, 422 aa, unknown
  TnpB Polypeptide
MTRVDSTSKEKKEVKNKKISESIKTTKKKRKHQKCTCYELKINHRRLNSKQREALSMMFVEAKWLYNDVLNSGLTPPQYDDKTTVVRVKYPDGFRERQLQYLSAPMKQKLLSNMSSSIKTLNTLKKKGKKVGALKFISDYTSIGLKQYTKTHKFDFQRNRAHIQNIPGWVRVHGLKQIPHNAEIADARLLKRASGYYVKVTTFTGKKPANEQKPLTTVVGVDMGVAASLTLSNGYEFSAYVEEPERLKRLQRRLPRQSRSSNAYRKTRNQLGREYEKMGHRKDDAANKIVSEILKNDLVFFQDELIVQWKKRWGRKLHHGVLGRVKSKLNNAENAYMLDRSVATTQTCVCGKKNKIPLNQRIYSCGCGRELPRDVHSSQMMVVLGRALVPMGCREFTLVENVDSWGSSEFYEHSVKPEALTL

SEQ ID NO: 41199 - protein, 479 aa, unknown
  TnpB Polypeptide
MVVLAVHLDQLRLKVGADLGEDDSQPLNGVAIEHSAAIFRHKDQVDVHLEHAVPSMPNIVAVFHRPNYTITMQQLQAFKFGLMPAGEQQRQQQMRRFAGSCRFVFNKALALQKERYEQGEKKLGYAGLCKLLTEWRNSTETAWLADAPVHPLQQALKDLERAYSNFFAKRADFPRFKKKGRSDSFRYPDPKQIRLEQHNGRIFLPKLGWLRVRFSREVLGTVKNITVSQSCGKWFVSIQTEREVEQPVPQGGAVGIDMGVARFATLSDGTFYAPLGSFKRHEAALRKAQQALSHKKKFSNNWKKAKAKVQKIHARIANVRRDFLHKISTAISKNHALVCIEDLQVRNMSKSAAGTADAPGRNVRAKSGLNKSILDQGWYEFRRQLDYKLAWNGGWLIAVPPMNTSRTCPCCGHVSAENRQTQDRFECVECGFKEDADLVGAINVLRAGHARFTCEVSGAVMPPAAGTHRSYSGAAQCRA

SEQ ID NO: 41200 - protein, 415 aa, unknown
  TnpB Polypeptide
MIAQQAFRYELHPNAGQRVLLARHAGTARFAWNWALGERMRRYRECEGRQRFTNAVEQHRHLNARKATEWPWMYEVSKCAPQEALRDLDRAFRNFVRARRASRYCGFPRFKRKGIDDAFRLTGSIRVLGRAVQLPRLGALRTKEGTEKFRGRILSATVRREADRWYASLTVETERPDREPILGPVSGVDLGLNSFAVISDGVREEAVVSPKPLGRSLRRLQRRSRAHSRKARGSGNRRRSALRLARLHRRIRNVRTDFLHKLSTTLATTKSVVVLEDLNVRGMVRNRRLARPIVDAGWSSFRRMLEYKSRWYGSKVVVAPRFLASSKTCSECGRVLESLALSVRKWVCPACGIEHDRDGNAARNLVAWYRLATGSSPESDACREPSGGAEAYAAASHGSAKQESAVEDLSMAEER

SEQ ID NO: 41201 - protein, 343 aa, Oscillatoriales sp.
VLNKSWNSTYQKWLNRPKRLKHHKPPLHQGAFNFNPQYDAGMWKEDDGFSIVLKMLVGDSWKWIKHQYQCPDVPTQWVKGSPRVQVQNGSLWIVFPLEKYVPATGGIKGIMAKSTFRTCGIDMDLDKFIVIASILETNDRGETTEVARHFINQSRHVARRKRNLGNIAIKMGKTGIISRGFAKKAWDSLSAVEIEYSRAVSRELVELANHWRANVISFEHLGNLRPKRGKYSRRSNQKRAYWLKGKIYEQVKRIAYQDYAILTTRVSPMNTSRLTPWGEPVWRGCKFPSSPTEFDSYRPGAALVATVDGYKAHSGLNAARNVALKAIKRHLSEVMLHQKSLQQ

SEQ ID NO: 41202 - protein, 371 aa, unknown
  TnpB Polypeptide
MKQTLMIKLAPTPEQYEALVKTMEAFNQACNYASNVAFETKTFGQFYIHRLIYHELRQRFGLSSQMTIRAVAQVSESYKVSKVSQHEFSPHSAMVFDQRILSWKGLDKVSILSLDGRLIIPTRIGAYQEARLDRKIRQSDLILRDGVFYLAVVVDAPEPTPDEPNGFLGVDLGIVNIVADSDGKTYSGAQVNGLRKRHAKLKGKLQSKGTKQAKRLLRKRSRKETRFASNINHTISKSIVAKAKGTGRGIALEDLGGIRDRITVRKSQRRQQHSWAFYQLRAFIEYKAKLVGVVVQAVDPRNTSRTCPVCGCIDKRNRVSQALFSCISCGYSAPADILAARIIASRAAVNQPYISTTYTWLGTMPCALGTG

SEQ ID NO: 41203 - protein, 454 aa, Dolichospermum sp.
MSKLKKSMGVQEILLSPDHETKAVLDYLCQQSGKLYNSGIYFARQTFFKTGKLLTGKFDLAYEPSVSKTMVAKSLPSTPAQQTLLSVIEAFKSFKELRSLFLKGQLHFQPKVPGYLTSSKLFKVAYPNSGGQKPTLVNGQLRFSLGLTVKRWFGISEFFLPMPSNLNIANVKEFTIIPKNGTFYLEMSYEVEKQQHDLDINQALSIDLGTADNLAACVDTLGNSLLIDARSMKAMNQLWNKKISTRKEGKSEAYWDAWLDRVTRKRNHQMRDGINKAAKLIIDHCLKYGIGTLVIGWNEGFKSNATMGRINNQKFVQMPLGKLKDRLKQLCDLHGIRFQETEEAYTSKASFLDGDSLPKYGEKPEGWKASGKRLKRGLYQSSNGSIVNADLNGSANILKKVASNLSLDLGLLGRRCLTTVARIRLWVLPKSILSAESQWLGSLRVSKPCFAKPK

SEQ ID NO: 41204 - protein, 298 aa, Bacillus sp.
  misc_feature (222)..(285): Xaa can be any naturally occurring amino acid
MGVKRMMINKAYKFRIYPNKAQATLINKTIGCSRFVFNHFLSLWDNAYKETGKGLTYGTCSAKLPAMKKEFVWLKEVDSIAIQSSVRNLADAYTRLFKKQNNAPRFKSKKNNIQSYTTRQTNENIAVVGNKIKLPKLGLVRFAKSREVKGRILNATVRRNPSGRYFVSLLAEAEVQELPKTNSYIGMDVGLKDFAILSDGTTYKNPKFFQSLEEKLAKAQRXXXXXXXXXXXXXXXXXXXXXXXXXXXXXXXXXXXXXXXXXXXXXXXXXXXXXXXXXXXXXXXXPIMFLLWISKQRR

SEQ ID NO: 41205 - protein, 221 aa, Bacillus sp.
MGVKRMMINKAYKFRIYPNKAQATLINKTIGCSRFVFNHFLSLWDNAYKETGKGLTYGTCSAKLPAMKKEFVWLKEVDSIAIQSSVRNLADAYTRLFKKQNNAPRFKSKKNNIQSYTTRQTNENIAVVGNKIKLPKLGLVRFAKSREVKGRILNATVRRNPSGRYFVSLLAEAEVQELPKTNSYIGMDVGLKDFAILSDGTTYKNPKFFQSLEEKLAKAQR

SEQ ID NO: 41206 - protein, 382 aa, unknown
  TnpB Polypeptide
MRAYKFRIYPSKKQEELLNKHLWLAKDLWNELLEHCKQTYEDFGYFPTKNTLQLMVKNYGLYSQTEQEIAHRVYNSVMRVFKLKKKGVKCGFPRFKSFDRMKSLHYPQYRFGFSRDKKLKVTPFGEIAIKKHREIKGQIKTLTLKREASGKWFTVFCVETPKEILGEKGGEAVGIDVGLKTFATLSDGMKISNPRHLMKHGNRLAFIQRKFSKKKRRSSNRKRAKVRIARLHEKVSDCRKDFLHKISTQVVNDYSIIALEKLASKEMSEENYGKQIHDAGWSMFANMLAYKAEGTGCRVVFVNPENTSQECSSCHRIVKKDLTERMHNCPFCGLSIDRDLNAARNILIRATPGQGGSNACNSLQKERDVALATSVKQEAHTF

SEQ ID NO: 41207 - protein, 361 aa, unknown
  TnpB Polypeptide
MNKAYKFRLYPNAEQINLLARTFGCVRFIYNKMLGDKIDYYHKTGKKLSNTPAQYKEEFPWLKEVDSLALANAQLHLQAAYHNFFRFPKAGFPKFKSKHRHQDSYTTNNQKGSIRIEDGRIKLPKIGFVKMKQHRPVPENYAVKSAAVSKTPTGKYFVSVLFEYEEVIQPVKIKNVAGLDFSMKELFVASDGVTAEYPRYYRQSMEQLQKEQRRLSKCRIGSKNRNKQRIRVAKLHEKISNQRNDFLHKLSRQITNVYDAVCIEDLNMQGMSQGLNLGKSVHDNGWGMFTSFLGYKLSEQGKKLIKIDKWYPSSKTCSCCGKVKEELSLSERTYQCECGFVCDRDVNAARNIRKQGMLVLA

SEQ ID NO: 41208 - protein, 621 aa, Mycobacterium sp.
VVVLDSGEVTEDLVRDMVEVLTSFCARLYGRRSARNRGDKGGGLRSVMSARPRLSVPSVTMLVMASERRALRRITDPVVAAAPAGVRIRTRVHLSEAEASALAGIGSFLGSVYRAELAARVGLGRLGHEEHAAWRARRKQALTTVSSSRWAGALTRAVEDQYQLGMRALSAHVTDLRRAVEVLKLRCALRPGEAVPTGTGRSRRCGYRSAGERFAKTRRLAILRGRLAVAQKALDAGRPSVTIGGKRLWRNRTHLDEAGITEPQWRARWDATRMFLTADGETGKIGGNETIRVDAAGRLRIKVPASLVDQYGTHINVAAPVKFSHRSTEWAVRVTGRRAVRYDISYDSSRGRWYLDASWKQDPVVAPSIDELRSGPVLGVDLNADHLAACVLDGSGNPAGDPITIGVATAGLAASRRDGRVRAAITALLDTAQINNCSAVVIENLDFADARATGRDTMGRGNRGKRFRRTVAGIPTANFRTRLTAMAVRRDIAIIGVDPAYTSKWGAQHWVKPLRQQSSEPVTRHHGAATAIGRRGLGLAIRRRPAGPRNGQRTVAGTPPARPDRRPAPTLEGTAVPAHRHPHDGSRCTGEHPPPAANTVRAATEQNSLLLTHKERCVQVP

SEQ ID NO: 41209 - protein, 366 aa, unknown
  TnpB Polypeptide
MLLTYKYKLYRSKKTKHLDELINIAGNIYNHCIALHKRYYKLYHKNLNKFQLQKHLTKLKRLNKYQNWKNLGSQAIQQITERIDLAYQKFFKKQGGLPSFKKTIKYKSFTLKGKVGYKLKDNVICLHGYDFKFSKNQTIKVDDKIKTLTIKRDNVGAFYICVSLETQDKHRITTGKSVGMDFGLKTFLTLSNHTKINAPLFYLQSLKELRTKQRKLSLKKKGSNNRAKARLELARFHQKLANQRRDYFFKLANLLAKKYDNIFIEDLNLKSMAKIWGRKIYDLAFHEFIYILSTKTNVVKIDKFYPSSKTCSCCGYVKKNLTLKERVFDCPNCKSKIDRDYNASLNIFRVGASTLRGEFIRPAHAG

SEQ ID NO: 41210 - protein, 388 aa, unknown
  TnpB Polypeptide
MTVIRGQVIELKPNNKQATYFKKACGVARFAYNWALAEWQRQYQEDKAYRESCEQSNLTIDGSQLNLPSHGKINKLFNAIKREQFPFVMEVTKCAPQIAIQQLGDAYKRFFKGESKYPQFRKKGEKDRFGLSNDKFKIKTENGKTFIQIPKLGWVRMKKGLRFQRKILSATISTRGEKWFVSLNVELSEEINPLPKTKQSVGLDLGITHLATLSDGTKIQAPKPLKNYLKKLRRLNKSLSRKQKGSNNRAKAKAKLSRLYYRIHNIRKDFLHKLTTELVRKFDVICLEHLNVQGMLRNRKLSLAIQDLGFYELKQQLIYKANQFGKTVKSVERFFPSSKACSCCGFKLEKLSLSVRKWTCEKCGAKHDRDINASINILNFANKILTIN

SEQ ID NO: 41211 - protein, 224 aa, unknown
  TnpB Polypeptide
VLSSAKLKISQSECEITKHQGGEIGIDMGIIRFATLSNGEYFKPINIFKNLKGKLAKLQKRFKNKTKFSKNWQKLKTKIAKLHHKISNIRKNYLHQISSQISKNHAIVYVEDLQIVNMSKSAKGNAEQHGKNVKQKSGLNRAILDQSWAEFRRQLAYKLTWNGGVLFAVPPQNTSQTCPCCGYIARENRQTQADFKCVKCDYQNNADVVGAINILKRGQALLAI

SEQ ID NO: 41212 - protein, 443 aa, Natronolimnobius sp.
VEYRRTAVIKLDTPEGAEASLRETVRQFKHCANTASEWCWHGRRQIPAESGCQPETRRVSGDDDGYHVTSKAKAERALYDRLRDETDLTANLVQKGIRRAVEAVKSGVERLKRGENTSQPHFSADSAVYDRRSATFHRDHVSLSTVDGRIECDYILPDDSETPPTKYVSDEDFEFRMAQLQYRDGDWYLHASMRKVEADEESSESESRHRTVLGVDLGVNNIAVASTGRFWSADEFNHWRRAYEKRRASLQQCGSRHAHENIESVGQKEQGRFEIYLHTVANELIEEAVEHDCSHIVFEDLTHIRENIPEATWQHVWAFRRLYEYVEYKAEEHGVEVVHVDPRNTSKRCSTCGFTHNDNRNGESFECQQCGYENHADYNASKNIGLQYLRRPQKCSISGVRTRRGASRQRRQNADDGGAPVDVRLNSAGPEVPHTMQTGAARP

SEQ ID NO: 41213 - protein, 416 aa, Natronolimnobius sp.
MEYSHRYPAYPTQEVVAALDYHIDVHRQAYNYTLYEYENVDADDIGSAYKHHYRLPGWKDEFPIFSEVNSKALQRTVTRFYQNLDGRSEQKRNGNTVGKLNWKSPREFQSMTYSQSGFELTNTSGRHATLWLSKIGDIRIRYHREIPDEATIKEVTIKKETTDEWFVSFSLEVDDADLPEKPAVETLDTSNSVGIDLGILNYIHTSDGTTVEWLDLEDEYERLRREQRKLSRKEQGSNNYERQRREVAKITRHIRRKVLDYQHKITTWLVREHDAVFVEDLDVAGMLQGEGNARTKQDAAWRQFITLLEYKGDLYGTHVVQVEPEGTTKECASCGVETAKPIWVRDRSCPSCGFECDRDANAAMNVLQRGFSELGLGWPEETPVETALPTDTTQVSAKRVVEAGSLGVDRESKALS

SEQ ID NO: 41214 - protein, 590 aa, Natronolimnobius sp.
MSDHLSLPIHLPDEDDKRFDRLATLTRRVANHVLEDHWTPVHLDGIADAPHQAWNYFDEHEPFDELGLYLPSRFRRCILQKVGETLRSHADRRDAFQSFQSVLPDHKIRRIHRRRIKEQLWGDGDYLSSGYVDILIDQLNSYYDRHGTYPATYFEMQDCPEYDSGVLPFSADDGPTSGQAVKYQYDTDSETLTIRLKTPDTLSPETRGDWSWTEYERDGYEAFHDLLAHGDLSAPEFQPARRKTGDTYYELSFPAEVEHAETTDGTDCVLALDAGMRKDMTAVVVTDEGEQRSTPQFIQFTDREKMRRLHRERTRLNDRLAASRRGGRSHTDEFAHIHSEYERVNSKIQHKRDQLTHDVANQVLALALAYDVDAIVHEDLRSLSPPSDEGTLSWELSSWARRDIIEKIEYRAECAGLAVERVYPQGTSRSCPRCGSTGHTCKSPDHQQEHWWGGHFRCDNARCGFEGDRDYIGTLNVARVFFSDTDELDHGFTSSYTGDSEIVLAGRSAGEQSDGLRSSSELPSDAGTRLTFGSGIVAYEPEQAAATTGGGSAVIAPAVVLPESNADGSDGRGPVVQQCTRFVRCTTESY

SEQ ID NO: 41215 - protein, 439 aa, Natronolimnobius sp.
MQYNYRYRLDPPEVLTETLLHHVDTCRQLSNHVLYKLNDADDIPTRYEVQGQLPDLKSWWDDLGDVHSKVLQMVVKRVYDNLSTLKAQKENGRAVGMLKWKPPREYRSFTYNQSGFKLKNTSGRPVLWLSKIGEIPIHLHRDIPESATIKQVTVKQEPTGEWYATFGIDVGENTPEKPETPEKVVGIDVGILKYAHDTDGYAIESPDFSAERERLERAQRDLSRKEHGSANWEEQCRVVAERHADLKRKRRDFLHKLSNYYATEYDLVAVEDLDAKGLVELPGNSRNRAGAAWGTFLRMLEYKCGHEGTHFVAVDPKDTTKECASCGVKTDKPLWVREHSCPSCAFEADRDANAVVRLRLTGSKIACDFATAWNILSRGLEEVGVGHSEATSSEPVGSDGLRKSRSDFRTPVETALPVDTSVSAKRVREITSHGLSDVV

SEQ ID NO: 41216 - protein, 406 aa, unknown
  TnpB Polypeptide
MQKEVQITVAGKVFKPNKLKVLALNRTLSEYLRLVKWYLSFNSKSKSDLHRNCYEEAKKRFNLNTALIQTARDKAVEILKSFEKIRKDDSVLRVKRISIRFDKRCYSFSKTTNVLTPYWLTLSLNRKERVSLPIVFGEKQRQRIEEAFRGEWEFTTVEMVKRDGQWYAHFVLKKTVEVPDEPETVIGIDRGERNLAVAVAISKSNPNKPVKGQFWRGDEIKRIRGLYGHVRRNLQKKKLLKKVKELKGKECRKVNQQLHIIANQIIQYAKQFPNPVIVMEDLRGIRNNFRKSKKLNKRFHSLPFRKLQTIIEYKALLEGIDVRYLTKKETKNTSRTCHRCGHVARVKGREFRCPSCGLVYNRDLNACINIARALTRGMGWGSSEPPKPADEGIGVKPTLNAGSSRL

SEQ ID NO: 41217 - protein, 387 aa, unknown
  TnpB Polypeptide
MRVRATLTFAVAPEGDTTLSPILETLYAFRGAVRYVAWWCVENRVVSLSRVHKSLYKALKGKHKLPARLALDAIRQGIWIAKGWLRNPRRGRRPVIKRLWMVLTPRQSYTFSWTEASILTLNGRVRVGLVYVERWHGRYRDWRIKEGKLLLRDGKLLLHVTVEKDIETYKPRDVLGVDINYSNVTLSSGIRIEVKTFKRAYSLKRQIEAIQRRHPRGWRFIPQVRRRIKMLGRKMHNVIRDACWKIANEVVKHALASESAIALEDLNGLRNRVRDKPRDWRLKLALFAYSKLQWAIEWKARQHGVPIIKVPSKGTSSICPRCRGQLKRDYGRTLRCPYCGLMGDRDHIASLNIRMRDAQATLIAPNPDDTTRMDEGEVGKLGAGFSP

SEQ ID NO: 41218 - protein, 357 aa, unknown
  TnpB Polypeptide
VGLTNIKHQILDHEYEGLQRFLHGDFSVELYSANKQQAKRFYKQIKPEREYPLSIRKDLIRVERRDTKLARYWVRVPVKLRRGGIWIAIKPHCDIKADYEICESKLIRRDGEYFLHIVVKREIELKTSYSSILAVDLGIRHVACSVDMLSGETHFYGRKLRQVRGHFFRLRRKLGRKKLMKVVKRIGDRESRITNDQLHKIAKAIVDEAERLNAIIAIGNLKGIRYNGKGRRFNRKLNSWPFRKLQQYIEYKANWRGIAMVEVNEAYTSRLCWRCGAIGIRSGKHRGLFECPRCGLLENADRNGAFNIGKRVLGQVSKVGAAVNQPVTEALALVELGSVAQRPTSEATLFRGVVHAR

SEQ ID NO: 41219 - protein, 484 aa, unknown
  TnpB Polypeptide
MKRSSTPSFVLTLKLNTSKEDERILAGRFFSGWKIYNVLVQHVRKVLRSMRQDPEYRDAMNRYHEDKESDEIKEELRDIRKRYKLNEYELHKYVQLQQKRYAADIDSLTAQKIASQVWQAVEDILFDSGKQIHFRKWKDFGSLEGKNNQSGIRFRDGRMHWKGLVIQPKLSRKDRYAREALRNRVKYCRIFRKTVGGRYQFYLQLVLEGTPPDKHPMGSGRCGVDIGPSTAATVSETDCSLKVLAPEAESIEREQRILLRKMDRSRRAMNPDNYNPDGTVRKGPKRWKKSNTYKETERRYQNLCQKRAAVVKQSHEREANRLIAQADQFYVESINFQGLTRRAKETKQDESGRCKRKTRFGKSIGNRAPSKFLTILEQKLKVRGGCLHRIDTISFKASQYDHHTDTCRKKTLSERWASIGDDKIQRDLYSAFLLMNSNADGTFAEKDRCIRTYPTFKEMHDQLVEKLKTSNQHLPGSFGVRRTA

SEQ ID NO: 41220 - protein, 185 aa, Clostridioides sp.
  misc_feature (157)..(185): Xaa can be any naturally occurring amino acid
MYPNKKQQELINKTFGCCRFVYNKYLAKRIEVYKNDKETFTYKQCSSDLTNLKKELKWLKEPDKFSLQNALKDLDNAYKKFFKEKVGFPKFKSKKINRFSYKTNFTNGNIMYLGQHIKLPKLGMIKIRDKQVPQGRILNATISKEPSGRYYVSLCCXXXXXXXXXXXXXXXXXXXXXXXXXXXXX

SEQ ID NO: 41221 - protein, 410 aa, Thiobacillaceae sp.
MRVKTRQTFRFYPSERQQRQLARDFGCARHAYNFALKLRTDSFKEGKSINYNASSAAWTEHRRDAAFSWLRESSCVPQQQALRHLQTAFTNFFAKRARYPSFRSKHGRQSAEHTASSFKWDAANRNLTITNLGRLNIHWSREFQSTPTTVTIIKDCAGRYFVALCLDEEKEVLPKTWQSIGVDLGISRLATLSNGERFANPRHTMTYARKLGRLQRVLARRVKGSNRRALTKRKVARQHSRIASVRKDCLDKLTTDLVRRFDVIALEDLNVRGMVKNHCLAKHVSDASFGQFRRMIEYKAGWHGKEIRIADRFFPSSKRCSGCGFVHASMPLDVRAFTCVQCGAKHDRDENAAKNILNFAEVIPQATAGQAGSNGRGERVKPRAASAVKGNARRSVNRPSSMDVEHVLHS

SEQ ID NO: 41222 - protein, 406 aa, Cupriavidus sp.
MQRLQAFKYELIPTGEQLRNMRRFAGSCRFVFNKALALQKENYGRGLKHLSYVELARELTAWRHSTEDPWIKDAPCSSQQHALKYLDQAYRRFFAKQAAYPKFKKKGARESFHYPNKAAIRLDQEHSRILLPKLGWVRYRNSRAVIGELRNATVSLTADKWFVSIQTARDVERPTPQSTSAVGIDVGIARFATMSDGTFLAPLHSLKRHQAKLRRAQHQLSRKTKFSRNWRKAKTRVQRIHVHIANARRDFLHKATTTISKNHAMVCIEDLKVGNMSRSSSGNATRPGRCVRAKSGLNKAILDQGWFEFRRQLEYKLAWNGGLLVAVSPANTSSTCPACSHVSTDNRKTQAEFSCVSCGHQDHADIVGALNVLARGHRVAACGEPVQSGHSTKQEPTEAIQADSIG

SEQ ID NO: 41223 - protein, 199 aa, Okeania sp.
VFAGATLRERIVWNDSLACCQEKYKLGQKKPTNSELQKLFITQAKKTEDREWLSEVSNIPLQQSLNDLNQAYQNFFKSTKGQHKGRTIKPPKFKTRKSKQTARFRKGGFKVGQHKVYLAKIGKLKIVWSRQLPATPSSVTVIKDSANRYFLSFVVEIQPETLPETDNSVGIDLGIKTFATFSDGTKVDAPKPLKKRIKK

SEQ ID NO: 41224 - protein, 405 aa, unknown
  TnpB Polypeptide
MKVNRIEQHQIRKSNPMWKVIDELCFKSKNVYNYGNYIIRQEFINNNNWIRYKDLSKQIKHEDCFKELGSNSAQMTLRRLDKNWKGFFVAIKDYVKNPDKYLGRPKIPKYKKKDGRYVLELTNMQTHIIDGYLYFAWKPLKQFNDMIKTNIQGRLLQVRFVPKNNCYVLEIVYEKEIATITDQQSKRICSIDLGVNNFVTMVNNVGTKPIVINGKGIKSYNQYWNKKLAYYKSVLKKINNKDWSNRLDRLSIKRYNKINNFFHKASKQVIEYCKSFNIDTIVIGKNDTWKQNSNLRKKTNQTFVQIPYELFIKKIKYRAEDVGIKVIENEESYTSGTSFLDNELPCKKNYNKSRRVFRGLFKSNKGIKINADCNGAYQIMRKVFPKAFTNGIVGVHLHPIILNVA

SEQ ID NO: 41225 - protein, 408 aa, Oscillatoriales sp.
VLKAVKVRIYPTIVQQVHLAQAFGCVRWVWNQSLAVMTATYQETGKGVTAMTMKKSIPLWKTDNEWLSECYSQCLQQSVLNLGVAFGNFFDGRAMYPTFKKRQGKQSIQYPQNVKVLSNCQIKFPGKLNTVNAKVHRDIEGKVKNVTVSKNPDGRYFASMLVDDGIECPESSSEGNVIGIDLGLTDFAVTSEGSKYQHPKATKKHEKNLARKQKKLARKKDKTTNNRRKAKLAVAKIHSRIKRIREDFLHKLSRKVVDKNQVVVVENLAVRNMVKNHCLAKSISDAGWGIFCTMLKYKAEMVGKVYLEIGRFFASTHLCSNTLKPLPKMDLSVREFDCPHCGQRHDRDINAAINIKNEGLRLLTLGTSVIAPEGYVRPKQYGRKSTTVVAVVVEGRSPRHSGTPLDGG

SEQ ID NO: 41226 - protein, 369 aa, unknown
  TnpB Polypeptide
MKTYKYPFYDQSNTIRIGNLLDDMWEVHEYFHTWQRHRYKDELPYAGYEAMCLHATELKHSTHRHWHVLPSQAIQEELKRIHLAYERFFKRLGGRPKIKKRHKFKSFTLKQTGWSLKGNRLTLNFRKWDKGKWRYDKVAYTFHKHREFYGNIRRITIKRDACGDYYLYILTDFVETKLLPTTGKSVGADFGMKDAYLTLSTGAKKQHPQPLKQSLNKLRSLNKSLSRKIKGSKGWWRCVRQLARLYRKISNQRKDFHWQLASELCKKFDTIIIETLNLDGMKRLWGRKVSDLSFYQFVEILKYKCQKHKRQLIEIGQWTSTSKPCSDCGYHNENLTLNDRQWRCSECGSHHDRDINAAINILRAGIAVA

SEQ ID NO: 41227 - protein, 401 aa, unknown
  TnpB Polypeptide
VKQQKQNRRTYKEKIRNHPQNMRLGNMFDDLEDVHNHFLALEKRYYRIYGKYAGRYRLQPHLTKLLQRTHPHWAWIPRDTLDAVIIRIHIGYERFFDWIKKGRRGNRRVGPPKFKRRGKLRSAKFQTGYKVWVKPQDEESFPIPKGTVRLSFKEWSEDKQKFVFVRRHILYHHHRDWQGNVCYIQISRDAAGEYWLYVVTDNTSKEVLSATGESVGIDFGMETYLTLNTGEKIQHPQPLKHSLNQLRNLNKAISRKVRGSNNWWRAVRDLARLYTKIANQRKDWHYKRATDLCRRFDTIVTETLNLDAMKRLWGRKVSDLAFGQFVEILAFKCIKHNREFLQVGQWTPTTKPCSDCGHHNDKLSLNDRQWTCPECGSHHDRDINAAINILRAALGPSVERM

SEQ ID NO: 41228 - protein, 361 aa, Helicobacter sp.
MLITYKQKLYKASKNKHIGKILRLYGICYNHCIALHKRYYRLYKKHLKLYTLQKHITKLKRTERFAFLKTLGSQTLQELLERIDRAYQRFFKKQGRQPRFKKVALYQSFTFKGKTGYKIQNNLISFNGYCFKFVKTYNFVGKPKTITIKRDNLGDYFLRLVCEMEDKPKPAGSKSVGLDFGLKTFLTCSNGTKVQSPLFFSRFLPLIKTCSKSLSKKQRGSHRRFKAKIKLAKLHRKIKNLRADFFYKLANYLAKQYTHVFIEDLNMKAMQRLWGRKISDLAFSEFVAILERKTQVHKINRFYPSSKTCSNCGHVKQELSLKDRIFQCQNCGLVIDRDLNASINIHRVGASTLRVEAVRPA

SEQ ID NO: 41229 - protein, 278 aa, unknown
  TnpB Polypeptide
VQAICKQFAQSRNFHCRRPRWRGRLSLGWIPFQAARAIRLDGDAAIFLKRRYQLWMSRPVEGTIKSGSFAQDARRRWYLNLQVEVPERSDCGTGEVGIDLGLKDLAVLSSGKKIANPRHLARYAAKLASAQRAGRKVRVRAINAKIANCRKHFLHELTSRLVRENRRIVVGNVNAASLARTSMAKSVLDASWSQLRSQLRYKAIRHGAQYIEVDERFTTQVCSGCGALGGPQGREGLVVREWRCLECGVQHDRDINSAINILVSGRNAGLQLTGIPAL

SEQ ID NO: 41230 - protein, 265 aa, unknown
  TnpB Polypeptide
MYEVSKCAPQEALRDLDRAFTNFWRRRKKNQVGFPKFKKKGRNDSFRLYGSIRVFEKAVQLPRLGRIRVKEKPQIKGQILSATVSRRADRWFVSFCTEEEKITSSLADGPRIGVDLGITSLATLSDATVFDKPRALTKRLRKLKRLSRQLSCEEKGSNNRRKAILRLARLHWRISNIRLDVIHKVTSYLAKNHSQIIIEDLCIRVIMKNKLISRAIADVELSELRRQLVYKTKWYGLKLIIAHRSFPSSKRCSQCGKIKKKTIFV

SEQ ID NO: 41231 - protein, 439 aa, unknown
  TnpB Polypeptide
MSSFKAYRFQLRTRPRDEALLRRFAGAGRWVWNRALAEQCARHARGEKYASYVEMAKWLTTWRNDPATVWLSDHPIHPQQQVLRRLDAAYKRFFTAAKAGHAGGRGRTGPPSFKRRGEEPGIRFPDPKQFALDAANGRIKLPKLGWLRIRMSQPVEGVLRNVSISREGHGSGSRWFVSLQVQVPETVPALGVAPTLGIDVGLAKFAAMSDGTLVDPLKALARQERRLRHYQRSVSRKVKGSANRRKAVARLGNLHRRIARQRSDWLHKLTTDLADAHPVIALEDLRIKNMSASAKGTVDAPGQKVRQKAGLNRSILDAAWGEFARQITYKVEWRGGQVILANPAYTSRTCRICGHEAAENRKTQAVFACVACGHTENADVHAAKNILAAGHAVWLNQLMEKNSKPSAAACGGEVRRQRRASAAAAAPEKQEPTEAKVLV

SEQ ID NO: 41232 - protein, 402 aa, Escherichia sp.
VKRLQAFKFQLRPGGQQECEMRRFAGACRFVFNRALARQNENHEAGNKYIPYGKMASWLVEWKNATETQWLKDSPSQPLQQSLKDLERAYKNFFRKRAAFPRFKKRGQNDAFRYPQGVKLDQENSRIFLPKLGWMRYRNSRQVTGVVKNVTVSQSCGKWYISIQTESEVSTPVHPSASMIGLDAGVAKLATLSDGTVFGPVNSFQKNQKTLARLQRQLSRKVKFSNNWQKQKRKIQRLHSRIANIRRDYLHKVTTTVSKNHAMIVIEDLKVSNMSKSAAGTVSQPGRNVRAKSGLNRSILDQGWYDMRRQLEYKQLWSGGQVLAVPPAYTSQRCACCGHTAKENRLSQSQFRCQVCGYTANADVNGARNILAAGHAVLACGEMVQSGRPLKQEPTEMIQATA

SEQ ID NO: 41233 - protein, 347 aa, unknown
  TnpB Polypeptide
MLARKQEAYNADKTNFKLKELSKYFHHELRKDEQYVWLKEQNTKVMVQAIRQMLTAYDKFFKYQNGFPKFKSKKDKQTALFPLKAISKRNTFETRHITLITSLKNIKFRCSDLYLKRLRMYKDNIRSATLSKTKSGNFFLSILMDIPQSEIIKFKKTNKEVGIDIGVKDFVITSDGKKFENKHFFKSDERKLKKFQRQLSKKKVGSNNCNKQRIKIAKVFGRITNKKENYIHYVVNKLLSSYDTIYMEDLSVSGMLKNHHLAKAISEVGFYKFKEILSSKSLVNDKKVVLIDKFYPSSKTCSCCGYVYKELTLNERKWQCPNCGANHDRDFNAALNILHEGQRINAA

SEQ ID NO: 41234 - protein, 281 aa, unknown
  TnpB Polypeptide
MSKKQLETVRLTASFKLPPQTRLGSLFTIYKQILNELLGYISFRNISSFKRLKKEKYYELRHKYPDLPSHYVYTACQMACSIYKSFRKLKRKGKAKGDKPVFKRDVVMLDDHLFSINLEKRDASIATLNGRVKVKLLHGKYHERFKDWRIGQAWLIKKCNGLFLNVVFSKEVELRNVIDVVGVDVNENNVTLALLDDFDKKITKEKTIRTAYFLKRRKIQSKIKTGKTRRKLLAKYGEREKNRVLDVYHKVANWIVKKALKNNSAIALENLKNIRRKIKIF

SEQ ID NO: 41235 - protein, 405 aa, unknown
  TnpB Polypeptide
MKILRAYKTELDLNNTQKTACARHAGAARWAYNWGLARKMEAYQNGEKVPTAIDLHRELNLLKQSELSWMYAVSKCAPQEALRNLDQAYAHFFRRVKEKKAGRKVRVGYPKFKSKKNGLGGFRLTGAIHIFENALQLPRLGRLRLKECGYLPVEDVHILGVTVSERAGRWFVSVQIERDIPDPKPTYTPVAGVDLGILALATVSDGTRIENPRAFKSRLRKIKRLQRVVSRRKKGSANREKAVRRLARAHLRVANVRKNALHQVTSRLARTKSAVVLENLNVSGMVKNHHLAQAIMDVGFYEFRRQMLYKGHWYGCQFILADPFYPSSKRCSQCGHIKVEMGLSERVYICDHCGWKVDRDLNAAINLEQLATGSSPERYACGESVSPGYQAVLVEAGTEQQSTCV

SEQ ID NO: 41236 - protein, 219 aa, Clostridioides sp.
VIVVEKAYKFRMYPNKKQQELINKTFGCCRFVYNKYLSKKIEVYENDKETFTYKQCSSDLTNLKRELEWLKEPDKFSLQNTLKDLENAYKKFFKENTGFPKFKSKKTNRFSYRTNFTNGNIMYCSQYIKLPKLGMVKVRDKQVPQGRILNATISKEPSGKYYVSLCCTDIDIEAFENTNNQIGLDLGIKEFCISSCGQFIENPKYLLKSLNKLAKLQRE

SEQ ID NO: 41237 - protein, 397 aa, unknown
  TnpB Polypeptide
LKGTKKLLKSYKTEINPTPEQKQIINRTIGVCRYVYNFYLAHNQEIYKNDKRFVSGMDFSKWLNNEFIPNNPDLHWIKEVSSKSVKQSVMNAERAFKNFFKGKSHFPEFKKKAKSDVKMYFVKTDAKAIIPCERHRITIPTLGWVRLKEKGYIPTNPNTHTIKSGAVSYKAGRYYVSVLVDEQEQQKPVLNEFGIGIDLGLKDFAICSNGKTYKNINKSSQIRKLEKKLRREQRSLSRKYESYKKLNKNLKGEATRQNIQKQKLKVQKLYQRLDNIRIDNVNKVISELVKTKPMWITIEDLNVSGMMKNRHLSKTIAQQKFFEFRTKLLAKCNEYGIELRVVDRFYPSSKTCHCCGSVKSDLKLSDRTYHCNECGYTEDRDYNASLNLRDCQTYSIA

SEQ ID NO: 41238 - protein, 383 aa, unknown
  TnpB Polypeptide
MKRSFKFRMYPNKQQIGILEDTLEVCRHLWNAALDDRRNTYKETGTGRTYNQQAAVLTIEKKYNPDMKAVFSQVLQNVLKRVDLGFAAYFRRVLEGAKKPGYPRFKSENQYKSFTYPQSGFKLEGNHLTLSKIGTIRIFKHRNVEGRIKTCTIKRDGTGCWYCILVAEVEDIPKIEPKTAIGVDVGLKHLVTTSTGETIEYPKYYAQTEEKLSHAQKGMSRKKKNSSNRNKARLKVAKIHKHIANQRADFLHKASNKIADMADLIIFEDLQIQNMLKNHHLAKAISDSSWGTLIRNTISKAASAGKIVVLVNPYNTSQRCSNCGTKVPKELSVRVHVCPKCGLVMCRDRNAALNVLADGLSVSAYRDLASTLGIYLQQATSMK

SEQ ID NO: 41239 - protein, 360 aa, unknown
  TnpB Polypeptide
MQKIQKVIKCKITSLTNIKQKQLQDEYSNLQNLLQLESEGLDFLPIYQNIQLHSANKQQALRFYKKINKNKEYALSIRNDLLKIGFKPNHKISQHWCKIPNKQNRKLWVAIKPHIKDIDFSQYKLGESKVFKKESTWWIYITIIKEVQIKESYSNILGIDLGSKVIATVCGSFDNQRPTFYGREVRGIRRHYQYLRLELGKKKLLKKIKQLSDKEQRTVNDVLHKISKKIVDIAEQTDSYIVLGDLKNIRKSARNKGRNFRRIVSNMPYLKLTQFIEYKAKEKGIKVIRVSERGTSKTCSKCGYEDKLNRRTQGLFKCRSCGYEINADVNGARNIVAFFKGYIPSERVEVTQPQTLRCRI

SEQ ID NO: 41240 - protein, 379 aa, unknown
  TnpB Polypeptide
MSSRVIGLKLPYDESVSKTISIYQNALQYCIDTAWKNRIKNAYRLQPFVYTHIRSLGLHSQLACACIKQACGMVKKAKNKPVVKRRFMRYNSPRSFSYKNGILSVATVHGRKKFHVEIPKYASKYNDWNIRESILTINKKNRIFFHLCVSKDIDVPLRSTRHRRILGVDVGIKHLAVTSGGKFFGSVVPKMRKHQRLVSALQSKGTKSAKRHLKRLSGRWSRFMRCKNHEISKEIVEGLGYGDILAMENIKHIRRNKGRRFNRQLHSWAFAQLQSFMEYKAVEKGIVVVKIDPAYTSKTCSRCGYIGIRTAGFFHCTCGYSCNADLNASFNIRNRVKPLAMTFGQNVSLPIVASDERDYRFHDDSSSLVTSPQTLAVGY

SEQ ID NO: 41241 - protein, 373 aa, unknown
  TnpB Polypeptide
VIVHKAYKFRIYPNKTQETLIKKTIGCSRFVFNHFLAKWNDTYKETGKGLTYNACSAELPKLKKEFVWLKEVDSISLQSSLKNLADSYNRFFQKQNRAPRFKSKNNKVQSYTTKYTNGNIAIVQNKIKLPKLGLVRFAKSRNVHGRILNATIRRNPTGKYFVSILVETEVHKLPKTNSSVGIDVGLENFAILSDGTTYPNPKYFRTLEKKLAKAQRILARRKKGGSNWNKQRIKVARIHEKITNARTDYLHKISTDIIKNHDVIGIENLQVLNMLKNRKLAKAISEVSWSKFRTMLEYKAKWYGKKVVVVSKTFASSQLCSHCGYQNKDVKHLNLRKWQCPSCRTHHDRDINAGKNLKNEAIRLLTVGTTGIA

SEQ ID NO: 41242 - protein, 454 aa, Rhizobiales sp.
MIARLKKTLDRKYRLHERLAALRKRRQDLLRAIHFLKRAIQKIASKLKQAQQVQKKPAPLFGPRKLFLAQFHLEKSGFASQAAWLKAWRNARSNCLFIEGDKAAPCGNRFARLRRAGDAFDLELRLPERLASEATNHYPCKGRQIHSVDFKGLNFHHGRQAILAALNSGSPITIRFHRDQTSWKVSVTIFQEMPVTTLDWQKGALGVDWNAGKIVAAHIDFHGNFIRSFTFACNTKGNTAHQTRDTIRKVAVRIVTLAQQLGVPVVSERLDFSAAKTSKRALGDPRFAKMVASFPYSSFTQAIGSACKRSGIALETVPSFHTTRVGRHKFARRYGLSSHQAAAMVIARRAMKFSEHLGPGMLLDTATSTGSKHPTDTREERKACVTDGTASMPGGKEGAASTGVVSANDAEIMLHACPRIWWSKQPLHDPSGLSGRSLRYRFSRGSEGWEPRRE

SEQ ID NO: 41243 - protein, 558 aa, Firmicutes sp.
VLSLPATSPQRAPATYEKPQTGILLHRRPQVKAKPKAARKRTSQKRAKAFTGVHALLVFPSGEDHKATLDLMRRFSAAVRYAYNRLLEGWSREALKRENGPLCVLFCLNTRYADDAVMKAQALLDSARELGEDPRKVVFGGRGLFEQLKRRHLSGKPLKELKREWKEKRQGLLYSRGDKTKGGNLNLRFLVKEGALWLRINLGDGSYAHALVKTSHPNLNALVERVHASLPYNVELSLKDGKVHATFTWEEEPAPLVATKENGVLGIDINADPYHLALALVSPDGNLRRYLTLSLEEVDQAPNKGAKELLLWKVAHQVVSLALEHGVAIATERLKHLPKGRRGDGSGRAFRRKQHRFAYASLLRKVHSLARKKGVQVVEVNPQDTSAIGMLKYAPQLSLSKDVAAAYVIGRRALGFKEKLPKGYGKLLRDERFRGHVQGFYASKVQELQAKKAQERNPYLRRRLSREIGEAKRHLSLLSSLQGSPGSQEGSTDGRNSPGVNPWRVLRVGLFLPLLGREVPRDLSPLKPILFGGSWEGWKGGLGPHPGGGPECANVRSA

SEQ ID NO: 41244 - protein, 414 aa, Chroococcales sp.
LTLPKIADNKSKVDGWYMIVYEFKAVINKQQTMAIEEAIRTTQFIRNKCLRFWMDNQKIKPYDLNKYTAVLAKEFEFADKLNSMARQAAAERVAFAIKRFFDNCKAKIPGKKGYPQFQKNNRSVEYKTCGWKLSQDRKYITFTDKCSIGKVKLKGTYDLHFYQLKQIKRVRIVRRADGYYIQFCIDAERNLDLQPTGKTIGIDVGLNHFYKDNEGNQVENPRYLRKSEKAIIRLQRRVSKKQKGSSNRKKAIKRLRKKHLKVSLQRKDHAVKLARCVVRNSDFVAYEDLKVRNMVRNSKLAKSINDASWSLFTSWLSYFSRVFGKVVVAVPPQYTSQNCSNCGETVKKSLSVRTHICKCGCVLDRDENAARNILAKGLKLAGYLTYPGEQGNDNALGENPLYLTLETRLSKGTH

SEQ ID NO: 41245 - protein, 502 aa, Rhodococcus sp.
LRLRRGRVVTAQVMATLRTLTHRDTAITALSARFDPATGAVAPPTEPADYVPPGFARGVRRQLIAHARRTDGAQATRLRITDVQEPPRMAAMARLSAVDRQLAQIAVTDRELVLTVKLPTSPFPAGRAQWRRVRLTAAIPNHLHGRPVIEWHLPTLILDRKGLLWRCAATELVSAGDLELATVAVGVDWSPSTLGAAAITTDHPDGLVSDYRGWTYDDRGLGIKLARLQAEGQLLHAKAARLTRLAATAPPQVRAELEAKIAVLNEHRTAVGAKRGWINRELAFHFARQATEYASAAHAQVIAVEDLTTLETRDHGRVNNNRAAQSARRKAAAALAHAAAGAGITVVSVPSRGSSAWCPGCDEPLARPGGYHTAWCSRCRVGGNRDHVAGVNLAKRALLGRGKATRRRGQMPAVRVAEHAPVRPSRDKHAPTPSRPRHRRVRHSLPTVTQRMGVNPKQHVPAPQASVWDTVKPTPPQSDAGSRDTRLSPTSATPVADSMRST

SEQ ID NO: 41246 - protein, 401 aa, Gammaproteobacteria sp.
LAYAAASAQFYCCGRAADPPTKKNPSPLHRYFARRFCKFPSYLRRSAIEFVKGQVASYLTRYQVWQTGGRTGGNARPPRFNPVAGCYPVMYRGQLVKFDVELTTASLKLWDGKEWLWHEVAIKAVRHRHRLGTVKSPTLVLNRHCHLAVPVQLNPQRLPEGQKACAVDVGISTLATASIVTPGGTIAARGFFHPAAEIDRRDKRAALIRRKARKTAKLSKGFGRAWYRKAKHINENTAQQTSRKLVDCALARGADVIVLENLKGWRPKGGRRRSGLRQRFHQWLHRRLATLIEQKMAKVGGRVVYVHARGTSAWAFDGSGRVKRDTTQYERATFRSGKRYNADLNASYNIGARYWAWNHKLTRRKDGQLSAGRSSPGKPRMPVTLSTLWQREPEAPHRCKA

SEQ ID NO: 41247 - protein, 316 aa, unknown
  TnpB Polypeptide
MAQQILKEVDGSFKSFFGLLKLAKQGKYPFSSCRLPKYLPKDGYATLIVGFVRLNGNRFVLPYSAAYKKHHKPVTITIPPVLADKTIKEIRIIPKADARFFEIQYTYQVEAAQRNLNPTHALAIDFGIDNLMTAVSNRGESFLIDGKRLKSINQWFNKRNACLQSVKDKQHYGKKTTRRQAVLQRKRNNQVRDYMGKAAKQVVTYCIRNDIGTLIVGYNTTFQRSSDLGRQMNQVFVGIPFGILRRKLKYLCEMNGIRYVEQEESYTSMASFWDLDEMPVYGEAGLVPQSFPAAGSAVACIRTALEGGSTLMSMVL

SEQ ID NO: 41248 - protein, 378 aa, Microscilla sp.
MLQVVKTYKYKLRNLSATQTRQLSSWVGACRFVYNLALETKQYAYKAYGVNLSRFDLDKELKTLKDVEWIKDVPSQSLQDVLQRLEKAYQSFFKGGGFPKWAKKGKYNSITLKSVTRDNCEAGRFVLPKLGEVKTFYSREIPKKAKLKRATIIKESDGFYISIMFSTTTQPLPSNNQTVGLDWGIEHFITTSGGEHIANPRLFQHYQNKLRIEQRSLSRKKKGGSNFKKQARKLAKLQAKIARIRNDFQHKVSTGLILKYGSIAVENLQVRNMTGRAKGTTEAPGKNVKAKSGLNRSILDAAPSMFLDKLEYKSKWHGRTFVKVNPKHTSQVCSECGHKDKESRKTQAKFVCTSCGTKLNADVNAAKNIEARAFASIR

SEQ ID NO: 41249 - protein, 376 aa, Cohnella sp.
VKCGDPLQVTLTAKVKIMPTPEQMDWLLQTSRAYRQASNFVSRLVFEKKILSLSALHTMVYRELRATFSLRSQMAQSVIKTVVARYKSLISNGHPWTSICFKKPEYDLVWHRDYSLGKHLFSVNTLDGRIKVPYETKGMETYFDGTWVFGTAKLIYKRGKFFLHIPMRKGVDETAWKSIHQVVGIDLGINFVATSYDTQGKCLFYPGRSIKDKRSQYKHLRKNLQKVGTPSSRRKLKRIGDRENRWMTDVNHRISKALVHRYDPNTLFVVEDLSGVRKVTECVRVQDRYETVSWSFYQLRQMIEYKANHRGARVIAVDPRYTSQTCPKCTRAAKANRDKKKHRFCCTACGYSSNDDRVAAMNLQRMGIKYIAEVVV

SEQ ID NO: 41250 - protein, 403 aa, unknown
  TnpB Polypeptide
MERLQAFKFELMPTGEQARKMRQFAGACRFVYNKALAFQKESHAAGQKFVGYVGMAKRLTEWRNGADTPWLKDGPVHTQQHALKHLEAAFKNFFAGRASFPQFKRKGLGDSFLFPDKNQITVDTGNGRIKVPKLGWLRYRKSRDVLGEVRSATVSLRAGKLYVSILTKREVEQPVPQGPAVGIDVGVANFAALSDRSFIAPLNSFRKHEQRLAKYQRRMARKVKGSSNWKKAKSRILRIHARIADARADFLHKASNTISKNHAMIAVEDLKISNMSKSARGTADKPGKNVRAKSGLNKSILDQGWGEFRRQLEYKTAWRGGYFVAVDPRNTSRTCPCCGYVSKDNRKTQALFKCVACGHSDHADTVGALNILAAGHVAIACGGMVQSGRPSKQEPAEGLRLPA

SEQ ID NO: 41251 - protein, 414 aa, Okeania sp.
MYGCQQQLIKSSENLPFLEYLCITANKLINCGIYLARQWYFKFGYITGKYDLEKKLKSNINYNFLYSQAAQQTLRGVAEAFKSYKELSKKHKKGELTDKPQLPKYRKKGGMEVVTYPKQALKLEKGKVKVPLGRKVKVAFKIDSFFLDFPSNLEFKEIREIRILPRNRCFYIQWVYELKADKPQLDKAKVLGIDHGVDNWLSCISNVGTSFIIDGKHLKSKNQWYNKQIATIKEGKPQGFWSKKLACITEKRNRQMHDAVNKAARLVINNCLKYGIGRIVFGWNKGQKNSINIGGKNNQKFVQIPTAKLKERISQLCELYGIELIETEESYTSQASFLDGDFLPTIGEKPKSWKASGKRIKRGLYQTQCGLLVNADINGAANILKKVATTLKFSLKEVSRGTLIMPLRIHFWIA

SEQ ID NO: 41252 - protein, 377 aa, unknown
  TnpB Polypeptide
MAEKGYMFRIYPDEKQKIQLAKTFGSCRFVYNNYLAKRIELYKTEQKSMNYNACSADLTNLKNEKVWLKEIDKFALQNSLKDLEQAYQNFFREVKKGNKDQGFPKFKSKHNHEYSYRTSFTKTTAGGNIRIDGNKIQLPKLGSVKFAKSREIQGRILNCTITKTCSGKYFVSVCCTDVKIEKYEKNKNIVGIDLGIKDFAITSEAEIVDNPKYLSKLEDKLKEAQRNLSKKKKGSKNRNKARIKLNIIHEKIANQRNDFLQKLSTRMIKENQIICLEDLAVKNMVKNHKLAKAINDVSWSEFVRMLEYKSLWHDRIIQKVDRYFPSSQLCNVCGYKNVEVKDLNVREWECPECNSHHNRDINAAINIRNEGLRLLGA

SEQ ID NO: 41253 - protein, 361 aa, unknown
  TnpB Polypeptide
MYKRLNIKLYPTIKQKIVLDNHFSGYRYCYNLCLSYKMHLWKYYKINKTGFDLQTELCQLIKEVPFLNNCKVECLRQAGLDVEKTYKKFYKGSGFPKFKSKKNKQSFIAQQSILIKKGRLSFFKNLIKFKDSDKYFNKLKSLEIKQCTFSKDKIGNYWASCLIEDNEIKMLPVVTNKIGFDLGIKDFLITSNSEFIPNNKFSIKKQYKLRKLQRKFSKTKKHGKNREKLRIKIAKLFQKITNQKQHFFHQVSNKLIRENQSINCETLKVENMIKNRKLSKSIQDVSWSSFISVLEYKCIWYNKELIRIPAFYPSSKLCSSCGNKKDDLKLSDRIYNCSCGISLNRDLNAAINIRDYKDKCA

SEQ ID NO: 41254 - protein, 264 aa, Microcystis sp.
LPTRVEERIAEVRIVPKCDCYVIEVIYGKTEQFLAPNEKIAAIDLGIDNLMAVTSNQPDFIPLLINGRPLKSLNQFYNQRRAKLQSLLKGNRQSSQRIRRLTRCRNQKIDNYLHRASRYLVNLLVDQEITTLVIGKNDGWKQGVNLGKVNNQKFVTIPHARLIDMIMYKCRLAGISVIIQEESYTSVANFLNLEPLPVYGETTEKPVFSGKRISRGLYRTDKGIRVQSDVMGSYNILRKAFPNAFNRYGIERCVVHPRRINLSK

SEQ ID NO: 41255 - protein, 506 aa, unknown
  TnpB Polypeptide
VAKATKTIKQSLGYKPAHILYFAATKALFNQVCAFYFEVITAHPALLDLSSKEALTALETLTHTTKDRSHPVMPLCAVIAVDIPAMFRRAAIHAALGSAHSFYSHLEKWRKQKEKALAKGKKFTIRPPVPPRSWNKPTVLYAGQWKGYTTTCIMLKLWTGKSWAWIKVRLQGRDLPDGWEMEIPMLVENGGRWNLHIPVKKKFTVPAKVAEQLNTNTETRLCAVDLNISHHLAVCTIQTVEGTEVATRFIGGGKQLHGLRKRQLGRVARNRRKTGIIAEGEQDNAHLWAKIRALDEDSAQQVSARIVQFARGHHASILVFEHLGNFKPEKGKYSKRSNEKRSYWLRGKIFRYAKYKAWNEGIITCRVSPRNTSRACARCGTLVARYNAGEPAEGYSVGAPLVYCPQCQMRGNADRNASIVIGQRLLARYQQDILQEKPPTPLSSAKRPVKTGGVRHSQETEGTGRPSTNRTRHGKANAQGTAQDTLSGMVDHVSGIPSQLRLFSES

SEQ ID NO: 41256 - protein, 379 aa, Clostridium sp.
MKFLLDLDGEIFDHAGFPVCEGYKALTVVRTDISKLHRHDEIPDRSEVCTHESGGIENPGTPRYKKDKMPITYMQNGIQHENGSFNVRLSLQKKLKEYMAHTYNIRAAYLYLKNPVFSNMDIIKQIKIYPPANNGTSRILVIYEVEDVLPEEHNGHYLSIDLGLHNLMTCYDNVGKTFIIGREYLSLSYFYNKGIARVQSQWDRIQAAREKEDLKTSKHLQKLYRKKNDCIKDYIHKMTRYITNYCVKNDIHTVVIGNIKGICKERNVGRKTNQKLHGLPYARIYMQLEYKLKMKGICLIRQEESYSSQCSPQSEEVSRIYAEKRNRKKRGIYIVDTVIYNADAVGAYNILRKYHAVFGKEIDMPVTGLSSTKTIKVAV

SEQ ID NO: 41257 - protein, 547 aa, unknown
  TnpB Polypeptide
MFWNDKSNNLTKILWKPSLLIDHKPNQRKYFRCSNRNISFNYYSDNANINPHLKHYRNYYSDNANINPHLKFKKMPNIDNTTKKIKLENRLEKIECNRLDKEIKNPKSKLCYNELKEKHFNFMDKIDNKVNNLDGFVRSHRVQIFPNDQQKKIISQWFYDTTHVYNKMVSHFTQIYDHYYKIVLDMDIDDNDRSVELGKLLKSNKEFPLNFKKLRKDKIEEFAKDYYNTPYCIIADTIKEFVSNTKSTTTKLIKRQITEFQFKHRKINRICHSVTIESHYTTDKGFYPSVMGKILTSDDKNDFQWSNIQHDYKLIYDKYTKKYYVHIPKYVFKKEPMARKPIAIMDPGERTFQALYGLDHVIAIGENMRDVISKRLLKIDSLKSKLNEKGKWKYNKKLKKKTKKKKHKYKRAIHRHHAKLKHLQQELHQKTAIYLCENYDRIMVTDFSSKRVSSKKGNLDKMTKRVLGKLSHYQFRQCLQNKCQEYGCQYLEVSEAYTTITCSNCGNLHKTLGTAKIYECIICENIMDRDVNAAINIFIKNHELVLK

SEQ ID NO: 41258 - protein, 452 aa, Alteromonas sp.
MITGIKFQAKPTLEQVKTLRQWQGCQRFIWNAKCDEDLYLRTFAKKYLPVGTYAEPNQSYSQYKDKALSPWLYDCPSQILRNGTTNWYNTYRKFIKGVCGRPKHKRASNQGSVHLTKELFKLFKEDNRWVLEIGTKSKPLGILNVKFHRSFEIPKSIYIKRNHDRWSVSFCYEDGVLNDYLREDHFKHLKGETREQLESKVIGIDRGIKRPVQFGEKEINYTPEQIKKMCGHERHIKQLQRNLARQQKGSKRYSKTSARIARKKSQQSNIRHDFAHKASHQMVSSNKSVLVFENLKTKNMSRSAKGSAEQHGKNVKQKSGLNRGILEVGWHIIQSFTEYKAEKAGKAVFYISPYKTSQECANCGHTHADNRKSQSLFKCTLCEYTDNADNNASAVIKKRAINLILDSGTELSDKGLLKPSSDIGREFGNKTQSKPAIVRAKKRQKRQLSFAA

SEQ ID NO: 41259 - protein, 344 aa, Lactobacillus sp.
MAQSVIRNVVARYKTIKTQLKQTPFRYNTGEKDAQGHAIWSQIPRDLTWLWRPVKFKRLQLDLQRNRDWSYLNSTNELSLNTLMGRKKVDFVCKNFDQYLDASRWKFGSIKLLQFKNNWYVHLSATTSLSEYELKQTQHIVGIDRGLRFLAACYDEQGQTLLCSGQKVLRTRRKYKKLRAQLQAKGTKSAKRRLKKIGQRENRFISDVNHRLTKTLVDHYGPNTIFALEDLTNVRFATEKAAKKRRYEMVSWTFYQFEQFLAYKANLNSSTVVKVSPRFTSQRCPKCGRIRKENRNHELHLYICDECGYKSNDDRLAAMNIQFLGDQYYQGVKRPKFTKIRSAE

SEQ ID NO: 41260 - protein, 403 aa, Lactobacillus sp.
MKQAITLRLRIVLAANETQLLQETMCQFAAGCQLVSQYLFDHEFVLDQYALHKALYHRLRADIGLKSQMAQSVIRHVVANYKTVQTQMKSEPYAFKDRYTGQWTRCPRDLTWLRRPLQYRKPQLKLVRNRDWSWLQDDRLSLNTLAKRIRVTPYLHGFEQYLTPDWQLGVATVVRTGAHYFLHIAVTKEIDTVDRPHVKDIVGIDRGLRFVLVSHNGAGQTNFVSGKAIANKRAKYHRTRQKLQRKNTKSAKRCLRRLSGRENRWMSDVNHRLSKTLVSQASPNTLFVVEDLTGIRQQLGRQALTRRELHSWSFFELEQYLRYKAALAGHAVIAVPAQYTSQRCPKCGRIDKNQRDQENHTYHCVSCSYQSNDDRIAAMNLFTLGQQYQSGSNHPRFIKEVIG

SEQ ID NO: 41261 - protein, 495 aa, unknown
  TnpB Polypeptide
MGKEVLKDMVTVQAKLTFDSSEDKQRVLELMRRWSSCMRYAYKRLLEGHERKELKRDLQGVFNLNSRYVDDAIMKAESIKKSCEERGENPEKVVFGGRELFEKLKKRHINGRAYRELQRKWQEKRKGNLYSRGDRSKKGNLNTRIETDGVFTRLRINVGERKYVYATIQSGWKTKGKTYTDRNQLLQAISSSGEPYSVELKLKNGVVYAYFTVEEVFPKPGITRANGVIGIDTNAYPRHIAWVETDENGQFLSYGRIPMPELESGSLSKKEYYRWQYAHMIVQMAKGKQKAIVIENLSIQDRGRRGDFSGRKSRRIRHYFGYRLLLEKVKLLAKREGIEVVEVDPAYTSVIGMLKYAPQYMVSKDVGAAYVIARRGLGLRERIPHNYMQLLGRLDENELDKLKEYVQKVVKNTCLRKKQLKEIERVKKFLQSPESESERASEPLDGTSSDVCGKVCNLWRVLRVAVVTPLSPGRVLRDMFVLKSFLVSGQVGRPG

SEQ ID NO: 41262 - protein, 226 aa, unknown
  TnpB Polypeptide
LRVFAASKKKNKQKINWIRLAEKNRIPTDCNYSNPRIRYDGINWWITVGIEYEDSVTVPSNDGIGIDLGIKDLAICSDGNKYKNINKTKKVKKLEKQKRRLQRSISRSYENNKQGKEYCKTKNVIKKEKLLLILNHRLTNIRHNHLHHITSEIVKQEPSFICIEDLNVKGMMKNRHLSKAVQQQGFYEFRRQMEYKSKWNNIQVIIADRFFQVLNYAVVVERSKKI

SEQ ID NO: 41263 - protein, 300 aa, Nonomuraea sp.
VRRSFTFLLRPTRRQARALAVCVEDHRQLYNAALEHRRTAYARAGATIRYGDQSAELKHIRADDEEGQGRWSFSSQQATLRRLDRGFTAFFRRVAAGAKPGYPRFKGRGRFHTVEWPKDGDGCRWDSRPEHPSAAFVCLQGIGHVRVHQHRPVRGRVKTIAVKRERERWYVVLSCEDVPAEPLPSTDAVAGIDLGVVSLITTSDGDHLANARWSRASAQRLAIAQQALARKQRGSGRRRKAVIRLAALHTKMRRQRLDHAHKTALALVRRYHLIVHEDLRIAGMTRRAAPRALREAAEAA

SEQ ID NO: 41264 - protein, 475 aa, Bifidobacterium sp.
MSQQTVIERVDVQGAAVYIGDRDDGTSEYSTNGERIMGWLCDGWRYRFNALRSRRYIINSDRTHHPLSTNPDERSVKTMRVECSWIAAMPAMVIQSPERVENTQWFSAIARRKTNLAHHRRMGRLPSFISRKHNDQTFACWHNKGANANYHQVNRNHGIVEVKGQNPKEHREHGTRFTIRIHIRVSQPIRDYTAIRVNWTRRTLSFTNTPLPLQHEPTGRKLGIDVGVAHAATQSDGIMLDLPKHKLDRIDREIRRRQKAMNRKAQASGKSRKQYVKDGVSKRYQHEREQVRQLYAKKKRIITDLYQKYTTHLVKTCDMIAVEALRTANMTRRCKPKPDPQHEGAYLPNGQSAKRKLNRSMLEASPSTLRAMLEYKTTLTPDCTLIEVNPAYTSQTCNQCKHTAAANRESQAVFHCQNCGHMENADINAARNILEAGLKHLRSTDGASHEPTTQDMPPASRGRHAVVSCKPQHLV

SEQ ID NO: 41265 - protein, 374 aa, unknown
  TnpB Polypeptide
MKLTIQIQVLPDVKQASLLKATVERFNEAATWLAGEVFAVRSANKVDAQHRHYRTLREKFGLSAQMAVRCIAQVCEAYKRDKNKRPRFRKHAAMPFDQRIMSFKGIDRVSLLTLAGRVIVPIIMGQYQRERFTNAKGQSDLVLRRDGKWFLLVTVDVPDGTPTPVTDFVGVDLGVVHIATTSDGQRVSGDKVEKVRQKHHRTRRSLGKRMSSPHKRRTRRNARRAMKRIGNREQRFRRHENHVISKQIVKLAEGTGRGIGLEDLKHIRIRTRFRKGQRAKISGWAFWQLRTFVEYKSKLAGVPVVVVDPRNTSRTCSACGHCEKANRQNQAEFKCRQCGFTANADVNAATNIAAAAKVNWLEVTKEHRCKSLVA

SEQ ID NO: 41266 - protein, 489 aa, Microcoleus sp.
MTEERDASPWLETRGKVGSGLNRLEYYFTYRNTIYRLGGVYCEYQNKTQLSAVRPYLLLSSILRIKRMSNYGCQQNLISPDSSLKAILEFVCSESNKLANCAIYYGRQLYFKTRKIPGKYDFHKLFKSNLHFKALYSHVAQQTLTSVAESFSSYIGLLKGITSGMVTQHPKLPGYRKNSLKLVTFPKADVKLKDGLLRFPLGSKVKLWFGIGEFFLPMPSNLDYKKLVEIRILPKNRHFYAEFVYRTEELVVDINPDNVLGLDHGINNWLTGVSNVGTSFIVDGLHLKSLNQWYNKRISVLKENQPQGFWSNQLARITEKRNRQVKDAVNKAAKTVVNHCIENSIGTVVFGWNKDQKQNVDMGKKTHQKFVQIPTGRLKDRISQLCQLYGINFVETEEAYTSKASFLDNDSLPKFGEKTEGWKESGRRVTRGLYRSADGTKINADCNGAANIIRKVAVKLGLNLSGISSGDLIAPLKIRLWTLQESPRL

SEQ ID NO: 41267 - protein, 325 aa, unknown
  TnpB Polypeptide
MQKGIKFRAYPTKEQKNLIDRTLGCCRLIYNKGLSMREDAYKSGEKINYSQTSAMLTALKKDEDYAFLKEVDSIALQQSLRDLDRGYINFFQKRAKYPTYKSRHQNRQAYRTLNQKDNIRIVGKHIKLPKVGFIKIKQSIDVGHINNVTVEKTPTGKYLVVLNVDFEPVRIANGGGRIGIDVGVKEFYTDSNGAVVENPKYLEASLRKLARESRRLARKQKGSNNRRKQRLKVAGVHEHVTNQRNDFLQKQSSILVREIEFQRLHHLRQIKLPLLHVQLQEIFPCCFRDLAYIFLNCLCVFANPANRLLPFFFIFIQIFLQCLRV

SEQ ID NO: 41268 - protein, 394 aa, unknown
  TnpB Polypeptide
MIAIKSIKQYYETNQELLTLMETFRQMVNECIRIGLKNNICNLKKLSSLHYKDLKYYNIQAKYKLTAMSQACGRISQMKYAIKQGKTPKSPYIQKPFLVSYYGFKINGRLLSIPIKNQETNPQKSIYVNIILNPHTQKILTNKSLKVKSFVITPQHINLCIQKKVEAIKYETAIGIDRNLRNVTIANNTKIIQYDMSNLPKIKQRFNKVLSSFKRNDHRIMQRIYSKLSRRKSRRTKQFLNRISKDIIQRARESKSIIILENLKGIRKLYKKGNGQGRNYRGIMNDWQFYELQRQIQYKANWEGIPVEFIDPKGTSQLCPICGFKVQEDKFQHRQLWCSNCKKSMDRDVLASLNISYKGWLRFIHPSCDAIEAMKGNLETPVILRVDASKLGMK

SEQ ID NO: 41269 - protein, 405 aa, Symploca sp.
VTLINSRGAQQVRIAYQYRIKPNQEQQEKIDNTLDMLRCQYNYELAQRFDWYEQNRCSIDRCPLVCHLPELKEKPTRFSQQASLKQLKKERPWYKKIHSQVLQEVPKKVELAFVRWLKGDVNSQKLGRPRFKAKGRYKTFTYPQFKQEHFVGNKITLSKIGDVKVIVHRLIPDGFVIKTVSVTKKADGYYVTLSLDDQTVPSIKPDFKADKIVGIDLGLYDFLVTSENERIKAPKYLRSAERKLRKSQQRVSRRKKGSNRRKKAVQKLGKQHKKVADTRKDFHFKTANQLIEKYDVVVVEKLNIKGLARTRLAKSIHDAGWGQFISILTNKAGNAGLLVVPVKPHGTSQECSNCGHQVKKPLSQRIHNCPVCHTSMCRDHNAAINIRNRGAHDLSKKAQSMSGVA

SEQ ID NO: 41270 - protein, 205 aa, Brasilonema sp.
LSCQWFISFRFEVETQECTSKSVVGVDLGVKNLATLSTGEVVLGAKSYKKYEAKLSRMQWLHRHKIIGSSNWKKAQLQIARLHRKIANIRKDTLHKLTTLLAKNHGTVVIEDLNVSGMMANHKLAASIADMSFFEFRRQLTYKCQLYNSKLVVVDRWFPSSKTCSNCGTKKETLTLSERVFECGDCGFVIDRDLNAAINLSKAVS

SEQ ID NO: 41271 - protein, 459 aa, unknown
  TnpB Polypeptide
MPEIMRLAFKYKLRPNRKQEQAMRNFSGCCRFAYNALLAQEKEEYQEYLEELESRLCCGEALSKDEAKALCVKPKLNQYTFNYALKKLKEEYPFLKEYCHSQVLQQKVMDLYEAFKKFFKGTGGYPKFKKRHSDDGFRYPQGFKVEEDNGRIFLPKIGYVRYRNSRKIEGIPKNVTVREEADGWYVSIQCEFELKPEISIPDIDTAVGIDMGVKRFLTLSDGNFINNLEEKLKPLENKIALLQKRIKHKVKGSNNIKKAYLKLTLLHKRKADIRNDFLHQVSTLLVKSHDNKYNREINSHIVNSRLFLEGKVIMGYLGEPGEVNIDQSLQTALNMGKTVCVPQILEGPGEMAAARLVNLKKLGRDHYGIRTPQEPVETIAPEDIDLVLTPGLGFTAQGERLGRGAGYYDRFLPRCTKGVPMAIGYEVQVQKELPTNAHDAKVRYLCTEKGLRVCKNNGK

SEQ ID NO: 41272 - protein, 364 aa, Ruminococcus sp.
  misc_feature (319)..(322): Xaa can be any naturally occurring amino acid
MVKAIKVMLIPNNVQKTKMFQYAGASRFAYNWALAREIENYEKGEKFISDAELRKEFTKLRHSDEYAWLLSISNNVTKQAIKDACTAYKNFFKGLQKFPRFKSKKRSIPKFYQDNVKIRFSNTHVKFEGFSSSRKANKQKMNWVRLAEHGRIPTDAKYMNPRISFDGLNWWISVCVEFPDCREILNDDGVGIDLGIKELAVCSDGTKYKNINKSQKIKKLEKQKRRLQRSISRSYEKNKKGESYCKTNNVIKKEKLLLKRNHRLTNIRKNYLNQTISEIINRKPRFICIEDLNVSGMMKNRHLSKAVQEQRFFWFRKQXXXXDFFGLENSSNTNAAIKESRLLWLIVFIHHQSFAAVVETSKKI

SEQ ID NO: 41273 - protein, 368 aa, Gammaproteobacteria sp.
MKQVHNLEGEINYRLLKSAVSQQSLRKLDKNFKSFFMVNEDFKKNPNKYKGQPKPPHFKKNQYDNLIYTYQAFQIQNFEVVLDTRKGRELKIPLPKPLIGKTIKMVEIIPKPHYFQAVFVYEENQAVYQQVQPNDKVMSIDLGLNNLATCVTNGVIKPFIVDGRRIKSVNAYYNKRKASIQSYLEKSRGKKWSNRLQNLTDWRNARVNDYLHKATAHVVKTCLTHQISFVVVGDVAKSLDQINLGTKTNQNFVNLSLGQFVEKLSYKLGQHSIKLIVANESYTSKASFKDSDKMPKKYEKNAKPTYSGKRLKRGLYRSKDETLINADVNGAYNILRKSDCSFSFQKLINKVGNGIKSWLHPTGRVFIK

SEQ ID NO: 41274 - protein, 196 aa, Escherichia sp.
  misc_feature (184)..(188): Xaa can be any naturally occurring amino acid
MKRAYKYRFYPTTEQAELLAQTFGCVRFVYNSILRWRTDAYYERKEKIGYLQANARLTALKKEPEYIWLNDVSCVPLQQSLRHQQAAFANFFAGRAAYPAFKSKRHKQVAEFTASAFKHRDGELYIAKSKSPLDVRWSRELPSAPSTVTISRDSAGRYFVSCLCEFEPVSMPVTAKTVGIDVGXXXXXNRQSPPHR

SEQ ID NO: 41275 - protein, 367 aa, unknown
  TnpB Polypeptide
MLLTYKYRIKDSRSRGLLNRMAVTVNFVFNYCNETSIKAIKRDHRFLSWIDLHALTAGSSKELGIHSQTIQKVCEEYVHRRKQFKKIKLNWRTSKRHTGWIPFRGSGIILSEDTVKYFGNILKFWKSRSLPEGSVIKGGNFNSDRRNRWYVNIQVEVPDPPKYQGTQPPVGIDLGLKIHMSLSDGTKYGYPKYYRLQEEKLGKAQRAHKKNQIKSINAKIANQRKDWLHKKTTDIVNKYGAIYVGDVNSSKLIKTNMSKSVMDSGWFMAKSFFGYKSQKLGKVFEERHETWSSCTCSVCLEETGPRGLSQLGIREWVCSNCGTLHDRDTNAALNILNPPSGHRRPNGNPWNLFREDAKRQETECSQR

SEQ ID NO: 41276 - protein, 216 aa, unknown
  TnpB Polypeptide
MRTDGTILERKFINFTSDKDHLYHVFGRIRRFQREHFSRQVQSRWNYAKRLNMELSRKIAAAITKCAIEYQADVIVFEYLEMQGKLSGKKKQKLHLWRKRDIQKLCEHQAHRNGIRVSRVSAQNTSRLACDGSGAVERNPENHSLCTFRTGKQYNCDLSASYNIGARYFIRELLKPLPETGRSSLEAKVPAVKRRTSCVYADLRKLYAEISELKAA

SEQ ID NO: 41277 - protein, 371 aa, unknown
  TnpB Polypeptide
MKTYKYRLHPTKQQKQLLAETLESCRVLYNCALEQRKVAYRQFGVSVRRLDQQAELLEIKEYFPEYKGIHSQVLQEVILRVDKSFQNFFRRLKNNETPGYPRFKGKGWYDSFTYPQSGFSLSDNSKGYQRLKLSKIGNIKVKLHRCIKGTIKTCTIKREVDQWYVCFACVVEPEVLPETHKSVGIDVGLEKFAALSDGMMVNNPRYLRKSEAKLKHEQRKLSRKQKGSNSRKKQKHKLAKIHRKIKNQRNDFLHKESCKLVKTYDTIVFEDLKVKNMVKNHHLAKSISDASWSKFIGYTSYKAESAGRKVIFVNPRNTSQICSSCGNTVKKSLSVRTHKCLCGLVLNRDINAAINILRLGTSPGGATAVAG

SEQ ID NO: 41278 - protein, 350 aa, unknown
  TnpB Polypeptide
MKAHTKTLKVRVRDKHTKTLNAMAYAVNQVWNYCNEIGGRSIRERNIWLSGYDLQNYTKGANKELGLNSATVQMVGHEYVTRRKQFKKARLNWRKSGGVKRSLGWIPVRKDCIKYANGQIYHNKQWFKIWDSYKLSQYTFKSGSFNEDARGRWYFNVVVEVQPEPTKGKGSTGIDLGCKESCRDSNGGGVQGRWYREQEDKLSVAQCANKKKRIKSIHAKIKNKRNDDIHKYTRNLVDENALIVVGNVSSQKLVKTRMAKSVLDAGWGQIKTLLSYKCDHAGSVFMEINEAYSTVTCSCCKKRTGPKGLEGLRIRGWRCSECGSTHDRDQNAAINILALGHERLAVGIPH

SEQ ID NO: 41279 - protein, 435 aa, unknown
  TnpB Polypeptide
MAVTAAKVNGQFQFSGRALNITEAKNKALEPYNCIVHDYGIVLELLPDDAQMQTLAQQIGNARFVRNRYLSDRKDYYQATKSSLSVNEYKAHWLPKLKEDFSFLRLSDKFALEAALEHVDTGYKNFFAGRAKFPKFASRWKPAGNSYTTKYTNGNIAILEERGLPYVKLPKVGKIRFILPKGQTVASLIPPGTTILSAVVKRETNHCTVSLQVEAVIPKPEQLMELHMRDILAADMGIKRFAVIGGQGWEEEIENPRWIRLHEKRLRRLQQSLSRKQYDKKTHTGSKNWQKAKRRVAAEQRKIKNQRKDFQHKLSHKIAARYSAFLCEDLNIKGMVKNHKLAKEISSVAWGQFFTMVRYKMQRQGKWFIQVDRWYPSSQACSCCGYKNPKVKNLAIRAWTCPHCGAYHDRDVNAKDNIFGQGIRSLEAAGVTIAA

SEQ ID NO: 41280 - protein, 422 aa, unknown
  TnpB Polypeptide
MNPMPHAAGRKKTLVHTAWLPKFFDQTCDYVSMRTAYRCRAYPDAAQQAVLNRTFGCVRMVWNRALAARQARWHLERQGTSYAQSDRALTAMKKDPALAFLSEVSSVPLQQALRHQHTAFGAFLARRARYPRFKSRRSRQSAHYTRRAFTLRGGVLHLAKMTGPLRYAWSWPDTDPGALDPSMVIVARESDGRWYVTFTVDTDAPAPLPQAGRAVGVDLGVRDFAVTSDGQRIANPRHLDRRARHLARYQRRLARCQRGSANRAKAAAKVARAHRKVRNARTDFLHRTTTRLVRENDMIAIEDLAVKNMASNHRLARAISDCGWGEFRRQLAYKCQWYGRDLVVIDRWYPSTKTCSACGHLLARLSLSARHWTCPACGTRHHRDINAAKNILAAGRAVARESPGDACGADVRHPGTPGCSRR

SEQ ID NO: 41281 - protein, 394 aa, Chroococcidiopsis sp.
MGNKAYKFRLYPNDEQTSFLARCFGCSRFVYNHFLRLTTDVYAEAKKSLRYKDWAGLLVELKKQFEWLKEVNSQALQQTLKDLESAFVRFFKKQGGFPNFKKRSNCQSFRVPQHFSIDENGFLKLPKMTPIKMVIHKKIQGTPKNVTISKTPSGKYYASIIAEQDIPHAPLNGDQIGLDLGVKEFAITSKSEKFENPRYFQKSLRRLKIRQRRLSRKKKDSNNRVKARLVVAKVHEKVAFQRLDYQHKISLKLTCENQAISVEDLNIKGMVKNRKLAKQISDVAWGNFLTMLEYKGDIYGCEIKYVDRFFPSSKRCSNCGYIKEDLTLKIREWECPECRRFWDRDTNAALNLMLFSESKIPLEEGKSTPDQLVVRLGMSRSSGSGQEATGEAYA

SEQ ID NO: 41282 - protein, 398 aa, unknown
  TnpB Polypeptide
MIVLLTRTVRVEIRPSAEQASALLALQPLVTAAYNDAAAHAFEHPEVKGAVALHHAVYRRLRAEYGLPSQFVCNVQRLAMGSVAALRKRLAGGKKASCPHAERLPIPYDVRTMALRPDRRTVSLTTLGKRIEVLVRKHQRLEHYASWQTDSGKVSCGKDGRFWLSLTFTREAAVPAITSDSHVVGVDRGIVIPAALSDGRLLGDPNAHHLDRRYYRTQRSLQRKGTKSAKRRLKAREGKWSRFRDWLDHNMTAQILQAVAPGTVLALEDLTNIRVRARRFNRQSRRRMHCWSFRRQQEMLAYKAPEYGVHVVYVDARYTSQRCSACGHTEKANRRSQARFVCRKCGHAENADLNAAKNIAANWTLSQRTESPPVAPRKRHVSPPHVADADTAARRLVG

SEQ ID NO: 41283 - protein, 411 aa, Kandleria sp.
MIVQRVEKHLIKQNNSYYPMFCDFAHKSKNLYNHANYLVRSEFIKNDKWLRYSEMDKILKADLEFDDYKQMPTAQSAQQTLRLLEKDWKSFFAAIKDRSKNKDKYLGRPKLPKYKPKDGKHILILTNQNVKLKGDSLVFPKTFKGFTLRPQFVSKDNFISFQQVRFIPGYNSFTVELVYNIEVPNAALPDNGRYLSVDIGLDNLATVVNNVGLKPIVINGKGLKSMNKYYNKQISHYREVAKRINGRDYTSRMDRLTCKRNHKIDDYMHKASKFLIDYAVVNNFNTIVIGNNKEWKQESSMSKRVNQSFVGIPHMRFIQMVQYKAQTAGLNVILTEESYTSGTSFLDNEEPIKANYNKVRRVKRGLFVSNNGTKINADVNGAYQIMKKVFPNVTSDGIQGVALHPVRVSVA

SEQ ID NO: 41284 - protein, 490 aa, Vulcanisaeta sp.
MLHRSVAVELEVTKELSKLLCSVESAYLNIVREVAAYAVEHNVTSAIQLRGLFYSKYRGEYPGLHSHLVIQAIRQASEIAKSFMERKRKGLAQKPYPEVRNVSIRFDETAWNYEQFIKSIAPVRIKLSLPNGQTEVWLRLHKRFWRYWWLVLNKEAGLRKTLIVKRRANKWYAVFVFEIKPKEGIPQSVVSFDINENTVAVGKIDLTSTVGMVASWNRQYLTPQLYTIKTDFGRLARRYGRVRNAIIEKLKPEFALPNGKYVNVTNTREFRKRVKHLRERGRKLGRVRQIANELTRTPAIIITEELGDNPQESMIEDVGKDELRHRIKQTPFKSIEEAVEDKALERGSRLVRVSSYRNSRVCPIHFTRLERTDDWHTLKCPLGHYVDRDYASVMNMDWKTTPEAWIKAFWWNMKSLNKNMNWRKYEGKSNPLIPYEIVQYIHAVLKTFVARLERCPAMLAQGDPMNHHRIQNEGGGEETSHALLGQGGGQ

SEQ ID NO: 41285 - protein, 403 aa, unknown
  TnpB Polypeptide
MYRVRRVHIGKTAQLDELARECGKLYSQTLVFFWRTVRRKGIWLKPKHLMRLFTSKQLHAHTADACVQAFFASLASWRERTKAGDPDAKPPRRRKWYFRVEYKRSAMLLKDGRLRLSNGKGNEPLVLNWPWGLPQTVVLRWTGTQYEAIATYHEARPIGPFPQGSVAGIDLGEVHTAVSHDGDRTHILNGRLLRSKVRYRNKLQAKLNSRIDGQMKKGSRRRKKLIHSKQKQLMKIKNQIQDIEHKGTTSLISTLHANGVQTVVIGDVRDIRQDNDVGHTNNQKIHQWSHGAVRHKLTYKAQRLGMYVTLQDEHYTSRTCPYCDFVRSKVKGRVFRCPKCGWTYHRDGVGSINIRRKYLGHGPVVGVMAPPISIRLVAGVARTEKVYVRENACAGNCTGAACL

SEQ ID NO: 41286 - protein, 403 aa, unknown
  TnpB Polypeptide
MYKAYKTEIKPNKEQIRRIEMLFEVTIATINDYIDYNIDTMHRLQPIASPEEYLELVNLELAETKYGKYISSPTYKTTVLKALSNKEKAFKRYLDCKGGLPHKKTPGTRHISFYTNSKEIGKYCIPCQRHRIYIKQLGWVRLKEKGYLPAYRSGKYIISLWIKKKAGRYFVIALVDTKKSLPKMKRVQGSSPNGLGIDVNVNNFAVLSNGTVYPNINKTERVQKLKKKAHRYDKLFGRKMRVFYREHPGEKYVLSNNARKILCKQDVVYNRMDNIRLDHINKIAREIIDMKPDYIAMEDIKVQSMLDYKRFSRYIPEQLFYSFKFSVYRKCLEKGIEFRLVDKWYPSTRICHECGYKFDKFSLDVRKFDCPNCGAHIVRDYNASLNIRDTKEYSVKELYYEGY

SEQ ID NO: 41287 - protein, 409 aa, unknown
  TnpB Polypeptide
MIEFMIIRKAFKYRLNTNTETEPLMLQYAGNCRFLWNKALALNLHYLEKKQPMLWYQELDWFSKLWKKSDEYAFLRQSPAQTLQQTLKQLERAFKDAFDKKQALKKMPTFKKRGDKDSFTFPQGFKVEGKRIFLPKMGWVSFRKSRDIEGSPKNVTVSRQGKHWFVAIQVEIECPESVHPSPSMVGIDLGVKRLLTVSDGQFDDPIEVSFCQAKIKRLQKRLARMVRYSNNWRKLKEKINRLHTKIANIRHDRLHKLSTTLSKSHAMIVLEDLQIKNMTKSAKGDSEKPGRMVKQKSGLNRVILDQGWGMFKSFLEYKQHWSGGQVLYVDPKYTSQTCPVCGYVSKDNRQTQSEFKCVLCGHEENADLVAAKNILERGHRLLACGETWVAKLGEAGTGKLSNELKPATV

SEQ ID NO: 41288 - protein, 398 aa, unknown
  TnpB Polypeptide
MKRVEKHKIYKSHPVYSTLDHMSRKANNLYNQCVYFAKNSENLSEDLKNLDKVMKSFPDAYDNYRSLGYAQCAQQILRLFHQNLRSYFALVRNYKKNPTKYTGRPRFPKFRKSSERFQVIFTNQNVKLVGQTITIAPKTFNHQLSITLRTNTAKKICQVVFAPRNDYFLVCVVYETADATISQTSNKVAAIDIGLKNLATVTFSEENEPILYRSDLTKINHDFNRITSNYVSVLKKTQNQDTSKRRKRLSEKRSGLMEDRLHKLSRAIINDLSHRGVSTIIVGKNTGQKINNRLKNFVQVPLFRLIEMIKYKAESAGITFIQINESYTSGTSFLDNELPTKEFYNKERRKLRGLFLSNNSKRINADVNASFQIMKKIYESFTCNNSVKYANPVVKTIC

SEQ ID NO: 41289 - protein, 376 aa, unknown
  TnpB Polypeptide
MSRKANNLYNQCVYFAKHSDNLSEDLKNLDKVMKSFPDEHDNYRSFGHVQCAQQILRLFQQNLRSYFASIKDYKKNPTKYTGRPRFPKFRKSGDRFQVIFTNQSAKLVNQTIRVVPKTFENKLSIKLRTHSAKKICQVVFSPRNNYFLVYVIYEADPIMLKNTNKLAAIDIGLSNLATVTFSEQDEPILYRSDLAKINHDFNRLTSNYVSILKKTQNKDTSKRRKRLSNKYSGLIEDRLHKLSRAIINDLSHRGVSTVIVGKNTGQKINCKLKNFVQVPLFRLIKMIKYKAELAGITFIQVNESYTSGTSFLDNELPTKEYYDKARRKYRGLFLSNDSKRINADVNASFQIMKKIYKEFVYNDFIKYANPIVKTIC

SEQ ID NO: 41290 - protein, 398 aa, unknown
  TnpB Polypeptide
MKLVEKHKIYKSHPAYAKLDEMSRKANNLYNQCVYFAKNSENLTEDLKNLDKVMKSFPEEHDNYRSLGYVKCAQQILRLFHQNVRNYFASIKDYKKNSTKYTGKPRFPDFRKSGERFQVIFTNQSAKLKGQTIHIAPKTFENKLSIRLRTSCAKKLCQVKFAPRNDYFLVYVAYEVDDLVVSQNSDKIAAIDIGLKNLATVTFSEQHEPILYRSDLVKINNEYNRLTSEYESILRKTQNQYTSKRRKQLSEKRSGLMEDRLHKLSRAIINDLSHRGVSTVIVGKNTGQKISNRLKNFVQVPLFRLIKMIKYKAESAGIKFIQVNESYTSGTSFLDNELPTKDFYNKARRKYRGLFLSNDSKIINADVNASFQIMKKVYEELTYDNSVKYANPIVKTIC

SEQ ID NO: 41291 - protein, 391 aa, unknown
  TnpB Polypeptide
MIKSIKVRLRPNNKQLTRLFQYVDCARFAYNWSIAREQENYSQGNKFLLDGELRREFTQLKRLPEYKWLNRVSNDVTKQAIKEACKAYINFFKKQARYPKFKSKKRSRQSFFQDGFKIRFTDTHVKVEGFPMSKKRNKQKLNWIKLCEKGRIPTNCKYMNPRFTYDGLYWYVSVSIDVDENIDIPSNDGIGIDLGVKDLAICSDGNTYQNINKTLRVKKLEKQKRRLQRSMSRKYNVNKKGERYEKTSNLIKRQKELLKVIKRLTNIRRNHLRQTTSEIIKRKPSFICIEDLNVRGMMKNRRLSKAVQQQSFYEFRRQIEYKSAWNNIPVIIADRFFPSSKLCSCCGMIKKDLKLSDRIYKCECGNVIDRDFQASLNLKAYGENVLRQSMV

SEQ ID NO: 41292 - protein, 463 aa, unknown
  TnpB Polypeptide
VYSLKLQTTKPQAKELERRFKMVNDIYYTTLREILKRDAKRKKDPRYKHAYRLPKGKERNAILNELRKEYDVYGKYSFGKFANNYRNARNYSTFIPSDCASNLGQRAWLAYTNATFADTKSSIKFDKQIQSFEGAKNSGLAFRRNVVTLGTQHNQLVLKPKFRNTQYEKDVFENRLKFCRLYRKIENKKPSFYVHFVFDGQPPARFNQQMTGKVGIDIGVSTVAVVSNSLVLIRDLHRPTKEELDQVAAYDRQLFRLRKLSNPNNFEGNGRYKKGHFEWVRSNRYVKIKNEAYEYSRKLAVRRKLAHRTLANQILQLGDQFVVEDMDFSKLSRKCSVDNKISFSKSISRSAPGELIRYVQYKANYIGKQFIVANTFQIKASQLDHSTGQYKRSALSERSKMIDGNHVQRDLYSAFLLSHVNDVGNKVDLDMCNEHFETFIKLHDNEMKTVSSTNMTIASHLWT

SEQ ID NO: 41293 - protein, 538 aa, Paraburkholderia sp.
MSGPQCGAGVERWDQMTGLYGSMKRKLYARIAAGGGKAKSHKTAFCREHGISARMFNAMAIELQGLIDGTREMLVAERKSLRNGIRQLEKQLAVRRIRLEALAEDRLRMSPQREAKLRRTTHLNALRLSKLTARLAGVEHRLAGNVPGICFGSRKLFRQQHHLELTGFSSREAWLRQWQSSRSHQIFFVGSKDETAGNQLCQLRRNADGTYSLKIRIPDRLRLPDDGKSLVIDDVTFNDDRAALEAALDAGTALSWRLHRDKRGWRAFVSFDHRAAPKTTLDVAYGAIGIDFNVDHLAVTETDAFGNLLRTGRLPLLREEAGSGQRNGVLSDVLTKAVAWASKTRKPVVAEALDFTAKRKAMAQLSPKGARMLSGLLYAKYRQLLEAKCFRAGVELILINPAYTSTIGAVKYASRRGWSVHAAAAGVIARRGQKLTERLPRAGTAIRVPVRGGHHALALPARKSGDSRVAAWRSVHAAYRGVVRERWLAVRGGSPRRSAKGTFGGGVRAAPLSRGDRLPCDDNLHEQICARSNLRLEL

SEQ ID NO: 41294 - protein, 423 aa, unknown
  TnpB Polypeptide
MQLAERHLIKPNHELYATLDDLTFKAKNLYNHGLYLYRQSYFEHKKNSETPVLSWADIDKSLRKQGHVDMRALPSKVANAVLKNLGENITSFWKLVRLKREGNLSQSPKLPGYLHKTDGRYALSFNYQTFGAKRGSNNELFLCPKGINLPIPTKVANPKQVRIVPNHNNFIIEVIYDAEERSPKSTSKYAGIDLGVDNFATITFSTQNNPLIIKGLELKSINQGYNRLIAKAQSLLPAHQKTSQSIHRLWSRRSWILRTKIHQMTAFLATLFDEMQIEKVFIGKNAGWKQKLPFGKKVKQRFAYLPYETFIEQLQYKCQLQGITVITQEESYTSKASFLDNDDIPVYGKTDNPKFSGHRIKRGLYRSSDGRLINADINGSYNILRKGLMNNNQTLHMESLLIHPLVVNGIGTEPNDKLVQLYM

SEQ ID NO: 41295 - protein, 346 aa, Catenibacterium sp.
MAQQILKEVDGSFKSFFGLLKKAKQGKHALKDCRLPRYLPKDGYTTLIIGDIRLKGNKLKLPYSNSYRKTHNAVEIAIPPILLDKKVKEIRIIPKADARFFEIQYIYEAECIQRNLNTTNALALDLGINNLVTGVSSKGETFIIDGRRLKSINQWFNKKNARLQSIKDKQHFGKKPTNRQKALACRRNNRINDYMNKTARRVIDYCIDHDIGTLVVGYNETFQKDSNIGRRNNQTFVNIPYGKLRDKLEYLCELNGIILVMQEESYTSKASFWDKDVIPVYKSNDTEEYLFSGKRIHRGQYRTASGQVLNADVNGALNIMRKSSVVDVNILYSRGEVDTPIRIRIA

SEQ ID NO: 41296 - protein, 414 aa, unknown
  TnpB Polypeptide
VIRTYLYACHLPKVEADALNHESGRIYTRALVEHYRVYRQTGHWLSPFKLKQLVDFYDTQDGRARLLHSHTTDAAQEGFPKACKTARECRKLGLDNRYPYKRKYWRTTIWKQTGIQPTASGLLLKRAKGQPPISVSLPNLSGDVLEARLVYDRVGRQYDWHIVTDDRREPPSAPGVNVAAVDLGEVHPAAVTDGNESVVFACRALRAVKQHGHKRRAELQRLQAAKTKGSLAWKKLQRRKTRFAAQQQRRLRDIEHKVSRAVVDWAVQRKVGTLAIGDVRDIGDGKRLKTISQQKVSSWGHGKLREYCTYKAEAEGMNVPLVEEHHSSQTCPMCGQRHKPSGRVYRCPACGFVGHRDGQVGAVNLLSRHTQGEVGRLRPPATTKYRHPFGRLAFGTGKRSRLDTAQVAWAGQHD

SEQ ID NO: 41297 - protein, 291 aa, Bacillus sp.
MLVNKAYKFRIYPTKEQEVLIVKTIGCSRFVFNHFLAKWNETYKETGKGLSYGVCSSELPNLKKELPWLKEVDSIAIQSSIKNLADAYSRFFKKQNDAPRFKSKRNKVQSYTTKHTNGNIAIEGDKIKLPKLGLVRFAKSKEVEGRILNATIRRNPSGKYFVSLLVETDVQPLPKTNKEVGIDVGLKDFAILSNGEVFENPKFLRNMEQKLIREQRILSRRVKGSSNWNKQRVKVARIHERIANARTDYLQKISTHIVKNHDIIAIEDLQVSNMMKNHKLAKAISEVSFLL

SEQ ID NO: 41298 - protein, 406 aa, unknown
  TnpB Polypeptide
MLRAYKYRLHPTKEQKIFFAKSFGCARYVYNWALNKRIEAYQTEKRRINSIDLCKMLTGLKKEEGMEWLKELSNECLQQSIRNLDSAFTRFFREKKGFPKFKSKHDNRQSYKAINSVVVDLDSNKVRLPKIGWVKFAANRAFEGRTTSVVVSKTPTDKYYISVLVDDDKDFPAKENITYDGTIGIDVGIKDFAVCSNGDVYKNPKYLEKSTVKLKQLQRRFSKAKKGGNRRERIRKRLARQYEKVTNQRTDYLHKISTKLVRENQAIIIEDLNVKGMMKNHHLARSIGSVGWSTFFSMLEYKCKWYGKTLIRIGRFQPSSKMCGCGYVNWGMKLSDRTWTCPKCGIVNDRDLNAAQNIKRFGLQEQNLLTEPVAHWGLDGENPTMDERGESYLRSSGSVKRQNRQV

SEQ ID NO: 41299 - protein, 477 aa, unknown
  TnpB Polypeptide
MGKRTTTPSFIHEFPLRVSIHEAHQIEKRLEKARQVYNAALNECFRRIERMKHSTEYRAIEDMKPKTRMVKGADGKPKREFTPEYKAARQALLLKYGFSEYSLNGWAKSLTGTWVTEGLNGQVFRAVVRRAFMTAAKFYFGKGGKPKFKSKRTPLESIENSTNLQGLVWRDGYLLWNKNDLKLKAVVDMGEPRDRYALSCRVKYPRLVRKDLNGKARYFVQLVLEGWPYPEPEKRTAPSGSVVGFDLGPSKVAIVTDTEARYEPLLPELRPAEKALRRLDRRMDRQRRASNPDNYHADGTVKRGKRKWKKSRRYLVTQAKRADVYRKLAAQRKTLQGEFTNGLLRAGETIKAEKLNYVAWQRNRHFGRRVQRNAPGMMLSLLRRKAGKRLYDIDVFKTRLSQFCVCGRYQKKPLSQRQHECECGAKVQRDVFSAYGARFVDETTGRLDAAKLLADWPDAEPRLQTASSGKGTGKSGA

SEQ ID NO: 41300 - protein, 466 aa, Leptolyngbyaceae sp.
VTTRRQTFRLYPNKAQAKALFAARRLHCYLYNACVSHRQTEYKLGNKSVDYYTQQNALPAFKKEWGEFAALNSQSLQGTVKRVDLAYQSFFSGLRGKPKFKSIRNYSGWGYPGKSGWKATTEGQHGTLTLNDLGITLKMRGKAKEWAIPGTLMIVFKPSKRQWFASFTVEVATIEAKFGSESDLKYESIAAYDLGTETALTLFDGTQFETVENPRLSHKNDEKVRNVAKQKRRKRAPKKGVKASRRWKKINQREANLKAKVARQRKDWQHKVTSDIASRYDIGVTEKLNTKGMTHTAKKGSKRSVRETGSPAKQLSKKRKKQKAGLNKSILSVGFGTLNKMITYKIEQKGGLVLQLPTRIIKPSQRCPKCGAVHKEWAELKNRYHVCSACGFEVPRDQGSAMVMYNVATHQQPGLGTSLASLGCFSATSETRKTGSMRQLGQKKRQKSNQLDGNGVLETPSAYAVG

SEQ ID NO: 41301 - protein, 380 aa, unknown
  TnpB Polypeptide
  misc_feature (343)..(343): Xaa can be any naturally occurring amino acid
MLLSYCFRIYPSKAVQAKLQEHLELCCWLYNRLLEELNKARAGGRRLNYKDTQALIVKLKREEKPELRKVYSKVLQMVNHQLWNNLIALSDLKKNGRRVGKLRFKGRGWYKTLNYNQSGFKLKDGKLILSKVGEIPIKLHRRIKGKVKGVVIKRERSGRWYAIFQVEDKPEPLPKTGRAVGIDVGIRHFLTDSDGRQVENPRYYEKTLKRIKILQRNLSRKQKGSKNLEKARVKLAMAYEKLVNQRDDFLHKLSRFYVSNYDLIVVEDLPIQNMARNHTLARSILDASWGKFLRMLLYKAERAGRAVLKVDPRGTSKEGDKNLDRDYRASLNILRRGLVGLGXPEVTPVERRPLLRIPASAVVAGQVFSMKQEAPCLSEG

SEQ ID NO: 41302 - protein, 352 aa, unknown
  TnpB Polypeptide
  misc_feature (244)..(327): Xaa can be any naturally occurring amino acid
LYNVASFYIRNAYSASIKSNEDRFPHEIQVLEELNGVVDELNVIRQKHHSTPIHIIDHEHRFVSMQHLDGFFKLRDQIDYRALPAQANQNVLHMLYRDWKSFFAALADYKAHPDKYEAIPHIPRYADKDGYKPLIFTNQICKLRKDKHGWYVKFPKAVLQAGWVRDRYDLGKMDLHEQKLKEVRLIPNGDTIKLEIVCEIEIMEPTITIHEATRVAGIDIGVDNLTAIAFTSGHRPVLIKGNEXXXXXXXXXXXXXXXXXXXXXXXXXXXXXXXXXXXXXXXXXXXXXXXXXXXXXXXXXXXXXXXXXXXXXXXXXXXXXXXXXXXXMRVGRSVSIWERRTIRHLCRYRFVR

SEQ ID NO: 41303 - protein, 208 aa, Methanocaldococcus sp.
LKKYWNRRKNRVEDFINKLTSQLSKLFPDAIFIFEDLDKFNMYDKNSNFNRNLDRTNWRKIAKKLEYKSVVLYVNPHYTSKTCPVCGSKMKSQEGQVVKCDKCGIFDRQFVRCYNIFKRGVELAKKLLGGVGVPVAGAEVDDLLSNEPRGELRLVKPNPNVEAKLPVRKSNRRFELQNPKDFVQIFDFPLMVYTVDLNGKYLKIYNCP

SEQ ID NO: 41304 - protein, 307 aa, Haloarcula sp.
MVVGKELRDRHNSPKSRLRLEIVGDPNWPDYEDQSRLELWYDETDNTFRASQPVTVSDDARDTPLADEKAALDIGANNLVACTTTTGEQYLYEGRELFQRFRETTREIARLQSKLEEGRYSSERIRRLYRKRTRRRDHAQEALCRDLLERLYAEGVDTVYIGGLTDVLETHWSVETNAKTHNFWAFKQFTERLACTAEEYGISVEVRSEAWTSQECPQCGSTGRTTRHQDTLTCQCGFEGHADLTASETFLKRQIKQAVRPMARPVRFEWDDHEWSELPRSHESPKEQRTDPSTVHRDGNIASGESA

SEQ ID NO: 41305 - protein, 465 aa, unknown
  TnpB Polypeptide
MQKVTRTVYSKNLNLGKYEELSSQAKMLGSLRKELWHRFGSIGGVGANHRKIRDEWVKSRNFAPLPAKAWKETVRDVLDDISLYEEAAKVKVRAAISRKFKDDDKRKELYRALKNGEWINNPYLCRKMRKHKRHGRTKVSNQIILENGVYRQFKDSNGQTWLKIPSFNRGKMVTIPLNSNLHLKGGLRLILDDGKVAVHYTIPQKKFRPAGDKVIGVDKGYTEAFADSEGRFYGTELGDVLTEGTEKRHGRGKARNKLHQIAKKKPHKARNIRKYNLGRKKLTRQYDHQKELIRGIAFQSAHAIVDHACEVRAEDLTKPFASQQKFKKFNRTMSGWTKGSLAEALNVVTKARGSCLRVVNAAYTSQVDSQTNRLEGRRVGDKFYHVSGDVSHADTNAARNIKCRADDTDISLYTPHRDVKKILLGRMTAIGGASCGINSDRPSLTLVARRERVSTESELLKRLIV

SEQ ID NO: 41306 - protein, 500 aa, Mycobacterium sp.
VVAVVLRRLGWLCFGIDGAPLYRAPVQRGGVVRRSYVFRLRPTARQHTALAACLEAHRELYNAALQERRDAWAHSKTRVCYGDQSAQLTEIREARPDQAVWSFSSQQATLRRLNKAFAGFFRRVKTAKPGVKAGYPRFKGKARFDSVEWPKDGDGARWLPEHKRVYLQGVGQVKVHVHRQVVGRVKTIQVKRCGRRWMLVLSCEDVATNPLPGTGRQGGIDVGIASFATTSDGEHVDNPRWGRRGGDRLAAAQQRLARAKRRSNNRECKRETVAARHRKIANQRKDFHHKQARALVARYDVLVVEDLKIANMVRRAKPVPDPDKPGQYLANGAAAKRGLSRSISDAGWGRFISVLRAKAEEAGRIWIEVDPGIRRMAAKSAGMQPPKTASPKRTSSAGDARIAPKQTRWPRATSCGLDWPFTRKPREKKPTASSRRRSHTTLRLSEAPRAAGVMPGRKAARSDTVAWPGVSIYDLSDPNRGSSSPTTLATGTPPTCWHYV

SEQ ID NO: 41307 - protein, 201 aa, Burkholderia sp.
MILVYRYRVKSLNGLLNKQSRAVNYVWNFCNDTQKHALKWGKKWPTGFDLNVLTTGSSKELGIHSGTVNATCEQYAKSRGQHRRPYLRYRGRKSLGWVPLKGRDLKREGDAFRFAGNTFRVFNSRPLPEGKIKDGTNFAQDARGNWFLNIVIEMPDVQARPIRSGVGIDLGLKDFATLSIGEKLPNDRFGRRAAEKLAKAQ

SEQ ID NO: 41308 - protein, 140 aa, Burkholderia sp.
VKLHAKVANARADFQHKLALDLVRRFDYIAVGNVSAVKLARTRMAKSVYDASWSSFRNKLRYKAIAHGATFEEVNESGSTQSCSSCGSKDSTTRPKGIAGLRIREWTCSDCGVEHDRDINAALNILRCGRASPGVGILFL

SEQ ID NO: 41309 - protein, 156 aa, unknown
  TnpB Polypeptide
LNVQCVTVPAIPLEPTGRTVGIDLGVTNMVATSDSVFEEGEHFGSKAQHGLARAQRSLATKQLESKRRRRQVEEVARLHRKIKNQRCNFAHQLSRQLVNEYDFIAYEDLKIAKMVSTPTARPDPEQSGAYFPNGARRKAGLNRSIHDAAWGSSSPF

SEQ ID NO: 41310 - protein, 156 aa, unknown; identical to SEQ ID NO: 41309
  TnpB Polypeptide

SEQ ID NO: 41311 - protein, 414 aa, unknown
  TnpB Polypeptide
MDLTRKVRLYPNKAMLTILDMLCDYRRFCWNQALDVWVSLVHQRQEYLPADLRLKVKQAIKDKSVTFTDDENALLEQYPAPTQYTVRKMLTKQKHDWQYQLSSRVLYLAVADLAQAWTYFFNNKENKALRAGKPTFRQKKNPKQGFKTDRSRIRNGKLLLDKPRQYQGDWCAISFKGYSLPDGPIKYCSITKVNNKYYASLVIDTRIEPLVQTGQNTAVDANVNHFDYTDGHYSINPKRLNSLYEQIAFYQKRLARKRHVNGKKASESKSYTVMRAKLQALYEKATAIQNDLLHKFTTYLYRTYDTIVIEDLDVRAMQMSKKAKNLHRSLFGQFRFQMEYKAIKLNKQLIIADRYYPSTQRCSQCEHVKKGDDKITLQGNAKHGTAHNEYVCYNCGYTVDRDQNAVNNLLALIK

SEQ ID NO: 41312 - protein, 440 aa, unknown
  TnpB Polypeptide
MKGKEGRVVFEAVKVALDPSPAQERLLLSHAGAARFAFNAGLAHVKAGIDAGVKPEWSFYSLRRWWNANKDTLAVNDDGVIWWAKNSKEAYSYGLEALAKGLSNWVKSRRGARKGRRVGFPKFKSKDRATPRFAYTTGFRLIEGDPKALRLPKVGRVHCMEDVTERVNGARVLRVTVSRRAGRWFAALAVERDDKPVAKAPKGGAVGVDLGLKTLATLSDGTVIENPRYLRKSERRLKMAQKALSRKVKGSRRRAKARAKVARINARVANQRQDAMHKATTWLASTFSEICIEDLNTAGMVKNHHLAKAVMDASFGEFRRQLEYKTARSGAALHVVDRWYPSSKTCSRCGRVKAKLSLSERVYRCDGCGLAMDRDLNAAINIRVAGSAPETQNAHGGTVRRSNQHGCATQVPAKCEPSRRENAVRLGADERKHVLQAKSN

SEQ ID NO: 41313 - protein, 399 aa, Nonomuraea sp.
VNVVGLAIELGQLGLEVGADVPHDPLHAFQVRPGEYRIPKLLHENQVSVQDGNTVPAGSVVSMFGHKPWVGSWCAAQVQLPPLSDPGQRAALASAFGCARVVFNDGLRARQDAWEQGMPYICDGQLSKRVITEAKKTPERSWLAEVSAVVLQQALADLNVAYRNFFASLTVKRKGPKLAPPRFRSRRDNRQAIRFTKNARFCVTSGGKLRLPKIGDVPVRWSRDLPAEPSSVTVVKDAAGRYFASFVIETNQAPLAESAAEVGIDLGLSYFAVTSDGRKVNNPRFLRRAERRLRKAQQELSRKEKGSANRHKAKAKVAKAHARVADARRDWAHKLSTQIIRDNQAEYVENLAVSGLGRTRLAKSLAAGRADRLNACRAQVRPRSALAQREEAGSLRGAG

SEQ ID NO: 41314 - protein, 434 aa, Nostoc sp.
VINLYSCQQILIHPNQELKAILEFICSESNKLANCTIYYARQIWFKAKRYITKFELHHQMKSNRHFQTLYSQASQQLCSSVYESFASFKQLNTLYKRGELTDKPSPPKYRKDGLNLVTYPKQPLRLKDGQIRIPLSSLVKIWFKLDYFTLPMPSNLRFEDIRELRILPRNRCFFVEFVYKTNPVASDVDKSRVLGIDHGLNNWLTCVSNLGKSFIIDGRHFKSLNRWYNKLLATIRKNKPQGFWSNKLAAITEKRNRQVRDAINKAARIVINHCIKNRIGRVVFGWGQGIKQQTNLGKKRNQQFVQIPTARLKGRIKQLCQQYGIEFIETEEANTSAASFVDGDTLPKHGEKPDGWKSSGRRVKRGLFRTSQNWYINADCNGAANIIRKVSTTLSLNLSGVSRGSLTTPTRIYIWVTAKKKRGNEVLARCIVSA

SEQ ID NO: 41315 - protein, 437 aa, unknown
  TnpB Polypeptide
  misc_feature (359)..(359): Xaa can be any naturally occurring amino acid
  misc_feature (373)..(373): Xaa can be any naturally occurring amino acid
  misc_feature (383)..(383): Xaa can be any naturally occurring amino acid
VWNRSFNAIVDNCGRSWFDLYDRSTSPALSMILTYRFKLAPTKAQRAALGRICELQRQLYNAALQERCEAWKKNGISISKIDQNKSLTQIRSFDEAYASVPVAMSRWSIARVDDAFKGFFSRVRRGDKPGFPRFKARSRWRSFGFAEWDGVRLKGGKILFRGLHGGLKVRMHREIPEGHSIKSCTFTNHGRHWFIAMQVDVPVAEAHAHPGTEIGLDVGIEHLVTTSDGLHITNHRPRSRRERDLRIAQRARARCRRGSKRRAKVKDRLARLQRRISNARSTHLHKVSAALARDYEFIAGEKLQVRNMTGSARGTADDPGTNVRQKAGLNRALLDAAPATLISYIFYKAERAGGTVVQXNPAYSSQDCSSCDXRVPKALSERXHRCSCGLVLHRDHNAAINILKRALEAHGRARPPGDANVGHQPVRCLGNMVAAAA

SEQ ID NO: 41316 - protein, 351 aa, Paenibacillus sp.
MQSVTIKIRFFPSNSIELKLLSREYIRAINSLTEQAEKEGSFPKLTTKDVEAKLPSAVLNQAIRDAKSVFKKTKKEMKRPILKKPTYYINNQNYSIGHSSIAFPIIVDNKVKKTIFPALLTERDKKFLQNAKCGLMRIVEKSGKWFAQVSLEIPTETTTGEQAIGIDLGLKVPAVAVTSEGKTRFFGNGRENKYMKRKFRSERKGLGKKKKLRAIRKLDHKEQRWMKDKDHKVSRQIVNFAMENQVSVIRLEKLTNIRKTTRTSRKNEKNLHTWSFNRLAQFIEYKANMAGIKVEYVNPAYTSQKCPSCSTLNKAIDRKYSCLCGFHTHRDKVGAMNIIHAPVIGGNSQSA

SEQ ID NO: 41317 - protein, 367 aa, Paenibacillus sp.
MLVNKAYQFRLYPSPAQEVLIAKTMGCCRFVFNHFLAKWNDSFQATGKGLSYDSCSSELPNLKKELPWLKEVDSIAIQSSVKNLADAFTRFFKRQNDAPCFKSKKNKVQAYTTKHTSGNIAVDGNQMKLPKLGRVRFAKSREVEGRIQSATIRRNPSGTYFVSLVVETEVHALPKTNQEVGIDLGLKDFAILSNGEVFANPKFLRKMEQKLIREERILSRRVKGSSNWNQQRIQVARIHERIVNARTDYLHKISTHIVKNHDLIAIEDLQVSNLMKNHKLAKAISEVSWYHFRTLLEYKAKWYGRRVVTVGKTFASSQLCSCCGTKNKEVKDLKLRQWTCTNCGTHHDRDFNASLNILSEGKRLHTV

SEQ ID NO: 41318 - protein, 255 aa, Paenibacillus sp.
NSLTTNNQNGTIAIEDGTIKIPKLKTRIRIKVHRPFTGRIKSCTISKTPSGTYFASVLVETERTPLPKADKKIGVDLGLKNFAMTSDGEVIANPKHLRTSEQRLAKLQKNLSRKKKGSHNRNKARLKVAKLHEKITNQRKDFLHKTSTQMIRDNQVIVLEDLRVKNMMQNHKLAKAISEVSWSMFRAMLEYKAKWYGRTLMIAPNNLASSQLCSCCGYKNAEVKNLAVREWTCPECGAQHDRDVNAAKNLLKLAI

SEQ ID NO: 41319 - protein, 367 aa, Paenibacillus sp.
MVVNKAYKFRIYPTPEQATLINKTMGCARFVFNRFLALWSDTYNETGKGLSYGACSAELTKLKQEIDWLKEPDKFSLQNALRNLSDAYHRFFKKQNDAPKFKSKKNPVQSYQTNYTNGNIEMVGNQIKLPKLGLVKFAKSREVEGRILNATIRRNPSGKYFVSVLAEANIHELPKTGKEVGIDVGLKDFAILSSGIVVGNPKFFRRLEEKLARAQRKLSRRMKGSSNWNKQRIKVARIHEKITNARTDYLQKNSTQLVKNHDIIAIEDLQVAHMVKNPKLAKAITDVSWSMFRSMLEYKAKWYGRKVVAVGKTFASSQLCSCCGYKHKEVKDLKLREWDCPECGAHHDRDFNASLNILAEGKRLLGV

SEQ ID NO: 41320 - protein, 464 aa, unknown
  TnpB Polypeptide
MPRHNEPGSPALVHRTARAGLRLTRGQRRRLLGLLMSAGDVWACVLEVNAWRKARQDTPLVSYQALCRELAASGPACFGELDTTGARSVLRRYSDAWFAAAARRKKGDGSARFPRRRRRMMPARWYHDRLAVDGRRLRIPVARGCPPLQVRLDRDLPYPPGRIRSVTLLYEAGRLWVDVTAEVPVTVYPLGAEPDPGRVAGVDLGIIHPYAVAGRDGQALLVSGRAIRAEHHQHLKDTKARQRAVTRRAPKPGQRGSRRWRHYRRRQQIVEARHQRRVRQAQHEAARTVIGWAADRRVGTLAVGDPRGVLSIDAGRRHNQRTRDWRVGHLIATLRDKAELAAITLVLTDERGTSSTCPACRARVPKPRGRVFCCPHCGLAGHRDLIAAANIAGRLPGGITPAVTAADVTHRRAGNHLPGVSAARRDPRRRPHHGDIRGSPGRHLPAPTGVTAGRGVARLTARTS

SEQ ID NO: 41321 - protein, 385 aa, Halomonas sp.
MLSIMTKRAYKFRFYPTPEQVTLLTRTFGCVRFVYNAVLRYRTDAYKQHQVNIGYSAANAKLTALKKDPAAVFLNEVSCVPLQQSLRHQQTAFKHFFEGRTRYPSFKSKRHRQSAEFTRSGFKYRNGQLFLAKSKEPLNIRWSRELPSVPSTVTVSKDAAGRYFVSCLCEFDTQALPIIPKMIGIDLGLKDLFVTSDGHRTGNPRHTAKYAAKLALAQRRLSKKRLGSANRAKARQKVARLHAKIADCRKDGLHKLSRRLINENQVICIESLQVKNMVRNRTLAKAISDAGWGEFTRQLAYKAAWTDRQVIAIDQWYPSTKRCSCCGHVMETMPLATRVWTCPECATVLDRDVNAAVNIKAVGLTVLALGENVSGMERVSMSCSR

SEQ ID NO: 41322 - protein, 297 aa, unknown
  TnpB Polypeptide
LTERSKRSSDASKAARKRLRERQAIRAFVGTVGLTAWSSRTATGPNSPPMVAPISKTSARSRSRGTALKMHRPVEGSVKTVTFCRQAGRWYVVFVCDVPDVDAEPSANPAVGLDLGLKSFFVTSDGEEVKPPKFYRQAQKKLRRVQRAVSRKRKGGRNRRKAVQHLARVHQHVGNQPKDWHHKTALSLVRRYGLVAHEDLNVQGIARTRLAKSTHDAGWSQFLGILTRKAESAAVTMVAVNPRNTTQTCSNCGCLPAVSLHLSDRVYHCAFCGFQADRDFKAAKNILSRTYCAVVRL

SEQ ID NO: 41323 - protein, 276 aa, unknown
  TnpB Polypeptide
MPRARTPRLWLTRKYSYRVRDGYVEILGGYKLKIIGWDKRYDAYPSGDAKLILKDGKFILCISKHVPRPVKYVARGVLAIDINEKHIVFGNSHFEYRFETAVERALHYKQLAENLQKKYSLTRYNAWLRRRGVRDRIRYFHRRARNIVEDWAKKVSHKIASLAKQHLYAVAREDLTNLVDSLKKLPKEHRVSLLILSYRKLEQWIDWQCEKNGAPLIVVEPRGTSTTCPMCSSKLIENGYRRLRCLKCRFEADRDIVAVLNIERRALVQMWGALIP

SEQ ID NO: 41324 - protein, 413 aa, unknown
  TnpB Polypeptide
VFEVKRTNIFVLEDCSALWELADGCVRLYNEINFERRHAYIYYKRFKWYPKRLYEKYAPLIGSATAQQIINKNNEAWRSFLALKRLEKKGKLPKHITKISMPRYWKKNGKRKLRMIIRNDCYKIDDKYIYLPRGLKLKYKGMLKWKGKQGRLEIIYDEVDEVWRGFMTVEVEKPSLKGGNKPLYIDLGVINLATVWFEGLKQPIAFSGRKVLADWWYWTRKIAKEQSRLARVNRAKTSRRLRRLYRIRQRRFRHAVNAMIKTIVEDAYQLGSSKIVLGKLKNMRSKSRYNSKANVMINNFWSFDYMVRRLKEKAEEYGIEVEEKSEYKTSNKCLLCGSEDVIRRGRLFKCLSCGLEANRDAVGVINIGRLHGGGVNGVVAHPLLLRWNGMKWEPRRAMNNQSMNALEARISRL

SEQ ID NO: 41325 - protein, 401 aa, unknown
  TnpB Polypeptide
MSDTKVFLKVYEYQMYPTKEQKLLLDKEFYFYKRYRKSLYKYMKQAEVEKGIFTKKEALREIRRYQKRIANINFDYSKYCAKNHFDFACDNYARKYEPIFSRKRNFKRNDATRTHETIKFTPSFIKIEDSFFHIHDVRIKIRPKVIVSPKFSCCYVKKFNGKYFLTCIAFHRPYVYQNKNLVCGIDLGLKHFITLSDNEGKSKIYDVDYSKIHVNLIKAKHYCRIKDNIMLKNPNYKKSKNFHKVATLASVRVAKAQEIRTSQYNKIADEICRKYDYICLETLDLETMYANPNLKTKLAQVALHSFYQIIKNKAKKYNKELIFADRYFPSSQICSNCGAIHKEMDQINTQSETKLICDCGATIDRDLNASRNLLKYALDRLKIEAKPILAQNSSVETFLNV

SEQ ID NO: 41326 - protein, 411 aa, unknown
  TnpB Polypeptide
MSTRQRLYPTPDETTMLARHCGDARYVWNLGLEQRALYRPSRAQKVTANSQMRDLAEVRQSFSWLAAGSSSIQQQALRDLDQAFKNWWKNPGHFGRPTWRRAGEHEGFRVVEVTTRRLNRKWAQVHIPKLGWVRFRLTRPWHDVDSCRSARVTLNRAGQWHVTFASPQSTVIRVSTNGAVGLDLGVATTVGTSDGELLKIPALLSPGEVQRKRRLERQRARQVVGSKRRGGTNHQIAKLCEREVARRKDWIEKITTDLVRNYDLIAIEDLKIKNMVRSAKGTIEVPGVHVRAKAGLHRAIYAQGWGTLRTRLEQKATAATSPVEVIVVPARNTSRQCEKCGSVAKENRESQAVFRCRTCGHHAHADVNAAKNILAAGLAVSGRGGTPRSGEVDKTSSSGPVKRQPLVEVAA

SEQ ID NO: 41327 - protein, 415 aa, unknown
  TnpB Polypeptide
VSEVVRTVVVPSVRLTERKLAVFRELEELYRQVLVELVDYGFRNNINPFTRLKRDKYRELRRRFPQLPSHYIHTACQDASTRIKSFNKLKKKGLAKSEKPEVSRASIWLDDHLWRRVGYTAILIYTHRGWIPVELVPHKLYWRYVNNGWALRTQPKVKIDCKHKRLLVHFVFVKTTSTSEDGAKRVISVDVNENNIAVKVLDKVYILETGIKRITVGYARYREVVQGVKGNGYVGRAVHGRECKRKKDIRLKIANIVANTAKSINAVVVLEELSEQCPRNMIKDVRDSALRHRIYQAGFRGMVKAIEEKCLERGAPVAKVSPRNTSSKCPFCESKLMRGSAPRQLRCPRCGFRAGRDVIAVLNLEKKYLTLKGCVPFTPMPSDPALEVVVLPMKEWARRKSLDATNKNELMRMSI

SEQ ID NO: 41328 - protein, 380 aa, unknown
  TnpB Polypeptide
MFRAIKVKLYPNKQQEQVINKILGCYRFVYNHMLALKQQEYNDNKTNLSLCDLSKYFFSTLRKGEKYSWLKEQNTKVMAQSIRQMMSAYDRFFKLHTGFPKFKSKKDRQSALFPIGAISKKNTFETKHISLITSLKDIKFRCSDLYFKRLQTYKDSIRSATMSKTKSGNYFLSILIDIPQDEVVKFKQTGESVGIDLGVKDFVITSDGEVFENKHFFKKEEQKLKKLQRQLSRKVKGSNNRNKTRIRIAKLFERITNKKDAYIHYVINELLTYFDTIFMEDLNVKGMLKNHHLAKAIQEVGFYKFKQLLVSKALVNDKKVVLIDRFYPSSKICSQCGYKKQDLKLSDRFWVCPDCGECHDRDFNAARNILLEGQRMLEAL

SEQ ID NO: 41329 - protein, 370 aa, unknown
  TnpB Polypeptide
MKQLKTYKYKLYNRDATKHLDRIIDLSSKIYNHCIAVHRRYYRLYKKQLNKYQLQKHITKLKKQHKYWNEVPSQAIQDITDRIDRAYKLFYSNLKNKKKTSVPHFQKRQNYCSFTTKQAGYKLLEGNKIKISDKVYSYWKSREIQGDIKTLTVKRTGRGYYIYLVCEEEVSYLERVTSGNSVGFDFGMKNFLTASDGNNVSMPLFLKKNLNRLARLSRKFSKSKGKRGSKRTLLKLHEKVANQRNDMHWKLAHKLTDLYDVLCFETLELQSMLKSCQKKIMDFGFAKFISILEYVAKQKGKAIVFVDKWFPSSKLCSECGWKNESLTLKDREWVCQSCGCVHDRDYNASINILREGTSSLSACTNGAVCI

SEQ ID NO: 41330 - protein, 401 aa, unknown
  TnpB Polypeptide
MSYRYRLLPTPAQRAVLRDHCGHARYVWNLAVEQHQHWHPGRASAPGYLEQCRQLTAARAEHPWLAAGSHMVQQQALRDFARARAVFLDPGNPARRPSWRKAGRDEGFRIVGRRGRQWDVRRLSRKTGQVWVPKAGWVRFRWSRPVPAGMKSYRVTLDRAGRWHVAFAAIPEPVPAPGTGEVIGIDRGVAVSAALSTGEMLRVPGLTVRERTRLRRLERKLGRAKRGSNRRARAKLAVARLRARETDRRKDWAEKTSTRVARGFDVIRVEDLKIGTMTRSAKGTRENPGWNVTAKAGLNAGILRSGWGLLVRRLEQKAPGRVERIRPAFTSQRCSACGHVDGKSRESQARFACTACGYACHADVNAARNIAAGHAVTARGGVRDAGPVNREPQPLASLTRT

SEQ ID NO: 41331 - protein, 227 aa, Cyanobacteria sp.
  misc_feature (8)..(37): Xaa can be any naturally occurring amino acid
  misc_feature (171)..(226): Xaa can be any naturally occurring amino acid
LVQQKSIXXXXXXXXXXXXXXXXXXXXXXXXXXXXXXQMRDAVNKAARLVINHCLENNIGTVVFGWNQGQKQESNMGSKNNQKWVQVPTARLKERISQLCQQYGIRFVETEESYTSKASFVDGDYLPKYGEKPDSWKPSGRRVKRGLYRTALNWYLNADCNGAGNILRKVXXXXXXXXXXXXXXXXXXXXXXXXXXXXXXXXXXXXXXXXXXXXXXXXXXXXXXXXF

SEQ ID NO: 41332 - protein, 364 aa, unknown
  TnpB Polypeptide
MRVIEAKLKGTQEQYQALDEAIRTAQFVRNKCLRYWMDNRGVGRNDLYAYCKILAQEFDFARKLNSMARQASAERAWASISRFYANCKNKAAKKGYPKFKKHCRSLEYKVSGWKLSGDGMSIPFTDGNQAGTFALYCNGEARRLILGSKINRVRVIRRADGYYAQFCLDVERKEQGQYTGNIIGIDLGLRHFYTDQNGNTVDCPKFLRRSERRLKQHQRRLSRKFKKGVEQQSKNYHKQRKRLGKVHLKVQRQRRDWAIKLARCVVASNDVVVYEDLQVKSLVKNHHLAKAIHDASWSQFTRWLDYYGKVWGKVVVAVPPQYTTQDCSRCGYRVTKTLSTRTHSCPRCKLELDRDQNAALNILF

SEQ ID NO: 41333 - protein, 398 aa, unknown
  TnpB Polypeptide
MILAHRIRLDPTSAQEAYFARACGVARFAYNWGLAEWRRQYDSGGKPSEIALRRLLNAIKNEQFPWMRQVTKNAPQQAIKNLGRAYINFFRELTKCRRGEIPRKVRAPRFKKKGRHESFRADNGPDKRHPHNVITAGKWVKLPLIGWLAMREEVRFAGRILSVTISRRADRWYASFCIEVEYVPDLRTDDSVVGVDLGITALVTLSDQTPKVSGVKALRRYLDKVRRLSRIISRMRRGSRNCGKAKTKLARLHTRIANIRSDALHKVTTYLTRYRTIAIEDLNVAGMLKNRQLSRAVGDVGFFEFRRQLEYKAVMAGSTVIVASRWFASSKLCSSCGTKNETLTLSERTWTCLSCGTSHDRDRNAAVNLARYAESSPASACGAEGSGDGHQTVAKPAA

SEQ ID NO: 41334 - protein, 309 aa, Lactobacillus sp.
  misc_feature (2)..(5): Xaa can be any naturally occurring amino acid
LXXXXQLAISDLGKAWQNFFNKALPDWGMPHFKSKKEPRQGFKTDRAKVVNGKLRLDKPRGVKEWADIKMVGAKSLEGDLKVVSVFHENNKYWATLPFGVNVTKKPATNFKTAVDVNVGHMNYTEGKVNTYPKRLRKLYERIKHYQRQLARKRIVNGKEASQSNNYLVTKAKLQRDYRKATNIQHDLIQKFTTKLINENDTVVIEDLAVKNMQMSHVASKGLQRSMFGYFRQVLTYKCEWYGRKLILADRIYPSTQRCSDCGHIKTKEDKITLAGNQKHHTKHNEYICYECGAVMDRDENAVQNLLALA

SEQ ID NO: 41335 - protein, 523 aa, Bacillus sp.
MAKTTSPSFVLSLELAENPLMLCLASDELEICRVMYNTVLGTYLKREAQMKREKHYKKLIRHYKGVSKKLKSDKENKFLQDEKKKIQLELKKRRENVQLTEYASHEWVKPIRSHFGNKVNSAVAQKIASRAWSAFQKKVFGQSKKVRFIRKGEMDSFEGKTNTTGWRYVDRHIVYKELSTPLLIKEKDTYVSEVVQNIEKKMSFSYKVHTNGETKTLTDLYRVKYVRIVKKEIRGRIRYFANLVIAGYPPSKKRKLGKGKVGLDIGTSTLAVVSLTKVALVNLAEQVKQISNEILRIQRKMDRSKRATNPNHYHSDGTIKKGHQPWIFSNRYQKLRSQLKEMHRKQAAIRKLSHRSLANHLLMLGNTFYTETMNYKALQKRKKETEVSERTGQYKRKKRFGKTLGHRAPAMFLSILEKKVKQYGGTFIKINTQTFKASQYCHIRNDYMKKPLSERWHIIDNTTKIQRDLYSAFLLMNSNSEGTKANQKRCHETFPLFKNLHDQEIQQILKQKKGILNSGIIIH

SEQ ID NO: 41336 - protein, 399 aa, Streptomyces sp.
MEVTHVKRAFKYRFYPTDAQAAELSRTFGCVRKVYNLALAARTEAWTLRQERVNYNVTSAMLTAWKKTEELAYLNDVSSVPLQQALRHLQTAFTNFFAKRARYPRFKSRKRSRKSAEYTTSAFRFRDGKLTLAKMAEPLDIVWSRPLPEGAAPSTVTVSQDAAGRWYVSLLCEDPAVKPLTATDTAVGVDAGLGHLLTLSTGGKITNPRHERRDRARLAKAQRELSRKAKGDGANRASARRKVARIHARIADRRRDNLHKLTTRLVRENQTIVIEDLTVRNLLKNGHLARAISDAAWSEFRSMLEYKAQWYGREVIAVDRWFPSSKLCSNCGTLQHKMPLHIRTWTCECGITHDRDVNAAQNLKAAGLAVSACGAGVRPQRSTPGGQSATKQEPLRREP

SEQ ID NO: 41337 - protein, 702 aa, Streptomyces sp.
MGVRNSYESLVVDVIVGLSRGEAREGEGGVRRRVVVGEGEVQQVAAACARALRGVDVVSGEQLGEAALVERAGWLTALVGSLAAGVVQEHWNGPDLARLASGVDLVGASLPSQGWMALRRLGWSVTIPEGVYVPDRVVRIAQEQAGRVLRSAWWRAEITAALLATWPADPARRTVADWEALGTALPEGPVVATGVLLARTRQIAAFQARHRRLPAGLTECEQAPGADGQVVLAAVDKQLATLERCPQDPFRNAVLTVRLPARPAPACRADWRPVRIRFRLPPHVPATAVLCPPTLRVRQGRLLLDVPYALAVPKPERAGHRTAVAFDWGLNTLLTGGTLHLTTERQPRVVTDGHPVYFRAAGVLAKADRLRILGEYIGARIDRLRVLITSRQERGMRPNPWLVGKLAVLQTERDCVARRRARLNVALAKAAAGFMTDHAIAAGARVIYLEDLRDMQARGKGRTLNTRLSQTVRGAIVTQLRHQAAVHGIAVVIVPPRGTSKYCPRCLTAFRHHKAPNDPRAGWAWATCPNDACGYSTGRDNAAWQRIGARGLTHQHKTSLDRTSKTFVIRRVVEALDRASRVQGQTRDRTKSGPTAKRPVPGKRRRVPAPPNNRTPTRARPGGKRPAGRTSTHPTHRGQRCPRQQGPTTIGTPARPHRPDGARLGAGFHRHAHTTPTRGQPWPSHPPARSRTPGIAQETQAD

SEQ ID NO: 41338 - protein, 395 aa, unknown
  TnpB Polypeptide
MSRYRLRPSLAQEAALAGHCAHARYVWNLCVEQESHWRPGRGSMPGFAGRCRQLSEARANNAWLAEDSVIVQQQAIRDHDQAMRNHFAGTHRPPSWRKAGRDEGFRIVHVKPSDVRRLSRKIGEVRIPKADWVRFRWSRQVPQDVKSFRVTMDRAGRWHVAFAAVPDPIPGPGNGEVVGVDRGVAISAALSTGELLCCPGLPRRQQQRLRRLKRRLARAKRGSERRKQVKRAIARLKGRDADIRKDWCEKTSTNLACRFDLIRVEDLKIGSMTRSAKGTAAQPGRNVRQKAGLNREILRSGWGLLVRRLHEKAPGRVEKVRAAYTSQRCSACGHIAAGSRESQALFRCAACGNTLNADVNAARNIAAGHAVTARGGDGDARPVNREPQPVLLPTA

SEQ ID NO: 41339 - protein, 415 aa, unknown
  TnpB Polypeptide
MKKMKDYNYHIGLKLRIYPSDKQKKIIKMNGGASRYIYNKLVADNNEMYGLKKSSSFSIADKERLEFLQSIHSSKSNMLVMIPFLTQKEIDSDMICNAIQNYQSAWNQFKKVKGTSVPTFHKKDNTYSYKTSNHYGKIRDNGLKDGSIYFIDNTHISLPKIGKIRFKGSKKLLNKILNFDNEVRLGSVSIEMDNLGLCYISISLASDYLFHDEYVKTNSSIGIDLNLSNFLADSDGNIIASPKFLKKAEAKLKKEQRKLSRRYESAKRDGRKYYGSCNYQDQRLKVAKIHKHVSNQRKDFYNVLANNLVKNHDYIFAEDLKIRNMIKNHKLAKAISDSGWRNFLTTLSWIAQKRNKNLILVNPKNTTQMCSTCGTISDKKIVLGQEEWTCPHCGTYHIRDVNAAINIKNKGLALV

SEQ ID NO: 41340 - protein, 411 aa, Hydrocoleum sp.
MRLVEKHIIKESHQHWKEIDKLCFLSKNLYNYANYLVRQSWIFNQTYLNCNQIYNQVKNSPDYRALPSKVSQQILRILDKNWQSFFAASQAHKENPNKFIGRPKLPKYKDKIKGRNLLVYTIQAISKLSLTQGKIKLSKTEIEFPTQAENIACVRVIPKLKQYVIEVVYERPSKSKINNPKAVAAIDIGVDNLAALTSNQKGFTPILVNGRVLKSINQFYNKTRAKLQSKLQEELSTSNQIQRLTAKRNNQVENYLHVCSRWIINHLQTWGIGQLIIGKNPLWKQWVNNTKTNNQSFVNIPHARFVEMLKYKGEMAGIKVIVSEESYTSRASFLSLDYIPRYGEENGEKYEFSGYRESRGMYKQKDSKIRINADVNGSYNIMRKVIPTIFDEGIEGVVVRPVRITPNQAKN

SEQ ID NO: 41341 - protein, 365 aa, unknown
  TnpB Polypeptide
MRRAVLRRACKVTLDFATAKKRHEIARLLEAYRGAVNFYIRTLWRDGGKLDGETLNRLPKEHTRLQAFHKDQALKQALTIVSSTKKAAAVTDIAASRPVFKGAAILCHGVDIEFGRGAFDLVVRLSTLRKGERITIPTKRTAVFNKWLAVAGARIVQGCAISENALIVWIEVPEGTLREDGDILGVDVGIAKLLATSEGEILGDDFRNLRDRVRRRRPGSKAKRRARIQRDHFINRIVKQLRWDSLQAIGIEDLIGLKRGKQKGRGKSFRKAAAPWTYRRVRQRIECLAQENRVRLVAVDPRGTSRTCPECGTEDRRNRQGENFRCIHCDHSSDADIVGARNVLARTMAELGSVQSPRRKRTANG

SEQ ID NO: 41342 - protein, 365 aa, Streptomyces sp.
VRWGTNVPGYGLDGLSVRPSHAASVRVSGVSGRRSAHRVGEGVRVCPGSVLRLPQGHPRGTESRGASFQVAQGCSAVDPVHRQRALEHQRRRPPVPAEDRRGEVKWSRTLPSTPSSVTVIRDAAGRYFASFVVGTDPAADRARMPATDRTVGVDLGLTHFAVLSDGTKIDSPRFLRRAEKKLKKTQRELSRKQKGSKNRDKARLKVARAHAEIGDARREFHHELSTKLISENQGIAVEDLAVAGLARTRLAKSVHDAGWSSFIGMLKYKAQRYGRTLVTIGRFEPTSQTCSTCGVKDGPKPLNVREWTCAACGTVHNRDHNAALNVKQAAGLAASACGAPVRPGAIPAQRDEAGSHGFPTDARAA

SEQ ID NO: 41343 - protein, 300 aa, Streptomyces sp.
VIVKLVVQVRLVPTPVQAAVLEATLRACNEAATWASKVAFEKGVKRNFVLREHTYTEIKARWNLGAQAAQHVIKKVCDAYATLQANAGAGNLGRPGSKRYRGAVEKPVVFRPQGAQPYDDRMLSWQTDRRRVSIWTASGRVKDVAFTASPEQLATLALYRRGESDLVCRDGRWFLNATCEVPEAPPNTEPVDFLGIDLGIANIATTSDGEIMAGRELNRIRVRERKLRSKLQRKNTPSARRRLRKRRRKEARRAKDINHKIAKHVVAEAERTGRGIALEDLTGIRGRVRLRKPWGYLPRL

SEQ ID NO: 41344 - protein, 655 aa, Streptomyces sp.
VSRKLPVGEGETSRTACARGLLRAAVDEKTGELMSASLLAERVGWAVDLVSGMTSELIAERWNTTDVDILASGEDVGGRKLPSNAWMALRRLGWTVTAPGGVKVHDRIVRMAQEQAGRTLRCAKWRVDLTFGVLGAWPADPARRTAQEWDAVREAVPGGRHLPSSVIKSRTRQIAAFARKHGRMPADVFQLEAAPRVARMLLLSACDGQQATIERHESDPGRALLRLQLPTRSDPCSHRGWTWIACPVALPPTIPKGAVLHLPTLRIHQGTVRADLAYTHAVPQTRRTGHTVALGVDWGLNTLLSAGTARLHADKTITSPGSGGMFRTAGVLAKQHRLRRLSEHLHAKADHYQRLIGDDTNHPLTARTLALTDEIRRVSARRSNLNNALAQAAARWTVDQAIAAEASVIYVEDLRSMEARGMGRTMNTRLSQQVRGRIVDRMRHLAVEAGIAVVTVPARNTSRHCPQCLVTLRYRKAPDQPTTPGWKWALCPSCGYQGDRDTGAWKRIAARGLTHQAKTVADRAGGVMAIRSVIDSLEAKAVITPTTSTGRDRSKTGPTRPQTARPTPRRRRTPSPTRPQGPAGKRPEGHAHTDRTRLPRAAHRHQDVTTTSTPTTGHRPRGAALGAGFHLHAHASPPRWAEPPPDPTVRIGLLS

SEQ ID NO: 41345 - protein, 457 aa, Lentzea sp.
VSSVIQAFRFALDPAPEQVAALQSHCGGQRFAYNWGLALVKAVLGQRKAEASYGIPDSELTPSVQWSAYGLRKLWNDAKDEIAPWWGENSKEAYASGLANLATALGNWNGSKNGARRGPRMRFPRFKGKRRALSCRFTTGAFGLVNGDRRHVKLPRIGAVRTHESTRKLARHVERGTARIRSVTVTHQSGRWFCSFSVEIRRADPPPTRPASVVGVDLGIKALAVLSTGEVIANPRHFDGMRRELRRLQRQAARRIGADRRVQRQPSRRWRRTLARIAKLHTAVANARRDGLHKLTRVLAATHGTIVVENLHIAGMVKNRRLARHVADIGMGELLRQTKYKAAWTGGTVHIADRWYPSSKTCSACGSVKAKLRLSERTFHCDKCPLVLDRDLNAARNLAQLVDEATGGTSSPSCGATVNEPDGNPCQTRHVRAAGIATGRPDPAGPGQRRHRKVTAT

SEQ ID NO: 41346 - protein, 375 aa, Thaumarchaeota sp.
MIEFYRSLKGIDLHSSYKKACITRACAILNSRKKGKMRGFKIRGLRPLKPMICITSGFFVTMKGRLFVPLQRGSYFDLQLNHHVQERLTGRKVRSLTISRNVLSFCYSDEVKPVPVKSVLGLDRNEKNLTFGNVEGVIQIDLSKTVRIRSTTKEILGSFKRSDVRMRRKLARKYWTRSNNRTDRLLHAATNLVVGCASASCASLAIEDLTNINRLYRKGNGQNRDFRFRLNSWPHYKSKRMLAYKAAWKGVALIQLTKSETNGSSSVHSACGEKLRSPAMGDAVHGRELWCQSCKVWIDRDVNVAIVLSQRGLARFASSLPKPKSRSHEPLEAEEKGLASEAVMGNGTKTPILRVDASKLAHGPINGRPFNRWKS

SEQ ID NO: 41347 - protein, 421 aa, Halobacteriaceae sp.
MAATTTKTLEATLAPPTAHKERKLCDLLDTYREGLHEAFEAGCDTMSATSDVVTPYDLPYQAKAALCNYVPQLHDTYDAQELDDDHPIRLTNQAAEFDHSAARDYEFTWWAPQPGRGTNFWIPLRINPAQTELWHDLLDGDASAGQIRLQRHRTSWTLHVTVEFPIEQPDYEPTDDDVTPVGFDIGEAHLLAGCACEQATPTDPLLINGGRARHLRKEMFTTLKRLQEREAAQWRIDERFNHYQNALTDIIEKASRRAVEYACQFDKPVLVLEDLSYIREDLDYGEWMNRRLHAWAFARLQQRIEDKAREVGLPVTYVRPEYTSQICHECSHIGYRNGDEFRCTNDECWVSEYHADINAAVNIADRHDPWGESLPLKSAGDDIPRDGSACDSTTTHRESSERPSQMTLTAYEESKPSASDD

SEQ ID NO: 41348 - protein, 379 aa, unknown
  TnpB Polypeptide
MYKEVAYMHTVVKTYKFKLYKNKKNKHLDDSIDIAASIWNYCIAMHRHYYKAFGKHLSANKLMKHITKVKKTLHPEWKALGSQAIQDVVQRVDRSYKAFFDHMKQKRHGRKSPPSFKKRSRYSSFTLKQAGYAFHNGNKVTIMGHEYKYCKSRPIEGTIKTLTVKRNALGEFYLIIVTKQECNDIYPRAGKAVGMDFGLKHFLNLDDSSVIDSPQWYKASLKELQVAHRAVSRCQKGSQNRRRAIRHLERVYQRISNRRRDWFFKLANQLVGEYAIICIEDLNLDGMKRLWGRKASDLAFAEFVSILEWVASNAGSTVVKIDRWVPSSKACHVCGTVNPNLTLKQRHWTCDCCHAILDRDTNAAINIKKLGLAQLGYSV

SEQ ID NO: 41349 - protein, 515 aa, unknown
  TnpB Polypeptide
MAKGKNETSPSFVLTLPLKVDQPSRERLDADFYSFWRIYNGLVSISTKRWRQLRKTRQYKALSLAISEAKKDSIEQKALYAQRNQILKEAGFSRTGFDKMVKPLAKHFGVNSAIAQTVAERVWKAWNDFLFGKGKEVHYRRFDMFYSFRGKSNATGIMCREQTDGFVLQYKNCVIPIVLRNANTNTGWYQREALKNRIKYCAILRQWVKHKWKNYVQVILEGYPPIKVDNNGEMKHPIGDGRVGLDIGTQTLAISAKKCCDLKVLAPSALAQSKGLVNEIAKIQRAMDRSRRAMNPKYFNEDGTIKKLHSKHGHKQIRKWVYSQNYCKLRSRYRDLNRRLAAIRKQEHYALANELLQYGDAFFIEDMNYKALQKKNKETKINAKTGRFRSKKRFGKSLSRCAPAAFVTILKQKIERLGGKLTKVNTFDTKASQFDHTDDSYTKKKLSQRFVKLSDGTIVQRDLYSAFLLAHLNKDMKTYNKKTLKSDFADFRVMHEETSYRLKHSTDWLPASVGF

SEQ ID NO: 41350 - protein, 500 aa, Moorea sp.
MSKKVGYPKKLSTQIVPVVGMSKSVELELLSTMKKLGVVRAESYNKLGSINHWGLDWKKAIPKVKSFRTPDTLGLPAKLMDWTINDVAKAITAQQAACIDAVIKKIYKRFQGIENQKTRKELCQQVKTLAILDNPLLHRLIRKEFQRGHSWVKNQIVYQKVGYKCRRLSRNTYQLELAGLIRGKRNKIIVKSNRKISGQIRLIYSQTFQRFEIHFLVDHGTVEIPSERRSIGVDKGYTEAFYDSDGQAHGKNLGRVTTKKSDRICSKNRNRGRLWALHRKLKKIDPAKSARILENNLTRKTENRRYRKNQSEIKAIIGAASKSLFKGESLKVFAEDLTQPIKNKRQSLAISRKLNNWMKGVMRDSLQKWANWTGSVVTEVQPSYTSQIDSVTGTLLGKRSGDSFTRFNGVVLQADHNAAKNVLDRGTDHEIARYMSKTEVQAVLLRRTARFLKGMGLSLLDAIELGWLDCKHNKTKAFKKLLVEMPGTPRQMGGRLDSNC

SEQ ID NO: 41351 - protein, 382 aa, unknown
  TnpB Polypeptide
MKIHRSSKCYFNKWLTTKKKQELKEILVEHSRIVNYFIRKYENDIPQKKKNELLLANYIQECISDTKTFFTARMVKNCFSEGYGMIQSSKSLSTSMGKKYVSPKHYGKRMILSETIATHDIARQTKLFDFNLTLGCVRTDRKKHKISIPLKRHIQFNKWSILGKLSKSVVITDKYVIFFFKVETGKKKTEGELVGFDFGLKRLGTLSNGDVIGKNINKLLLELNIKKRCSKAYYRKKEEIREYINKEIKDINFNDKQLIVVEKLKNMKYKMKERGRLSKSIRSVFYNLSYRQVLQRIQMLCEENRVSFRSISPFWTSCECLSCGHIEKKNRLSQESFVCLKCGHSDNADSNASKVILKRFITGKYGFCYQQDNLKEYYISAN

SEQ ID NO: 41352 - protein, 444 aa, Archaeoglobaceae sp.
MKQTLQKTIKIPVSQAITQEKLSQLTNLTARLTYAVQLFLDRIIADDITTVKDAEKFRKEIEAITSLPSAYAQTCRDKALWMYRSYKKLHREWQKEVVKLERKIERCIDKHKRRKLEHKLYRLKKREPSLPTIMGKIPVVFDYRVGSIEFSYSAKEFKLWMRISTLEKGKRIDIPLHSYSYAEKHLKSWSIKSFQIVWRSKLNRYEVHVVVEKEVVVKPERLVGIDLGLKRIITAYEQGGENRVLLLSKEECKEFFIRMRRLNNRIGKLQRLRKHKVLKKLKHRRRNYASDFRRKLAVEIAKHFSNSIAFIGLPKNIRTDKHHKGSGHRKNRKCINHWAFREFAEILQTELMENNNIAIIVNEWLSTKTCSECGSKKTEINDRHFRCLNCGYKGDRDVNAAKNILKKGLEKLNKTKVSRKGTGAVVNQSELPMIGLKPLKVEAP

SEQ ID NO: 41353 - protein, 1293 aa, unknown
  TnpB Polypeptide
MAKSIRCPKCHNYYNEFYTECPFCIAIEKAKKAGELSNCPKCGNPVPKKDLDWHLKTYHDPLAERTHDWPHSGIFNYHIEKPVKFPVQGWKIHVSADTNNAAKVFDIVKPILEKEKISFKAVSDTGLLEHLNSGSQVGKFITIYPQSEKEAVKIAQEVDRALEGKGLKGPKALNDTSFGNSGLVFYRYGGLRDITEKEIEKGRKDFGGMLVRSDRSLEPDVRNEEDNLASGKPIRKEIYKPDWMSDPFKAAEKLLKSKVSSIEPTTGEPKIPVLEKPKVISTPSEIIKEGKTMGLLDRIFGRNKRPKQTELDNVLNARHEEYEKGIKEQEKKIESNERQRVWANETVEEYKDSQDYFKNLEKERNARRLAQRYVRPSADWQGKQIQEEEISKEILEKQKTRASRKAGPGAYINVPNLLNLTRGGAGGKAAAAGGSPPGGGPPPGGGGPPSGGGGIGPGLIQCTNIGCRIKYPRNLPRCPNCGTQNPAFFLKGTQVLCQCGNVYEISRKACPKCGAPNPKYGLKGDEVRCPNCGKIYPMDITECPKCKEPNPRYVLKRGQTRCGQCGKVIDINWDFCKYCGAHNAAKPKTTGLGESVGFRISGRTYEILMYELAGVFCIFGLPILGLPQLLYLGIVLMVLFPFYTYLPGEHEVLASREEGEQHLGTAGAASLVLKSNIKLISFTLTVFQFTPLIPGGVPVSSLIPLAISFVYYFDLPTSYRTSQPSKMIEAWLRLVVGIVIAGFFLLGFAGTTQGTTLAFMSLAFFCTSFPTQKEEKEPGVVRVELLSKAYGGNAQKGAHIIGKGLFLFFMGFALLYSNIPFSTSNDMSIIFYTVFILSLFSGLMTGPEGRPAMGILMIIMTLFVFSFMFTGIIGQAVFGYWWPQIYGFVDSAVTPLIPLWQQMTAGMGDAWLLLTNPMQYYNMMMMRQQATQSVVKTGGTTKSIELLKFDIFTSLTGTLEPLEDPVVGSIELQNQGEFEANKLTLTFVSSFVNAQSVSISAGTTEQEPCGSLDKLECSAPNNPTKSGSRGTCLWQPTPPDVIYPDEIKMATFAYKNDAWIFTDINGTSQDLATCVLNGVESTYPSACYSDPNSTYKFGGNILKIDANYTYDYNVNVSIPVEVIEESKYIQLLAARQITLQELTSQYSGGPVKATLWSQKQPIRNKEVALFVASFYNDGTGLLNQIYSFNIKIPAELGTVEIISQSFRISAPPALPDGCTYTPGNPYNIIHCQHTCGESCVMKPGEFKRVSFFVTPNYGAELIDRKTSLIIGLGSYEYTKSTSQSLTIANFPPH

SEQ ID NO: 41354 - protein, 280 aa, Sulfuracidifex sp.
MKEQLVSVKVIDFGKLKTIYDDICFFRAYNNAIRKVEGSRLSPPPSIPREILSSIQGKGPIRLGPIEIQFINETKIRLKGYNTLVEGVPELGEPLYAIVDMTDGIKVMLAYEGRKVVVGIDVGIRHLITVASLLDGKLWKVRYFGTDLMKDDFARYLGDNQGYSHLQTIRDKVRRQTIEAVNFIEEMNPKVVAMEDLRLYDNKIGRGLKTIQNALELELYKRGIRYRRLEPYNTSKICSNCGYKKGEILGSIFVCPACGYKADRDFNAAFNIALRCFYTC

SEQ ID NO: 41355 - protein, 383 aa, Sulfuracidifex sp.
MARRGSKAIRATVSMKIAVSDSLLALVNNYVKALRFSLFWLKENVKNPEEKGVLSKVHEELYTRLREEYNLPSKVAEDCYREALATYKGWYNNPRRGRFPRVYKPTVWLTPKASYSVNFERMTVRIAGVGELPILGFPRNLKDYLSWRIKEARLVVKDGKAFLKIVFEKEGEKVEPKESIAVDINMAEVVVGKDDRNYVRIPTRLEEVHHWKSLAESLQKKYPRRWRRENKRILHRVRSFHLKAKRIMEDFARKVGKWVVEIARGFGSNIIKLENLRNLLKNVNKLPKEFHDKLYLMQYRRLQYWISWQANKHGMIVEFVNPSYSSVSCPKCGRRMEEKGYRWFKCSCGYENDRDVIAIMNLNGRGSLSLSTAPQMRDVRANR

SEQ ID NO: 41356 - protein, 353 aa, Sulfuracidifex sp.
MARRVKAIRATVSMKIAVSDSLLALVNNYVKALRFSLFWLKENVKNPNEKGVLGKVHKELYKKLREEYNLPSKVAEDCYRDALSIYKGWYNNPRRGRFPIVYKPTVWLTPKASYSVNFERMTVRIASVGELPILGYPRNLKDYLSWRIKEARLVVKDGKTFLKIVFETEGEKVEPKESIAVDINMSEIVVGKDDRNYVRIPTRLEEVHHWKSLAENLQMKYPRRWRENKRILHRIRSSHQKARRVMEDFARKVGKWVVEIAKDFGSNIIKLESLKNLLKNVNKLPKEFHDKLYLMQYRRLQYWISWQAKKHGMIVEFVNLVIHQSHALSVVEGWRRKDIVGLSAHVVMRTTVM

SEQ ID NO: 41357 - protein, 382 aa, Sulfuracidifex sp.
MARRGSKAIRATVSMKIAVSDSLLALVNNYVKALRFSLFWLKENVKNPEEKGVLGKVHEELYTRLREEYNLPSKVAEDCYREALATYKGWYNNPRRGRFPIVYKPTVWLTPKASYSVNFESMTVRITNVGELPILGYPRNLKEYLSWRIKEARLVVKDGKAFLKVIFEKPFEKVEPKESIAVDINMAEVVVGKDDRNYVRIPTRLEEVHHWKSLAERLQKKYPRRWKENKRILHRIHSSHQKARRVMEDFARKVGKWVVEIAKGFGSNIIKLENLRNLIKNVNKLPKGFHDKLYLMQYRRLQYWVSWQAKKHGMIVEFVNPSYSSVSCPKCGRRMEEKGYRWFKCSCGYENDRDVIAVVNLNGRGSLTLSTAPQMRDVNPNR

SEQ ID NO: 41358 - protein, 382 aa, Sulfuracidifex sp.
MARRGSKAIRATISMKIAVSDSLLALVNNYVKALRFTLFWLKENVKNPNEKGVLSKVHEELCTRLREEYNLPSKVAEDCYRDSLSTYKGWYNNPRRGRFPRVYKPTVWLTPKASYSVNFERMTVRIASVGELPILGYPRNLKEYMGWRIKEARLVVKDGKTFLKVVFEKPFEKVEPKESIAVDINMSEIVVGKDDRNYVRIPTRLEEVHHWKSLAENLQKKYPRRWRENKRILNRIHSFHLKARRVMEDFARKVGKWVVEIAKDFGSNIIKLESLRNLLKNVNKLPKGFHDKLYLMQYRRLQYWISWQAKKQGMLVQYVNPSYSSVSCPKCGQRMVEVSHRWFKCLCGYENDRDVIAIMNLNGRGSLSLSTAPQMRDVRANR

SEQ ID NO: 41359 - protein, 382 aa, Sulfuracidifex sp.
MARRGSKAIRATISTKIAVSDSLLALVNNYVKALRFSLFWLKENVKNPNEKGVLSKVHEALYTRLKEEYNLPSKVAQDCYRDTLSIYKGWYNNPKKGRFPRVYKPTVWLTPKASYSVNFERMTVRITSVGELPILGYPRNLKDYMSWKMKEARLVIRDDKAFLRVVFEKEEEKVEPKESIAVDINMAEVVVGKDDRNYVRIPTRLEEVHHWKSLAERLQRKYPRRWRENKGILNRIHSFHLKAKRVMEDFARKVGKWVVEVTRMMGSNIIKLENLRNLLKNVNKLPKEFHDKLYLMQYRRLQYWISWQAKKHGMLVEFVNPSYSSVSCPKCGQRMVEVSHRWFKCSCGYENDRDVIAIMNLNGRGSLSLSTAPQMRDVRANR

SEQ ID NO: 41360 - protein, 195 aa, Sulfuracidifex sp.
MARRGSKAIRSTVSMKIAVSDSLLALVNNYVKALRFTLFWLKENVKNPEEKGVLGKVHEELYEKLREEYNLPSKVAEDCYRDALSIYKAWYNNPKKGRFPRVYKPTVWLTPKASYSVNFERMTVRIASVGELPILGYPRNLKEYLSWKMKEARLVIRDDKAFLKVVFEKEGEKVEPKESVAVDINMSEIMDPEQS

SEQ ID NO: 41361 - protein, 196 aa, Sulfuracidifex sp.
LGVDKLVTTSDGVVIENPKVFDKVEKKTKILQKSLSTKKKGSGNYEKVREKLAKLHEHMKNLMSDYIHKVTSWLIEQYDEIYVGDLDVKYMVEDSESKTLRKHILHSNFSKFMSYLSYKAKRAGRRVVKVDPRNTSKTCARCGHVKKDLTLADRVFVCPSCGWTVDRDYNASLNILRAGSGPRACGQETSAIHTLL

SEQ ID NO: 41362 - protein, 437 aa, Sulfuracidifex sp.
LKRTVRLESDFLNEWKYHVLREVEEYQRLIVNEMIGVILSEGLPTTRKKLHERFYNHYKEKYPFLPSRVIEGAYIIAGRIVKSFRERRKRGLTRKDKPEYKKVVITIPNMVNWRFNRVSVNVLTHKGWIEISLKSTKQFTRYVYESWRVSQELKLRLVGRKVLVWLTFEKEVEVETKDGNYISIDVNENNFTLAVFEDFKLKELRRYETGLGRIVVNYSIRREEITKGHSTKDELIKKKLRKLRERERKIDVLRKTAKRITELARDLKAKVIVGKFSSKAKEKMEGDKNGRLRHRIHQWSVVKFVEMLKTQPIDVEEVSESYTSSTNPFDGKKLRKGKQEVEKVVKVFNPFLMTGTAHEGGGIRVFKVNARYLESGQVLLERDSIAPLNIMKKVDGRVVVFPSTSPNDLRMTVYDPLRGVPVAELKVIKSKEELRPG

SEQ ID NO: 41363 - protein, 428 aa, unknown
  TnpB Polypeptide
MKLTFRYPVYPTQAQETTLERWFDHLCELQNSARHDRLVAYETEGAFVSLSDQQTLLTAAREKYDDFREVPQDFQNHALRRNDKAFTAFRKRCKEGAAKKGYPRYKKRVRSLTWSLRKYTKVVRPKTKDTDKQTIRVRENPIIETQFRHNRLKVPKLGELKIRMHRPLQGDPKEVTIVKKASGWYAHISCEIPDTPKVEPTAAVAVDVGTTHYLTTSEGEKEENPRWYRQAEGRTRKHSKDLSRKEKGSHRRKKQQHKLALHHERTVNRRKDFIGKLVYKLYHHEKNSVLVAENLNTSNMVQNKHLSKSISDASWSTFFEWCGNIAERDGFHFHQVDPKNTSQTCSACGEKSQKKLSLAIRTFRCQFCGTSLDRDHNAAVNILLRAACAHRGERWVTDLTEARNKNEARDMGLQNAKQLLLFVTSPSL

SEQ ID NO: 41364 - protein, 564 aa, Streptomyces sp.
VPRERRSKKRELRAMAAPFTVAAPSGAHIRDRLRMTAAEAEILRLVGEYNGRHQRADLAERVRLGRVKVKENRRAERKRKLTAVSSSRWAGAMTRASEGQYQLSLRCLFDERAGLRRAVRIIERRLTVPCGQRQGRTRGYPDRAERWQKQRRLAVLNTRLADVEERIQQGRPAIVVGGRRLAKVRHSLADAQLSETEWHEQWEAARLFLTADGESAAPYGNYTITVHPETGEVSLVLPEPLRHLANAPRGRYKLGCTVGFSHRREEWLNRACAHRAVRYDIVYEPDRGRWYIDASWSSDTAVLPSPQEIRSFGERILGVDLNADHLAAYVLDPHGNPVGEPITVPIAITGPASQRDGRLRAAITELVTVAREHHCAGIAIENLGFDDARAAGRETMGRGGRGKKFRRTVAGIPTAKFRERLRSMAFHNGLVVIAVDPAYTSIWGERYWKTPLQQQTKTTVTRHHGASVAIGRRGLGHGARRRPGVTAHHQRMVERRATGQTVHIPRPRGTASPPRRASTPTRGDKTRPSQGDQLALFPDLEDRSRGHRTIRPDSCDSANTGQLA

SEQ ID NO: 41365 - protein, 402 aa, Streptomyces sp.
VDRVIRTYKFLMRPTVGQAIALGEMLRDHCSLYNGALQERRDAYRHVSKTSVKYREQSAQLKDIRAYDPERQGRWSFSSQQATLRRLDKAFAGFFRRVQYGERPGCPRFRGATWFDTVDFPKDGDGCRWDSTPHDVVTRVRFQGVGHVKVNQHRAVVGDVKTISVKREGRKWFVVLTTDQGEPEPLPVTGRVVGIDVGIAHFLTTSGGEHVANPRHGRKAAARVRAAQQALSRCRRGSKRRRKAVERVATLHRKVRRQRLDHAHKTALGLVREHDFIAHEDLKIRNMSATPAPKPDPETPGTFLLNGATAKAGLNRSIADAGWGVFLAILNAKAESAGREVMAVDPRNTSRRCPECGHTVKENRPTQEKFHCVSCGHSAHADAVGALNVLRAGLVRRGAHQA

SEQ ID NO: 41366 - protein, 381 aa, unknown
  TnpB Polypeptide
MTKRAYKYRFYPTEEQEQMLSRTFGCVRFVYNAVLRYRTDAFYQRQEKIGYVAANTFLSKLKKDEETAFLNEVSSVPLQQCLRHQQTAFKNFFESRAKYPTFKKKTARQSAEFTRSAFSYRDGNLFLAKCKEALAIRWSRELACEPSTVTVSKDSAGRYFVSCLCEFDPKALPVTPKMVGIDLGLKDLFVTSDGHRTGNPRHTAKHAARLAKAQRTLSKKKLGSSNRAKARQKVARVHAKISDCRTDNLHKLSRRLINENQVICVESLKVKNMVHNRSLAKSISDASWGELVRQLKYKAEWADRQLVAIDQWYPSSKRCSGCGFVMKSMPLNIRHWICPECAAEHDRDVNAAINIKAAGLAVLALGENVSGMGKVPVSSSR

SEQ ID NO: 41367 - protein, 405 aa, unknown
  TnpB Polypeptide
MTRFQAFKYELQSNGEQQRQMRRFAGSCRYVFNKALALQQARYEHGEKKLGYAGLCKRLTEWRNSAETTWLSDAPVHPLQQTLKDLERAYANFFAKRTAFPRFKKKGRHDRFRYPDPKQIKLDQANSRLFLPKLGWLRYRNSRDVRGTLKNVTVSANSGAWFVSIQTEREVAPPTHPATSMVGIDMGITRFATLSDGSHIEPLNSFRTHQQALAKAQRAMSCKTKFSQNWRKAKSTVSQLHARIGNARWDFLHKTTTTISKNHAMVCLEDLQVRNMSKSAAGSSDSPGRHVKAKSGLNKSILDQGWFEFRRQLEYKQVWRGGEVLAVPPRNTSRTCPCCGHVSADNRQTQAKFACVECGYENHADLVGAINVLERGHRLLACGDGVRSGRSVKQEPTEASQLAFS

SEQ ID NO: 41368 - protein, 536 aa, Sharpea sp.
MIDEEYNKILKQYHKLSGRHILVAETDMPYSDVLKVVALSDKIRKAGNELVGIMRKNYDQLLRTKRYRKLLSLYGNTEGKDKRKMLANQLNEMQKSYDVTWDYCRKSMIPIGKKYGIDAVFALTKAEDVWRSIEKCLYDNGKIIHFSKYGELPCIRAKQINRGIPMSVKNDKLQFKLGKTVFGIQINDRFQQDEVNSVLSYLAEPEITDNKAVNTFIEDAYCIDTYRPCYVTLVPKMIRGKYRVYLHLTIEGRAKPKYDKHGNPRHEYGKGMIGADIGTQTVAYTSDTEVGLKNLSERGNSIQTSERKERLLYRAMDRSRRAANPQNYNDDGTIMKGHKTWKHSNHYKKLKAKHSELCRINAVNRQLAINEDSNHLRSLGDTFVTEPKNASKLMKRAKETAKNDKGKFNKKKRFGKSIKNRCPSGFQTTVEKKFKVTGGTYIEVPNNYRASQYDHTVDDYIKKKLSDRLYKLQDGTEVQRDWYSSFLLYCYNYKTQDIDKNKCITEFDDCYKKEKALITWIKAHKIKVLNSGIKIA

SEQ ID NO: 41369 - protein, 393 aa, Salmonella sp.
MLYAVRVRLYPNAAQREFFARTFGCCRWVYNNALAYCQAMYEAGSPRPSAYDLMKRLPALKAEHPWLGEADSQALKQACADLDSAYKNFFRRVKKGEMPGFPRFKSKHRGDATYTATAATGIALESRQLKLPKAGWVRCRGVREWDGRIKRATVRQTPTGKYYATVLIDNGRELPAQPTINLNPLGIDVGCKTEGFTHQFAALSTGEIVTAPAEYKRQMKRLRRAQRRLARKQKGSASRMKQKRYVAQLHERISAVRRDFLHKLTHRLTCENQALAVEDLNVRGMMAAPKPKPDPDNPGAFLPNGASRKRGLNRSLASASLGEFFRQLEYKCAWRGVALFKVDRWEPSSKRCSSCGEINEHLTLADRRWQCPACGAEHHRDINAAVNIAAGAV

SEQ ID NO: 41370 - protein, 276 aa, unknown
  TnpB Polypeptide
MKIDTEAIEYMLTQLNHQDMKQINVPTSRLKKLKHHPKSLSKSRLQTMIQLQTYMNQHPQYQPKIKCQSENTHYVGIDVGISNLITASSQDRSQTVKIKTCDYPLLKNAIDAYNRKIIDINRDFNCHRRLNKAHHITRREDYKEAVQTLIDTIDTPLMQMVKHIVTHVYPRHTVYVIGINHLQIEFYATHQVILHHIIDTFYRVFETYPELKGTVVTFNEKQSSIECPKCHQKHHQSRTSDNQFKCRHCGFKHKDDDIVASCNIVNNYLRTKKGTI

SEQ ID NO: 41371 - protein, 243 aa, Lactobacillus sp.
  misc_feature (232)..(232): Xaa can be any naturally occurring amino acid
VKSNEVNGKKEISLWPKMRCYPSDQQKQLIKINSDASRFIYNEMVAINKELMQLRRVKLPIDIVQDRIKQLTMRQNAKQMSNHYQFLEDKRIDSLTKANAIQNYRKAWNAFRKVHATGVPKFHRKSYHWRYQTNCQYPGQKNALLTNGTVCFLDNSHVKVPKIGLLRVAGSQARLLKRICETRIGTVTLTKDSADRFFLSMQLASDESFVKVSKATHGHVGIDLNTDNFLTXTLSKCLITINS

SEQ ID NO: 41372 - protein, 488 aa, Propionicimonas sp.
MSNSRMRTRAYLLPSHANPGKEQRVRDLLPWWQRGLVHTQLIVVRRLREGIRPGYLDTRAFPGYLSQRQWKSVVNQVNAAIESWRELAVIAVRALICDLDVADEDRIALYQDNKAKRWFGHPVLGPMVERLLSTTLPFPHLATVRTMNMDGPIATHEVPANPNGPHQTWVRISGVPGTRPVRIPFGTNPYEQAAAGQRANYLQVHVPDHGPIVYRVIKHSPIAAPRSEGKVLGLDWGLANLFATSDGRRHGQQLYRWLRTADTQLTALAASLQRQGIRLSQSKRYRAMVRRLRRHVRNEVGRVLNKIATDNVAELVVEKLDFRGGGMSRRMNRILTIAGRAAVTAKVAALTEDHGITVTAVNPAHTSRQCSGCGYTTKTNRKTQDRFRCGFCGKGVHADINASRVILQRRSLAGRDQHMSKDAVLAHLDCQFATRWGCDPGRFRERQTRPHSRATRQDQPVLAGSTTNQTFVETVGSTDRGPEETPPE

SEQ ID NO: 41373 - protein, 352 aa, unknown
  TnpB Polypeptide
VQTITLRLKLHRPTRAKQRLYRQLAERTTALANALVAADRPKGLTSKTARPYLGGHLPSAVINQALRDVAAHPKVERFRVLWPAYNNQNLRMEHVGDFWTASLPTHAGRVRVPLATTERQAELLARLGASVRQGAAKLYEKRGRWYLALSVSVETVPCTGEQVAGVDLGLRNLAVVTCAGESLFFGGEHAAYVRRRLSRLRRRMGRAKALGAIRRMKDKEQRWMRNLDHQVSRAIVNWCLARGVGTLRLENLAGIRLRGQRRRRRDQGRSLHSWSFHRLQQYIAYKARLAGIRVEWVVPSNTSRTCPQCGHVDAGNRNGIRFRCQQCDHHAHADVVGAQNISRAISGLADAA

SEQ ID NO: 41374 - protein, 372 aa, unknown
  TnpB Polypeptide
MMSVNYVTRGYCVPLYPDCLQRIMLAKTFGCVRLVFNHFLDVQKNNLINQGHIYTKNEISHMLTLMKKDGQFSFLKEVDSVALQSSCENLNWAFMKFFNEHKGFPRFKKKGYYSTYTAKNNNNCIRTGNNCIRLPKIGWVKTKLYQKIEGHIQRVTVIDHGDGNYSLSICATDVPVETLPSTGKRIGIDVGISELLTLSNGDIYDNKRFYASTLDKLIVQQQKLSRMIKGSNNYERQRRKVHKLHKKIRNQRTDYYHKLSKQLIEDYDVIAVETLDIKSMMNGKVSNLNLSDASWSRFLYMLKYKAEWYGKRFIRINQYEPTSQKCHVCGYINKGVKELSIREWECRQCGAKHNRDINAAINIIKAANIATL

SEQ ID NO: 41375 - protein, 400 aa, Streptomyces sp.
VKLVVQVKLLPTPEQASALEATLRACNQAAAYVSAVAFANDLKDRNGLQKEVYTDLKTAFGLSAQPAVRTVKKVVDAYATLRANLQAGNLGPPASKRHGRAVSAPIVFRPEAAQPFDDRCLSWQYDARTVSIWTVDGRMKGIRFACSPDQLKTLVTYRRGESDLVCRKGKWFLVATCDFPDPEPYQPVDWIGVDRGIVNLATTCDGANYQGRGLSRYRRWQARKRAELQARQTRSATRRLSRRAQKEKRHATQVNHRISKEIVSVAQRTGRGIAVEELGGIRDRVRLRRDQRGTLSSWPFHQLGQHLAYKARKAGVPFLEVDAAYTSQRCPRCGHTERANRPDRDRFRCCRCGLAGPADVVAGVNVRDRARSAWVFVTAPALSPSQLLGAGWMRPVTVLS

SEQ ID NO: 41376 - protein, 375 aa, unknown
  TnpB Polypeptide
MAHTKSRTAQRREKASNLVQQRTIVLPLDLETEQFDLLIQVAGFYNRMWSSLVSWCDSNRTVNRTRMQKDNYRRLREQYPQLPSQFVCVGMRDAAGAMRSWNSNRPKRKWNMRARRKAMTVNYDLRLMSVRGNMLTLSTLQGEKRIHTLMPEIPLWFDTLYPTRKLNAAKLMLDPKNHTARIALIYRLSNTFTEQDRLDVLGVDLGQHSLAMDSRGGESKANNIWGVKRRYAHNRKTLQEKGTRSAHRRLKAMKGREERFIRDVNHCESKRLASTPGIGYIAFEDLTYIRRQARKGTRIGRRRRNMLNQWSFSQLQEFTTYKAFSPPTSASSWSTPPTPANAATGAATWTHATATTRASTANAADGATTPTTTQP

SEQ ID NO: 41377 - protein, 489 aa, Clostridium sp.
MKEMKIVKITMKAILINETDINKSVIDNMMLVFCTVIRYSFKKILNGIKISELEKMAAKKYNLNIRQAKDAVESARQTIRSQKELIKMNYDDYSKKVKAIEKILSDKNKKLSDKKKNALLSKLAKRQRKLDYWNNFIVTGTIPTVTFGRKEMFLRRCKGLITNKEWKDCRNNRIYSRGDKTKNGNPNLRVIVKDNMTFLEISTLEKTESNRAVKIQVPIYLPQKLSKKTKKINGINYRQLFLNHLQTGEAYQVEIIKKNDKYYCHITFELPETDVIYTGHNGVIGIDTNPDGFALTMIDNKGNYKWNTYLKQHELLYFKGNRRENLCGELIAQVVKIAKVYECGISIENLKFKNDKDVNSKFARIKNNFIYSKLLTMLESACYREGVELLKVHPAYTSKIGLYKYCHQYGMVIHNGAAMVIARRSYKFKESIPQILIDKYVNEKYKYKFNYYHEWKKWSIIDRNIKKKEEVKNPDFWIVNRKILLGLIV

SEQ ID NO: 41378 - protein, 414 aa, Halorubrum sp.
MEVRRTAPVKLVVPDERYDDLHESARQFLYCANRAAEFCWDDDSYVNCVTANSTARDALYEQLREETDLTANLVQEAIRRAVQATKGCVERWKQGKRVSQPEFTSWSMVYDKRSATFYRNRVSLSTVNGRVECDFELPADSPTPYEQYVLSEDHEFRASTLQYDKATDEFYFHITTRKYDTDESEVSEDTEHQTVLGIDLGVNSLAVASTGTFWQGDDYDHWCREFEMRRGEMQQRGTQAAHDALLRLGKREEAWRKQYIHTVANEIVSEAVDHDCGVIVFEDLTNIREQLPQAKWHHIWAFRRLAEYVEYKAPEQGVSVKQVEPNHTSQRCSRTDCGFTHESNRDGEHFHCQKCGYEVNADYNAAKNIGLRYARKRKHRLRSSPKSGSGDAPVDVRVNGGTLNGKSHQPIAGD

SEQ ID NO: 41379 - protein, 393 aa, unknown
  TnpB Polypeptide
VARYRLLPSLDQEALLQDHCSHARYVWNLAVEQHLHWRPGRANAPSYLEQCRQLTQARAEHPWLAAGSQMVQQQALRDFAHAMSAFIDPRNPARRPSWRKAGRDEGFRIVALKPEHVRRLSRKSGVVWIPKVGWVRFRWSRVVPGAKSYRVTSDRAGRWHVAFAAIPDPIPAPGNNEVVGIDRGIAVPAALSTGELLHIAGLTREERKRLRRLERKLARTKQGSVNRNRVKRAVAKLRARETDRRKDWAEKVSTDLARRYDLIRIEALMIKNMTRSARGTPDSPGRNVRQKTGLNREILRSGWGLLVRRLEEKAPGRIERIKPQYTSQRCSACGQVDPKSRESQAVFRCTACGFAGNADVNAARNIAAGHAVTARGGDGITRPVNREPQLLAS

SEQ ID NO: 41380 - protein, 235 aa, unknown
  TnpB Polypeptide
MMVKAVRVMLEPNNVQQTKMFQYAGAARFAYNWALAKEKDNYEKGGKFISDSELRKEFTRLRNSAEYAWLQNVSNNVTKQAIKDACIAYKNFFKSLQKHPRFKSKKKSTPKFYQDNIKIQFSDTHVKFEGFSSSRKANKQKLNWVRLAEHGRIPTNAKYMNPRISFDGLNWWISVCVEFPDCKKNLNNDGIGIDLGIKDLAICSDGNTYKNINKSQVVKKLEKCRRRLQLEFLEV

SEQ ID NO: 41381 - protein, 388 aa, unknown
  TnpB Polypeptide
MILAHKIALDPTMKQAQVMARACGVARFTWNWALAEWTRQYKAGEKPSALKLKKKWNTLKGESFPWVYDSPKGANQQPFSNLQKAFSGFFKKTSKYPRFKRKGDHEAFYVENDKLSVTEDRVRLPKIGPVRMREQLRFAGKILGAVVGQDGGRWFVSIQVDVGEVQKFRTDDDIAGVDLGVKTAAAIVTEGFAEQHEGPKPLKRAMKRVRRYSRIVSRRKKGSCRRAKAKRRLARLHYRVRCVRNDWLHKLTTRLCRENQAVVIEDLNVRGMVKNHRLARSVGDIGFREFRRQLEYKSPMYGTRLVVADRWFPSSKTCSGCGEVKDTLALAEREYVCEHCGLVVDRDVNAAMNLRTLGLGGIHARGEATAVSTLVEPRTKPCTLAYTS

SEQ ID NO: 41382 - protein, 319 aa, unknown
  TnpB Polypeptide
MRELLKSFKTEINPTEEQKVRIRKTIGTCRFIYNFYLAHNKELHESGKKFMSSSQFRVWLNNEYLPSHPECSWIKEAYSKSVTQAVNDGQTAFKRFFDHKSAFPKFKKKGRSDVKMYFVRNNPKDCLCERHRIKIPSLGWVRIKEKGYIPTTKDGYVIKSGHVSIKADRYYVSVLIEIPDHRIVNNSSEGIGIDLGLKDFAIVSNGKIYKNINKSAKLKKLEKKLVREQRSLSRKYENLKKGESTQKRNIQKQKLKIQKLHHRIDNIRTDYINKIIAEIVKTKLSHITIEDLNVSGMMKNRHLSKAVASQSFMNLKQSF

SEQ ID NO: 41383 - protein, 402 aa, Mastigocoleus sp.
MIILEFKAKGKTTQYAGIDEAIRTAQFVRNKCIRYWMDKPGVGQKDLYRHSTSLRKEFDFVKALNSSACQASVERAYSSIARFYDNCKKKVLGKKGYPRFKKNCRSVEYKTSGWSLSENRKQISFTDKKGIGTLKLKGTWDLYFYQLEQIKRVRLVKRSDGYYVQFLIRTDTKIESKPTGKTIGLDVGLKEFYTDSNGNSESNPRFYRTGEKRLRFYQRRVSRKNKGSTNRKKAINKLGRVHLNISRQRQEHAKRLARCVIQSNDLVAYEDLRVKNLVKNHCLAKSINDAGWYQFRKLLEYFGTKFGKITVAVNPAYTSQNCSTCGATVKKSLSTRTHICQCGCELDRDHNAAINILNIALSTTGHVGTWISDPNASGDLAPTVLGANLSQQAESVNEESSA

SEQ ID NO: 41384 - protein, 400 aa, Lysinibacillus sp.
MELMSIGKFAKRVGVNVVTLGTKIRLKPTKEQEVLFWKSAGTARWAYNYFLAESERIYNDEKRTVKEGEVRKKINNELKPTTHKWLKEVGSNVMKQAVKDADIARKRWFEGMTEKPRFKSRRRSKVSFYVNYESLKRTNEGFRGEKIGSVKTCNALPKLKKSHKYSNPRISFDGRNWFLSIGFEQEFEPYDLTDESLGIDVGIEKLAVCSDGEFKKNINKTKEVKRLEQKLKREQRQLARKLEANTKEYTKKRKPIYKIPLKNMKNIQKQNTEIRNLYKRLNDIRTNHLHQCSNEIVKTKPSRIVMEHLNVKGMMKNKHLAKAVAGQKLYEFKRQIQYKCKKYGIEFIEADRWFPSSKTCSSCGQVKSDLRLKDRLFICSCGLKMDRDLNASINLANYSI

SEQ ID NO: 41385 - protein, 403 aa, Moorea sp.
MIILEFKAKGKKTQYSAIDEAIRTVKFIRNSCIRLWLDNKGTGKYDLSKYCKILAKEFSFANELNSTARQAASERAWSSIARFYDNCKKKVPGKKGFPKFQKRGRSVEYKQSGWKLSPDKKSITFTDKKGIGKLKLKGTWDLWRFDKKQIKRVRIVRRADGYYVQFCVSVDINEELESTGKTIGLDVGLKDFYTDSDGNTEPNPRFYRTGEKRLKFYQRRVSRKKKGSANRKKAIKKLGRTHLRISRQREEHAKRLARCVIQSNDLVAYEDLRVRNLVKNHCLAKSINDAGWYQFRKWLEHFGTKFGRITLAVNPAYTSQDCSQCGEVVKKSLSTRTHTCKCGCQLDRDHNAAINILKRALGTVGHTGTWIIDPNALGDLASTVPGSGLVEQVESSIKESPFL

SEQ ID NO: 41386 - protein, 304 aa, Tissierella sp.
VCRNCKQFHRCLNLDEAYQNFFRRLKDGKVKAGFPKFKSRHSNKFSYKSNFTNNNIEVDYEENKIKLPKLKWIDSKVHREFSGEIKSATISKNPSGRYFVSILVDEGIKELPKIDKEIGFDLGLSEFIIENSGNKVPNPKNLIKNERKLAKLQRQLAKKQKGSNNRNKIRIKVARLHEKITDTRKDFLHKLSSQIINENQVIVSEDINISGMLKNHKLAKAISDVSWFEFTRQLEYKAYWYGRTYIKIDRFYPSSQICAICGTKNIELKNLKIREWTCENCGSHHDRDINASRNILKEGKRMLA

SEQ ID NO: 41387 - protein, 402 aa, Escherichia sp.
VKRLQAFKFQLRPGGQQECEMRRFAGACRFVFNRALARQNENHEAGNKYIPYGKMASWLVEWKNATETQWLKDSPSQPLQQSLKDLERAYKNFFRKRAAFPRFKKRGQNDAFRYPQGVKLDQENSRIFLPKLSWMRYRNSRQVTGVVKNVTVSQSCGKWYISIQTESEVSTPVHPSASMVGLDAGVAKLATLSDGTVFEPVNSFQKNQKKLARLQRQLSRKVKFSNNWQKQKRKIQRLHSCIANIRRDYLHKVTTAVSKNHAMIVIEDLKVSNMSKSAAGTVSQPGRNVRAKSGLNRSILDQGWYEMRRQLAYKQLWRGGQVLAVPPAYTSQRCAYCGHTAKENRLSQSKFRCQVCGYTANADVNGARNILAAGHAVLACGEMVQSGRPLKQEPTEMIQATA

SEQ ID NO: 41388 - protein, 369 aa, unknown
  TnpB Polypeptide
VWNLAVEQQQHWRSGRQSPGYDEQCAQLTAARAEYDWLAAGSQTVQQQALRDFAQAMRNFFHGTHRRPVGRKAGKHEGFRQVGVKPRHIKRLSRRYGQVWIPKVGWVRFRWTRDIPDTVKSYRVTRDRSGRWHIAFAAIPASVAGPADGSVVGVDRGVMVSAALSTGELLHAPGLNAGETERLRRLQQRLARARRGSHRRARTKLAIARLRARETDRRRDWVEKTTTNLARRFDTIRVEDLHVRAMTRSARGTPECPGTNVAQKRGLNREIHRQGWGLLVARLKHKALVRLEFVPPAYTSQRCSACGHVAPENRKSQAVFQCGACRAGPCNADVNAARNIAAGRAVTARGDLGASRSVNREPQLCSPAA

SEQ ID NO: 41389 - protein, 369 aa, unknown; identical to SEQ ID NO: 41388
  TnpB Polypeptide

SEQ ID NO: 41390 - protein, 436 aa, Caldilineales sp.
VSPHLKGVVKAHRIALDPTDRQASLMLEHAGWARVAANWARGRFQLAWFGETDERNADEWSAHVEASPDGGAWLSDMDLRKDFNAVKADLFAWSGGLSQNVAKNAIIHRGRGLEAWGAACKARKHGQPHRKVGFPPVRKRYRKLAFTPSNGRNSIQVDGRQVRLPRIGWVRMREALRFDGDILSITVSRTAGRWFASFTVDTGEPAPAPRPGPDVGIDMGVKTLAVLWDGGEKTEIANPKALAALRATQQAISRSVKVNGRPCTRNRRRLYEKLARQHAQVVRIRSDHHHKATTQIAKRGGSVTVETLNVDGMKRNRRLARAISDAGMAEFVRQLEYKCHWYGTEFRRVDRWYPSSRTCSDCGAVKPSLLLSERTDRCHRCGFECDRDENAARNLQAFGRPGRPSADAETRKTDCGSHGRRSIHQTAHHAIPLDIT

SEQ ID NO: 41391 - protein, 312 aa, unknown
  TnpB Polypeptide
MNVERALQEAIKKPERGFPKFKNSSEPNQSFTFLPQKGSEGLAKPIKVFGLEQIPEKAEIANAKLVKRFNEFYLYVTTYSKDERIRRHEVLGLDFGISENLIMSNGIELKYKTPISAKTIKLQQKLSNKIGSKKGEKKSKNYLKTREKLAKSHFKDKMKRRDANNKIFHYIDSYIHIACQDEQIANWKGSKEANKTIQYSAMSAIKAKIKNLASSRVDVLDKFKATTKTCSSCNATRKMEKSDRIYVCPKCGLKIDRNLNSTFNMINMSKFATEHSETMLADINDQDFINLSKIERLEIRLISREAHQFIDE

SEQ ID NO: 41392 - protein, 612 aa, Rhodococcus sp.
MAGTEPTTRRQFAFTTRPHLAVDDTTGDPIGLDDLDIRVGWLLDLITAAETELLTRLWHPDTFDLLASGRDGDGRALPKHGHVAAARLGWTPTYPNGCYVPSRVSRVVTAHATATLRTCGYRDAAIASLSARFDPATGRLRAPVDGEVSVPSGFARGVRRQLVACIGRSDAAAGQEPASDASTSHAAATEETQSTRLRITDIQTPPQVTAMARLSAADRQLAELTVTADTMVLTVKLPTTATPTGRAQWQRVRLTAALPPHLHGRAVTAWHLPTLTLDGRGLLLRCAATEAVPAGDLAAGTVAVGVDWSPSTLGAAAITTDTGDGLVSDFRGYTYDDRGLGIKLARLQQEGQRLHRKSARVRRLAENAPPELRSKLEAKIAVLDEKRTAVGVKRGKINRELAFHFARQVTDYAAAADATVIAVEDLSTLEPRGRGRVNNNRAAQSARRKAADALAHTAARVGVVAVTVPARGSSALCPGCNAPLARPGGYHDAWCQSCRLGGNRDHVAGVSLAKRALLGRGAAVRTRVGGLEIRTTMYAPVRRCRDKTGPTPGRPRHRRVRRSVARPTSAEGVNKSKPRPASQASVWDTVESAASQDVSGSREERGSGPPGT

SEQ ID NO: 41393 - protein, 405 aa, Allosalinactinospora sp.
MRLRYRYRLYPTPGQCVALARAFGYARVVFNDFVAARDQAHRAGEKPPSGGALQKKLITEAKKTPERAWLSEVSNIVLQQAARDAETAYRNFFASFNGHRRGARMGAPRFRSRKDHRQAIRLHSGGFRVRDNGRLNLARIGDVRVAWSRDLPSAATSVTVIKTADSRYFASFVVETDPDNHGEHLPAVVDKHGDVELALDLGLNAFATDQRGRVIDNPRVLRRAERRLKKAQRALSRKQEGSANRAKAHARVARLHAKVTDTRADWLHKVTTRMIRESQAIYLEDLSVKGLARSRLARSVHEVSWGRFMSLLQYKAARYGRTVVTIGRFHPSTKLCSRCGALQEMPLSARIYRCGYGLALDRDHNAAHNILAAGRAERQNACGDQVRPPFGVAQVAEAGTHRSAR

SEQ ID NO: 41394 - protein, 374 aa, unknown
  TnpB Polypeptide
MPFDPAPTVAARAKRVLRFRLKDKHAKWLSELAREVNFVWNYCNELSYRVWERERRFLSGFDLQGYLNGASKEGLRIGSAVFQQVAEELAARRKQHKKVRLAWRKSRGARRSLGWIPFKARTLTYRSGQVWFSRRPLSLWDSYGLPQYAEHLRAGCFAEDARGRWYLNVVVEVEVAEQPKAAAEDIVAGRAQDIGIDLGLKELACLSDGSKIERTKFFGEIEEKLAVAQRANKKGRVRALHAQAAHKRKDFLHKESTRLVRRNDAIYVGNVNAAAMAKTKRGKSSLDAGWSMFRTLLRYKCDDAGVRFVEVDERYTTRTCSDCGLVGGPKGIAGLGIRGWTCVGCGATHDRDTNAAKNILARGRARLAEGILRL

SEQ ID NO: 41395 - protein, 447 aa, Acidimicrobiaceae sp.
VTRAEFEPTKTSSPTNVTQALRYALDPTPDQINLLRSHIGATRFAYNALLGLVKVNWDENRKKKEAGKDVAKQDYLGTSHFDLQKLWYERRAELAPWWGENNSSTYNYACLNLSKAFTNWRKGRSKFPTFKRRGSGGSVSLMPGAVKLVGTHHVRVSRIGEIKNYESTRKMHRHLERGTGRILSATVSEINGKFFISFAIEVARCLPVTRSPERIIGIDVGLSTLYTGATPGGEQVLTVENPRHLATAAKELTHAQRIASRRQGPGPGRAPSKRWRKANSRVQKIHAEVANARKNLIHETTTNLAKNYDVIAIEDLNVTGMLKNRSLAKHISDAAWGEFRRQLEYKTTWYGSTLVVANRFYPSSKICSRCGTVKAKLTLDERVFHCEACGLIIDRDLNAATNLAKLGLPGTSSGTGRGGEVRPEHQILDATAHPDEASTETLTLVSA

SEQ ID NO: 41396 - protein, 350 aa, unknown
  TnpB Polypeptide
MTQRVQMTFRYRFHPTAEQAEQLGRTFGCVRLVYNMALEARIRALQDGRPLTYGETSALLTVWTKKDEFSFLRDVSCVPLQQALRHLQAAVGNLLAGRARRPRFTSRRRSRASAEFTRSAFTYCDGRLTLAKMRSPMRIVWSRPLPEGAERHERSHRRRRVKAQRALSRKLPGSANHAKARLRPARVHAHVADRRRDHLHKLTTRLVRENQAVVIEDLNVGGMVRNHRLARAIADAAWRETRSTLEYKCAWYGRELIVVDRWFPSSKRCSSCGAVRQDMPLDVRKWTCGCGAEHDRDVNAARNILAVGLAERRNACGADIRPQRETSFRAGDRRRSRNLPSPEEKPSLAW

SEQ ID NO: 41397 - protein, 324 aa, Streptomyces sp.
LRRLDKAMQAFFRRVKSGDTPGYPRFRGVNWFGTVEFPKDGDGCRWDSTPHDPVTRVRLQGVGHVKVNQHRSVAGRIKTVSVKREGRKWFVVLTAEQARPEPLPPTGSVVGIDLGIVGFLADSNGEFITNPRYGRRAAAKIKAAQQALSRFPRRKAKDRTGNHRRAVEKVAALHGKVRRQRLDHAHKAALGLVRMHDFIAHEDLKIRNMVKAPAPKPDLENAGSFLPNGSAAKAGLNRSISDAGWGVFLTILHAKAESAGREVIAVDPRNTSRTCPECGPVSAENRPTQEKFHCQSCGHTAHADTVGALNVLRAGLVRRGANPA

SEQ ID NO: 41398 - protein, 258 aa, Moraxella sp.
MKTLKLRIKDKHTNQLNRLSGSVNFVWNYVNDLGYKYLQKTGKFFSAYDLNEYTKGSGELLGLHSQTIQAINETHAKSRKQFKKAKLNWRTNRPNAKHKSLGWIPFKKSAIKYLSTRQTGKKALKSTIQLSLSKGQKLIIDVFDGYNLSLYQINTLEIVQDSRNRWYACITVKEYPKTQCGTGSVGIDLGLKDSATTSKGGKLTIKQTLKCAKELAIAQRAGKKKHVRAIYAKIKNTRQDLIHKFTTQLVRQCPNRGW

SEQ ID NO: 41399 - protein, 432 aa, unknown
  TnpB Polypeptide
LEKLSKTLTRTVVIECYANKYTRRALREIEGAYREMLVEMVEYAVKYKASQETLHRVFYNRFRERHPWLPTRVIKGAYRDAVRRAKSFREIKKRGEAYTNKPEVRRVTVTYSDSQDWGLEDGVIMLKTHRGWVELHYRNHRQLYRYLYGGWKLASELRLKVLGRKIIVYLSFTKSFEVNYNPENVVAVDVNENNVTVAVFKSGVLADVYRVETGLGGIVIAYSERRKRITQGKSTKTREVKRKLRRLRERERKQDVLRKTAKLIENLAVENSAAVVVGNINEKAKERMEEDANSKLRHRIHQWSARKLIELLDEKPVHVVKVSERGSSSRDPFTGRRVRGFEPLVIRSAVKGFGRVKVMKIVLRVAKVGGRVLERDVVGAVNIGLKYLNTDGSPVALGSTGIHGVWVKLMSPHRGPTPLTEIQVFTNTIKYR

SEQ ID NO: 41400 - protein, 433 aa, unknown
  TnpB Polypeptide
LANQIRDFKKVRPRDPWIVEREESEVCLGTEGTECRSGHALKCCIPAVCKKMINVTRYRVYPNKAVQDTIFHQFGLCTDVRNHCLDTQCFNVRMLPGLKGIHPELKDVHSIVLQNMIFQIRDNLKALSKLKSKGKRVGRLRHKPVRSLVYEQTGYKIVGNKLVLSKIGEMPIVITRPVPGTIKQVVLKFNRTHQWFVSVISRTEDESVERVGMRTVGIDMNLLNFSTDTDSKVFEHPHNVKKVARQLGRAQRKMSRSVKGSHNRRKQRLKVARIHETVVNRRDDFLHKWSNHYIQNYDRIAVEKLNIKDMLEGRRARGTNRNTLDAAWGKARTFLAYKAERAGCQFVAVDPAYTTQDCFQCGTRVPKELSERMHNCPVCGYTENRDLNAAFNIRKRAFGIGWDTPEFTLVEIGASTPAMPMQVPVNESRISRL

SEQ ID NO: 41401 - protein, 413 aa, Gammaproteobacteria sp.
MSAFSQQSAATIRAVRYRVLPGTPAKARQLNRLAGACRHVWNWALDRQDAAWLGWRFSSAGRPPAPTFFTLGKAFTKLRNSEGHEWLRALPFKEVRYALKRQADAWHAFFKGDRGPPRFKGRDGAAGFTIPEGVRLKDGFISVPKLGSYRLRRRGGNPHPEGFPKQAVFKHQSGKWFCTVFYEVAIDRHPDDGKVVGVDRNVGQCALSTGEIIRLPDLARLEARRRRYQRRMARQAKGSGRRKRTRVKLARTSRRIANVRSNWCHKASRRMADAAHTVAIEELNTKGMTRSAKGTKKEPGTNVKAKSGLNREILSSGWRGLERNLEYKAGQVVRINPARTSQTCHECGFADSANRPSQSTFRCQACGHEANADVNAARNIRRQGLARLDGEGRWRSMATPMNRQTGGELRRAA

SEQ ID NO: 41402 - protein, 396 aa, unknown
  TnpB Polypeptide
LSYRYRLLPNKAQHGALERILEDQRVLYNAALEERIDCYRKTGRGRTYVDQCKALTLWRSFDATARSTPLKLQRWTLSRLDAAFRSFFRRVAADAIPGFPRFRGKSRWRSFGFTEMEGIRWDGKRLRIAGIPGGLRVHLHRPLQGDLKNCVFTRGPDGWSISFQSAFAAVEKRPVEKTIGVDMGLVTFAHTSDGDQIPNPHVARRRDRQIKRRSRALARCLKTSKRRQKVKRRLSKCHRRIENARSTWLHQQSSALVARADLIAAEDLNIAGLLKNPHASRSIADASWGRFLSMVAYKAERAGKHFILVKAKNTSQECSGCGMIVAKSRRVREHSCPHCGLILDRDHNAAKVILARAVARPEAANPAKPDSPRKIGPSKRFETLPGGRAGSARGAT

SEQ ID NO: 41403 - protein, 398 aa, unknown
  TnpB Polypeptide
VQLRYNYRLYPTPGQRMALARAFGCARVVFNDGLAARQDARQAGLPYLSDRELSARLTAAKATPERAWLGEVSAVVLQQALADLNAAYRTFFASRTGQRKGPKVGPPRFRSRKDTRQAIRFTANARFKILDNGRLRLPKIGDLPVRWSRPLPSQPSSVTVIRDSAGRYFASFVVQADPGTVPEAEPVIGIDLGLTHFAVLSDGRKITSPRFLRRAEKRLRRAQQSLSRKQQGSRNRDKARVTVARAHARVADARRDFHHKLSTAIIRDNQAVYVEDLAVAGLARTRLAKSVHDAGWSAFVAMLEYKARLYGRQFRRIGRFEPTSQVCSACGVRDGPKPLHVREWTCGACGVTHDRDVNAAKNIAALGRREALTARGGQVRPAATLAPAGETGSLRGAA

SEQ ID NO: 41404 - protein, 287 aa, Okeania sp.
MIIYEFKVKAKEVQYRAIDEGIRTSQFIQNKCLRYWMDNKGVSKYDLNKHCAVLAKEFAFVNELNSMARQSAAERAWSAISRFYDNCKKQIPGKKGYPKFKKYCRSLEYKTSGWKISENRKAITFKDKKGIGKLKLKGTYDLNYYQLDQIKRVRLIKRADGYYCQFAIKANVKVETEPTGKAVGLDVGIKYFLADSNGNTVENPMFYRQSEKKLNRANRQKSKKYKKGAKPQSKNYHKARCRYAKKHLRVSRQRKEYCQGVAYSVIQSNDLIAYVDAERRAEGRLKC

SEQ ID NO: 41405 - protein, 379 aa, Carnobacterium sp.
MFKYKTYRYRIYPNKKQQQSINQTIGCARFVFNHFLHQWTETYQETGKGLSYSTCSSLLTRLKKETETLWLKEVDSIALQSSLEHLADGFERFFKKQTKYPRFKSKKNLVQSYTTKQTNGNIAISGNQLKLPKIGWIRFAKSREVAGRIVRAAIRKNPSGKCFVSLLCEVDIHPFHKTGSAVGIDLGITDFAILSTGKKRDNQRFTAQMDKKLKREQRKLSRKYEQAKKDGKELWEAKNYQKQKQKTAKLHEKVANQREDFLNKLSTEIIKNHDIICIEDLNVQGMKRNHKLAKSISDVSWSAFVQKLTYKADWYGKKVIKVSRWFPSSQICSACGHRDGKKPLNIRAWVCPECGILHDRDINASITILQEGLRSLQLV

SEQ ID NO: 41406 - protein, 381 aa, Carnobacterium sp.
MFRSFRYRLYPNKKQQTCLNKTIGCSRFVYNHFLNQWNTQYKETGKGLSYNTCSALLTHLKKQDETCWLKEADSTALQSSLRDLADAFDRFFKKQNQHPRFKAKKHANQSYTAKNNVNNGNSSIEVVGSYVKLPKLKWVKFAKSREVEGKIISATVRRNPSGKYFVSLLCETEVTPFRLTGSAVGIDLGITNFAILSTGEKRDNHRFTSKMEQKLKREQRKLSRRQEQAKKDEKDLFEAKNYQKQRIKVAKLHGKIANQREDFLNKLSTEIIKNHDIICIEDLNVEGMKKNHNLAKSISDVSWTAFVDKLAYKAKWHGRKIVKVNRWFPSSQLCSSCGHPDGKKSLEIREWICLKCGTLHDRDLNASQNILHEGLHSLQHV

SEQ ID NO: 41407 - protein, 341 aa, unknown
  TnpB Polypeptide
MKRGKVYKDKPEVRRVTITYSDSQDWRLGDGVIKIRTHRGWVELHYRNHKQLHRYLYDGWRLASELRFRILGKKVVVYLSFTREFEVCYSPRNVVAVDVNENNVTVALFKDGALADVYRGETSLGRIVIAYSERRKRITQGRSTKTREVRKRLKNLCEKERKLDVLRKAARFIEALAVENRAVVAAGNINESAKKRMEENAGNRLRHRIHQWSVKKLVELLDEKPIHVVKVSERGTSSRDPFTGKTIKKFEPLVIRTAVKGLKRVKVLKIVLRIAKVSGRVLERDVVGAVNIGLKYLNSDGSLMTLGSTGAHGVWVKLMIPHRGPTPLTGLQIFTNTVKYR

SEQ ID NO: 41408 - protein, 384 aa, Glycomyces sp.
VHLRYRFRVYPTVPQRSALARTFGCVRTVFNDAVAARKAAHREGLAYPSTAVLDKLLITEAKRTPERAWLAEVSTVPLQQALRDCHAAWRNFFDSVSGKRAGGRVGPPRFKRRSHTQAARYTRRGFSVKANGRLYVAKVGDLRVAWSRELSADPSSVTIIKTATGKYYASFVVAVDDGADLLEPVADPDTETGIDLGLKAFAVLRGGKTIENPKFFAQMERRLKKAQRALSRKQRGSANRVGARLKVAKIHERIRNRRDDWLHKQVAALVGENQALYVEDLCVQGLSRGRAAKSIQDAALGRFLTLLESKAARAGRTFAKVDRLFPSTRLCSACGALTGPKGLEGLGVRVWECGCGAVHDRDGNAEINIRREGKRLVAAGLADT

SEQ ID NO: 41409 - protein, 400 aa, Bacillus sp.
MFYNKGSYFPKEVYILNRHKAYKFRIYPTNEQAVLINKTIGCTRFVFNHFLGKQKEKDAYWYIVELMVQNGQLPTNNWKGSFFNKNESIKAVKELKQHYSFLKEVDSIALQKSVENLNDAYTRYYKKQNGSPRFKSKKNPVQSYTTKYTNGNIAIAGNKVKLPKLGWVRFAKSREVEGKILNATIRRNTLDKYFVSIVAEVNIKHLPKTQKEVGIDLGLKDFAVFSHKEKIENRHFLRNMEQKLIKEQRTLSRRIEGSSKWQQQKVKVARLHEKISNRRKDYLHNTSTQLVNNHDLIVIEDLQVANMLKNHKLAKAISDVSWAEFRTMLKYKCNWYGKQLVVVPKNFPSSQLCSCCGYQHKEVKNLQVRQWVCPSCHAQHDRDHNASINLLAEGKSLLTA

SEQ ID NO: 41410 - protein, 217 aa, unknown
  TnpB Polypeptide
MTVSVECGHWFVSVVTEMDFANDGPRRPGEVGIDLGIAQTVTLSDGTVFQLDVESIKKHEKQIAVLQRQLCRNKEARQKLAKLGKANPFDKREPSRKRRRLKAKIQNHHRCIRNIRRDFMLKTAHTIAQNYGGVAMEDLKLKNMTKSAKGTVEEPGKNVSQKTGLNRSLARVAPYAMRMAIHWAVFKANGRLILVDPKYTSQTCPICGCTSSSNRPS

SEQ ID NO: 41411 - protein, 685 aa, Bacillus sp.
LCFIETTLNDEGNVVQTSSTDRLVFGEIKHLHTERIQGIADTLKGTKASFVLSNHIVQDMWHKYLFIILSEKTPRLKRESGRRGKNRYFFVFSNISIETYVRIWYIFHIPNTKGVCSMKKAYFSNRIYKSGLHPKYVEAIGYTLFLWNRAKHFAFQTQVLEKRSGISKRSQSVHMTIKSRFSLNDYYANSAVQEANALLSSQTELQKLYIENKKEQIHAVKKKIKQTKSNLTVLRKIKQSFIKGKPKFNKTSKEQQMGRYFVVQFKNRTDLYYHAYQFEHTYIDPEIKHLQSKLRKLRFRFDRLQKQLDSLTNKVSSAVFGSKKLFQAQHTVEKYKEDHQLWKHDFTQARYQNMLISGRKDARSGNFVFTYNPDTQFLRFITPNGITIEISHLTFPYGQDQVNHAVQTQGDCTNKKKAGKPIGWAIEDHGAYYIFKCVIDGDENPNQNFSKSGGVIGVDCNVDHFAWANINKKGQLIKIGTFSFDLEGKTSGQITKIIESETIALVDLAVKTKKPLVVETLKLTKAKVKNPYGNKKANRIISMFAYRKMILAIQSRAKKMGVAVFEVNPAYTSQMGKMKYMKRFGISIHQAASYVIARRAMGFKEKLPPVLHSLLPEKMVGLHHWAQWKYWSRILSDLRVHAFYQMEFSNDDKIRSINELFPPGALTDWEEKGLSQFENRRIILC

SEQ ID NO: 41412 - protein, 271 aa, Ruminococcus sp.
  misc_feature (254)..(257): Xaa can be any naturally occurring amino acid
MLNDKIREYKKTKKLLKNTPAMYKKEYSFLKEVDSLALANVQLHLEKAYKNFFRDPKVGFPRFKSKHHSKNSYTTNVVNGNILVEDKRIRLPKLKWISMKKHREPAENCCLKSVTVSMEPSGKYFASLLYEGYSCENQAADEDYSNAKILGIDYAMQGMAVFSEEIELEKAGFFRRNEKRLAREQRKLSRCVKESRNYVRQKKKVARCHEKIRNQRKDYLHKLSRRITDQYDIVAVEDIDMKAMGQCLHFGKSXXXXSNGPVPAFWKKCTG

SEQ ID NO: 41413 - protein, 450 aa, Ruminococcus sp.
MSYQGEIKMQIISSYGVELRKQNIPIRQTLEIYRSAVSYLIGIYVQVWEELAEIPDAKRRFNAAEHLVHTTKKNHACFDFDIRFPKMPSYLRRSAIRHALGTVSSYKTRLDLWEKTDGKSGKPRFVYENHAMPVFYRDVMYREGAEGKDEAYLKLYDGHDWKWFCIRLEHTDMEYLRKYWSGKKASAPTLEKRHQKYFLRFSYTEEVTLTKTPVKEQIICSVDLGINTDAVSTIMRADGTVLGRKFIDHPSEKDRMYRTLGRIRKFQREHGSAQTQGRWAYTKRLNTELGKKTAGAIVRYAEENHADVIVFEYLEMQGKISGKKKQKLHLWRKRDIQKCCEHQAHRKGMRVSRICAWNTSRLAYDGSGAVTRDWKNHSLCTFQTGKRYNCDLSASYNIGARYFIRELLKPLPATERSLLEAKVPPVKRRTSCVYADLRKLHSEMERLKAA

SEQ ID NO: 41414 - protein, 371 aa, unknown
  TnpB Polypeptide
MILAKKVRLYPSEIQEQKLWQSVGTARFIYNWTLSRQEENYKNGGKFISDNELRKEITKLKKDELSWLNKVSNNVAKQAVKDGCDAYKRFFKGLSDKPRFKSRRKSRKSFYNDNWKLKVKEGKLVNIEKVGWIKTNEQIPIGVKYSNPRISYDNKYWYISIGIEQEEIQEELTDVSLGIDLGLKELAICSNGKVYKNINKSYVVRKIEKRLKRLQKQVSRKYEQNKKGKEYVKTKNIIKLEKQIQQVYRRLANIRSNYLHKTTTSIVKTKPYRVVIEDLNVKGMMKNKHLSDAIRKQGFYEFKRQLEYKCKFRGIQLVVADRFYPSSKTCSQCGEVKKDLKLKDRVYKCSCGLSIDRDLNASINLSRYKLA

SEQ ID NO: 41415 - protein, 511 aa, unknown
  TnpB Polypeptide
MEEASDGMTTVHTRLRLDEETARLLDDYALRFGRDLRRLHALLGQGVSLKDAKKQFVREGLTARQFNGIAATLKGMKESRAKSYQLEIKSKAPRARAIEKKLALDASRGGYSPRVRHQKKRVVGRLRDFLKHAPDREPRLIFGGKQLWHAQHHLKENGFATHDEWRNAWRESRSGEFFLIGSKDESSGNQSCRVDLHHETLTVRLPDALGGLRVIPGVRFPYGKEVLEQALQRQIAISYRFVRKKKGWYVFASTKARRGERLTDRSRGVLGVDLGPGGMAAVETDRIGNPIARKTYPLALYHKTSSQARALIGDVAAEIGDWAKRCGKPLAIEKLDFEEKKGLLRERGKGYARMLSSFAYRTMAKALESRCAREGVEVIRLHPAHTSTIGIVKFAAMYGLSGDEAAALALARRAQDLKESLPAGTAPGRPEDRSGHVWNHWKRLGKALRHLGRHAFLAARRRSGRAREYPALSARTSPAQRRRHARGHPLDHRVGIPEPIPGSTVRPGCME

SEQ ID NO: 41416 - protein, 395 aa, Streptomyces sp.
MGGVKIVVQVKLTPTPDQASALSATLDAVNDAANWLSLRAQGKEDERDRTRRALQAVAYRELKDRGLSAQPALHVIRKVADAYTTRRANLKAGNYGKQDSKRYQRIANTPIRFRPNASQAYDDRCLSWRYDQQTVSIWTIKGRIRGIGFACSPQALKTLSEYRQGESDLVHRDRTWYLIATCEVPAEPLNTEPDGFLGVDLGIANIATTSDQDEPSAGEKLTRYRRRQLRIRAQLQARGTKSAKRKLKQRARREARHATNVNHVISKRIVAEAERTGRGIGLEDLTGIRERVRLKKPQRVALHSWAFAQLAALVLYKAERAGVPVVQVDPAYTSQMCSWCGHCEKANRRTQELFACRSCGVVAHADWNAARNIGTAPKSSGLKSTSLMRRTLLVL

SEQ ID NO: 41417 - protein, 426 aa, Succinatimonas sp.
MKEGCFIRAYKYWIVPETAQSEPFLKGVANAFGQTRFVYNKLKDYVDKKLDNREKLPSKTDLNNYVNRKLKKQHPFLRGSVDKFCFTHAAYQLHDAYSAFLEGKRGQPHFRKKFDSVQSFTTNFTNNNIKVDEENGIVELPYFNKRKGCPVKAVIHRSIQGRIIGAQVVRHATGDYYVVIICEVKIDELPENEKAVGLDLGIKDSVVCSDGTVINSIRALYQSEKSVKRTQKSLSRKYEAAKKRTPEGCRVQLSKNYLKDKAKLARKHKRVRNQRYDLAQKTSNKIVNENQIIIIEDLHVKGMLKNHHLAKAIADAGFYQLRRCIEYKAYALGRILVRVDRWLPSSQLCSHCWYQNKEVKNLSIRVWDCPNCHTVHHRDVNAAKVIKAAGLEMLSKGYYHSTSCRNAAKLSVWRGRYSQTNLTSPQ

SEQ ID NO: 41418 - protein, 475 aa, unknown
  TnpB Polypeptide
MLLAHRIRIEATPAQRDYFARAAGTARKVWNWALAQWHGQVELGQWPQAKTLKKAFNAIKYVHPDWLDAQGSPWLKTIHRDAHAQPFAHLERAWTRYYKQRKAGVQAFPPVFKKKGRCRDCFYVANDKFRLEGRYAVLPKIGTVVLAESLRLTGKIMGACVSREANHWYLAVQVDLPEQESLRPRSGDDVIGVDLGISAAAVLSSGEKIASPRPLRKAQRRLRIRSRRHARKLKAAKRAVGIQGAIPKGVRLPVSHNRKKAAQALARLHARIAHIRADFTHKLTTRLCRENQAVAIEDLNVRGMLANHRLARAIADVGFYEVRRQLQYKAQRYRTLLVLADRWYPSSKLCAVCGAHNASLTLNERDWHCQCGAHHDRDMNAAINLQRLATDALAAIKALRKSRLSDTRTVSRTARGRKRTLNTFVHVFDSRLRLAGQEARQYRYSVAHRRRTRAGGYDVLEQRAKRTGAAWAPVS

SEQ ID NO: 41419 - protein, 501 aa, Acidithrix sp.
MSEPHSMVSIMKRTVRLATLPLNKNKYDETRSVIGHYSDAKRVFVAHLRQTSLWRLLDRSKSFRDYAKAQGLYPEGINVHLVDQAAFDAVDTCIRHIESCFVRANVKARVWRRFTDEDERHYAYACLTRYSAIGQIMGGGVPEISTVTTSPETGTKIASYLHRVIRDALDGSWPTVIKSHSMSLDSTLYSVVDNDTAKGKTRRYVKVVSSTRNKRISLPLSGISRVSGNVRVVLDEENKRAFIHVSYDVAALAKATGPAVSLDWGVTEVCTDDSGVHHGDEYGRALRSMTKRRHKTGKARNKLHALSKRDAGSRRTKHISRNNLGTKKQKARLRRAKAQLQTISGAAIKEVVYGEGNRTRANGRAPQHPSQRPKEIITEDLSHLGGKAKSKKISRLCSSWARDENQERIMVHAHVGGSGIKTVNAAYTSQTCPNPTCGHVSFDNRSGDVFHCRNPYWDCNWQGDADHVASMNIKSRIQDHQIDRFTPYTEVRKILDARFLR

SEQ ID NO: 41420 - protein, 344 aa, unknown
  TnpB Polypeptide
MLLTFKIKIPDHLVTSLENLYPMAKKCVDRMIENRDLKSSFYYKEIPCALSKSLISKYQRNKKLKKVKNLVIPICGDKGRQVKIVENGIRVPSIFKKEIIPITFPKPVVGFIRQVEFFKKKNIWFMSYSYSTPVEKEIEIKGVIGVDRNSKENVVAVSNLKTGEVLRLGPDCSTISYQFRKKRAKLQKEKKYEALKKLSGKQKRRTKDINHKVSRAVVNYACNTSSAIVLEDLGEINKGKIKNKVQKSQWSFYQLLIFIKYKAVLAGIPVYSVNPAYTSKSCSRCGSINNVNGKRFKCAECGHVDHRDSNAAFNIAYRGLKDLSLSNQKLSEGCIDATINWSLT

SEQ ID NO: 41421 - protein, 412 aa, unknown
  TnpB Polypeptide
MNGEAMSIKAYKYRIYPNQATTHKLYWVLTRCRELYNAALDKRTSAYRIAKKSISAYEQQHDLVEIKEELRPEYQEIASHVLQDVISRLNKAFDRFFDRVKKGQEPGYPRFQGRNRYTSFTYPDGAGWKLDQRTRPADKKGIVRVNLRLSKIGTVKLHLHRDMEGTIKTLTIKREGEHWYAVFTCEIGTPTTLPISCEAVGIDLGITHFAALSTGEFINNPRYFRRGHKTLAKRQAAASRKKRGSHRWKKAMQAVKKAHRKIRNQRHDFLHKQSRQLVNRYQVIVFEDLQIANLLKRPKPKQDEATGQYLPNGATAKGGLNKSISDAGWGIFVLYCTYKAAWVGRTLVKVNPKYTSQTCPRCGRMRKKTLAERWHSCECGCEMDRDTAAAKIILDVGRKHLVGGTRPTSEMA

SEQ ID NO: 41422 - protein, 419 aa, Lactobacillus sp.
MSKTMAQLPYHYGVKIRIFPSTEQKRLIKRNSDASRFIYNEMNGINRELYLLRQVKLPIKLVQQRIQTLENRIKSPATGISNIHGWLNNPDYDSDMKANTIKNYRSAWNLFRKVHRSGTPVFHKRRTEQRYQTSNHYTAKRGEPNMMNGSLRLLDCKHVRIAKLGRVRFKGMPQNLYARRDNIRIGTATISMDATGRYYLSLQLGSEQPFVKKLNAAIQSSIGIDLNTDNFLTDSTGNIVANPRYYRSIRGKLAKAQRKLSRRALRAKKEHRSLRDAKNYQKQRLVVANIQRKVANRRNNFLHLISTTLIKNHDLVVAEELRSKNLLRNHALAMSIADVGWRTFLEMLSYKANLYDRQFVTVSPRNTTQTCYACSFVMGTRNTSKLTLADREWTCPNCGIHHIRDLNAAQNTLAKGLAK

SEQ ID NO: 41423 - protein, 537 aa, unknown
  TnpB Polypeptide
VNKEVLKMPTEKKIDSNFVTVECLLAFDKDEDKGQVLTLMRKFSSMVRFAYKRLMVGAERKELKRLLSRKYGINTRYSDDAILLAQQTLESCIEREQNPKKLVFGSRKMFEQLNKKHLTGKRRETLRQKWEERRYGILCSRGDKSLQGNLNLRLVNLNNQWHLRINLGNGEYVWAKVTRSVKRKTDKWIGFISSIEHAEKTGDWFPYTVRIKLKNGKIYAQFSKEEKLPEVAITRDNGVIGIDINAYPFHLSLVHAAKDGNLEKYERISLDSLLEGSSDRREYLSWQVVHQVVGIAKRERKAIVVENLEKLPKGKRGDGLPKLRQRLQKWIYKALLQKIELVARRNGIQVIKVNPAYTSIIGKLKYAPLYNIDKDTAGAYVIARRGLGFKERLPKSYKKLLKDKDFLSYAIAKTEDKIAKLKQEIREEKNEYKRNRLKSILWKTRKELDTLLIPFMGSGESESAAQQTVNRQMERVRGSTQVERKSWQVLSVALAFSCLESLRDLSPLKRVILTRDWVGAAKRNGLVPPYLVRGRVY

SEQ ID NO: 41424 - protein, 380 aa, unknown
  TnpB Polypeptide
MLSGAPPHEPAKYHTYEDIRAAGLGSQTAQHVIKKVADAYRALHSNIKNGSYGKPDSKRRLKVQSKPIEFRPDAAQPYDQRNLSFALDARTISLWTLAGRLKDVPFTCSAGMLKALTEFPRGESDLLYRDGMWLLIVTVDVPEAALNDHPAGWLGVDLGIVNIATTSDGERMAGRSINRYRRRQLALRRKLQAKQTRSAKRVLKRQRRKEQRRGRDINHRISKHIVTEAERTGRGIALEDLTGIRARVRHRKPQRVMMSSWSFAQLGSFIKYKAHRAGVPVVYVDPAYTSKECADCHHIEKANRVNQALFICRDCGVVAHADRNASRNIAARAAGVRDAGRQSSVPAAGDCGQDVTGSPAASRSLVTSLVLYGREVDQGG

SEQ ID NO: 41425 - protein, 244 aa, unknown
  TnpB Polypeptide
VKSGRLQWRFSKRYESLRAELAEIFRLSAATRKREHGEVCNWLLGHAGHIIVEDNSYKAFQRGRFGKTIGRHAPAALYAQLTNKAESAGLLVEVVSPKKLKPTQHNLLTGQFVKHELWERRVRLGNDDDDRWIDRDAAACLNLLYADLEKQTYAPERIREAVLAGVTAWLDAGVVVIQAREGITEREFGRFRRRGIPSLTVQGLRQQDFVVGVTANRGQPRGEKPRLYRNPPTSVVRLFSRAEP

SEQ ID NO: 41426 - protein, 501 aa, unknown
  TnpB Polypeptide
MISLSTALKHYKRKDMQDEILLAAQDKEVVARFGDKGFGKRPDTLKYPSDILEQVKNGATSFHVSEERWKNPLQITTQMTKNEADSLRSGWDLVIDIDFEVWEITKLIANEIIKALKEHGVSSVSCKFSGNKGFHVGVPFKAFPKKVHEQEIRTLFPEATKRVVSYLADYIDSKERGFALSKKIIKSKEFNDFLKKTGKNADEFTKRICLKCGARLKSENKKQVEFICSKCGKIVNADESVKYMICDKDNVYMERIQNTMIKKCPKCEGTKFGKKVNLFIDTLLVSSRHLYRMAYSLHEKSGLASIPIDPNRVLEFDKSNAKPEVVRIPKFRFLDTRNVKKGEAGKLIIEAFDHKPQIEGEENEVEKKKYEPLGFALQEEFFPPCIKKGLKGLKDGRKRFSFLLINFLTSVGWDYEKIEKLIIEWNKKNDEPLREENLLAQVRYHKRNKKKILPPNCDNAAYYKDIEICEPDNLCSRIKNPVNYSRLKVRSVKKKSKRKKD

SEQ ID NO: 41427 - protein, 576 aa, unknown
  TnpB Polypeptide
MQDTKTKTDINLIQFHKITSRHVLVLEADISEYDKRELLHMSNIIRVAGNELVVVMKKQYEQLLRTKRYRHLQDMYAKAKKAEDKKQVSVITAEMTEMQKSYYVTWEFCRKSMIEINRKYNINSIFALSKAEDVWQAVEKCLFSDGKTIHFKKYGNYPEIRAKQANRGIVISADDDGIRLKIGKIKLRPIINKPKHTKTRKGNTVQVQESHDIFAEAEAEAVLNYLSNPDVVDKTALDLYNKKGIIMDTFRPCFASISFKEIRGKMRIYIHITIEGISKPKYNKDGTRRHQYGKGFIGCDIGPQSIAYTSKEEVGLKNLAERGASIKAREQKEARILRKMDRSRRAVNPENYNADGTIRKGKKTWKKSHRYKKLHSQYRNICRIAAENRHLAINEEVNHMRALGNVFITESKNAKKLQKRSKKTECQDKPSVVQKSDGTKQLVYKYKRKKRHGKSIKNRCPGYFQAQAKAKFEITGGIYIEVPVTYRASQYDHTCNKYIKKALSQRMYELANGTRVQRDWYSSFLMYCIGTDLQNISRYKCKRYFDELYAKYLELEQYIINNKITVMNSGIKFKAA

SEQ ID NO: 41428 - protein, 589 aa, unknown
  TnpB Polypeptide
MEITRTINADKRYYIDENLIINPGSLIDTEHRFNDMKIQMYNLLYDKKYKSAGILMKDTYSKWCKDTFKTSDYYNCAVYASASGMLSSQDELNKLYIKTKKSDIDARDTKIASTIEQLEKKQAIKDSLVTYAKIQKWKTPYPGCQTKMTGKSVTLPGSKKVDVDTYERNIEADIRRLKSRLRLLVSARNRAQNKLDCLKTHSPKRIIFGSKKMYTEKDSEDINIETWKQKFFNKRHASMSLPGRHTSKNCNFLVRRASAADFATRKELDGHKEALIITCMDGKEAVLLDFHLSRDNNLWLDALNAKPENRKPVCYNFQLKCDENGRMYFIPSVTMVLENAYCNESFENGCVSIDLNYDHVALTDIDKDGNRISGEVLRFNSENKTSEQISDEIGRIISKVGQYCEDRRKPLVMEDIDTTISKHGMKYGNAKGNRHASVFAYRKMEYCIENQSYRRSFGIIKINPAYTSQIGKILYMRRLGISIHEAASYVIGLKGMGLRDRLIPEEQMAARLTDHLKEELSNGKDVYGLMKIWKYISGKLSGIYTHSFYRSIPYEYKKGDELTKTGKPKKPKSLSVIAAEMKGWTACYY

SEQ ID NO: 41429 - protein, 315 aa, Elusimicrobia sp.
MSSSVSIIFHPGFYNFLELIKFFCSQEQTFVFHLKMSDKRFLSGINLALKKELWEDKKEKASRYDLDKRVKELKEEHEWLKVPPSQSLQQVNKDLEQAFRNFFNGAGYPRFKKKGIHDSFRIPQGIKLEGKLSKKAGQVTLPKLGTLRYTHTREIEGRIKHVTISKKYGKWYISFNCEVDIAEVEEKPVSEIGIDRGITIFAQCSDGVSIKGVSPLERNLSKLKKLQRELSRKKKYSSNWKKTRSRISKLHEHISNIRKDFLHKASTKLAKNHSLIVLEDLKTRDMSRSAKGSMDNPGKNVKVKSVLNRNILDQG

SEQ ID NO: 41430 - protein, 423 aa, unknown
  TnpB Polypeptide
MIVNKAYKIELKPNNKQRTAMASSAGCARFAYNWGLAQRIELYEKEKKSTTAINQHKDLCAIKEEQFPWMYDVSKCAPQEALRDLDKAFKNFFRGIKSGKKIGFPRFKSKHRSKSSFRISTGAIYVNKSTIKLPMIPGKLRLKEKGYIPTEGVKYNSFTVSKEVDKWFLSVQCVVELPEPGPRTGGVVGVDLGIKTLATVSDGMVYDNPKSYKKLERTMNRVQRERCRRVKGSANRKKSVQRLQKINYKIRNKRKDSLHKMTSDLVRTKPNLIVLEDLSVNNMLKNHKLAGALSDASFGEIRRQIEYKAAWYGSKVTFAGKFFPSSRLCSSCGVLKEDLTLSDRVYKCECGSIIDRDLNAALNLKRYGEFHRSLSKQKACGEERLQFSAFYGAENGALLKSRNSTTSLPDEVDLYRFERTDKP

SEQ ID NO: 41431 - protein, 439 aa, unknown
  TnpB Polypeptide
MSSYTTEKHHIKKGHSEWSACDSLCFKSKNLYNQALYRVRQHYFKTGKYIEHNKVQKEFQNEKPECYTQLKSKVAQLVLKQVDHDFNSFFGALKSWKEDPSKFFGKPKIPCYKEKDGRNAVSFNVQSMSKKSFKKGILQLSGLLLSLPIQHPIEILSKVKKGEAYKVLSIKEATITPDGDGFVVIIKHEIPDVKLAEENGVVAGADLGVNNLSAVSTNVKGATNFMINGRPLKSINQYYNKELAALRSSSDKCKTRSGKKKIQDRIRKLCRKRNYKVRDYLHKASRMLVNRLVSLGVTHLIVGKNDGWKQEADMSKRSNQNFVQIPHAKFIQMLQYKWRALGLKFSLSEESYTSKCSFLDRESLERHDKYKGRRVKRGIFKSAEGFLLNADINGSGNIVKKVVRDAWDLWSHEDLIEGFVVNPENLTVPQPRKWLRQIA

SEQ ID NO: 41432 - protein, 507 aa, unknown
  TnpB Polypeptide
VSLTLNQGKWDALREMARCYRGEKNEHLRRYSQDALFASDDSARTRRDELVQAGYVSPTKLQARMWKMALKDGYETVQRQWAALAKDIKPLIARHDQWSEAAKHYAYWLIYTPRRMAELTSGRAPRPVKFSVSECEQRQVRNYLRRVIRRKRGKRPVAKAARSMAFDADMYTPLVKNGRQYIALMSQKPKARIVVPLTGNTPIVGNIRVVLDAERRRVEIHYTSDVKVAAPLTGEPCGLDAGVTEVFTDEQSHRYNPKFGEVLASASNAVLRKGKARGKLWAIVRQAEARGDYAKAARIRKFNLGYQKMDAQRRRARAEIVRQINTAIRQVLRKRQPSTLITERLDIRGKAKSKHLARLVSQWARGTLKDRIEFLASAGGSRREQVNPAYSSQTCPVPTCGFVHADNRQGDAFQCLKCGHADDADRVAATNLKARAFDPEIRLWTPKARIKEILLARFTARLESGGNPATVSGRTPGARGDKSYRQPESETPTAIGFGRENGGAKLG

SEQ ID NO: 41433 - protein, 164 aa, unknown
  TnpB Polypeptide
MSCTSLSTRLVSENPDATFVVEDLRNIRKSAKPRSRKLRTYLNRWPYAEFLRMIEYKSPNRVVKVNPGGTSSECPVCGDRVKHPAWKISRCETCGQDYDRDRLASLAISLRGLDLCGDPFPVSAESSLPSMMDEYLYTRSIRHAPGTGRTEMAYVPNETLHNIS

SEQ ID NO: 41434 - protein, 354 aa, unknown
  TnpB Polypeptide
MPTIALTMKLHLRPSEEDALAFGVMSKAYMEACNFVAQYAFDNGCFLSVLKLHKALYQTVRSQFGLKAQLAASVFRTVVARYKAVREQLWQSPFRYKDENGEWKSITRNLNWIQHPVQFHRPQAALVELESYAHIVGIDRGIRFLSVSYDEKGKTSFVSGREVMEKRQSFAKVRAELQSKGTKSAKRALKRISGRENRWMRDVNHCLTKALVSEYGAGTLFVVEDLTGISFAEDNQRDAKGNRELHSWAFYQYEQFLSYKAQLAGAEVLKVSPKYTSQRCPKCGRILKSNRHRETHEYVCDACGYRTNDDRAGAMNIQYLGRLYAAGDPEPKFVLPKPAPAVADASGPGEAKPA

SEQ ID NO: 41435 - protein, 393 aa, unknown
  TnpB Polypeptide
MTKVNRTETIYIKADDTISKMCHIAKNLYNEANYIIRQEFIGNGNWIRYYDLWQELKISENYHSLPGNTAQQILRSIDKSWKSFFRSIKDWGKNKHKYFGMPGLPKYKDKAGETVLSFTKMQVRIKDGILRLPKKIGLEVKTRIKNAVGARIVPLGVGYNLEIMYEKTVPEAKQNGRIASIDLGVNNLITMVNNIGEQPIIVKGGIAKSMNQFFNKKKAQLQSIYDHQGYKTGYASQKLSLKRNRKINNHLHTVSRRLITWCIAHDIATIVVGRNERWKQRANMGKRSNQNFVSIPFYKLLNMLTYKGEEYGITVIPQEESYTSKCSFLDNESIKKHKTYLGKRIARGLFRTASGILLNADINGAYNIMKKAFPNAFVEGIEGLGVVPRRLSI

SEQ ID NO: 41436 - protein, 541 aa, unknown
  TnpB Polypeptide
MEKRMPMRKKNPNLKSILYTSKYFNTGKGNEVKQLLENMSNYKNLLSQYVYEKRSLLLTSDGIKTLKANYNIVKDNTILAWNIQKEHHAIVDKYENALRRHIKNFKVRIQDKMVVKRYSKDGKRHKKGDTKYFEIKFKSTRLTRLVKYLIYLDFSKDIEAQIDNNAVRDLLNYYRTKPYFNRILNLAKDMQNRLLSKIHLIEFSNDYSMRLSSQINKARVEIDNTNSLYKYWFIFKMKGNKEYRLPLEINKEYHNKDIIAKEFLLYLSTKKNKINISTTYEGKEPVFKSFNKAVGMDVNIKHNFAKLSDDKEIDYDRAFFKSIVKDINKLDKIGYQNLSEKELKKLQKLYRRLDWYVELLIHNILDYCEKNGITDLVVEDLRLKDKSNIINEEFNMKYSRLVKLLHLSNVKNMLLRQGEKRGIRVHIVHSEWTSLGCPECGNIDKNNRTTQESFKCSACGYEDNADHVGSVNVLERLNLFHWLGVQANRLYSVDKYGRIKPKHIGKYALLKILNDYYKARGFLHHPVLPSEVNNVRTVVKV

SEQ ID NO: 41437 - protein, 605 aa, Rhizobiales sp.
VLGEYAALMSRAERLLLAQLKAGRVWTGDLKVSFYKPLGISATHLDMAYRQLMAKLSSVAELAKENWKDVTGKVASKKVDITRKEKAHGKALRNLIKLVGQLHSIRVKVQQRRKLLANVNARDHADCLFALKVRLGELHAKRAAVASAREEVRDLSFALHQHKRRLSILEGRAERAKMQVADPTLCFGSKKLFRAQFDLAANGYDDHAEWLADWKFRRDAQFTLDGNSSKEGGNQFARLRRRKDGLFDLELRLPKALAHLATRIEKYAGVIIPCVDLRGLSFNHGGEAIADAIARGQPVTVKFLRDAKSWKVTVSVDHKLEWKTPDFAGGALGVDINAGHVSAVLVDPSGNPVEVYNFPCVTYGKFFDQAQDAVRKVAAKIAVLAKQLGVPVVAELLDFSEKKKTLKDAKNARYARMLSSFAYSAFWKALSSTCLRQGVALRRVNPAYTSIIGRVKFARRYGLSVHEAASVTIARRAMDYSEKLPRSSTGTVKVPTNGSGHVTLDLPVRKDASELAPKSRHVWSKWYGLNKEYQKALAALGSSRRKPRPKSGSSQLTGRSILPESSSRNLTGGAENRSMVSRNTRDVPAESRFSHAARGRRRAGN

SEQ ID NO: 41438 - protein, 425 aa, Streptomyces sp.
MFPATVGVRASKVIVMQLRYAYRLYPDTVQQAALARAFGCARVVFNDAVRAREDARRAGQRFPTAGELSRKLITEAKRTAGRSWLGEVSAVVLQQSLRDAEAAYKNFFASLNGSRKGPRLRAPRYKSRKDGRQSIRFTANARWSITGSTGQGRLSLPKIGAVKVKWSRPLPVTPSSVTVVRDAAGRFFASFVIDTDPAADAARMPQTDRTVGIDLGLTHFAVLSDGTKIDSPRFLRRAEKKLKKAQRELSRKQKGSKNRAKARLQVARAHAKVTDARREFHHQLSTQLIAENQGIAVEDLSVTGLARTRLAKSVHDAGWSSFISMLAYKAERYGRTLVKIGRFEPTSQTCHACGTVDGPKPLNVREWTCPACGTVHDRDHNAAINIETAAGLAVSACGAPVRPGAIPAQREETGSHGFPTGDRAA

SEQ ID NO: 41439 - protein, 421 aa, Mastigocoleus sp.
MQLVEKHVINRKHKFWKDCDYLSLQAKHLYNATTYTQRQYFFQTGKYYNSVDIYHATKNLESYRYLPTKVSKQIVRKVSETWKSWLSALKDFKKYPHKYLGRPRIPGYKHKERGRYVVIYPCDAISQPALKKGLIKLSPAVVLRSAFGERGSQVDICFPTKVKKVDQVRIVPKLNCYVIEVIYTYAPIELKQSPWVAGIDLGLTNLMAITSNQPGLKPLLVNGRPLKSINQFFNKKLANAQSKEAWRQIKQLNYKRDNRVNNYLHTASRRAINWCLKNNISTLIIGNNQGWKQNISIGRLNNQQFTQIPHSRLINLITYKAKLSGIEVIVTEESYTSKASAIDGDKLPKYSPDTKYKFSGKRIKRGLYQTATGKLINADTNGSMNIIRKVIPDIFKGIEGLPFIPVALDLWTPATNIEDYH

SEQ ID NO: 41440 - protein, 614 aa, Streptomyces sp.
MAAGLLAACWNAADVDALAAGVDAGGRALPTNAWMALRRLGWTISPPEGIRVNDRMMRMAQEQAGRLLRSAKWRADLTTGVLATWPADPGRRTPGEWDAVREAVPDGRHLPSSIIRCRTRQIAAFQHRRGRMPADVFELEAAPDAARMLLLSACDGQQATIVRADDPGRALLRLQLPTRPDPRSYRDWTWVACPITLPPTVPPGAVLHLPTLRTRSGRVHADLAFTHAVPKARRTGHTIALGVDWGLNTLLSAGAVRLHDDGKITAVGAGAQFRPAGVLAKQHRLRRVCEYLHAKAAHYQRLINDTDSHSLTGRHAVLAEEIRHVSDRRSHLNDALAWSAARWTVDQAITAGASVIYVEDLRSLEARGMGRSLNTRLSQQVRGQIVDRMRHLAAEAASPWSPSRPAILPGAAPAASSRCATEKPPTGPPHPAGNGPCARTPSAAGRATATWAPGWGCPLWGSIAARGLTHQTKTATDRASGAMAIRSVVDALEATAVVEPATPHTRRDRSKTGPTRRRTPRPAPRRRRAPSPTGPSGPAGKRPEGHAPPGRTRLPRAAHRHQGVTTISTPTTRRHRPQGAALGAGFHLHAHATPPRWKTIQPIPQPADHTGSLS

SEQ ID NO: 41441 - protein, 221 aa, Geobacillus sp.
LKQQTFPTPAKYKKEFPWLKEVDSLALANAQLNLQKAFQHFFSGRAGFPKFKNRKAKQSYTTNMVNGNIKLSDGYIKLPKLKWIKLKQHREIPAHHIIKACTITKTKTGKYYISILTEYEHQPAPKKVQTVVGLDFSMSTLYVDSEGKRANYPRFYRKALETLAKEQRKLSRKKEGSNRWHKRVAVESRSLYRFLSVHSAVNVDSRETGTSMRPSISNMRA

SEQ ID NO: 41442 - protein, 399 aa, Lentzea sp.
MVINVKQVVQVRLLPTPEQASALSDTLRACNTAASWLSERMYTDQVFRKFDVQKRLYTELRERFGLAAQPAIRVIGKTVDAYTTLRANLKAGNYGPPGSDRRRKVEGSPIVFRPQAAQPFDARCLSWQLGDAGRDGTVSIWTVAGRLRNMRIVGDPRHLALLRSRPAIGETDLLHRDGVWLLHAVIDSPQAARREPVNGFLGVDLGIVNIATTSDGDRTSGARLNRYRKRQLRLRKRLQAKKTSSARRLLNKRRRKEARFAADVNHRISKTIVAEAERTGRGIAVEELTGIRARVRLRKPQRATLHCWAFAQLGQFLTYKARRAGVVMVQVDPAYTSQTCHACGYVDKRNRRSQAVFHCGRCDFVGHADHNAALNIAARGVERRGEVMRPDAAPILAAS

SEQ ID NO: 41443 - protein, 397 aa, Streptomyces sp.
VTVNHVKRAFKYRFYPSDAQAAELARTFGCVRKVYNLALAARTEAWTRQERVNYNQTSAMLTAWKKTEELAYLNEVSSVPLQQTLRHLQTAFTNFFGKRARYPHFKSRRKSGKSAEYTTSGFRFRDGKLTLAKMPEPLDIVWSRPLPAQAKPSTVTVLQDAGGRWFVSLLCDDPSVTPLGASGNAVGIDVGLDHLLTLSTGEKVTNPRHECKDRVRLAKAQRNLAKKTRGSANRNKARHKVARIHARIADRRRDGLHKLTTRLVRENQTLVIEDLTVRTMVRNRTLACAISDAAWSEFRRMLEYKAAWYGREVIVVDRWFPSSRLCSACGTVQDTMPLSVRTWTCDCGTTHDRDVNAAKNLLAAGRAVAACGAGVRPQRSTPGGQSAMKQEVSRREP

SEQ ID NO: 41444 - protein, 415 aa, unknown
  TnpB Polypeptide
MVSLPSGLFCAIDVLLTYIVRENSDMSIPKIIMRLADLHKAWYNIFMIKAFKYRIYPTPAQQTALQDTLDASRWVYNQTIEVKRDFWREHKKSIGLYDTMKMLPKWKHENEWLKKAHSQVLQNASMRVDLAFKAFFRRIKKGEKPGYPRFRGYNRYNSFTFPQSGYSILNNGKLRMSKIGDVRIKLHRPIKGKIKTLTVRRNNLGYWYVSFSVVMKTKFLPASSEVVGIDVGLTHFATLSDGVQINNPRFFRKDEKVLVKAQRRLSKTENGTPERRRAWRVIQHIHQRISNRRRNFAHQFSRRIVNKYQIVVFENLDIRSMQNRNFHGMNKSIADAAWRQFMDFTAYKAEEAGRLSPRIDPRNTTQTCSGCGEIVPKGLSVRVHDCPYCGLVLDRDHNAALNILARGLACIGSNP

SEQ ID NO: 41445 - protein, 383 aa, Pseudanabaena sp.
MTQLLSVKCRLIVSKELRTEIDATLQGFADACNQILKIGQGFKQWNTTKLHHLAYKTVRASTGLGSNHVCMAIRRVVGNVKAVKQIHKFRPTSISLNERTFRYWEETQEVGITLTKRHRFKLAIGGYQIALLRGQKITSATLNKTRQGDYYINFVVEIDTPPTGKTPKVIGVDLGRRDIATTSTNKSWSGEQIQTVRDRFSRVRAGVQSKRTRNSRRLLRRLSGREQRYQKWLNHNISKELVQVAKQSGAALVFEDLTNIRQSLNEKPRNKTERRRTNNWAFHQLRIFVQYKAAIAGVSVVFVPPGYTSQTCNRCGHIHPIKGKSYRSVKKFKCGYCGFEHDADVNAAMNIAALGLSFVSQPERPGMNCQLEGQIPLLTIFQI

SEQ ID NO: 41446 - protein, 249 aa, Geitlerinema sp.
MAKHAGVARHAWNWGLATCKETLEAGGKLPSAIDLHKRLVAEVKSQNPWYYEVSKCSPQEALRHLSKAFKRVWQVKGTGFPKFKKKNVKDSFYLEGSIKISGYWVKLPRIGWVKSHEQLPPAHPKNVTVGKRAGDWYIAFKIDFEPQVTPKIRERIGVDVGIKTLATLSDGKTYPNPKAYRQAQKKLAQLQKELCRRQKGGKNREKTKLKLAKAHRRIANIRADHLHKLTTYLAKNHSEVKMGLRSLWL

SEQ ID NO: 41447 - protein, 373 aa, unknown
  TnpB Polypeptide
LKITITAKIKILPTIEQIENLKHTYNQILLANNDISKFVFNNKEFNRNNINKAMYYDLREKYQLKSQMAQSCMKTVLAKYQSAKSNGHAFSLINFKNPEYDLVWNRDYSLNLDKQIFSVNSINGRLKIPFEIKSKEQYFDGTWSFGTAKLVYKFDKFFLHIPMTKEMSDFNYATCNQVVGIDLGINFLATTYDSQGKTTFYNGKQIKNKRAQFSKIRKELQQVKTSSSRKRLKAIGSRENRWVTDINHQVTKALVDKYGNNTLFVLEDLTNVRQITERVRKRDRYISVSWAFYQFKEMLEYKASLVGAKVILVDPKYTSQTCPKCGHVESSNRDKKKHIFKCRTCGYTSNDDRIGAMNLQRKGIEYISEGLYQ

SEQ ID NO: 41448 - protein, 406 aa, Sphaerisporangium sp.
VIRAYKFLLRPTARQAQALTEMLRDHCSLYNAALQERRDAYRHVSKTTVRYGDQSAQLKEIRAFDPERQGRWSFSCQQATLRRLDKAFAAFFRRVKAGEKPGYPRFKGVGHFDTVEFPKDGDGCRWDSQPHDTQTRVRLQGVGQVRVHQHRPVRGRVKTISVKREGRQWYLILSCDDVPAEPLPATGSIVGIDMGTVHFFTDSNGEHKDNPRFVESMAEELAAAQRYLDTFPKRTRKRTKRHRAAARKVARLHGKIRRRRLDHHHKTALALVRENDAIAHERLNTAGMTKAPAPKPDPEQEGAFLSNGSAAKAGLNRSILDAGWGLFLQILANKAESAGRRVIPVDARNTSRTCPPSAGGCGHVAKENRVTQAKFECVKCGFVENADRVGALNVLNRAGLVLCAAA

SEQ ID NO: 41449 - protein, 294 aa, unknown
  TnpB Polypeptide
MVKAIKVMLIPNNVQKTKMFQYAGASRFAYNWALAREIENYEKGGKFISDAELRKEFTKLRHSDEYAWLLSISNNVTKQAIKDACTAYKNFFRGLQKFPRFKSKKRSMPKFYQDNVKIRFSNTHVKFEGFSSSRKANKQKMNWVRLAEHGRIPTNAKYMNPRISFDGLNWWISVCVEFPDCRETLNDDGVGIDLGIKDLAVCSDGTKYKNINKSQKVKRSEKQKRRLQRSISRSYEKNKKGESYCKTNNVIKKEKLLLKRNHRLTNIRKNYLNQTISVFPIRRSLQRCRRVSAK

SEQ ID NO: 41450 - protein, 267 aa, Lactobacillus sp.
  misc_feature (232)..(235): Xaa can be any naturally occurring amino acid
MLLSLTVKAKLKLDNATDAAKFLETGEQYRLACNHVSEYIFSNDFELNTNKIQTKLYPDLRQRFGLKSQLAISAIKTTVARYKTLQTQLRRKPMAYPTGKKDKKGKEIYLIVPRDLHWLWKPICFKRPQADLVRNRDWSIVADGEKLSINTLQGRVKARFVLKTGFEQYLDGTWEFGGAKLIKSGTNWFLHIAVTKEFSECSRTDMQHIVGLDRGIRQLVTAYDDQGKTTFXXXXATTKICGLACKGTIPEIPNDVSVKWAIKRTAG

SEQ ID NO: 41451 - protein, 364 aa, Archaeon sp.
MKAEKTIICRILEPTKRKKGLLIKELSNANGYIRGQTTDLYSATKQAMNKYIQKDELKEEHTYPLFLRNDTFRVEEAKSTKEFSYWAKIPVSGVWGGVWVPIRPHEPIKEEHEVKDSKVVWKPYGFELHLSISFDVAPQTPKNVLAVDLGERVMVAAVSTADNGNPNLLGKDVRGTRRHYAYLRKKLQGIGESRIKEVEDKESRVVEDRLHEVSKKIVDGADGEDALIVLGDLKGLGNKDTNKGARMNRIANTMPYHKLTKMITYKAKEKGIRVIQLSERLSSKTCHRCGSENTNRPTQGRFDCNTCGLRNYNADLNGAKNILYRSLAYMVGDGAVVNQPKTKASIAKSRFRYGTSPWKPLPNL

SEQ ID NO: 41452 - protein, 405 aa, Archaeon sp.
MNLSYKYRLYPSEKDKKVLEKNLDLCRQVYNHFLEKLNKKDETPSRYELQKQLPKLKKKWTELKQVHSKVLQMVLKQLYDNLKSLSEQKRNGYKVGKLRCKGEEWFKTIEYNQSGFKLKRTENRLDKLRLSKIGKIPIQLHRELEEEAKGVIIKRNNTGEWYAIFQTEQETEKQNSVNSDDVEAVGIDLGIQNFIVDSDSNRVEHPKNVEKAEEQLKKAQRNLSRKEKGSNNHKKQRKRVAKLHEQVKNRRMDFLHKLSNAYVNKYDRIVLEDLNISSMVQGKMNSKNTLDSGWRKFIQLLLYKAESAGIEVVLVDPKDTSKKCSQCGVKTNKPLWQREHSCPSCGYKTDRDYNAAQNILEKSLGEGRAKVTPVETEASTDTNFRDVSASFVIETGSPFLTSEVS

SEQ ID NO: 41453 - protein, 376 aa, unknown
  TnpB Polypeptide
MLKAFKYRLYPTKPQERDLERTLSLCRQLYNAALQERRDAYRKAGKSLSFYEQNRWLPQIRAELPEYKGVHSQVLQDVIKRVDLAFKGFFRRLKGKGKAGYPRFKGKGRYDAFTFPQAGTTGVKLQEGGKRVLIYGIGSVKVKLHRPLQGTVKTATLKREGEHWYIVFVCEVEPQPLPENQKAIGIDLGTNPHFLITSEGEMVEAPRYYQRAQEKLAGAQRKLSRKKRGSHRYRQARKRVAKLHRKIANQRRDFHHKLARRLVNNYGTIVHEDLNTIGLARSRTAKGVLDAGWAQFLAILAYKAEEAGRRVIGVDPKHTSQDCPVCGHREKRPLWVREYTCPQCGTLLHRDVAAARNILARAWTEPSGMGTAWAVP

SEQ ID NO: 41454 - protein, 311 aa, unknown
  TnpB Polypeptide
MKILKAYKYRLYPNKQQQELLSKHFGCCRYIYNYALAKKIEHYTKGKKTLSRFEIQKDLVSLKNEKETKWLKEVNSQSLQASLVNLDQAYTRFFREKNGFPKFKSKHNKQSCQFPQKNKVDFENNKLHVMKFREGIKCRFHRQFEGTIKTVTVNKTKTDKYFASILVEENIPEPKKEKPDINKAIGIDLGIKDFAVCSNGKSFENPKHLKKSICKLKKEQKKLSRKKKGSNRRNKQRKRVAKIHEKITNQRNDFLHKVSRELIDENQINTYCLETLNVKGMMKNHCLAQSIGDVGWSTFISFLMYKAEWEG

SEQ ID NO: 41455 - protein, 408 aa, unknown
  TnpB Polypeptide
VLLTFKTKINPNKEQVEIINNISNESRILYNFYLNEIKTYYETENKFISYYEQQNKLKEYKTNYITFDVKKEVLRLLHNNYKSFFELIKRNKDLKPQTPKFRGKNYFFTISFTQDFIIKGNKLIISYVNKNRLEIPLEYNEPIKNLICIRNKSKSDIKQLKIYKNKNEYFVSITYEKKEENIKENSQILSIDLGKKNLVSIYDPENKEGMIFSSKFLSMNQKYFDKRIDELKSKRDKKKKGSIRYKKLNNKINKLYLKKKTQTNLSLQKLSKDLSKQNKTILIGELTNLKKNTLNDIKKINRQMQGNWNLMTFIRLLDYKCKLKGNKVIKVNEAWTSKTCCKCGEINHDLSLNDRSYICSCGNNLDRDINGAINIYKQYMGDYNTPNDIQISYRFDWCNTNQTNKFKF

SEQ ID NO: 41456 - protein, 548 aa, unknown
  TnpB Polypeptide
MAADTKLQKFEKFWTSEHEELSKKLPTPNTSTKYVSTNNGLLNSVMRIDGHANEQTHSEHQQKKTNKPKVVKECQEIDCAELRYQKYSVCEEHFRIMSTSDSCFTIVSTKKNSGNRCNCKTKQYGLCGKHLPKEPKSKDKPKIGIYTRQIRLYPTMEQRTILKQWFGVARKVYNSTLKICQSRPKLNKSLDNLRFRIEKKLYHKDYISKVPYYIKDCAISDYIKADDNARLKYRTTKKCSQMRFRSKKQPSQSIEPKPTSTKPILNSNNRPRLLQVYTRYMPPIKTKEDIPDFSSCRIVMKYGREFYLSAQVKYELPQKNQVIDLDKTVAIDPNAKNMLAFYSTSTAGVIGENINQLLDSKNSKISRLQHFESKTPNKRIKKMLRRKIIRQYNKREGIRDEIHWKLANALLKNYDTIIIPEFQEQKKCRTLYRTTNRQMFGISHSLFRNRLSHKADIQGKRVIVMTEEYTSKTCSQCGHYNIPTDRQYYCFNCKLSIHRDVNAAKNIMMKGYIELLGKVCSQNIISDDISSKDSAMGIENRDIIDNTD

SEQ ID NO: 41457 - protein, 484 aa, unknown
  TnpB Polypeptide
MHMVMLAVEFYQLRLKVGADPSEDTVQVVNHLLGEHATAVFCHKDQVNVNLENAMPAVSYFVVFLHRPSIIQSMKRLQAYKFRIEPNGEQQRAMRRIAGSCRFVWNKALALQIANHEAGEKFINHFDMCKWLPVWKKEPDTLWLKETPSQLYQVVLKDLVRAYKNFFEKRADFPTFKKKGISSSFCFPQGCELDAGNSRIRLPKLGWIRYRKSRTVEGTIKNITVSCVAGKWYASIQTEREVTQPVHTSTSIVGLDAGVTLFATLSDGTMFEPVNAFRKNAAKLAKYQRCLSRKTKFSGNWKKQKHKISRLHQRVAHTRNDFLHKTSSIISKNHAMIVIEDLKVTNMSKSAAGTIEAPGRSVKAKSGLNKSILDQGWGEFRRQLEYKQAWRGGDVLAINPCNTSRTCPACNHVSAENRKTQSRFECVECGYAENADLNAAINILRAGHARLACQVNDAVMSSATGTHRSYLPHSGVEAVGIPCL

SEQ ID NO: 41458 - protein, 358 aa, unknown
  TnpB Polypeptide
MRLAYRYRIYPTKAQETKLEQWLGLCCELYNAGLQERRDAYRCAGKSISYAEQQNQLPETKQLRPELRDIHSQVLQDVLRRLDKAFAAFFRRVKAGEKPGYPRFRSRQRYDSLTYSQSGFALEDDKLQLSKIGRVKIKQHRPIEGRIKTLTVARTATGKWFACFSVEVATAPLAASAEAIGIDCGLEKFATLSDGTEIENPRFFRSDEAALALAQRKKRRREAARIHERIANRRRNFAHQVSRCLVITYGLIIFERLNIKGMVRNHCLAKSIQDAAWNQLIQFTAYKAESAGRRVLTVDPRHTSQRCSGCGVVVAKPLAERIHHCACGLRLDRDHNAAINILALGLQGAGSTVEAPSF

SEQ ID NO: 41459 - protein, 780 aa, unknown
  TnpB Polypeptide
LGISKNRGRPIISIVRLKCYLNVGNFRIRCPLMKSTFALRKPAVACGFARILFDPGIEMEKLNVLKPKEDTVGISSLPLFNSRERKLPTSRLPDEKSAMPASVPQVKRKIWNVNWNPCEHNSLITKACRILDQASISNGKNFCPYWTISSEEISRKLFLPTGTACADSALNLSKELFEPIKGESWFCMTREQLPSRNLSRIFSQSLQFSAAGSTVYEVTHSKESLDRLEKFQGESKSGKKYKSLKVRLFPSEKEQHDKRLLADCARQRWYYNACIDIFDWEALKAQLEEAKSQRLPCPSFSANEIRNRLAWHEYLEREEVWGNKKFILKSFAFREECQQEQIAKAKLKLEKERQQAEINAANKIKRLKEKEMMKSMSREEKYKFEVHLREERERLKMLAQEKLQESKKINGNMKKNKRDYPQAQWIESCYGQKIEGKTLERIIRGACANFASNLNSAIKNYYNGHISSFNLDFRRSKSINEFLSFDDGNYPGYIKKLSGYYGYRNNNRSLACNKRRVHLNLQEIISQHTPTAINITHDKQTKEWTLHFPVERDWFPSDDRRGENQALHTVNGEAIGLDPGMRKFLTGYSTTGEILTVGNRAYKKLTPYLNRINTLACEMAQLRKRKAQLTDKQQLLEHEKIAAAKWREKFELWKRVKDMITELHWKVATYLCRNYQYIFLENLSSKSCVKGNIAPFIKRILLQYSFHKFKQRLTYMCEKYGCKLILVAPALTTKTCSNCGTINEVAKSETYNCPNCSFSCDRDVNSAKNILIKGMTIMFR

SEQ ID NO: 41460 - protein, 424 aa, Pseudomonas sp.
MDLAMHRAERILIKPSDTNYRAVARLCREAKTVYNCASYLMRQSFFDGKLIPWATADKLLKSGFKEHPSYSANPNAMSQAIIKKLGDDWKGYFAALAEWKKTPSKFKAKPKMPGYASHSKTASMPFQHLSCVDSHIQFPKKTSIAPIRINCCENQELKAKGEDKIILEIRFVPHGSCYWLEVVYDKRSSSDDRKQDVLLDKNKHLSIDLGINNLATLVSDQPGFRPVLINGRVVKSVNHLYNRDVAKLRSKGHKKLIEAKSVKRFCWINDHFHKASRLVIQTCLDHDLGTLVIGHNPGWKQAVNIGKVNNQKFVSIPHAKLIEQIRYKAEEYGIQVVVREESYTSKASALDLDPVPNYDSKSGAKHRFSGRRVKRGLYQAASGLQLNADVNGALNILRKEIGDSFFKAVADEGLVFRPKRVTLR

SEQ ID NO: 41461 - protein, 506 aa, Pseudomonas sp.
MNQALLPYGVYQEESTPNLIRSFCFPMILDAKQVKLLHQVLDLGHEIRETVVADRIKNREENRLLRQAGGSPVYVNLTEQRRSIAALMKADARFKLIHSQVAQDQCERIDKADKHWLKSLKTGDKRAKPARHRDRKFFRSVTYPQYGNGVRLSAGKIWFSKLGTFRLHDYQKIPGIKKTVSIVWKQGKFWAVFTAQQAANKWFEPESDWQDKPTVGGDFGLKSLLTLSDELVFDPPKRLKEAFQGLRSIQKSVSRKFEARKREWVVDQALAKASGRPLTTLRDYPRSNRLREEIKRLAKAHTKVERCRGYDHAKIASILQAEYSHVALEDHGVNFMIRNSRMAKSASDRAIGSLKLRIKSTLAPERLFRVSTSDENGCGNSQTCTCGAHVPKTLNDRIHACASCGRIGDRDVVAGDRVHVRTFGRVSQGRGQRFWPVLQNTGTRGEHKSKAVKRRSGESAPNGAGFKVLDEAQTSQVSWAKEHTSGGKPTEVDKTSLVLASKTLSP

SEQ ID NO: 41462 - protein, 506 aa, Pseudomonas sp.
MNQALLPYGVAQEASTPNLIRSFCFPLILDAKQVKLLHQVLDLGHEIRELVVAERIKNRDDNRLLRQAGGSPVYVSLTDQRRSISAWMKTDARFKLIHSQVASEQCERIDKADKHWLKSLKTGDKRAKPARHRARKSFRSITYQQYGNGVRLSAGKVWFSKLGTFRLHDYRKITGTKKTVSIVWKQGKFWAVFTAQQAADKWFEPKSEWQDNPTVGGDFGLKSLLMLSDELVFDPPKRLKEAFQGLRSIQKSVSRKFEARKRAWVVDQALAKASNQPLTPLRDHPRSNRLCEDIKRLAKAHTKVERCRGYDHAKIASILQSEYSQVALEEHGVQFMIRNSRQAKPASDRAISSLKLRIKSTLAPERIFRVSTTDENGGGNSQTCTCGAPVPKTLKDRIHACASCGRIGDRDVVAGDRVHVRTFGRVTQGRGQRSWPVLKNTRKRGEHKSNAIKRWSGESALTGAGFRVLDEAQTSQVFWAKDNTSDGKPTEADKTSLVLASQTLSP

SEQ ID NO: 41463 - protein, 467 aa, Pseudomonas sp.
VKKAKTPSFVLTLPLVTKGRDVAVMRKRFEAGKRLYNAVLAEGLKRLKFMRNDTRWAALRTVEDVDTKRAGYRMLRQEYRFSEYELSSFATDLKNRLWRDHLGAHEPQLLAKRMFAALEQYSFKKRGKPRFKGRKRPLRSLEGKSAASAIRYQPETGCVRWAGLIMPVLIPTEGRDKYLDEALQKPVKFARVVWKKLGSKTRFFVQLIVEGTPPNHRKTTPGIGGLDIGPSTVASFSDVSATLRKFCPGVVPCATTKRRLQRQADRILRQANPECFDDAGQWIKGKRAEFISNRLQKLRDKIANTDRKLQARRKSEHGQLVNQLLTEANVWQLEKLSYKAFQKMYGKSVSYRAPGAFVQLLKRKAESAGGKVVELNTWKLKMSQYDHCTETYTKKPLSLRWHTLGDGSGEIQRDVYSALLACCTDGKLHKRSSIKLRLAAHEHVLRRTGLWRASESASAGALASAPA

SEQ ID NO: 41464 - protein, 212 aa, unknown
  TnpB Polypeptide
MQVYYMKNLTVKTKQKNLIMKTQRYLELIMQCMGWLCFTEDIQKENEGYFRKSEERLAREQRKLSHCVKGSNNYYRQKKRVALCHEKIRNQRKDFLHKLSHEIAEAYDVVAVEDIDMKAMSQCMHFGKSVMDNGYGKFRELLEYKLTWRGKKLVRVDRFFPSSKKCCKCGNIKKELKLSDRVYLCTCGNRIDRDLNAAINIREEARRMLLAG

SEQ ID NO: 41465 - protein, 507 aa, unknown
  TnpB Polypeptide
VPEVWTPGSGWPGGGPLQRAARSDRRGARLGDRGQGSGARSCAPVRSGRPDRCAVGGSSGIQGAHRPCATRRVRVPVPVREGVVVTVVFRRLGRIRLGVDGAPLHRTPVGCGGSVRRAYVFRLRPTARQHVALAQCLDTHRELYNAALQERRDAWSHNKTRVFYGDQSAQLTEIRAVRPDQAVWSFSSQQATLRRLTKAFDGFFRRVKRGETPGYPRFKGKARFDSVEWPKDGDGARWLPEHKRVYLQGVGQVKVHLHRRVEGRVKTIQVKRQGRRWMVVLSCDDVPARPLPATGGQAGIDVGVVTYATLSDGTAVVNPRWARSEAGRLAVAQQRLQRAQRGSNNRAARRETVAARHRRITNRRKDFHHKQARQLAARYDLLVVEDLTIANMLRRAKPKPDPDKPQQFLPNGARAKSGLNRSISDAGWGQFISILRAKAEDAGRTWIEVNPRHTSTRCECCGHAAPENRVNQAEFVCQRCGHRAPADEHAARNILRAGLALHAATAA

SEQ ID NO: 41466 - protein, 385 aa, Lactobacillus sp.
  misc_feature (306)..(380): Xaa can be any naturally occurring amino acid
MKANAIKNYKTAWKLFHQVHQAVTPKFHKRGYTQTYQTSCLYSAKVTAPTMRNGSVRLKDTHHLQLPKLGRLRFKGLPPKILVQADDIRIGTTTISMDAVGHYFVSLQMGSEHPFVSKQSVVKSKVGVDLNLDNFLTDSNGQVIANPRYYRTIRGKLAKAQRKLSRRARRAKKSQRRLSESRNYQKQRILVAKLQLKVANQRKNFLHHVSTALIKNHDLVVAEELRSKNMLRNHALAMSIADVGWRTLLAMLSYKAELYGCKFLTVNPRNTTQTCSHCGHIMTGKNKLTLADRKWTCPNCGIFHVXXXXXXXXXXXXXXXXXXXXXXXXXXXXXXXXXXXXXXXXXXXXXXXXXXXXXXXXXXXXXXXXXXXXXXXXXXXKGFGN

SEQ ID NO: 41467 - protein, 485 aa, Streptomyces sp.
VKKFRTQPGFVVQAYRFALDPNTTQERALRSHCGAARAAYNWAVGWVTASWRQRKAEETYDVPEGALTEWRPWSLPSLRKAFNEAKHTDPRFSAWWEENSKEAYCTGLANASAAFDNYAKSKSGRRRGRRVGAPRFKSKRKARLACRFTTGTIRVDADGRHVTLPRLGTIRTHEPTAKLLTRVQAGTVRILSATVRHERGRWFVSFQAEVKRDLVRVTRPDVTVGIDLGVKTLAVMADSTGEIRTVANPRHLDSALKQLRRTSRVVCRRQGPDRRTGAKPSKRWEKANAARNKVHHRVANLREDALHKLTTSITAEYGTVVVENLNVAGMLKNRRLARRIADAGFGEIRRQLDYKTRRRHATRIVVADRWYPSSKTCSGCGAVKAKLPLHMRTYTCDACGLVIDRDDNAALNLAALAAARTTGTGVAGDQDTAPAASKPRGADRKTRATRTRRKASAGRAGGATLPHQRQTETRDRTQTEALTLW

SEQ ID NO: 41468 - protein, 407 aa, unknown
  TnpB Polypeptide
MDLTEKEIIYSTDKRFDLIKELCHLSKNLYNAALYDVRQYYFETKSYRTWQSQRPIFTKNHNPDYYALQSHLAGEVLIQVGKQFISFFNNKSNKKKRIPKYKDKNGYNIVAFPKLTISKQIEFDEDKQLYTYTLCKKSYNLKIQSTKPNVKMVRFVYDEANDLIKCFKIYEVKEPKLKKDNSRYFSIDPGLNNILSIYNNIGIRPLLYNGRPIKSINQYYNKTTAKLNSELPANIKSSKRLKQLSLKRANKIDYEMHKISTHIINEAVKNNISKIFIGNNVGWKNEINMGQRNNQNFANIPHTKLFHQLLYKGLLNGIEVIFTEESYTSKASFFDKDEIPKYGESDNHNFHFSGRRIKRGLYKDSKGNIWNADLNGAANIMRKVSDKAYKGIRKTKELMKQPILVTL

SEQ ID NO: 41469 - protein, 305 aa, unknown
  TnpB Polypeptide
MKKAYLYRLYPTEEQAALLQQQLDVAREVYNACLLERREAYRMAGVTLNYYTQANQLKRIRQDCPDIAAVNFSMLQAICRRAQRAYDTFFRRVKAGQTPGFPRFKSHLRFNSVTFPSYGNGCNLRDNRLYIQGVGTLKVKLHRPVGGPIKTVTLKRVGRRWCAVLVCEVAVVPLPATGRAVGINLGLASFLMTDAGTAVEHPRPLRAAQARLRRAQRSLARKQCGSHRRAKQRRRVARLHEKVANVRRNFQHQTAHKLVQAFDFICHEDLAIRNMMRNHSEVLARTMGLGSSPQVVTWPVGACVA

SEQ ID NO: 41470 - protein, 447 aa, unknown
  TnpB Polypeptide
MQITRGYRTELDLNNEQITLCKKHAGVRRFAYNWGLTRKQEVYKQTGRSISAMELHRELNALKQTDFPWMYECSKAAPQEALRDLENAFSRFFRRCQLKRAGEWKGKVGYPKFKTKRKGLGSFRLTGAIHVYEKAIDLPRLGQLRLKECGYLPTSGVHILSATVSEEAGRWFVSIQVEEEVPDPPPATGAPLGVDLGIKAMAMGSDGTAIENPKALRSELKRLKRLHRRLSRKAKGSKNRAKARRRLARKYARIAHVRRNAQHQATSRLTRARLSPAERAARREEIASTLPEPKAKVKPRRGKRSQATQTTEAPPLAERVAKKVKQKQIKRRLRLATEADAALRPRVVVLEDLNVEGMKRNRKMALAISDVGLGEFRRQMSYKTVWQGEDYLLADRFFPSTKKCSKCGNVKEEMDLSERIYVCEQPECGLIIDRDLNAALNLAALAR

SEQ ID NO: 41471 - protein, 573 aa, unknown
  TnpB Polypeptide
MSDHLSLPIRLPDEDAARFERLATLTRRVATYVLETHWTPLHLDGIADSSHQAWKYFDEHEPFEELDLYLPSRFRRCILQKVGETLRSHADRRDAFQSIQDVLPDHKIRRIHCRRIKEQLWDDSNYLSSGYVDTLINQLNNHYDRHGTYPDTYFEMQDCPEYDSGVLPFSADDGPTSGQAVTYQYDSDSETLTLRLKTPDTLTPETRGDWSWTEYERDGYDAFHDLLTHGDLSAPAFQPSRRNTGTAYYELSFPIEVEHAESSEDADCILALDAGMRKDVTAVAVTKDGEQLSTPQFIQFTGREKMRRLHRERTRLNDRLAELRRSGSAHTDEFAHVQSEYERVNNKIQHKREQLTHDVANQVLALALTYNVDAIVHEDLRSLSPPRGEGMLSWELSSWARRDIIENIEYRAEYAGIGVERVYPQGTSRSCPRCGSTGHTCKSPDHHEEVWWGGHFRCDNSRCGFEGDRDYIGALNVARVFFSDGNTLDHGFTSSYMGDCEIVLAGRSAGARLTFGAGFVAYEPEQARATAGGGSAVIAPAVSLPESNADGNNGRGPAVQQCTRFLRCTTENY

SEQ ID NO: 41472 - protein, 598 aa, unknown
  TnpB Polypeptide
VSYSRKVVISVKVPILWESMSDRDRTRLNRITGRDTRVIRAFLGVIARHEKQLLVGKRRRRINGGKLEKLTLTAERSKDSSKNRLSVPHDFKRRFPNTSVNELQECRQVAVAMWNSYLALEGQQPLPARGYRSRKLPRYVFGRRFKIHYTPEQPIKHWLDLMDSLDSARTDYWFHGRLLIPLSPSSYHLNRMKEGRVTALRLFKDARKRWWAVFSVRNTVPAIDGDGRPPAVMGIDLGIDKAVCSVVLTKQRVRYVRYFTQPEKVKRIKKYDEMVDSLQREMNNKLNNGKPADDVILRLRELSGRRVKISKDHDGVLVKQLSDHILELSKKYDLYVAIGKLTGIRDRAGKKSGKRKRFRKMMARWSFARVSNALKHSLAQHGWKVSGRDSRIIPVREFWTSMICHKCGHRGIRPKQSLFICHTCGYRANADKNGAINIARCLIMLIPRLRDENQGLGRWLLPRERERSTLKARRSSCSKGKSSRSQRLSDSKGPSVAECRTQTSLEEFADTSDPAMVRIAEEPSAAIDARKATDSLGKMVQRTEAQSGLRNNVPMMSSKARVAKPGWCPARAGDSSHGKGGTRELRVTEGVHSTLEAT

SEQ ID NO: 41473 - protein, 397 aa, unknown
  TnpB Polypeptide
MKKNKAYKYRLYPNKEQTVLIEKTIGCTRFIYNKMLSDKINHYKDTKLMLKNYPSQYKNEFEFLKEIDSLALANAQLNLNSAYTNFFTKAKKQKPTLRKSIKKKLKEGTLTREIRITDLENHPQFKSKKYSSWSYTTNNQKGTIQIKDNKVKVPKIGFIKLKLHRNILEDSVIKGATVSKTKTNKYYISILVEYENQVLQKDIEKVIGLDFSMKELYVDSNGNSANFPRFYRKAQEKLAKEQRILSHRKYESNRYEKQKLKVAKVHERIANQRKDFLHKESKKLSENFDLVCIEDLNMKAMSQCLNFGKSVSDNGWGFFTTILKYKLEDQGKYLYKIDKWFPSSKMCHVCGKINEKLTLEDREWDCECKAHLVRDHNAAINIRTVGMTGIAQRYLQH

SEQ ID NO: 41474 - protein, 466 aa, Nonomuraea sp.
MYWRRTVSGAPPIAIRPTPILRHEHHMGMEVCGGRYDQPVESGRRARAQVARLDLSPAQVAVLDGQAHAARALWNLLHEYFTFRQGRFASLKECDEAIRAARKEIDWLGRLPAQAAQAVLKTYRQAWANFFNPGHPAGRPAFKARLRSRMAVDVPQARDLQIKRVNRRWGAVNLPKAGRARFRWTKDLPGVTLGGPAGRITGARLVKDAFGWSIVFRTDTVVASPARHAGPEVGIDRGVKVALALSDGTSREHGPWLSAGERQRLRRLEKKAARQKEARHKAAGVTERSRAKRLIRTYDQIRRLRAIAKRRAVDWQHQTTTELARTFSVIKVEDLRITNMIRSAKGTVEVPGKNVAAKAGLNRAISEQAWGRTVTLLEYKSWDRGGRVVKVCAPGTSQTCHRCGRREAANRETRAVFACKNPACGWIGHADTNAAINIANADGTPVSGRGDLGATRSAKRQPPRAA

SEQ ID NO: 41475 - protein, 403 aa, unknown
  TnpB Polypeptide
MLFFVKIILYICAMFKAFKYRIYPTEPQKELIAKHIGSSRFVFNLALETKNAAYIGNKHNYSPFDLIKQLPELKKECPWLKEVNSQSLQQAIQNMDIAFKKFFKGAGFPKFKSKRGRQSFSIPQNVIVEDDLLIIPKFKEGINMSLHRPTKGIIKSATISVTPTGKYFASILCDTKEKLPAKSPIKENTTIGIDLGIKDFAITSEGEVFKNPKHLRKAQSKLKYVQRKYSKYKGKRTKNKLTKIHEKIKNKRLNFLHKVSTKLIRENQTICLETLVVKNMVKNHNLAQAIQDASWSTFVSMLQYKADWYGKNILRIGQFAPSSKTCSNCGIVNKELQLKVREWTCSSCSTTLDRDVNAACNIKSFALKNYLSGEHRLKNQDELPTLVGVLTPEANPIAYGVGG

SEQ ID NO: 41476 - protein, 513 aa, unknown
  TnpB Polypeptide
MSSVTRTVPLRPFVCREKKTGGGLDLHTILEELREDAKLCATESFKHITVENLEKLSEHDKLKPAVAGRRMGVQFSKPGRGTGRSRFERMICEYAVSQLRSWRERRKAHTRDVNNYVSAGYRFTNNSNKPNFLKPRLALSATDKNYHVIRFNGSIAELDMVVSGRWVTFTFASPQRFREPGVRIIAPTISIDDKNRVIFNWHIKLPVERTEFSDQYVVGVDVGITNHTTAAVRDIETGKVVEASFMNRRVRSLENKIRRAKTQIAVLKRHGRDEEAEPHRAALSNRRKELSILIGQEVADLSYQYGNALVAVEDLSHITNTMKYGRWVSGKIVDRITDMVESNGGRVMTVPAAYTSKKCHQCGENMDMNDYHHPVCVSCHVAWDRDENAAANIAGKLKEKHKKSCVTRKKHASKKRHKNSRGSTKPLKHPLRKMGPTPKAPQNQSKQDNTHHVHHKHTVIKKREEVFPVLCAAGQSPLCGVTVPAVVSSCRVSDKKPHDYPNGKHRLNDLCAS

SEQ ID NO: 41477 - protein, 410 aa, Haloferax sp.
MEYSHRYHAYPTQEVAAELEYHLNVHRQLYNHVRWDYENSPEDDKPSEYDQNNRLPEWKRKWSVFSELHSKAAQETVARFHRNLSNLRKKKEKGYNVGRLKRQAPAEYRSVTYNQSGFDLDEKRGRDKYAYVRFSKIGWVKIRYHRLIPDHATIKEVTFKKETTGEWFVSFGLETDESDLPEKPDEDSLNASNSVGIDLGILNYIHTSDGKTVDWLNLEDDYERLQREQRKLSRKEKGSNNYEKQRVKVAKVKRRIRRNVLDYQHKITTWLVKEYDAVFVEDLNVQSMLQGDGNARNKQDVAWRQFITLLEYKADLYGTHVVQVEARGTTKECASCGVETAKPIWVREHSCPSCGFKTDRDANAAMNVLKRGFSELGLGWPEDTPVETALPTDTTSVSAKRVVETGSLGA

SEQ ID NO: 41478 - protein, 393 aa, Halorientalis sp.
MHREVTTTVRVKLHSLTGRKARLVEREYGAFQDAVHGDDANPYSATMQQAGKVRSNKNPREDTEQPVVLRNDCITIEHDEATVLSSWWFKLPVYNPEKEKGDSIWVPVHVPEKDTHLLEDEYICDSELISRDGEWYVHLVCKRSVAVADEYDDVLAVDMGAKWIAVSTFLSDRDTTFHGAEVRRVREHYKQLRKSIGKAKVRSGAQVIERLGDKESRTVEHKLHQVANDLIARARERNAVIVFGDMTGLRFDTGEGRYVNDKTHKMPYAKLANFLTYKAHLDGRECTPVAEYDSSVTCWRCGSQNTRRDVQGRLECHDCGLDDNADKNGALNIGQRAVGKDIRSPLSTAGAVVAQPETQVVLTGTNGEMEPANSPDNVGLTLSEGSPRLQSWE

SEQ ID NO: 41479 - protein, 396 aa, unknown
  TnpB Polypeptide
MEHLTLQTKKNPEPAYDFNQCAYKMPAYLRRTAIQEALGAYSSYASNHENWVNNGKQGKEPKLTYERNAMPTLYKGNMFIRTGSDTARVKVYHRKDWVWLDVLLCKQDVKYIEKHCLSDPNTVQKNPKLKKCGKCWYLVFPFAKAVTFEDVAIEDRTICAIDLGINQNAVCSIMQSDGTVVARKFINFATEKDHLYKALGRQKKAQQHGNRKTPVLWKRVNDINQDISRKTAKGIMDFAILYNVDVIVFEYLDTNGKKRGSKKQRLQLWRKREIQRIVEHHAHKCGIRVSRICAWGKRLPWHSMVSGKWNVARICRTEKKKYNYSICVFPNGKIYHCDLNASYNIGARYFIRELLKSESVMTRLPAEANDLRYGTGTTRTLSTLIRLNADLCATCA

SEQ ID NO: 41480 - protein, 326 aa, unknown
  TnpB Polypeptide
LQEVRCIQKQEHPEWALDCPQRIREHAMSEACEAVKNAKLKCKTTGKYQEIHFRKRKDNIQRFGFDVQSLKDKSIFSMLKYKVTFHISEKENSELEGTKVVCEDHRWFLIIPQKRHIQRPENQRLPFVALDPGVRTFMSFYSPYVFGKIGDGDFKRIYRLCLGLDRLYSKMATDPSKKRKFKLAAERQRWKIFDLIDDLHKKTAHFLVTRFSEIVIPTFEASQMVTKLRSKTARSMLTFAHYRFKQFLIAKAEEYSCKVRIVSEAYTSKTCSYCGRIQNIGSKKRFKCSCGVNADRDLQGARGIYLRALGALPWVEHLFYPAIVNQ

SEQ ID NO: 41481 - protein, 383 aa, Sulfurovum sp.
MLKAVKVRLYPNAEQKQCIASQIGGARYVYNRALTLRKYVYTKFGIKIGKFALINHITKLKKRANTSWLKEIDSQAIQQSIANMDKAYQHFFKGGGYPKFKSRHHSRQSFQYPQRVKIENNKVYLPKVGWVKCKGLRKEFVGKIKTVTVSHEAYQYHASILVDTEEKKTVISHNSKSVGIDVGVALVVADSNGKKVKPLDLMRELKKLRTKAQQLSRKKKGSNNRAKAKAKLAKQNLRIANMRKNFLHKLSKSYSQNQTVVVEDLKIKNMTKATKGTIEKPSKNASAKRGLNRVITQQSWGLFFELLEYKLQHRGGQLIKVDPKHTSQTCNECGHVSKENRQSQSKFVCTSCGHSANADTNAAKNILVRGIHGNNASHQTRVA

SEQ ID NO: 41482 - protein, 478 aa, unknown
  TnpB Polypeptide
MLVHQAFRFELDPNDRSRSALARQAGAARYAFNWGLAVVQDRLDARRVLTALAVRQGASAAEAKAWAAGVAGPIPWSLPALRREWNQAKYQVAPWWAENSKEAYNAGLDSLARALKGFFDSRSGARRGGRVGWPNRKRRHRARRSFRVTTGSFGVIDGRHIRLPKIGVIRTKEPTATLVARLEAGTARVLSVTVSEQAGRWYASFTYQVERQQTAVPSGPPAGVDVGVKHLAVLSTGEQVPNPKHLLKWQRRQSCLQAELTRRRGPGQGKPPSKRWRRTRQRLARTHRKVAAARSDGIRKLTTRLARTHSVVVVEDLNVTGMTATAKGSGRRRAKAGLNRAILDTAPGELRRQLAYKTTWYGSALVVADRWYPSSKTCSRCKTVKPKLSLSERTYRCDICGLVIDRDNNAALNLASLVQATTQVPPVEAGTGRDIIPAYAQEEERYMATARCSSANCEDSTGHAPGQTATAAEQSTAA

SEQ ID NO: 41483 - protein, 210 aa, Oscillatoriales sp.
  misc_feature (5)..(6): Xaa can be any naturally occurring amino acid
LAVRXXIRTANFVRNKALRRWMDNRGVSQNDLQKLCVTLAKEYDWAGKLNSQARQSSADRAWNGISRFYKNCRDGKPGKKGYPKFKKRGRSVEYKQTGWKLDRDRKRITFTDGFKSGTFKLLGTRDLNFYQPGKIKRVRVVKRADGFYCQFLIDVERSEPQFPTGKAVGIDLGLEFFYTDSEGNHIENPRFLRKAEKSLFYFSRLFKMWN

SEQ ID NO: 41484 - protein, 417 aa, unknown
  TnpB Polypeptide
MWIRKGFSFKLTPDGAQARKMSRFAGCTRFVYNKGIAWNEEQRNADSNFRISYKALSAQLPVWKENHPWLAETYSQCLQQAMKDLSQGFQRFFAGDAGFPKFHKKFASTDSFRFPQNFKINEGNKQILLPGIGWVKYRRSRFIEGKPKNVTVSRRADGWYVSIQTGFECVPPENQGDAVGLDMGVKRFCTLSDGTFEAPCNALKKNLKKLCFEQKRLARMTKFGKNWRKQKEGIAKLHQHIANIRKDFLEKLSLKFCKNHAVIVREDLKIKNMTASAKGTAEEPGAHVKQKSGLNRAILDQGWGLFFAKLDWKAQLNGGTVIKVPAAYTSQTCPVCGHCEAKNRPTQAKFKCLCCGHTDNADHVAALNILARGLNNRVSACGEFGGNARAQVNSGRLFETGSGQQQEPIEEITRLAP

SEQ ID NO: 41485 - protein, 397 aa, unknown
  TnpB Polypeptide
MSRYRLLPSPIQEAVLRGHCAHARYVWNLAVEQHQHWHPGRASAPSYQEQCRQLTQARARYAWLAAGSVTVQQQALRDFSQAMAAFFDPGNPAGRPSWRKAGRDEGFRIVGRGTQWDVRRVSRKVGQVRVPKAGWVRFRWSRPVPAAVVSYRVTMDRAGRWHVAFAAIPEPIPAPGNGEAVGVDRGVSVSAALSTGELLHAPGIIVRERQRLRRLERKLARARRGSERRARLKRAIARLHARETDRRKDWAEKASTDLARRFDLIRVENLKVSKMTRSAKGTQADPGRNVRAKAGLNRGILRSGWGLLARRLEEKAPGRVEKVEPAFTSQRCSACGQVDPKARKSQAAFQCTACGYACHADVNAAINIAAGHAVTARGGNGAARPTNREPQLLASRT

SEQ ID NO: 41486 - protein, 417 aa, Streptomyces sp.
VKLVVQVRLLPTPAQATAMEATLRVCNEAATWASEVAFEYGEFKNFALRKLTYAQVKSRWSLGAQAAQHVIKKTCDAYATLRANLKAGRLGRPGSARHRRATREPVVFRPDGAQPFDDRMLSWRIPERTVSVWTTGGRMKNVVFTASPEQLATLALYRKGESDLIRRDGMWFLNATCEVPEAPLNMDPVDFLGIDLGIVNIATTSDGEIMAGRALNRIRARERGLRTKLQKKNTPSARRRLKKRRRKEARRARDINHKIAKHVVAEAERTGRGIALEELTGIRERVRLRKPQRATHSSWAFAQLGQFIAYKARRAGVPVVYVDPAYTSRTCAECGHIDKANRVSQSRFACRSCGFVDHADRNGSRNIRARAWELRRRGALSTAPAPTPLWRDGAGRKPDITASDAPLCKPGLSVPGR

SEQ ID NO: 41487 - protein, 221 aa, unknown
  TnpB Polypeptide
MRKIKGDGCYVSLLYELLDIKYHILPRKIVGLDLGIKKLITLSDGIQIDNNKYILKYEKRIKRLQRELSRKVKKSRNYYKAKQKLAVLYTKLKNARNYYLHKITKQITEEFDIIVTEKLQTKSMLEKKIMSKNIADASFYEIIRQLQYKSKFKGKYFYQIDTYYPSSQTCSVCSNIDKKYKNLNERNYYCHNCRTELDRDLNASINIMFEGLKLHMKYNYS

SEQ ID NO: 41488 - protein, 497 aa, unknown
  TnpB Polypeptide
MKKKTNWKSFNIKMPVELIPIYDFLQNELNFILSNDETRTILNKIDLSQHRGNVWRELRDNLKWRIKDWTLHNKTWHSYILFENIRRELQSKKEAVIIYNELVENNYIIDETLFDNLHKLNLYPTRSQISNIKRADKVPELAYNATFNLDYSISEKQFFRLINNNICKIKINKKDWIDYEIIFPSSIDSRFTGRIAKPRFIKRKRDNQYIGICSYEYKIEESDLEDKILGVDIGKIKLFSSVVMSKDGTFSNEYINTRRSQKIEDKINRLYENKQILFYKIKAYENLKLTDTQKYNTWKTLYSNIRNKITNSKDYQSKLISNEIVQLALQNKCKTIHIENLKWLNSQGGKWNHSQIHSKIIEKASMYGIKVKKVSAYNSSKEHPITKEIGEVKDRIVEFTNEKIDRDLLASINLAIRSTNIKLKKPLPKKVKTKRVKPKSNKKEIKEKVKKLKGNTQIVVFLTNELNSTVQVELGVRPLNEVSVCNSLLGYYQKCQL

SEQ ID NO: 41489 - protein, 290 aa, Ktedonobacter sp.
MAKATKTIRQALQYPPQSAHSFAEHQALYNRVVAFYFEVIQAHEGILSLKNKEALTALEKLTHATEKGPHPILPLSDIAPDIPAMFRRAAINAALGSARAFFSSLKTWRARKEKHEAKPCKKGKKKQPFRERPPVPPRTWNKSVSFYAGLWKERSQHSIMLRVWTGSCWSWLKIGALSRDLPEGYALGSPQLVRKGKSWWLHTPIEKTLEAPANVVEQIAAKETRICAVDLNLDQHVAVCTVQAVEGTILATSFIGNGTAVSGTRRATARTHCTQPISDWHHCRRGTGQC

SEQ ID NO: 41490 - protein, 466 aa, Ktedonobacter sp.
MEDANETPLPQIEETPLPVRVKAYAYRLYPTRKQEGTLLWTPRRCKELYNAALEERTAAYKLAGISVSYGMQAAQLPPIKEERPEYREIHSQVQQDVLRRLDKAMQAFFRRVALGQIPGYPRYKSGNRYHSFTYAQSGYEILGALTSHDKKKKKTCRLALSKIGHLKMLMHRTIKGVIKTCTIKHDGDQWYAVFSVEQAINPTTVHPSSKTVGIDMGITSYATLSTDEQIDNPRIYRSTEQQMKVAHRTLARRKRGSHRRNRAKRQLTRLYRKVRHRRQDFLHQTSRRLVDRYGTLVFEELQILNMTARPKPKKEEAAPTEDGAVRVERYLPNGAAAKSGLNKSIFDAAWGRFITLCACKAEEAGGMVVKVAPQQTSQLCSGCGVLVPKALSVRWHSCPTCGAELDRDENAARNILHRYEQQGPLPSRKQPSKKRKATRKVVGAGSAPQQPAPSSQGTGRCRSLRL

SEQ ID NO: 41491 - protein, 454 aa, Ktedonobacter sp.
MLHALDKKKCSKPWYLTFLAKEAKSIFQCGVEREGVFMLLCKKIKLDLSEQDAATLEFMQGKCRGLYNWWVMKLRDGEKWRFNACKKTLAESRAYDPELNQIYGKLLAEVYYRLDGAMRAFFRRVANGETPGFPRVRPRHGFFTLCYPAMYLTLEGDTLMLPTGGKGKHKRFPAIRAHLTELPPEGFREVAISRDGRGNYYASFSYRQPEQAKRDGNTVAFDLGIKTLATGVTQEGRIYHIGGFKGSRWYNKQLDRLRSKRGKCKKKSRRYLHLSKVYKRVSQRKRNKQRDSLHKASHLIARRLVERTVVVGDLSQRQMVMKEHQERNRTLNRAVYNDWGLYAFVQMLTYKCQLYGKELEFLDERNTSKQCSGCGNLQDMPLRKRTYQCAECGLVMDRDENSAHNILMRFLARRGPYTQARPECGVLQATQSGVEVMGTSCEGQVQQLNLFACG

SEQ ID NO: 41492 - protein, 331 aa, Ktedonobacter sp.
MSAWSAARLPRHPLKGPITMAIAMRVQLILEGHALIKKKHVQTGTDTIGLDIGPSSLAIVPREGKADLVTFCEELTQNARKKRRIQRKMDRQRRANNPENYDEQGRVKSGKRLRWKESKRYQATRRQHANAEHRLAAHRKSLHGNLAHRIASVGNTITIEKTSFKGWQKQYGRSIGLRAPGIFLGHLTRIVAKTGGTLHEASAYQTRLSQYCQKSGQYHKKPRSERWHQCPCGFGPVQRDLYSAFLLSYLEPQQTIPSLTQPVWEGAEPRLQAVMEELQQRANEGQPLPRSMGLVARRKSGAARAGARRLKSPAYLHQEPVSPSGEAGNGG

SEQ ID NO: 41493 - protein, 414 aa, Ktedonobacter sp.
VKKCSILEEIRGFDVYQERWAMIRAHKIRLHLTEEQKGYFAKAAGISRFVWNWALAEWNRQYEAGEKPTAFKLKKQFNEIRRAQYPWTWEVTKNASDQPFLDLANAWTAYFDGLKQGKKTGRPTFKSKKKSKLSFYLANDQFELGDHRIWIPKLGWVNMAENLRFVGGKVTGARITKTADWWFVSIQVELPDAIPAKKPAACGIDVGLNRLATLSTGEGVENQAFLKTALKKLRQANKRLHRRTLGSKNREKARRQVAHLHYRITCMRDDVLHKLTTRLANCYGIIGIEDLNLKGLLKNRKLARSFSDAALGKLLNVLKAKVEQRGGHVIKVNRFFASSKTCHGCGWKWEDMQLSDRVFLCQNPHCAYAQFEQDRDYNASLNILAEALRLIGLIDQAVSGTGSDEDANLAVDAG

SEQ ID NO: 41494 - protein, 396 aa, Ktedonobacter sp.
MRQKKEQNRMIRAHKIRLHPTAEQAVYFAKAAGTARFVWNWALAEWNQQYEAGEKPTAYKLKKQFNEIRREQFPWTWEVTKNASDQPFLELGRAFAAFFEGHAHRPRFKSKKRSRPSFYLANDQFELGDHRIWVPKLGWVNMAEKVRFVGKITGARITKTADWWFVSIQVEMPDPISVKRPAAIGIDVGLNRLATLSTGEEVENQAFLKTALKKLRQANKRLHRRKPGSKNREKARRQVARLHYRITSLRDDVLHKLTTGLANCYGIIGIEDLNLKGLLKNRTLARSFSDAALGKLLSLLTTKVEQRGGQVIKVDRFFASSKTCHGCGWKWEDMQLSDRVFLCQNAHCAYYQFSQERDRNAALNILGEALRLIGLIDQVVSGTGSDEDGNLAVDLT

SEQ ID NO: 41495 - protein, 411 aa, Ktedonobacter sp.
MQLVERHLIRLHDARFAVIDQAAFASKNLYNQANYHVRQAFIHEGTYLPYAAIFHRLKQHEAYQALPRKVGNAILIQLHHNWVSFFEAMEAYREDPSPFTGRPKIPGYQDKAKGRFMLIYEKKALGKRAFKRTGKLVPSGLPIEITTQITWEAMRQVRIVPRADGYMVEVVYEQEIQPAAVNPQLRAAVDVGVNVLAALTSDKPGFVPRLVSGKPLKSLNQSYNKRRVKQQQRLAHENRYTSRYLDRVTTKRNRRVDAYLHTASRRIIDLLVREGIGTLVIGKNPLWKQDVNLGRRNNQQFVQIPHARFIEQLTYKAHLVGIRVILQEESYTSKDSFLDDDPIPTYEANAAEKPVFSGKRVARSWYRARDGRLIHADINGSYNILRKSSSDPLQVGRGVVGAAVLPRRLAV

SEQ ID NO: 41496 - protein, 313 aa, Ktedonobacter sp.
MGSPSLVRRGKQWWLHTPIEKTFAAPANVEQQITTNPQTRICAVDLNLDQHIAVCSVQTVEGTILATSFIGNGTEIAGFRKLLLGRIARNRSQTGIMAENEQDNADLWRKIRHLDEHIAHLVSGRIVQFAKEHQASILVFEHLGNLQPEKGKYSRRGNTKRAYWMKGRIFRYSKYKAWNASGIITSWVNPRNTSRQCHRCHAAVIRYNQGQPESGYTPGAALVVCPQCQMRGHADRNASLKIGQRLLERYGEPFKEKPHTAVRRAGRVSKETGVALSQDAKRQKGPSISEARHGERNVHGTAQQGTLWMDERP

SEQ ID NO: 41497 - protein, 435 aa, Ktedonobacter sp.
MQTVVTAKLKLNTTPEQFKALRTTQLAYRDSLNYVSQYAFAHGKMSNAVRLQDATYEEIRLRFHLPSQMACSVPRQVGASYKTLWTKVKNNAVHRKEGKTKKRYKGLDKAPTFISPTLTYQYKKDYTLKKEQQVSILTLEGRVIVPYTGYNKHVALIQRGAEIGASKLWYDKPRKQFYLLVSLAIETADPTPETHKQVAGVDVGMRYLAVTATMQGDCTFHSGKQIVPKANHYARLRKRLQKKGTRSATRRLVAISGRERRLKQNTNHVVSKRIVQQHPQSLIGLEHLTDIRERTKRRKGKNAKQRKANRTFSKWSFAELHSMIAYKALLHRSMAIKVDANYTSQACPKCGHTCKENRPNKGLLFVCQNCQYTLHADLVGARNIAMRTLLIRQDWIGTGLLSVRPDVSDDEAKAARLKRYAGLRWSSDTTPSPRL

SEQ ID NO: 41498 - protein, 287 aa, Ktedonobacter sp.
VKTRQDPKAIAQVRVVPKVGYVVVEVISEHEPTVTAVDPDLLAGLDPGMDNLATLTSNKPGFVPVIVNGRGIKSCNQYYNKQRAVLQKSLGHPGRSRRVEQLTTRRNRRIEHDLHTASRFLIDLLVAEGIGTLIMGKNPLQKQEIRLGKRTNQHFVQIPHARFIQMLQYKAELVGIRVILTEESYTSKASLLDLDPLPVYRKGEQVAYQFSGKRIERGLYRAADGRVIHADVNGAGNIIRKVAPGAFERKGVEDGECRVHLPVVHPVRKSFPHKPAREKILAPVRIR

SEQ ID NO: 41499 - protein, 290 aa, Ktedonobacter sp.
MAKATKTIRQALQYPPQSAHSFAENQALYNRVVAFYFEVIQAHEGILSLKSKEALTTLEKLTHATEKSPHPIVPLSDIAPDIPAMFRRAAINAALGSARAFFSSLKQWRARKEKHKAKPCKKGKQKQPFRERPPVPPRTWNKSASFYAGLWKERSEHSIMLRVWTGSCWSWLKIGALSRDLPQGYAMGSPQLVRKGDRWWLHTPIEKTFEAPAKSGEQLTTAQTRLCAVDLNLDKHLAVCSVQTVDGTILATSFIGNGTAVSGTRRATAWTYCTQPISDWHPCRERTGQC

SEQ ID NO: 41500 - protein, 392 aa, Ktedonobacter sp.
MKQKRAFKYRVYPTPEQRQMLAQTFGCCRFVYNWALRKKTDAYYKDHQRLYYKELSILLTDLKKQEETQWLNEVSSVPLQQALRHLDKAFLNFFEGRAKYPTFHKKRNAQSATYTANAFTWRNGSLTLAKMSEPLQIVWSRPLPNEAIPSSVTITKDAADRYFISLLVEEDIAHLPCNEKAIGADLGLKSFVALSSGEIVGNPRFFAKDEKHLARAQRRHAKKKKGSKNRDKARKKVARLHAHIADRRRDFLHKLSTRLIRENQTICVESLAVKNMVKNEKLAKAISDVGWSEFVSQLEYKADWYGRTLVKIDRWYPSSKRCFECGHLLDALTLDVREWTCPECGVHHDRDINAANNILAVGLTVHACGENRRPGAVKTKPGSSRRSRKASK

SEQ ID NO: 41501 - protein, 342 aa, Bifidobacterium sp.
MRVQFVDHMSAGTPIMSVFIHNHNHRPCDIVECMRRSTRTQDDETWRVAVIPVRLSGADHRKAHEACHKAALLWNFLLAEMRAYWDEHGSDPSDKELRHRLYEKRPDLRDGLHAHTIQGVLDGMNDAVATYRENRRQGNMDVHAPHRAKNYRPLDFTSGYGWRPTNDGERVALSFGRNHRRILVRMPNISDPKTNAPVPVERWGAMRLCWDRNKRQWSLHVSVPTSRPPQGNPNNIAAIDEGVINPMAVAVETDDAYEILVVNGRHARAVKHYRNTRIASLQERLARCVKESKRWCKLDAKRRRIEAEAADALRNADHQTTRKVADFLQEHDAGRIVAGDVR

SEQ ID NO: 41502 - protein, 485 aa, Bacillus sp.
MPKDEKEKEYRTYQINIKKGHKLYPYFNVLCLNSNNLYNTTNFYIRQVYTALKQEKELQLLQKEIIDIIHNNIDKMNDNQLVSYRKKLEKEKLKPKEEQKVVKANLFEMPTKEKSFVDYNFLDCLFKAIKQKDYYSLPGQVNQQVVKNVNQNWKSFFKSLKEYKKHPEKYKARPNIPGYLPKGNRKETILSNQICKMKDGKHLSFPKTKMKLNIGKIASIKGKYQQVRIVPKHDRLVVEVVFLIGEKKEITLKKERCIGIDLGLDNIATVVTNTELAPILFKGGKIKAINQWYNKMRSCYYGILRNGKKQNEGFYNSKKLARLDSKRFKQIKDFFHKVSFNIVRIAKENEIDTIVIGKNNDWKQEIDLGKKNNQNFVQIPHSLLIELITYKASTEGIAVIVTEESYTSKASFLDEDDIPTYKSGNTVKLVFSGKRIKRGWYRSQNGGFINADVNGAANILRKVVPKAFANGIAAVCSQPLVVNVR

SEQ ID NO: 41503 - protein, 395 aa, unknown
  TnpB Polypeptide
MIANGSQQRDARRFAGACRFVFNKALALQEQNYKDGGKFIRYEEMAKHLIAWKKDPQTCWLKQAPSQALQQVLKNLETAYQRFFDKIADHPTFRRRGQHDSFRFPQGFRLDQANSRIFLPKLGWLRYRNSREVAGTPKNVTMRHSCGKWFISIQTERDVEPPVHEATTAVGIDLGVARFATLSDGQSIASLNSFKQHQQRLARYKRSMARKQKFSKNWIKAKAKVQKLHSTIANVRRDFLHKTSTAISKNHALVCIEDLKVANMSRSAKGSKEQPGRNVKAKSGLNRSILDQGWAEFRRQLEYKQAWLGGRVVAVPPQHTSQRCACCGHVDVANRLSQARFACVSCRYEANADFNAACNILAAGHAVLACGESVQSRRSVKQEPAEATAQELALV

SEQ ID NO: 41504 - protein, 372 aa, unknown
  TnpB Polypeptide
MIRAHKIRLYPNNVQATYFFKACGTARYAYNWALTEWKRLYELGEKVNEGILRKRLNAIKREEFPWMLDVTKCAPQLAIKNDLNNAFRNFFRGLKQGKKIGYPKYHKKGVNDSFALSNDQFQVRDTHVRIPNLGWVKLAEELRFDGKILCATVSRIADKWFIAIQVEIPDEESPVRENQAIGVDLGINTLAVLSDGTEYVSSKASRKYKKKLKRLNQSLSRKAGAKKGEDVSKNFKKAKRKLSRLYAKMANLRADDTHKLTAMLTKKYTLIGIESLNVKGMMSNHKLANSIADMSFFEFRRQLEYKATAIGTKIVAADQWYPSSKTCSACGTIKSKYELPLSIRIFKCECGFVCDRDVNAAINLKNYAIQHV

SEQ ID NO: 41505 - protein, 323 aa, Lactobacillus sp.
LVFSDFNHTWKAFPFSIPSRYQFTQNILHSLKHRGGYPRFKSRHAAEQSYTGRSVCTVIAKRRMKLPKLGSIRTSKTSQAVNGKIKRYTVSYGPTGRYYLSLQVETVAPEALPKTGKTVGLDVGIADLAISSDGEKFGTFNAKWLEKQATKWQSKYSRRKYQATVAVRQWNHNHKDVKMDLNDYQNWQRAQKQKARYQQRIANQRQDYLHKLTTALVKKYDVIVIEDLKAKNLQKNHHLAKAIANASWYQFRTMLEYKCDWYGKQLITVNPNYTSQICSTCGYHSGKKPLEIREWTCPKCGTHHDRDINAAVNILHRGLKAVG

SEQ ID NO: 41506 - protein, 523 aa, Opitutae sp.
MITISAKLKDRALEPVLVGYAQLFARLERLLFVALYVKTESVAAAKRRFVAEHEITARQFNAVHNQLQARVEAWRAARERNVATTRSQIEKCALALTKIKRPLAQHHKQRRLALLTARLRRLETELAAKIPAICFGSRALFREQFNLEANAHASHAAWLEQWRAKRAAGFFVLGSSDETCGNQSCQYRDGQLHLRLPGALGGGTVAIPVVFAYRQADLLAALTPKVQRVQRGPRKGAEVERCDAVSYRFLRRDDRWYVYASFATATAPVLTDPRNGGVGVDLNPWGLAVTRIDRSGNIADHFEVPWQIEDRDQAQVQAAIGDAVRVVARYALAHGVPVAIERLDFAEAKKQGRGAAGNRMLSAFAYAAFARIMQGRCARDGIGLLPVNPAFTSVIGRGKFADGYGLSVHRAAAAVIARRALNFGEKLRTRSAGTARVLPARNRTRHVWHNWRLWAKARQPRRRLSTQPKGSRGLQPLIGRSLGFDPHSPNGSPCRADCATPNPGALTRGATPQASREHCSRGA

SEQ ID NO: 41507 - protein, 330 aa, Thermovenabulum sp.
MSVQLTRDEVREAFKSFFSLKKVGVTKHNAPGFRSKNQLSPIKYVQSGYIIEGNKVTISLGRKRGDGVKNVSFSISYRKDINFERVRQLTITYDKKCGQLEARLVVEVCEKANDGIKKVAIDVGETVLMACIFDDGKVFLYSGRLIKSVRRYWQKVRKNLKTNSQRWKQISHRENRQVEQLLHIATTHFIEQCLENKVGEIAVGNLNGIRKNINFNDSMRLHAWPYRKLIEMLKYKGALAGIMVRDDINESRTSITCHACGKVLASNRVYRGLYKCSCGWKVHADINGALNIFEKAYKVSPLKGSSGFVAKPAAVSFYLGWNGVAEPIHK

SEQ ID NO: 41508 - protein, 432 aa, Aphanothece sp.
MKARAGFLTQTKNLVLEYLLLTPVYLKTLYRAVKVRIYPTPEQSQKLSQVMGCARFWWNYALNLCNQTYKETGFGLTQIALNKVLPKLKKEKETAWLGECYSQVLQSTTLNLTKAFKNFFDKRAKYPRFKSYHGKQSCQYPQNCQVVEKAVKVPQVGIIKASIHRLFDGQLKTVTITKTPTGKYYASLLFDTEQETPELVVTGKTIGIDLGLKDFCITHDGQKTSKFANPRHIKKHEKNLARKQLLLARKKKGSKSREKTRKLVAKVHERISNARQDFLHKLSRKIVNDNQVVVVENLNIKGMVRNHNLAKAISDVGWGMFVNFLDYKLKEKGGLLVEIDRWFPSSKTCSNCLYQMLDMPLDIREWACPSCGTHHDRDENASKNIRAEGIRQLSVLGTRTAAEGGEVRPKGGRKSVLRHSPVSSEAPHEANA

SEQ ID NO: 41509 - protein, 413 aa, Haloarcula sp.
MRRTNTFEVVPQSEQDETILRRLLDASASLWNQLTYERRQRFFAGENVWDCDDYYDEYVDILGSATTQQITRVNDAAWRSFFETVEEADQEVSPPGYWGNQADGRDLRTYVRNDAYTIRWGERSRLELPIGSQLKDEYGFGRAERLRVAVRGEPHWQGNQGRLHLSYDDVDETYRAHKPVTVPEAEQATPTGSDVAALDIGANVLVACTTTADDQYYYSGQKPFRQFRETTERIADAKAKLPAGQQTSTRIQRLYRKRSRRWDHAVNALLRDLVQRLYDDGVETIYHGDLTGVLGEYWSVEANLKARTFWAHRQCLDQLANVCEEYGIDVAATSEAWTSQTCPECGEREQTRRHRETLRCPCGFEGHADLVASRTLLEQATNTAVRPTARPVRFQWDDHQWYPIEGNAVASNE

SEQ ID NO: 41510 - protein, 519 aa, Acidimicrobiaceae sp.
MTGAIAEEYLTRAVVFPLDPSPAQERLLRSYCGAARFAHNWALGQVKDNLATRSDERAAGLSEEALTASLSWSAYSLSKTWNAAKDEVAPWWKEVPKHAFQSGTTAAGAGLANFSDSRKGKRGGPRMGFPKFKSRATAKPSVTFVELNHQLSWLEDADVRAGRSQPNGHHIRLMLPQSTPDRDVRCRRAHLAWIHTTQSTRRLARKLESGAASIQAVTISFVGGRWQVALSVRYYVTPTSKPVKFHGGSIGVDLGLKHLATLSRPVAGLTDEVGHIANPRVLAKQLTKLARLDRKLSRCQPGSKNRTKVKSQRARLHGTAAKTRALELHRITNALAGGFDTVAIEDLNVKGMATKKRHLGRSLADASFGEFRRQLTYKSPDRAATLVVVGRIYPSTKSCSACLADGRSAVKAKLHLWERVFECSACGMSLDRDVNAARTIEAEGRRLLAAKLESVQPMPSPQDVAGLRPETKNADPRTGKSEAPQGSSAPAAVQLPHPGLGEKLGEKAEPRSGEFPLSA

SEQ ID NO: 41511 - protein, 561 aa, unknown
  TnpB Polypeptide
VAVHNLKTEDKKVLKSIRKKLPACVAEIELAVTGEQEFKIQRIGNQLRIIRNTVLGQLKKNYDQMVRTKAYKSALKEYQQICEALTKTTDAKDTDKLIQQKKITADKLIKLQQKHNVTFEYARNYGKQMRTKFSLPDAVLVLTTCEMVWRSIETLLYKGADKVYFYNKDDLITFQGKQANRCIILKAVAENNFYVKFGNLELPLIVKQNDLYIKETLANISHYIKNNISIDNNNIKLYNQGLDPVSTYRIRNNRIVRRLIRGRIRYYLQITIEGNPVPKRNKDGSIRHKYGTTGRIGVDIGTQSIAVVTDNQVILKNMAERSTNTFKHEHTIHLLQKRLDRSRRATNPDNYNEDGTIKKGPKTWVYSNHYKKARAKIKDLHRKAATNRKLSHNEDINKLRSMGSELIIEPMNIKALQKKTKTVTKNEKTGKYNRRKRFGKSILRRSPGYFIEQAKYRFNCSGGRVQEVNNQTFKASQYDHQLNDTKKKQLSQRWHVFDDKTKVQRDLYSAFLLYCTDETFQEPDHGICTNFFESFLKMHDRCINEIIASGKKVMNSGIKIA

SEQ ID NO: 41512 - protein, 336 aa, unknown
  TnpB Polypeptide
MTGKSFSVWLNNEYLPQNPDKLWIKEVSSKSVKYSIENGCMAFTRFFKHQSGFPNFKKKGKSDVKMYFVKNNPKDCRCERHRINIPSLGWVRIKEKGYIPTTKDGYAIKSGHVSIKAGRYYISALVEISNNEIANTFNEGIGIDLGLKDFAIISNGKTYKNINKLVKLKKLEKQLIREQRSLSRKYENLKKGESTQRNIQKQRLKVQKLHHRINNIRTDYINKTIAEIVKNKPSYITIENLNVSGMMKNRHLSKAVASQKFYEFRTKLKAKCDENGIELRVVDRWYPSSKICHCCGAIKKDLKLSDRIYRCDCGYVEDRDFNAALNLRDALTYEVA

SEQ ID NO: 41513 - protein, 366 aa, unknown
  TnpB Polypeptide
VFAVKRALKLNNREATLMAKHAGFRRVVFNFGLSLRTQMYSEGQFTDSKVLNEVKKVLTNYVKKQPEFAWMNQLSSRVDQNALIDLKDAFSRYRSGKAGHPRFASRRDGQSFTVDSSNGKVLLSAGKTIKIPTLGTFRLYEPLECGYVSQTFTISKEGNRWFVSFCVDAQRLPVQQPEGSVGIDVGVKSFVTLSNSQVFDAPKPLKQAKTKLARLQGKASRQIKGSNNQRKTYNKIGRLARTIACIRKDFLHKLTTYLAKTFKLIKIEDLNVRGLLANHKLARAISDLGFYEFRRQLKYKCKMYGASLVLIDRWFPSSKICANCGHKKDMPLAERIYNCPACGLLIDRDLNASLNILNWEPKAIGG

SEQ ID NO: 41514 - protein, 382 aa, Bacillus sp.
MKKKAYKFRIYPTKQQEILIAKTIGCSRFVFNHFLSHWNDSFKETGKGLSYNKCSARLPSLKTELPWLKEVDSIAIQTSLKHLSDAFDRFFKKQNYPPRFKSKKNNVQSYTTKETNGNIAVIGNKVKLPKLGLVRFAKSREIKGRIVNVTIRRNPTGKYFVSILAEEEIKPLDKTGSIVGIDLGLKDLAILSDGTTYGNLKFFRTLEEKLAREQRILSRRKEQALKEKKSLTEARNYQKQKREVARLHERIANARRDFLHKASTEIIKNHDVIGIEDLAVSHLLKNANLAKSISEVSWSKFRRMLEYKAKWYGKTIVVASKTFASSQLCSACGHKNKDVKNLGLREWDCPQCGIHHDRDLNAGKNLRDEAIRLLTAGTAGIA

SEQ ID NO: 41515 - protein, 194 aa, Streptomyces sp.
VGGEPGPAHIQARRLSRYRRWQARKRAELQGRSSRSARRRLARRKRKEQRHAAHVNHRVSKEIVSVAQRTGRGIAVEDLGGIRKRVRLRRDQRGALSSWPFHQLGQHLAYKCRKVGVPFLEVDAAYTSQRCPRCGHTDRANRPDRDCFRCRRCGLSPSYRWEVPPGLADVVAGVNVRDRARSAWVVVTAPAPSR

SEQ ID NO: 41516 - protein, 372 aa, unknown
  TnpB Polypeptide
LRSSPQCVDKAIWSWRSRRKLHADWERRVDGADQRVDLAEDDRAREKAEKSLAKLIDREPSAPDFQKKTPCRIDYRTGRIEYGNNSFVLWMHVSTLEKNRPMDIPLNPSHYHLKQLEGSEIDDFEIVKHGKKYYAHISISREIAEIETSSVGGIDQGLNRTLAIVLLNRDMPHEELFCETDKLNLIDKYDSIIASVQHARNGKKLRQLRHKRSNVAIYHDWCLANHVALLTKGYYLAIGNARFHQTNIKGNGKPGLRKRIGKWSYSRQRQCIALKRAEMGYQTLLIDERYTSKTCHVCGSRLIERKWLDGSSYILCHCCGLKYDADLNAGHEIALRCVPDCDLELPSALQSRRDRDDRLKVRMNPAENRVSA

SEQ ID NO: 41517 - protein, 388 aa, unknown
  TnpB Polypeptide
MLRAYNYRLYPTPAQADFLNRSFGSCRWVYNWALQQKLEHYQREGKTLNCFALMKQLPALKHEHEWLGRVNAQSLQQVVSHLDAAFNAFFKKSGGFPKFKSKHKSRASFSCPQACRVDFENQTLSIPKCKGIRAVFSRIFEGTIKTVAISRSKSGRYFASVLVDDGKPLPTQAPVIANTSVGVDVGIKHFATLSTGEKMENPKYLQQAQARLKVLQRRLSRKQKGNANRDKARFRVARLHEHISNQRQDFLHQVSTRLIRENQTVVVEDLNVAGMLKNHCLARAISDGGWAQFKAFLRYKCEWYGRNLIEIGRFEPSSKMCSCGVINSELKLSDREWMCSSCGVLHDRDILAANNIKRFGLIQRGTLAVSLLSSPDVTGCDEGGIPRL

SEQ ID NO: 41518 - protein, 228 aa, Okeania sp.
VSLRVNDTRDLRLNPTNKQVGIDLGITNLLTTSVGEKVANPKNLHKLHKKLRLAQKSLSRKTKGSNNYQKARLKVARIHAKIKDSRGDYTHKLTAQLIRENQRIVVEDLAVKNMVKKRCDPATTPAPLRNAHQETTKHAKAISDANWSELVRQLDYKADWYGRELIKIDRYFPSSKGCSNCGYVVEKLPLNIREWDCPECGSHNHRDINAAINILAAGGAVSVCGARL

SEQ ID NO: 41519 - protein, 414 aa, Clostridium sp.
MKLSFKFYLKFNQNQLSIIEKLSYHTTKLYNIANYDCREIKFKSFYEMRKIYKNNYHTKFLHSQSFQQIFKILEQNWKSYFASIKDYKKNPNKYKGVPRQPKFKNTNNKKNEIIYDKQGIRYKDDILKLSLSKVMKEEFKVKSLNFDMENIKMPINLNSLQQIKIKWDNSSKQWYLIMIYKKQEIDITKEYDNMMSIDLGLDNLATIIFENNLSSYIIDGKYPKSKNSYYNKEMARLTSITMKQQGDSKYFKRTKQLNNLQTKRNNFIKDYIHKASKKIIDLAILNKCHTIIIGDFKGVKQQNTAKSFVQTPQQELVNKIKYKAELLGIKIIMQEESYTSGCSALDLEEINKDSYNKNRRIYRGLFKSNKGILINADINGSYNIMRKYLKCTPRSLIKMMDNGFLDNPIRLRVA

SEQ ID NO: 41520 - protein, 401 aa, unknown
  TnpB Polypeptide
MKRLQAYKYQLKTNETEERILLRFAGSCRFIFNKALALQQERREQGEKKLSYADMCKILVEWKAGEASFLKETPSQSLQQCLKDLERAYTNFFKKRADFPQFKKRGKHDSFRFPQGFKIDQDNSRIFLPKIGWIQYRNSRIIEGTAKNVTVSQSGGRWYISIQTEREIDQPVHSSTSIIGIDVGIAKLATLSDGTVFEPVNSFKRHQQRLARYQRAMSRKQKFSSNWKKAKTKINKLHTRIANVRKDCLHKTTTIISQNHAIVCIEDLKIKNMSKSANGTIEQPGCNVKAKSGLNRSILDQGWFEFRRQLEYKELWLGGEVLAVPARNTSRKCTVCGHTAADNRTSQASFRCTTCGHEANADVNAACNILAAGHAVLACGEIVPSDFSMNQEPAEAIQAYA

SEQ ID NO: 41521 - protein, 383 aa, Acidianus sp.
MARREKNPIRATVSMKIGLSDSLLAFVNNYVRALRFSIFWMKENVKNPNEKGTLSKVHEGLYGKLKEDYNLPPKVSADCYRDALAIYKSWYNNPKRGRFPRVYKPTVWLTPKRSYTVDLDRMVVKITSVGELPILGYPRNLKEYANWDMKEARLTIRDGKAFLKVVFEKPKVKIQPKGSVAVDINMSEIVVGKDDSHYVRIPTRLHESHHFKTLAENLQKKYPRRWKENKRILHRIRSFHHKAKLIMEDFARKVGKWVVEIAWDLGANVIKLENLKNLIRNVNKLSAEFRDKLYLMQYHRIQYWIEWQARKHGMNVEYVNPSYSSVSCPKCGRKMVEIAHRYFHCPSCGYENDRDVIAIMNLNGRGSLTLSTAPQMRDVIPNR

SEQ ID NO: 41522 - protein, 457 aa, Acidianus sp.
MPPSSGQLLGDEEREPTSTPAIPEEGVYKVKYSNRRTNIVRLLPNGFQERKLRRLADLSAKLFNEVNYERRQQFFHEGKVDIKGTYKKYYEKYKEKLRTNAQAVLNKNNEAWSSFFSLLNLKKEGKLPQHIKHVSPPGYCKDRKTKKRKLILIVRQDRYKVDAENNKLILKDFNMEIEFVGRLRWYGKQGRLEIIFDETRNAWYAHIPVEVGVEETGKKSKHVVKGERKSIQIAKPKGNKVASIDLGINVIASVVVSDGTWLLYKGIRTKEDYFYFHKRIAEVQSLADRTRNIGEYEAYLELLREERRLFKKLKRRLLHLYRNLASHLIKTLHELGVSTIYLGNPFNIVQEKGDNFMTDKWPYRKLMHAIELKAQEYGMKVYEVDEYNTTKYCAYHDVKVKRNPRGVVICPKGHKLHSDLNGALNILKKAVGVVVNEVKKPLSFIVDHNRVAPIKGV

SEQ ID NO: 41523 - protein, 398 aa, Symploca sp.
MTQKAFKYRFYPTPEQEQLLRKTLGCTRLVYNRALVARTQCWYSRQERIGYKQTSAMLTDWKKEPELAFLNEVSCVPLQQGLRHLQQAFSNFFAGRAKYPNFKKKRNGGSAEFTKSAFRYKDGNVSLAKCSEPLPIRWSRKLPNGVIPSTVTVSLTPSGRWHVSLLVDVEIKPLPKKAKNVGIDLGITNLITTSDGDKIANPKTFKAKYQRLRKAQKALSRKQKGSCNREKARLNVARIHAQIVDARTDFLPFGTLREQKLTTQLIRDNQVIVVEDLAVKNMVKNHKLANAISDASWSEMVRQLKYKSEWYGRELVKIDRWFPSSKRCSHCGHIVEKMPLNIRQWECPECSAEHDRDINASVNILAAGLAVSVCGATVRPEQSKSARAGAMKQKPKLC

SEQ ID NO: 41524 - protein, 205 aa, unknown
  TnpB Polypeptide
VPQAYRYALDPTPAQERRLRSHAGAARYAWNWGLARVKARYAAEKKWYSAEDLHRLWNAEKKTKPDLAWWQENSKCVYQEAFRNLDRALGDFSKFKKGLRKGRRLGFRGPRRRAGAGIPVASAPGVMRCSGSTVTLPRLGTIRTHESTEALAVKIAEGKARILSATVSRTAQRWLVSFTVEVEREVPDHHRRPQTAVASISGSLP

SEQ ID NO: 41525 - protein, 382 aa, unknown
  TnpB Polypeptide
MSTTTITRRRAVKYRAYPTKGQANLIDRTIGCARLVYNLMLETRIASYQSRFGMPDAQGKELPSTPRLYKDDYPFLRDVDSMALCNAQMHLDKAYRSFFANPKSGFPKYKSKHRSRQTYTTNCINNNIRFENGGTRLRLPKVGPVKVRQHKRIPDGWKLKSVTVEHRPSGRYEATVLFEYETQAPEPVHPSTFVGLDYSSHDLYVTSDGVRAGYPRFYRQWQERLAFEQRKWSRMVKGSANWSKQKRKVAKVHERIRDMRMDFLRKAANRISESYDCVCVEDLDLHAIAQTLRLGKSTMDNGFGVLRAMLDRKLVEQGKPGLVKVGKWYPSSQLCSDCGHRYADTKDLSVREWTCPECGAWHDRDVNAAKNIRDEGRRLSLQ

SEQ ID NO: 41526 - protein, 430 aa, unknown
  TnpB Polypeptide
MRQVERHWIKEGHVLYPICDDLTFKAKNLYNAGLYQVRQSIFERNKFQEEEKPSVLSWVELVSQFRKEKQGDMLALPSKVSTNILKTLGSSINSYYQTLKAFHDKSNSSVTSKPQLPGYLHKTEGRYVVEFTSQTISKKRGLNGEIILCPKDFSLVIPTKVKTPKGVRIVPKLKAFVIEVIYEVEASPLKHTGAYAAIDLGIDNLASVTFSDGINPLLIKGSRLKSINQGYNRLIAKAKSKLPANQKTSQGIHRLWRNRELKLQSELHKVTSFLSLYFDEMAIEKIFIGKNQGWKQEVALGKKTNQTFTQIPFTTFISQLTYKCLARGIEVVEQEESYTSKASFLDNDEIPVYKNVQTKPQFSGKRISRGLYKAKDGSLLNADINGSYNILVKGLLALGKSLDREKVSFHTRSLKNLQSVANKDLLLQYM

SEQ ID NO: 41527 - protein, 382 aa, unknown
  TnpB Polypeptide
MNVAIRAEVIGDDDLRNTIRLSNQACQDTIDVGMKSKTFNKTRLHQLTYRTIRKAYPQLNSSLVTAVRDQASDMLKRLKLKRKPTKKQDSSIRLNHNTFRLLSDSKLVSISTIRGRKKYAVKIPAYFEKYTFNESTSARIRTKKGRIFMDIVVNIEVQEKHKAKRIIGVDRGIYNPAVTSDNTFFNGRKLRDVKGRYRYLKGCLQRAGTRSAKRALQKLSGRERRFVADINHCISKAIVNKDCDAIALEILKTGAMKRKGKTGKKTRKLIGSWSANQLLSFIEYKAEMLGKNVIFVNSHYTSQACNRCGDIRRANRNGKVFRCLVCSYSLHSDLNASRNIACLAKGKTSRLVVNQPNVACDELKASLREELRASIVTSSASI

SEQ ID NO: 41528 - protein, 349 aa, Caballeronia sp.
MIKVYRYRVKSLSGLLNKQARTVNYVWNFCNDTQKHALKWRKKWPTGFDLNVLTTGSSKELGIHSGTINAVCEQYAKSRQQFKRPFLRYRGKRSLGWVPMKGRDLKRNGDAFRFAGNTFRVFNSRDLPDGKVKDGTCFAQDSRSNWFLNIVIEIPDVQARSIQSGVGIDLGLKDFATLSTGEKIANPRHFRELEERLGKAQRARKKRLAANLHTKVKNARADFLHKLSHRIAREFDYIAVGNVDSSGLAKTNMAKSVNDAAWSSFRNMLKFKAIAHGAMVEEVSERFTSQTCSSCGTLPDSRPKGIAGLGIRHWMCSNCSAVHDRDVNAALNILDRSGHRAPVEGIPVH

SEQ ID NO: 41529 - protein, 370 aa, unknown
  TnpB Polypeptide
VNRAIKYRINPTEEQKELFARTIGCCRKVWNLMLDERETTDLTEGLSCRPTPAKYKKEYPYLKEVDSLALANEQLALEKAYSMYFKGKGTGRPKHKSRKNSRASYTTNNQNGTVAIDIDRGLIRLPKAGMVRAKLHRVPEEGWKLKSATVSMTKSGSYYCAVLFEYESEAKPVEHPESNAVGLDYKSDGLYADSEGNICGSPKYYRKGQQKLAKAQRKLRHKKKDSSNYRKASRKIAKEHEHISNQRKDFLHKKSAEIANQYDMVCAENLDMKAMANKGFGNGKATLDNGYGMFLNMLAYKLADRGKVFVKIDKWYPSSQICSCCGTVHPEMKDLLVRRWRCPDCGAELDRDVNAAVNIKREGIKEYLSA

SEQ ID NO: 41530 - protein, 379 aa, unknown
  TnpB Polypeptide
VPTVKLNRAIKYRAYPTKEQAVLLAKTFGCVRFVWNHMLTDAQTFLNEAGTFFIPTPAKYKKEFPFLKEIDSGALCNAQLYLKDANKRHHEKKVSAPQLKSKHKSKMSYTTNIHSYKTKDGRTVKTIALGHDTILLPKIGKVKINKHCSPKADWALKAATVSCTRTGKYFISLLYEFEKDIQPVAATKEKSLGLDYSSHDFYVDSNGDAANYPRFYRRAEAKLAKEQRKLSHMKFGSNNYNQQLHKVRLLQEHTANQRKNFCHTLSTAIAKQYDAVFVEDINLRGMAGSLKLGKSTNDNGFGMFRTMLEYKLTSQGKTFAKIDKWYPSSKTCSVCGLIKDDLTLADRNWTCSSCGTTHNRDHNAAINIRNVGLLGLYPA

SEQ ID NO: 41531 - protein, 367 aa, unknown
  TnpB Polypeptide
MKKTFQYKIKSNLQTEQKAEKWLSLCQQLYNDSLNERIIAYKENKKSISQYEQMKRLPQLKKVFPEFKSVNSQTLQDVIQRLDKAYQGFFRRVKAKNGKAGFPRFKGQNRYDSFTLKQTGWKLNNNYLEIKNIGSFKLFLSRPIEGNIKTLTIRRTLTNKWLACFSCENVPQKLLPKTNKEIAIDVGCQSFLTDSKGNKIDNPRFFKNSQDVLAARQQKLSQKVKGSYRKSKARLLVAKIHQKIFNQRKDFHFKTVNKLIKENDKIYIEKFNSFKSFKGLNKSMRDAAWFQFFNTLRFKAVEAGKEVIEVPAKNTSQICSKCGRIVEKDLSVRVHKCLCGSEIDRDWNAALNILRLGQSLRVTPRIS

SEQ ID NO: 41532 - protein, 419 aa, Nostoc sp.
MIRLMLYGCQQILLNPDNDLKVILEFLCSEATKLSNCGTYYARQLYFKTGLIPSKFDLNNQLSNNIHFAAMYSQAAQQCLMSVAESFKSFVGLLKGIKNGTVTQKPKLPGYRDGGLSLVTYPAQAIKLTPLGLRFPLGTKVKTWFGIAEFYLPMPSNLDRKQIREYRILPRNGEFYLELVYKLSTIQSDVDFNKVIGIDPGLNNWLTCVSNVGTSLIVDGLHLKSLNQWYNKRVSVLKENQPQGFWSKQLALITEKRNRQVRDAVNKAARLILNHCLENKIGTIVFGWNEGQRQNINLGSKTNQKFVQIPTARLKDRIAQLCQQYGLRFEETEESYTSKASFLDSDLLPTFGAKPEGWQESGKRVKRGLYRSANGTKINADANGASNILRKVAVKLGLDLSGISRGALIAPLRIRFWIA

SEQ ID NO: 41533 - protein, 218 aa, Nostoc sp.
LSELEIHQPGYILCQKSPKSLRRLQRRMSKTKKGSQNRVKFRNKLARLHLKVSRQRKDFAVKTARCVVRSSDLVAYEDLMVRNMVKNHRLAKSISDASWSLFREWVEYFGKVFGVVTVAVPPHYTSQNCSNCGQVVKKTLSTRTHICPHCGHTQDRDQNAARNILEKGLSTAGHVGTNASGETDQYLSEATHKSKSTRGKRKPKERSLESPAVSGTPD

SEQ ID NO: 41534 - protein, 421 aa, Nostoc sp.
MVEEAHQRGESEVLHKVVQVRLYPSLEQQTQLAQTFGCARWWWNYALNKSIENYLETGKGLGRAALNAFLPALKKAEETVWLADCYSQVLQATTLNLTRAYKNFFEKRAGFPKFKSKHGKQSIQYPQNVKIVDGFVLLPGNIGIVKAKIHRTIEGKIKTVTVSKTPSGKYLASILTELDDENPVISEGKIYGIDLGLKHFAVVTDGEKVSKYDNPKHLAKHEKNLKRKQKKLARKQKGSNSRNRYRKVVAKVYERVSNSRQDFLHKLSYKLVSVSQAVIVENLHVKGMVRNHKLAKSISDCGWGTFTNFLAYKLERRGGKLIEIDRWFSSSKLCSNCFYQIGEMPLDVREWTCPHCNTHHDRDANAAQNIRAEGIRMIKAEGSAVSAVGGEVSHTLGRKSKFRHSPVITEAPTSTGLGKLG

SEQ ID NO: 41535 - protein, 256 aa, Nostoc sp.
LSFSLSPCYDYAIELSVKMLVFEAKLVGTNEQYGKLDEAIRTARFVRNSCVRYWMDNKGIGKYELSAYCAVLAAKEADFPFAAKLNSMARQASAERAWSAIARFFDNCKKGKPGKKGFPKFKKEQTHGSVEYKTCGWRLDDDRRYITFSDGFKAGTFKLWGTRDLHFYQLKQFKRVRVVRRADGYYAQFCIDQERVERREPTGKTIGIDVGLNHFYTDSNGETVANPRHLRKSEKVISVNKSTIAVGFDFAQPTKG

SEQ ID NO: 41536 - protein, 244 aa, Nostoc sp.
MQKAFKVTLIPNHNQEVLINKTIGCVRFVYNRFLALRKELYSTEQKTLNYNGCSQQLTLLKKEIEWLKEVDKFALQNSLRNLETAYKNFFADFKKVKGRKNLGFPKFKKKYGCKQSYKTNLTNGNIQIIQNRLKLPKMGWVRFHKSQDIAGTIVNVTVTRTSSGKYIASILCQTEIEKHSQVAQNIGLDLGIKSYLVTSDGEVVDNPKYYRTQKRKLRKAHKKLSRTVKGSRNRAKVKIKLART

SEQ ID NO: 41537 - protein, 201 aa, Nostoc sp.
VRRADGYYCQFCIEQERVERREPTGFTIGIDVGLNHFYTDSNGEIVANPRHLRKSEKSLRRLQRRMSRTKKGSQNRVKFRNKLSSKHLKVSRQRKDFVVKTARCVVKSNDLVAYEDLQVRNMVKNHRLAKSISDVSWSLFRQWVEYFGKVFGVVTVAVPPHYTSQNCSNCEQVVKKTLSTRTHVCPHCGHIQDRDRDQLHL

SEQ ID NO: 41538 - protein, 408 aa, unknown
  TnpB Polypeptide
MKRSNLFTLAPTIDQGHVLRELAVNCAKLWNEVNYLHRQEYENYLKLDWNPQVYKKYVPQVGSATAQQVVRKNNEAWCAFLALKRIQKSVEHSSTIMRVKPPGYWKRDGRYLLRILFRCDSYHIRQDRVDLPHHFSIRLKGELKWAGKQGRLEVAWDSLSKKWRVFQSVHVKPIITPLGSKTCYIDMGVRNLATVWLPEWRQPVAYQSGRLLADWWYWTNRIARHQQRLLTVNGRKKSKQLSKLYRIRKKRFRHAVAAFARQFIKDIYSQGASTVVIGELTGIRNNSNHSRQGNAMVHNYWSHKYVTDRLKWTAEEYGMKVRTVSEAYTSQTCPRCGSRHSLRVLRRFHCLDCGLEAHRDAVGVLNMAARCGGYAVRPMAWPMLLRWNGCGWNRNNGMPTQQRIRVEA

SEQ ID NO: 41539 - protein, 264 aa, Allochromatium sp.
VTGRQLRIERLKTRIAMRQPLRFTGQTKQATISKQAGRFYVSILVETEDYNPHTPDQPSVGVDFGIKHLATLSTGAVIPANQQLKKHLKRLKRRQRNLSRKQQGSRRRAKAKLRVTRLHQRIKNQRQAVLHELSDHLTRTYQVITIEDLNVTGMTKNRRLARAIADAGLGELWRQIEYKAQWRGVTIIIADRWFPSSKTCHACGQIHDMPQSQRTLVCDCGHVMDRDLNAAKNLDQYGRDALRRDLKRTEESGKTGSPALALTT

SEQ ID NO: 41540 - protein, 626 aa, unknown
  TnpB Polypeptide
MFQKLWFPPKTDSLVSGSHSLPGCHRNSTVNYSLYQATKLEAKNKNYLKTCYRSLHTSLPNITENEDTKSHKKCLGLKQIEDGTIMRCRKIRIFPNADYMKYFNQCFGATRYLYNKTIAQFKQEIEKTQDEYSESAKKDGCVKLITPSKKDSETAGSVPKRCCKKIEGEYFCKQHSKCKIIYKIPLGFIHWRDIMIKGKDDLSDDEKWLADIPFDTRQLVVKNVMGGIKSAFSNLKNGNINEFDMSFRTKKENLNHFYVDHRALRADLVLFPKKFKKPLTVPKRDFKWLQDHIRNNKMCDMIISREQPGFYYLQIPYELELIDHKTNNSVISIDPGVITQGTFYDPSGKCGKMGDGLGRKICELYWKMDKLNSSVAKEANNLKTLKTNPGKLTMDQYKKIMTKKKQRLTKQQEKLNVRIDAEKKLRRGLIEKQDSTQASNKKILRLQKQLMQKIIKNNSLLNEKSLDYYFEKTEQNYYIKKSKKKIKNLKKKLRLVRRKKQNVTKESHQKTISYYTQNYKYIVIPEFNARQIAKKQKMMGMKKEARKTMGMCHGKFMERLKTKVESIKNCHLIIVKEDYTSQTCGRCGILHKVERDRIFICPNCGLDQDRDTNAARNILIRGLLQE

SEQ ID NO: 41541 - protein, 386 aa, Symploca sp.
MSKQVLTVSCKLSVTPEVAQNIDATLQAFCDACNWINQTVDKKVMGKVSMQTMVYQDVRGRFELGANLAIRAIGRVCQSRKSAKGKKSEVKQFKPTSLDYDARTFSFNEHDSTVSLNLIQGRAKGIKLDIGDYQKQLLQGKKPTSAELVKRKDSSYFLQIQVKDEPPKLIRTSSVLGVDLGRKDIAHTSVGDSFSGEQINRIRDHYASLRASLQRKATQGTRSTRRRARQLLKRLAGKERRFQSWLNHQISYRLIQQAKQQSMAIALEDLSGIRERTNQQPRSKQERRRSNSWAFYQLRSFLVYKAVKFGVPLVFVNPAYTSQTCHQCLHIHPEKGKSYRNGKTYRCGHCGWIGDSDFNGANMISLLGATVNSPRGSNLSCQIQGY

SEQ ID NO: 41542 - protein, 380 aa, Staphylococcus sp.
MYKGIECKLHPNQTQANLIQMTFGHTRFIWNQMLGMLNARYQNNANLKMLSYSTLSSLIPQLKQEYPWLKDVDSVAIQCSVKTLSETFERFFKGLCRYPRFKSRKQTLQSYLSTIRGQNIRFNHNQRYVKLPKLGWVKCKISVPHIENERIKSVTIKQKTSGKYMMSVLVTSENQALPQTHQTVGIDLGLSDFAITSDGYKYRSQKLHLKYQKQLYIWEKRMARRRIKAKAEEKSLSEAKNYQKARQQVARIHEKIANTRKDYIHKITTDLVETYDVIVIEDLKTSNLLKNHQLARSIASQSWYLFKTILKYKCECYGKQLYCVNPYKTSQYCSHCGYDSGKKTLDVRHWRCPSCHTLHDRDINAAKNIKNIGLGQALVK

SEQ ID NO: 41543 - protein, 383 aa, unknown
  TnpB Polypeptide
VNRNCLKIRLYPTRTQSRELEETLETCRLVYNSLVNDRKFQHETAQVSVGRYDQQAYLPVWKKSHAELGNVYSQVLQDVVHRVDLAFQAFFDRVKKGETPGFPRVKGAGQYDSITYTQKASFKVGASSIHIAKIGQVKARMHRKPWGEVKNCTLRRIGNHKNGKWFASLCQAIEPELLPPSEEAVGIDVGLKSFAALSNGEFIENPHFFRRDEKALAKAQRKLSKQKRGSRELKFCNAERRKARKVVSRIHERIRNRRHDFCHQNARRIVNRFGVIAVEKLSVKNMLGNHCLAKSIADASWSQFRSILTSKAESAGREIIAVNPAYTSQDCFGCGYRPDGLEGRTKKKLSDRWHLCPMCGLSVDRDTNAAINILAIGQYSLAT

SEQ ID NO: 41544 - protein, 396 aa, unknown
  TnpB Polypeptide
MIQAMKKRIYITYKYRLDPTKEQQNFFAQFAGSVRFVFNKSLEKIKQAVDAGLKIPTYTDLTKRLPYMKAQEETAWLSTIHSQILQQGIKDLSEGVDAFFSQKKQKKSSRGFPKFKKKGQRESFRYPQSIRCKDGKVYLPKIGWVRYRDSRPIEGVIKQAAVKLIGQHWYVCIACSIEIEVPEFHITEDTVLGIDVGIKNYISASDGMKIDNPSHLKHMLEKLRHLSKSLSRKKKGSKNWFKMRAKIQRLHIRITNCRRDFLHKQSTVLTDNQGVRAICIENLSIAGMVKNRKLARAISDASWGTFYEFLKYKCEWRGKKFLKVDRFYPSSKLCSSCGNKQDMPLHVRVFDCTACGMKLDRDINASINIRSAGTSELISCGEIRAGGLNEAGIGSF

SEQ ID NO: 41545 - protein, 662 aa, unknown
  TnpB Polypeptide
MVRSPIGAGILADGTAVSAEILAERLGYLAQMVKRQARSRIFEVWAAGGVSAISDSAKSHAYVAMEEIYGSILWPPSDLHASDRVRRMAEELAGRTLRSAARQIGLLEAVLPVVLPSATWQALTDAQRSSLPSLPWPAGTAPTEKRDMLWAIRRTEEELGRIPSDPYEVINCPDFAEGFFLCPLDAADGQQVKLAGVELALLLPVCAYPGKSDWSWHTLTLKVPDFAQQRYAKGVICRPSLRVTPDKSYFLTPLDIPVPALSSSLKVFSLDWGARRLLTGVVVSIDPSDPYRHALTTGRPYFCNSRQWRAKLARLKDDAHILDTKIKQQDKLLAGLRKHHRTDPSLLARKELLEHQRSSLWRRIGEAQEQLAYAAAKWVIEQSLAEGCGVIGLEDLRTLQSRERGVFQNERTNSTVRGILVQKIIDLAQLAGLRVIFVNPRGTSSLCSRCGRPSVFWHAPDHQGGDPNWLVCACVRSSDRDQAGAESVGALALEVLFPTPSSPVSSSTPAPPTTSPAGRRTKPVAGLASRRRVRARRDKHRAAQETPYTYQSHMFDANADNQPPKPQRRPSKPKISGAKWTATGNYGHLPLRSGACRQTTPRRVSRGSVVAQSLGQAERSSLDGNLHRESRAANPALVLDGVSRGYWHAVKFSRPRVLARPA

SEQ ID NO: 41546 - protein, 662 aa, unknown; identical to SEQ ID NO: 41545
  TnpB Polypeptide

SEQ ID NO: 41547 - protein, 439 aa, unknown
  TnpB Polypeptide
MHRTARSGLRVTRGQRRRLLELLVSAGDVWACVLELNAWRRARQDRPLAGYQELCRELAASGPGTFGELDTAGARSVLRRYSDAWFAAAQRRRDGDERARFPRRRRALMPLRWYHGTFTLAGRRLRIPVARGRPELWVRLDRDQPYPPEQIRSVTLVYDAGRLWVDVTAEVPVASYPAWQEPDPARVAGVDLGIIHPYAVAGPAGEALLVSGRAIRAEHRMHLADRKARARAVARRAPKPGQKGSRRWRHYRRRQRLAEARHRRRVRQAQHEAARTVIGWADNRRIGTLAVGDPRGVLSIRAGRRHNQRTRDWRIGHLITALKDKAEAAGISLQLVDERGTSSTCPACRSRIPKPTGRQLSCPACGHTGHRDLLAAANIAARLGGGTTPASLPADVTHRRAGAHLPGVAPSRRDPRRRAHHRDAHGSLGRHRPARASPI

SEQ ID NO: 41548 - protein, 511 aa, Geobacter sp.
MSNKVATYQGRLDLDEVQSEFFDGYARHYNHVERCLYADMRRYGKAATSFKNEYLIRHSVTARQFNAIARNLEGKIASTREQLPLQKDEVESRIARAKKVISKSKSPLVVHQKKRRLHILRTRLGQIEQQIESGDPSICFGSRRLFRAQFNLRENGYAHHGDWKRDWESKRSSQFYVLGSKDETSGCQGCVISANLDGSFNLRLRSLSKEAQYVELRNIRIPYGQDVIRQAMRNPQAISYRFLRDDKGWRVFITTSLPEIKTRSIKTSGAIGVDINADCLAISESDRFGNLIGTEIIPLVTYGKDTNQAKALIGEAVKRVIEQASAVSKPIVIEKLNFSKKKAALEKEDPRHARMLSSLSYGAITEGINARAYRHGIEVIEVNPAYSSIIGLVTYAQKKGISVHQAASLVIARRGCGLRERPVKGEATIPTPKGDHVTFALPARNRAKHVWSFWSDVKKIHTAVLAAHFRPPQGEPLARRSKSKSPIFTVRLRNANRQQHCSADVMGDIPW

SEQ ID NO: 41549 - protein, 428 aa, unknown
  TnpB Polypeptide
MRLTFQYPVYPTKTQEQTLFEWLDHLCELQNSARHDRLVAYETEGRFVSLSDQQTLLTQAREKYDDFREVPQDFQNHTLRRTDKAFIAFRKRCQNGDGKKGYPRHKTRVRSLTWSLRKYTKVVRKKTKDTDKQTIRVRENPIRETAWKHDRLKVPKLGEVKIYMHRPLQGDPKEITLVKKASGWYAHISCEISDTPKVEPTDAVTVDVGTTHYLTTSEGEKEDNPRWYREAEGLLRKHSKDLSRKQKGSHRRKKQQHKLALHHERTTNKRKDFIGKLVYKLYHHLENNVLVAEDLRVSNMVKNKHLSKSISDASWRTFFEWCGNIAERDGFHFHQVDPKNTSQTCSCCGQKSPKKLSLAIRIFDCSFCGTSLDRDHNAAINLLFRAACAHRGERWVTDLYEARNTNEARDVGLENTTQLLLFSTSPSL

SEQ ID NO: 41550 - protein, 463 aa, unknown
  TnpB Polypeptide
MKRTITINYTLEHNIEDLEKLGQDFASDINYFYSRFSGIKNIDNLNFRKVRDTILKELDHLNLNGHYLQRCLNIALGNVKSMWSNTFRFVKSNISSNKNLSNEEKYFLYIVIKSNSFVDYIVNTNKSFENLINSKYFSKWKKENSEYKIDERKIRQYLKRQLRKFKSKIPYTKKKYFKIDSTLYHFKNGKLYITNPYKKYNRFELVSVNKNIYKTEAIVHFNGNKVRIGFPISVKQKKLTNDKVNEIGIDKGFIDLITTSNNTNYGQRYCDMVKPYIDKYLETQKERGKYWSLYHKYKDSNPEKAENIKKNNLGYVKFNKNKNLTKETKKKFINNAINNFIKSEKPTEIIVEDLSWDKKSNKRKYRLGFDLSSWDKGYLQERIEFKAYENNITVTAVNPAYTSQICSCCGKLGSRTGKEFKCDSCKIVLDADYNASINIKNRKVTSITTYMKPSEVLEKLGLV

SEQ ID NO: 41551 - protein, 399 aa, Streptomyces sp.
VQLRYNFRLYPTPGQAQALAKAFGCARVVFNDALAARRAAHEAGLPWIPDAELQRRVITEAKKTPERAWLAEVSAVVLQQAVADLNTAYRNFFASATGQRKGPKVAPPRFKSKKDRRQAIRFTRNARFRITPGGKLALPKIGEIEVRWSRPLPAEPSSVTVIKDAAGRYFASFVVEVDPEPLPETDTEVGIDLGLTHFAVLSNGCKVASPKFLRRAERRLKRAQRALSRKQKGSKNREKARRRVARAHARVADARRDFHHQLSTRIVRENQAVYVEDLAVCGLARTRLAKSVHDAGWGAFLAMLEYKAARYGRGFARVGRFEPTSQVCSACGIKDGPKPLHVRTWTCQHCGTSHDRDLNAAKNILAAGRAERLNACGAGVRPPLAVAAGGEAGTHRGAA

SEQ ID NO: 41552 - protein, 591 aa, Halobacteriales sp.
MSDHLSLPLRLPDTHHDAYGRLDEFVQHVATRVLHNRWTPEHLNGISASNHQAWKSFDEHHPFEEIDDQALYHSIHDEEPSENFELYVPSRIRRCILQKVGETLGSHADRRRAFQAIQHVLPTHKINRIHRRHIKEKLWDDGEYLSSGYVDVLIDQLNSYYDRHGRYPDSYFELQDPPEYSNGALPYSADDGPSSGQAVKYHYDEDEQSVTVNVKTPDTVTPESRGEWSWHEHELTGYDAFQTLILHGSLSAPEFQSTQRKNGDWIYELSFPVDVDVINADGDAERVLALDAGMRKDMTAVVVDETGKQVSRPHFIRFTDRDGMGRLHRERQRLNNRLAGLRRSGRDYSEEFKTIQAEYERVNNKIQHKREQLVHDVANQVAALALVYDVDAVVHEDLRSLSPPRGEGELSWKLSSWARHEIVEKIEYRCEYVGVEVERVYPHGTSRSCPRCGSTGHTCKSPDHSEEVWWGGHFRCDNARCKFEGDRDYVAAVNVARVFFGGTDELESGFTSSYTGDSETVPARRSVGTRLAFGRGVVAYRPGQARATAGGGSAVIAPAVALSESNMDGSDGCGPATRQYTQFQRVTAEHC

SEQ ID NO: 41553 - protein, 522 aa, Nonomuraea sp.
LRADGRQERDAGRACGFAPCLAGAACPFPRSSRCACKALPSVRPCWYSRSHTLSNTRGEGIVVRVVQAYRFALDPTARQAAALASHCGAVRVAFNWGLAQVKANLAQREAERSYGIPDDRLTPALSWSMPALRKRWNQVKDEIAPWWADNSKEAYACGLTRLADALSNWRDSKSGKRKGPTMGFPRFKTKRRTARSVRFTTGTIRLDGHTHVILPVLGRIKTHEPVTQLARLLTEGARIASATVRWQEGRWHVSFIVHTERAVAVPARPDAVIGVDLGIKTLAVFSDGRPPVANPRHLNAAARRLRRLSRAVSRKHGPDRRTRQRPSQRWLRANAARNRAEHRVAALRRDGIHKLTSSLARTYGTIVVEDLHVAGMIRNRRLARAASDAGFGEIRRQLAYKTTWNGGRLLVASRWFPSSKTCSSCQAVKTKLPLRMRTYPCDGCGLTMDRDHNAARNLASLVKRTVAGSGPETENGRGADHKTPPSGAGGRETSTPHRVPAARIRRGPSPTTGESLTILETQ

SEQ ID NO: 41554 - protein, 288 aa, unknown
  TnpB Polypeptide
MTPYNFCHDFMKFPSYLRRAAIMAAYGQVSSYQTRLAQWKAKPGQKGRQPGLPKAGRSFPVMYRDNTFIRAGRNSVKLKVRIRNTWDWVDVELDKHDVDYIALHCAARNELSPALRKRGKKWYLDFSFEEKVILDKVSLDTQRVLGVDLGINNACVCSVMDSKGTIIGRRFKKLPVEQDSLERALRRIRKAQSNGAKRMPRLWARAKGVNKDYRRQDGRLHHDGCKRVQGRRHRHGTPRSRRAQTWLQASAASSLACQVCPADRGAPGTSLRYSHSSRVFLEYIEAGL

SEQ ID NO: 41555 - protein, 441 aa, unknown
  TnpB Polypeptide
MDTSESGSGCLSKVQVSVLEQTETREKVKGYKTELDPNNVQCTALLRHSGAARWAYNYGLRRKIDAFEDGEKSPSAIDLCRELVVLKNIPVEEGGAPWLYDVSKCAPQAALRNLDRAFSNFFRRCKSGNGKPGFPKFKSRKRGIGSFTLEGGVRVEDGAIRLPRIGWLRLKEEGYLPTAGVKIFKATVSERAGRWFVSLTVEEKRTALHPATGEPIGIDVGIKSMAVLSDGTVFENPRALRAAERRLRTLHKSVSRKQQGSANRKKAKARLELMHYRIACIRGDAIHKATSTVIAKQPSAIVIESLNVAGMMKNHCLARAVSDASMAEFHRQIRYKAAWAGILVLEADRWFPSSKMCSVCGHVLDKLPLGTRRWTCPECGAQHDRDLNAAINLKHLAASSAAGRKPKACCLESSGRIVVDPVKLSIGQEPNIMEGSNVASE

SEQ ID NO: 41556 - protein, 275 aa, Streptomyces sp.
VDLGIENIATASTGYLAAGRGLNRYRKRQLALRAKLQKKRTKSAKRRLKARARIEARHVANLNHIIAKTIVTEAERTGRGLSLEELKGIRTRVRLRKPQRVALHSWAFAQLGDFIVYKAKRAGVPLVFVDPAYTSQTCAECGHVDKRNRVDQGLFICRGAGSLPTPTGMLPTTSPPVARACGMRGVSHASLPPHRGVWTEESTPAASRALPPSPAVQGRVKLTTPRPPAPPQACCAKAPGPRRPGPRAAAPARCPADARPRGRSNRPSRGGVRPR

SEQ ID NO: 41557 - protein, 406 aa, unknown
  TnpB Polypeptide
MQRLQAYMYELRPTGEQQRQMCRFAGSCRFVFNKALALQKERYERGEKKLGYAGLCKELTGWRNDPETPWLADAPIHPLQQTLKDLERAYRNFFEHRADFPRFRKKGQSDSFRYPDPKQIKLDQANSRLFLPKLGWLRYRNSRDVPGAVKNVTVSASCGKWFVSIQAGREVAVPLPKGGEVGIDVGIARFATLSDGTFHAPLNSFRRHETALRKAQQAMSRKVKYSHNWKKEKARVQRIHTRIGNARRDYLHKCSTTISQNHAMVFVEDLQVRNMSKSAAGTTEKPGRNVKAKSGLNQSILDQGWGEFRRQLDYKLAWNGGWLVAVPPQYTSQTCPACGHVSADNRQTQARFECVDCGYEEHADVVGAINVLRAGHARFACEVSGAVMPPAAGIHRSDPGVAQCHA

SEQ ID NO: 41558 - protein, 414 aa, Blautia sp.
MPERTLERGLMKTGYSIRTWKKRLFCPHQDWLEKTEAYYTEVLNFYYGLLKQRQDLWSNSLFQIQRDLEILTVAGRDGRQPECPLPFHKVPVYFRRSAINKAATAVKSSAAGMDCQGGFGAKDKFPDEIEGTVTFFKGMYRNLSDEGIQLKLWNGEKWCWTECTLTGRDFPEDGALMSPVLVKEKNWYMLHIPVKQENEDARTAKERMAAGERVCSVRFTNTDMFAMCCVLEGDGSLAAVQNCRGGDAYRHHCRQLLEKIDKSRAYTDKDNSSKPNKKYYTHLKNLSEHYAHQVSSEIVGFCKKQSAGIIVLPIYNEDFSRMSLYKSGNFSPLHLSSRIRSFLKYKAWAEGILVLEVRAEGVGKTCAVCGRKVKQKGKMFQCENGHEGNRYLNDARNLGLKCQESFRRNMNLQI

SEQ ID NO: 41559 - protein, 251 aa, Clostridioides sp.
MYYGQHIKLPKLGMVKIRDKQVPQGRILNATISKEPSGRYYVSLCCTDVDIEAFENTNNHIGLDLGIKEFCISSCGDFIENPKYLKKSLSKLAKLQRELSRKTIGSLNRNKTRLKVARLQEHIANQRNDFLQKLSTKLIKENDIICIEDLQVKNMIINRKLSRLISDVSWSEFIRQLEYKANWHGRQIVKVGKFFASSQICNKCGYKSEVVKDLNIREWICPSCNETHDRDINASINILKEGLRLITIQNK

SEQ ID NO: 41560 - protein, 498 aa, unknown
  TnpB Polypeptide
LARLARDPPLNPHRKQLYRPVCRSMPKLGAPVVPACDSSGWAGHQNTAHPFFVISISCIPRIFLASTRISSFIFINNTAWHLLASLQRGGCRCNIRQCLSFLFNILKLRYTHTVKLIAQIKLLPDTEQAKVLKQTLETANAACNYISEQAWKQRTFRQFPLHKLTYKDVRINFPLAAQVVVRCISKVADAYKIDRKVKRVVKPHGGIAFDNRILSYNLDQREVSIWTIAGRQKIRFTCGQRQMELLSRQRGESDLCFVKGKFYLLASCDVETPKPIDVEGVLGIDLGIVNIASDSDGKNFSGSDVERNRRIYLHRRRNLQKKVTKSAKRKLKKLSGKQAGFQKHTNHFISKRLVEKAQDTCRAIALEDLSGIRKAPVRRKQRARHANWSFYQLRQFISYKAERVGIPVVFVDPKNTSRTCPQCACVDKANRVSQSSFSCVSCGFSAPADTVAAWNIQARAVVNLPMVSNHLLVQGQNFMPLGAELFTCSDHYHGYFLG

SEQ ID NO: 41561 - protein, 472 aa, Beggiatoa sp.
MRALKKKIKGLKKPQFKRLKELTHHAKNLYNQTLWTLREAFEATGRYFSYPQMDKAMKQVTNLEGEINYRLLKSAVSQQILRRLDKNFKSFFRAHQDFKKNPGKYKGMPRPPSFKQEKHDNLIYNTCAFQVKSRVNIVKEPKVVFFKMPDGQVFKQAQFISFEQVVVLEKGLEIKVPQQLWDKEIKQVEIIPKHNSFHAVFVYEEDPADFKQVNQNDQVMSIDLGLNNLATCVTNGVVEPFIIDGRRLKSINAYYNKRKAKMQSKLSERGKKWSRKLQNLTGWRNAVVNDYMHKATSIVVKTCVKHGISKVVVGDVVKSLNQINLGKRTNQNFVNLSLGQFVDKLGYKLGSHGIFLMVADESYTSKASFIDGDKMYKRYNPKAKQKRTFSGRRVKRGLYKSGDGTVINADANGAYNILRKTDSDFSFSKLVKKVGARIKEWLHPSKRVRPFPTEAQQFLINLKSQRSNLNFH

SEQ ID NO: 41562 - protein, 494 aa, unknown
  TnpB Polypeptide
VPLVTNSQDLAVLTARLEAGRQLYNATLSEAKKRLSNLRQSDLYTKAKTVPKLQKKARGEAFQKAKTACCYSDYDLQSFANQTAIASIWIKEHLDTHTIQKIGTRAFKATERMLFGNAKKVRFKGKGQFASVEGKTNKQGIRWTGQGVEWLGLKLAAIITDDPVIQHGLSAKVKYVRLVRRILNQKTYWFAQLVCEGTAYQKLQNLVGVGLVGIDLGVSTVAIVGDEETIWTPFAEELTSNQKQIRRIQRKMDRQRRASNPDHFNPNGTVKKGKKKWKKSNQYKLTSSKRRELERKQAAHRKSLHGNLVNRTLKLGKNILAEKVSVKGWQKLFGKSIGFKAPASFQSELKRKAENASGSVLLFSTRKTALSQTRLCGHKQKKPLSQRVHNCLECGLKMQRDILSAYLSRYVDPTTELLSIELARNGWLGMEQSLLEGWQRGSLQSARTKASPKSPSNGSERISSNLIGARESERESVNEICTTELEPPCLQTWG

SEQ ID NO: 41563 - protein, 209 aa, Campylobacter sp.
LVKRARQLSKKQHAKTKQEVLQEVLQGIKKSNNYIKASMKLNKLHSKISNIRADFLHKLSSLIIRNFNYIGLESLNTQGMMKNHKLAKSLADVSFYEFNRQLEYKADYQDKEIYRVDKFYPSSKTCCICKSIKQDLKLSDRVYKCDSCGNIIDRDINASINLEKFANKSVGLVQSEFTPMDLTAMQDDLAINQIATSKVEIGIQQKLYL

SEQ ID NO: 41564 - protein, 421 aa, Escherichia sp.
  misc_feature (40)..(83): Xaa can be any naturally occurring amino acid
VKRLQAFKFQLRPGGQQEREMRRFAGACRFVFNRALALQXXXXXXXXXXXXXXXXXXXXXXXXXXXXXXXXXXXXXXXXXXXXATETQWLKDAPSQPLQQSLKELERAYKNFFRKRAAFPRFKKRGQNDAFRYPQGVKLDQENSRIFLPKLGWMRYLNSRQVTGVVKNVTVSQSCGKWYISIQTESEVSTPVHPSASMVGLDAGVAKLATLSDGTVFEPVNSFQKNQKKLARLQRQLSRKVKFSNNWQKQKRKIQRLHSCTANIRRDYLHKVTTTVSKNHAMIVIEDLKVSNMSKSAAGTVSQPGRNVRAKSGLNRSILDQGWYEMRRQLEYKQLWRGGQVLAVPPAYTSQRCACCGHTAKENRLSQSKFRCQVCGYTANADVNGARNILAAGHAVLACGEMVQSGRSLKQEPTEMIQATA

SEQ ID NO: 41565 - protein, 468 aa, unknown
  TnpB Polypeptide
VKSSKNKQADIESKPSIGKDISRLGLNPYWNEVCEKHNSKLWLPIQTALSNLVDNSTISTFSKTIENSWFSTKLLFPNTNEIFRRYLAATSIDSWLLNLQKSKSIRIYPSKEQSVRLNKWIHASRFVFNKTIEYLHSCINFNPSWMEVKKDLLKQLPSWCNEVPFQIKGMAVRQAHKAFWAAKGKPSFKSRKAPMQSCYIPKSAIKETGIYPRVSGKGLFYSESLPEIALDSRLVKLYNQWFLCVPHAIKQQPVADNQGRIVSLDPGVCTFQTFYSENSAGHIGHSDFGKIQRLCFYLDDLISRASKVSCKKKRAMRKAQARIRKRIKNLVKELHNKTACFLVKNFDVILLPTFETQQMANKNDRHLRSKTVRSMLTWSHYQFKMHLKNKALELGKTVIDVCEAYTSKTVSWTGEIKKLGGSRLIKSGNIVMDRDINGARGIFIRSLIDSPQLIRDLGYLKRLGVPRL

SEQ ID NO: 41566 - protein, 315 aa, unknown
  TnpB Polypeptide
MGKGRPQPCPANRRASLDSAFAAFFRRVQAGETPGYPRFKSRNRWHSFGFKEHGNGFRVDGRRLKLSGIGRIAVRWHRHLSGQIKTLRISKQAGKLYACFSCVVDAPTPLVPTGKDVRIDVGLANLITTSDGEHVAHPRFYRNAQRTLRVCQRRVARRVKGSSGRRKAVVLLQAQHARISNQRKDYLNKLAHDLVGRHDKIALEDLTITRMVHGTLAKSILDAGWGYLVQRLTHKAASAGRVVVLVDPRYTSKTCSGCRQIFAGLTLKDRWVDCACGLSLDRDHNAAINILNRGGQLRWSSSSPRGGLGQEAAGL

SEQ ID NO: 41567 - protein, 482 aa, Syntrophomonadaceae sp.
MAKTKTTKTINKKLEYKKPEYFAETQKLFNQVARFYFDVIQEHQYILELSPKNALTKLENLTVQTKDNPAPKTPLPFQYIPAMFRRACINTAYGSAKSFFTTLHKYKEKKAKVEAKGKKYKQRPPVPPRAWNKNTVFYAGMIKDMDDETVMLKLYTGKAWVWIKFKHSGRNFPENWKTCSPHAVIFKNRIELHFPLEKKVKLTRIAKQLQQNPKLKVCAVDLNLDGNHAVCAILSGDGTQGNVKFIHGNKDLHHRRKRLLGKIATKRSQYNGILEDDDNKALWKKIHDIEDYEAHRVSRRIVEFAIANGADIIVFEHLKNLKPAKGKYSKRSNTKRAYWLKGKIQKFTRYKAIEHEILVSLVNPRNTSRDCFYCNEQVSRYNDVPTGYTVGAPLFQCPNGHKGNADVNASWNIGKKFFLKHSKPGKKLPGVAVFHAADQAIEKHEDSNGPVALPGSSVGHYVPNEVAVTPQILRDTSTHGLT

SEQ ID NO: 41568 - protein, 396 aa, Mycobacterium sp.
VSKFEIPEGWTVQAFRFTLDPTEDQARALARHFGARRKAFNWTVATLKADIAAWHATGTETAKPSFRVMRARWNQAKDGVCVNDETGQVWWRECSKEAYADGVAGAVDAYWNWQQSRAGTRAGKRVGFPRFKKKGRDADRVCFTTGAMRVEPDRRHLTLPVIGTVRTHENTRRVQRLIAKGRARVLAISVRRNGTRLDASVRVLVQRPQQPTLARPDSRVGVDVGVRRLATVADADGNVIERVPNPRPLDAALTKLRHVSRARSRCTRGSRQYRERTNEMSRLHRRVNDVRTHHLHVLTTRLAKTHGRIAVERLDAAGMLRRKGLPGARARRRGLSDAALGTPRRHLSYKRLVRVGIGRRRPLVCLVENLPRLPACSGHRLGRNLALRPMRSTSSA

SEQ ID NO: 41569 - protein, 378 aa, unknown
  TnpB Polypeptide
LILAKKVRIYPNKFQEQKLWQAVGTARFIYNWTLARQEENYKNGGKFISDNDLRKEITKLKKTNLSWLNEVSNNIPKQAVKDCCLAYKRFFNKLANKPKFKSKKRSRASFYNDPVKLKIKEKEILIEKIGWIKIKEQIPIGIKYTNPRVIYDNKYWYISVGIEKETLKESLRNISLGIDLGLKNFAVLSNGQIFKNINKTENIKKLEKKLRQKQRKCSKKYELNKIMKAGGYQFIKTKNIEKLENKIKLIYRKLSGIRNNYIHQVTNNIVKAKPYRIVIEDLNISGMMKNKYLSDSISKQYFYKFRQYMTYKSELHGIELIIADRYFPSSKICSECGCLKSDLKLKDRVYKCSHCGAIIDRDLNAAVNLSNYDNKKIA

SEQ ID NO: 41570 - protein, 431 aa, unknown
  TnpB Polypeptide
MIGDNHLFHMLFLGNSILYKTQSNQIKNMNKDTYNLLRRLCWHSARLYNYGLYTVRQNYFETKTYLPYVQNYHYCKTNENFKVLPAAVAQQTLKVVDRSFKSLFGLLNAKKHSKYQSRVSIPHYLPKDGYFQVMIPNNGFQIKGNEINIGISRFLKEDTGIKNIVLDFPTQINAKDVIEVRIIPQQKAHYFKMEVVYEVKEQELKLEHKNVLSIDIGLNNLATCFDTKNNRAFILDGRHLKSINYYWNKQNSKLQSIKDKQNIKNYTRRQFLLKRKRENRIKDIIRKSSKYISDYCIKNNIGNIIVGHNKGWKQDINLGRVNNQKFVQVPFGYMMSSLESKCEEFGMKYSEIQESHTSLCSALDNEEVKHHDVYMGKRIYRGLFRSREGKLVNADVNGALNIARKSKVTAMEVTSEQVMGIVAYPVRIRVF

SEQ ID NO: 41571 - protein, 417 aa, unknown
  TnpB Polypeptide
MPSGGEGVLTLTVRMKVSPEPELGEELISLMKRCREALNYAIEVVIENRALSLGKAHKLLYSVLKERYGLPSKVAQDCYREAITVAKSWLRNPKRGKIPKVKTLKLWLTQGQSYKVKDNYVELIGGLKLEITGWDRRYDSYPNREARLVYRNDEFFLMITKQIPKPSKYTPKGVVAVDVNEKEIVFGNGVVRERRETAVDRALRYRRLAERLQEKYSFSKYNAWLRRKGILRRIGHFHRKARNIIEDWAKKVSLEIAELAKRHQYAIAREDLTGLIEKLRELPGDHKVALLILSYRKLAFWIDWQCEKLGVPIIPVEPKHTSSICPNCSSRLKGNGYRQLKCPRCGLEEDRDRIAVLNIEKRGLELLNLSGGPLTAPTAPQMTDVFPNRCGEPMNRPEGTLALQDREEVSSWSLKRK

SEQ ID NO: 41572 - protein, 161 aa, Peptoclostridium sp.
VIAVKKAYKFRMYPNKKQQELINKTFGCCRFVYNKYLAKRIDVYKNDKETFTYKQCSSDLTNLKKELNWLKEPDKFSLQNALKDLDNAYKKFFKEKAGFPKFKSKKINRFSYKTNFTNGNIMYCGQHIKLPKLGMVKVRDKQVPKGRILNATISKEPSGRY

SEQ ID NO: 41573 - protein, 535 aa, unknown
  TnpB Polypeptide
MFNERSVLFNMSDKLNANYILELKLKTNKNQEAILNKRFLIAENMQNKVIKYAINQINELRKNKLYKKFLKLYLDEKDPNLKKYYSDELTKIRREFKLTKTDLEKYIKVQQHLYKSHIDSTTAQKLADNVWRGVQKVLFSNGKKLHFKKRFSLISLEGKSNKTGIMFKLDTKMLIWNNLQIPAKIRKNDLYVKEALLNPNMKKRIRYCRIIRKPFKHGFKYFLQIVLGGTPPIKKVAIKNKEGEITKIVKRNFIGKGRVGLDIGTSTIAITSKTKVVLEELAKNVKKYDIEIAKLSQSLERKRKQANPDNYNIDGTIKKGSKKWIKTKGYIKTLLCLKDMYRQKSTYIKLEHSKLANFILSLGTDIYVETMDFKALAKRAKKQRERSEKLSIINDKHGNKKSVYKYKKKKRFGKSITNKAPSSLISIIDRKLSYIGKNIEKINTCTFKASKYNHVTNKYEKPTLSDRWKNINGNEIQRDLYSAFLLMNSNKSKTKSNRKECISNFDNFLKLHNEEIERLKTLKSKGIKHPKSFGL

SEQ ID NO: 41574 - protein, 468 aa, unknown
  TnpB Polypeptide
MKRAYKTELNPSKEQIIKIKKTLGTCRFIYNFYIAKNKELFNYKKSLKKELDKAKLNLFMSKLPLKDKTPTVHSDATPIVYSNAISKSTELSTEVFNSTYETHIKDLEEKYNNAPGFMNANTFSKWLNNEFLPNNESYSWIKEVSSKAIKQSLRNGEKAYNNFFKGKNGFPKFKKKSQNEASFYFVNQCNKAKLKSGIVNYNYTVEVERHRVKVPTLGFIKLKEKGYIPSGVDAISGTITYKAGRYFISILMDKDNENQVNLNPKSEGIGIDLGIKALAILSNETIFKNINKSSKIKKLEKKLKREQRSLSRMLENKKHRKGGSSKNIAKKILVIEKLHMRLFNIRTDYINKVINEIIKLNPKFITIEDLNIKGLMKNHHLARHLANQKLGEFINKLTLKCNEFAIELRQVSRWYPSSKTCSKCGSIKKDLKLSDRTYICLNCGNIIDRDLNAALNLRDSTKYEVITT

SEQ ID NO: 41575 - protein, 524 aa, Streptomyces sp.
MGGACGPVGGGRSRWCAVRPVLRVLRCGGGAASEVGQEVLHRRRAAGVHGAGDQSTGFEVAEGLREHLVAVAVAVAVAVAVAAGPPAQLGPALRAVDEVDQDQGGPPGGDQVEQLPAGAGGISDVASHAFPQALTSPHLKPCTSRQKAARSESPLIDGARRPHRADPPGRLDAADRPDLRRRRHRVPGRPGPTAQDRRPGVGARATALSRRRPDQPHPAPGQPRHHRTYGGFRCPERAHHRRRCFQAEVKRDLKRVARPDMAVGIDLGVKTLAVMADSTGEIRTAPGPGHYDAARRQLRRASRVVSRRQGPDRRTGQQPSRRWEKANAPRNKVRHRVANLREDALHKLTTAVAAEYGTVVIEDLNVAGMLKNRRLARRIADTGFGEIRRQLDYKTRRRHATRTIVASRWYPSSKTSSGCGAVKATLPLHVRTYACDACGLVIDRDDNAALNLAALVAACVTGTGVAGDQDTAPAVSKPRGADQKTRATRTRRKASAGRAGGATLPQQRQEEARDRTQAEPLKLW

SEQ ID NO: 41576 - protein, 348 aa, Streptomyces sp.
VIKKTCDAYRTLAANAKAGNLGKRWSKRYRRATEKPIVFRPEGAQPYDDRMLSWRITDRTVSLWTLSGRVKGVVFTASPEQLAPLALYRKGESDLLYRDGMWFLNATCEIPEAPLNTDPDGFLGIDLGIVNVATTSDGQIMAGRALNRGRLRERALRTKLHRKSTPSARRRLKKRRRKEARRARDINHKIAKHVVAEAERTGRGIALEDLTGIRERVRLRRPQRATDSSWSFAQLGQFVAYKARKAGVPVVYVDPAYTSRTCAECGHIDRANRVSQAWFACRSCGFVDHADRNGSRNIRARTEELWRRGAQSTAPDPPPTPEGGTGRKHSTTASGARCANPGLQSRVR

SEQ ID NO: 41577 - protein, 387 aa, unknown
  TnpB Polypeptide
VQRKCLKHRLYPTKAQERRLEQTLETCRQVYNSLLNWHKHDYEVYGRTVTRYQMNGAFPKWRKQYPEIADVHSQVLQNISLRVELAFAAFFRRVKKNDGKAGEKPGFPRVKGDGYDSFCYPGSSVGYSVINGGLRLSKITEPNSTIKMRLHRPLVGKVKTCCIHRVGGKWFACFAVEQEDNPLPPSTEAIGLDAGLNSFMALSNGEFVDNPRFFRRDEKALAKAGRKQAKTKKRSQERRKANKVLSRIHERIRNRRHDFVHQAARRIVNRFGVIAVEKLNVKGMVKNHHLAKSISDAAWSMFRTVLTHKAESAGREVIAVNPAYTSQDCHACGYRAKKKLSERWHHCPMCGASLDRDTNAAINILNLAVNLSGTTLSQVIPVEAPSL

SEQ ID NO: 41578 - protein, 484 aa, Symploca sp.
MPKPKKRAEKLSTQTSPVVRMSAQVKTELLTTMQRLGVVRSEAYNKLGSVNYWGLDWKKAYPLVRVFRTPESLDLPSKLMEWTVSDVFKAINAQQAACIEALGKEIWRRYPGNDNQDKRNQCYRQLKTTEFLADSFLHRIVRKQYQRGHSWVRNQIVYQQGGYKCKRISRHRYQLELAGLQRGKRNQIIVRSHRKIKGQIRLIYNKDLERFEIHWLVNYGTVDTPKKLKEIGIDKAYTEAYYDSDGNVHGGGLGKLASQKSDRITAKNMNRGKLWALSRKYKEINPAKSARILENNLTRKTENRRYRLDLAAIASLISSASKSLLSEPIKVFAEDLTKPIKGKPHSKAMSRKLNAWMKGYMRDSLQKWANWTGSVITEVQASYTSQVDSVTGTLLGARKGDNLIRFTGDVLQADLNAARNLLVRGADKDITRFMPKEEVQAVLIRRTACFLKGLGLTLLNAVELGWLDSKHTKCKAFKELASGS

SEQ ID NO: 41579 - protein, 413 aa, unknown
  TnpB Polypeptide
MKKTYEYRIYPTDEQKSLLAKHFGHCRWMYNYALSRKISHYKQTSNTLSRYDIQAEIPVLKKQETTEWLKEVNSQSLQAVLIHLDTAYNKFFTKSGGFPKFKNRKSKQSFEIPKNLTVDFDKNIIELPKFKEPIKTVFHRKFIGEIRTCHIKRSNAGRYFVTILVEDGKELPSKPEITKATAIGIDVGIKSFAVTSEGEEIDNPRHFVTCQRRLASVQRSFSRKIKSKKKGDPLSKNAEKQKVKLQLLHEHVANQRKDFLHKVTTRLIRENQTICIEDLNVKGMMKNRKLSKHIQDAGWGMFFQFLRYKSDGYGSNIISIGRFEPSSKTCSKCGYIKHDLTLKDRAWVCPICGERHDRDVNAAINIRDFSFVNTGSDRNTQKSKSAKHGIALATSAERMSAMAFEAPESLAQG

SEQ ID NO: 41580 - protein, 377 aa, Macromonas sp.
MDIKRAYRFRFYPTSEQETLLAQTFGCVRVVYNHMLHLRTEAWEQRQERMGYNDTSAALTLLKKQPEYAWLNDVSCVPLQQALRHLQTAFGNFFAKRGRYPQFKRKGGHQSAEYTASAFRWDGQVLKLAKMDAPLDVRWSRKIPPAAKVTTVTVSKDAAGRYFVSLLCDDVVCAKPEVAEKIGIDLGLTHFAILSTGEKIATPNAFRKHEKKLAKLQRRLAKKKKGSKNRTKARLKVAKLHAKIADIRKDFTHKLSTRLIHENQVVAVETLAVGNMKKNRKLAKSIGDAGWAEFVRQLEYKAKWYGREVVKIDRWYPSSKRCSDCGYTAQKMPLNVRHWTCPDCGSSHDRDINAARNVLAAGLAVSARGEAVSPVSR

SEQ ID NO: 41581 - protein, 303 aa, Salmonella sp.
LRSPPAVFAPPTTAFANFFAGRAAYPAFKSKRHKQAAEFTASAFKYRDGKLYMAKNKIPLDVRWSRPLPSVPSTVTISKDAAGRYFVSCLCEFEPASLPITSSMVGIDVGLKDLFVTDTGFRSGNPRHTAKYAARLALLQRRLSKKAKGSKNRAKAHLKVARLHAKIADCRLDALHKATRKLINDNQVVCVESLKVRNMIRNPSLSKAIADASWGELVRQLRYKGEWAGRSVVAIDQFFPSSKRCSCCGFIMKKMPLDVRKWQCPECGTDHDRDVNAARNIKAAGLAVLAHGEPVNPESLKAA

SEQ ID NO: 41582 - protein, 364 aa, unknown
  TnpB Polypeptide
MKPIIKTLSVRIRDKHARVLNRMAFDVNQVWNAANADSDELSWVAIPEVGYMNCGTSAFELMKDLKGIRKQRDMIIDSTAVQETIAVHAKARKQFKKNKLNWLCSGGARRALGWVPFKSGAAKWVSGQIRYAGHYFNCWDSYGLSQFDFRSGCFSQDSRGRWYFNIVVHVEAETRQAECGQIGIDLGLKTTATCSNGDTLERQDYYRNSEVKLGIAQRAKDKNRAKAIHAKIKNRRKDAIHKFSHKLVKENSLIVVGNVSASGLAKTKMAKSVLDAGWAMLKTQLEYKSIATQGVFLEVNESYTTQTCSCCGCISSSSPKGRSGLGIREWTCAECGTTHDRDMNAAKNILALGHKRLAVGIPVL

SEQ ID NO: 41583 - protein, 386 aa, unknown
  TnpB Polypeptide
MKKTIRKAFKFQLKAPPKVSQKLANFAGGSRFVWNKALALNLDRLNEKQPILWYEELNFWATLWKKSDEYGFLKELPSQVIQQKLKDLEKTFKDGFDKNQPLKRIPVFKRKGQRDSFRYPQGFKVDQEKSKVFLPKIGWVSYRNSRKIIGEAKNITVSRKGKHWYVSIQTEYEAKILPHKSSSIVGIDMGIKQFVTLSNGTVYAPLNSFKMKAEKLSKLQRQLKNKKKFSNNWKKVKAKITQCHEDIGNTRKDYLHKVSTEICENQAVIVLENLKVKNMSKSAKGNSEKHGKKVAQKSGLNKAILDQGWSLFAAMLEYKQNWNGGMVLRVLAHYTSQTCPCCLHVGKENRLTQAEFVCVECGFSENADIVGAINVLAKGHSFLAVK

SEQ ID NO: 41584 - protein, 402 aa, unknown
  TnpB Polypeptide
MPDGEQQRDMRRFAGSCRFVYNKALAMQIENHEAGNKFIGYVPMAANLPIWKREAGQEWLKDAPSQALQHALKDLEKAYKNFFAKRADFPRFKRKNSGDSFRYPEPKQIKLDQTNSRILLPKLGWLRYRNSRDVLGEVRNTTVSQSGGKWFVSIQTEREILQPLPTATSAIGIDVGIARFATMSDENYIAPLNSFKKHQQRLARYQRRMSHKVKFSNNWKKAKAKVQKIHTGIANARKDFLHKTTTTISQNHALVCIEDLQVRNMSKSSKGSNEQHGKMVKQKSGLNRAILDQGWGEFRRQLAYKVVWHGGMLLAVPPHNTSRTCPCCGHISKDNRQTQAKFLCVDCGYKNHADVVGAINVLERGYRLLACGDSVQQGRSMKQEPTEATRKSSRSAVGISIL

SEQ ID NO: 41585 - protein, 383 aa, Clostridium sp.
MQGGEIMIKAIKIRLLPTKEQEELMFKSVGIARFAYNWGLNKWSELYNQGSKPSKSTIKKEFNNTVKKQPEYKWLYEVSAQVTAQAFGDLDDAFKKFFKKESNYPKFKSKKKSRKSFYVRYDAIKFEDNKVNLEKIGKVNYKTNYKIPSLSKYNNPRCHFDGKYWYLTLGFEQGENQIELNEDLSIGIDLGIKNLAFVSCLDKPIKNINKSYEVRRLNKRLKRLQRQVSRKYEMNKNGSNFIKTNNIIKLEKEIKLIYRRLTNIRNNHIHQTTNKIVKLKPYRVVMEDLNIKGMMKNKHLSKAIANQCLYEFIRQMKYKCKFNGIEFIQADKWYASSKTCSSCGATKKDLKLSDRTYSCIDCGLNIDRDLNAAINLSKYKLVS

SEQ ID NO: 41586 - protein, 363 aa, Helicobacter sp.
VIAQQSRMNVERAFKDAFKVKNRGFPKFKNSKFAKQSFSWNNQGFSFKESADGRFKIFTLMKMPLLLRMHRDFPPNAKIKQIAISCSHRKYFVSFSVGYEQDIAVIKNPKDCVGIDLNVFDIACSCGVNNPEKLTDFERYLLDMEKLLGIKLDAKTHATQLIPTYSKLHSLKKYSKKSKRLQRKQSRRVLKSKQNKTKLGGNFYQTQKRLNQAFDKSSHQKTDRYHKITSELSKQFELIAVEDLQVKNMTKRAKLKNVKQKSGLNRSILNASFYQIISFLDYKQQHNGKLLVKVPPQYTSKTCYNCGSINPKLKLNHRQYLCPDCGYQEHRDINVANNILNKGLSLFGAGNVLADFEEQSLSC

SEQ ID NO: 41587 - protein, 379 aa, Lactobacillus sp.
  misc_feature (5)..(5): Xaa can be any naturally occurring amino acid
  misc_feature (8)..(8): Xaa can be any naturally occurring amino acid
  misc_feature (21)..(22): Xaa can be any naturally occurring amino acid
  misc_feature (28)..(28): Xaa can be any naturally occurring amino acid
  misc_feature (51)..(51): Xaa can be any naturally occurring amino acid
  misc_feature (57)..(57): Xaa can be any naturally occurring amino acid
  misc_feature (79)..(79): Xaa can be any naturally occurring amino acid
  misc_feature (88)..(88): Xaa can be any naturally occurring amino acid
  misc_feature (103)..(103): Xaa can be any naturally occurring amino acid
  misc_feature (117)..(118): Xaa can be any naturally occurring amino acid
  misc_feature (120)..(120): Xaa can be any naturally occurring amino acid
  misc_feature (123)..(125): Xaa can be any naturally occurring amino acid
  misc_feature (128)..(128): Xaa can be any naturally occurring amino acid
  misc_feature (133)..(134): Xaa can be any naturally occurring amino acid
  misc_feature (137)..(137): Xaa can be any naturally occurring amino acid
  misc_feature (145)..(145): Xaa can be any naturally occurring amino acid
  misc_feature (183)..(183): Xaa can be any naturally occurring amino acid
  misc_feature (194)..(194): Xaa can be any naturally occurring amino acid
  misc_feature (197)..(197): Xaa can be any naturally occurring amino acid
  misc_feature (200)..(200): Xaa can be any naturally occurring amino acid
  misc_feature (208)..(208): Xaa can be any naturally occurring amino acid
  misc_feature (216)..(216): Xaa can be any naturally occurring amino acid
  misc_feature (224)..(224): Xaa can be any naturally occurring amino acid
  misc_feature (228)..(229): Xaa can be any naturally occurring amino acid
  misc_feature (232)..(232): Xaa can be any naturally occurring amino acid
  misc_feature (250)..(250): Xaa can be any naturally occurring amino acid
  misc_feature (263)..(263): Xaa can be any naturally occurring amino acid
  misc_feature (280)..(280): Xaa can be any naturally occurring amino acid
  misc_feature (285)..(285): Xaa can be any naturally occurring amino acid
MRKEXEKXFDYRRFVWNQGLXXWNDMYXASLVMMDKSIRPNERKVRDELVXNKADWXFERSARVLQLAVNDLSKAWANXLNPKMPNHXKPKWKSKKRSRKTFXTDRAQIVNGKLRLXXPXGTXXXYDXKMAEXXRWXGEIKQVCXVQDADGYYASLSIEATVMVEKRTIRRVTAVDVNVGKFXYKTPSGYAIQXTLXASXPALYARIXHYQKQLAXKRTTNPKXFNSXXYRXTRTKLKRNYQRVERIQMXLLNKFTTKLVVDXDLIGIEDLDNQHMRMNXRLAKXLHRSMFGKFKIMMQYKADWNGSTLILADPMFPSTQRCSRCGYIKTGEEKLTLHGNAKYHTGHDDYICYQCGARMRRDENAVDNLIDYAKSKVPG

SEQ ID NO: 41588 - protein, 402 aa, Streptomyces sp.
MATACVKRAYRYRFYPTDAQAAELSRTFGCVRKVYNLALAARTEAWARQERVNYNATSAMLTAWKKTEELAYLNEVSSVRLQQTLRHLQTAFTHFFAKRAKYPRFKSLKKSRMSAEYTTSGFRFRDGKLTLAKMAEPLDIVWSRPLPQGVEPSTVTVSQDAAGRWFVSMLCEDPGVRHLAATSAAVGIDVGLDHLLTLSTGEKIANPRHERRDRARLALAQRRLAKKAKGSANRAKARREVARIHARITDRRRDVLHKLTTRLVRENQTLVIEDLTVRNMVKNRSLARAISDAAWSDFRSMLEYKAAWYGREVIAVDRFFPSSRLCSACGALAGTMPLHVRTWTCGCGATHDRDVNAAKNLLAAGRAVSACGAGVRPQRRTPGGQSATKQEIHGATRGTSRL

SEQ ID NO: 41589 - protein, 392 aa, Thaumarchaeota sp.
MLRASERAVREGSSIEEAIVTLSMKIGSPALDPLADRYMEAKRHVLQWLYEHKTTSIKEVHNALYRMLREKYQLPSKLTQDCYRDAIAVYKGWLKSPKRGRFPILKNVSLWLTPKASYTVNFNAMTARILGQEVKIIGYPRNLIKYKDFQVKEARLVKREDRWYLNVTMKKQILIEKEVKGIVAVDINMDLITLGNNKQVIEVPTRLDDAAHFKKLAANLQKKHPRRWKENRRILNRTKGFHKKARNIVQDFARKAGKQVVEEAKRLNADYIVLEDLNRMITRVKNLKKGYRDRLYLMQYKRVQYWIEWQAKKNGLNVVYVNPAYSSTTCPHCGAKMAESGYRTLKCERCGYEDNRDHIAVFNLYGRGSLTLSTAPQMRDVAPNQWGEPSSF

SEQ ID NO: 41590 - protein, 379 aa, Cyanobacteria sp.
MIVLEFKLKGKKTQYSAIDEAIRTAQFVRNKCLRYWMDHENISRKLLYRYNTQLRKEFPLVKELNSTACQASVERCWSSIARFYDHCQKQLAGQKGSPKFKKNSRSIEYKQSGWKLIDPKHIEFTDQKGIGKLKLIGTWDLGFYSEDQIKRVRLVRRADGYYCQFCLAIEVKETLPATHNTIGLDVGLKEFYTDSKGNTESNPRYYRKSEPKLKKNQRRVSRKVKGSSNRKKAIKRLGRTHLKISRQRKEFAKRLALRVVRSNDLVAYEDLRIKNLVRNNCLSKSINDAGWYEFRKWLEYFGTKYGRITIAVAPNYTSQNCSNCGAVVKKSLSQRTHICQCGCQLDRDHNAALNILNQALSTSGHGGTWIIDPNASGDL

SEQ ID NO: 41591 - protein, 439 aa, unknown
  TnpB Polypeptide
MNRGVYKVSKGKKYKMQLTQKTRIFPSEEQEEVLQDLSEKCRLIYNFALAGRIEAWKKNGKNVNYTKQQNDLPEIKRKYPEYSWVYSKVLQMVLRRLDGDYKSFLALRRNGDKKANPPRFKGKNHFTTMNYNQSGFKLDKEGWVEFSHNHPKTTPLRFTIPEKFDFTDKKVKQVTIFKEDGDKFYISIVYERKEKPYLDNGLYQAIDLGITNIITAVNTKGKFLQTKNPRPDKYWQSKIEEIQPKRDHCKKGSRKWKRYHRKLRKMQRKCANQIKDFQHKLSKKLVENTKANTIIIGDLNVKKMSNSNRNKDKKRDKSLHRAVQNNGCLSRFARFLTYKAKLVGKRVIEISEENTTKTCCACGKKHEMNIWDRAMRCDYCGNELDRDKNSAVNIMVRFLSQNAPVDGLSSFEDILRKTGIPIRMYSQEAPLQKRGVVHC

SEQ ID NO: 41592 - protein, 391 aa, unknown
  TnpB Polypeptide
MIKTIRVMLLSNNKQKTKLFQYANTARFAYNWALGREQENYKNGEKFISDGDLRKEFTQLKKADEYTWLNNVSNNVTKQAIKDACEAYRDFFKGYTKFPRFKSKKYSVPKFYQDNVKIQFTDTHVKVEGFATSKKKNKQKLNWIRLAEHGRIPTDCKYCNPRFKYDGLNWWITVGIEYEDYTTLPSNEGVGIDLGIKDLAICSNGNTYKNINKSQKVKKLEKRKCKLQRSISRKYEKNRKGGSYCKTSNIIKSEKELLKLNHRLTNIRQNYLHQTTTEIVKTKPSYIVLEDLNVKGMMKNRHLSKAVQQQCFGEFRRQIEYKSAWNNIKVIIADRFFPSSKLCSCCGNIKKDLKLSDRIYKCECGNVIDRDYQAALNLKRYGENVMKQSVA

SEQ ID NO: 41593 - protein, 366 aa, unknown
  TnpB Polypeptide
MLKAYKYRLYPNKQQEEQIQKTFGCCRFVYNQTLSHRKEMYETQKESMNKTSCNNYCNQILKKEYEWLKEVDKFALTNAIYNMDSAYQKFFKEHSGYPKFKSKHNNKKSYSTNFTNGNIEISFENNEIKLPKLKWVKAKIHREFIGKIKSATISQVPSGKYFVSVLVEIEHISMESTGRMVGIDLGIKDLLITSDGEKFDNIHTTKKYQDKLAKEQRKLFHKVKGSKNWNKQRIKVARIHEKIHNTRIDNLHKISHKLISENQVIVSEDLAVSNMVKNHNLAKAISDCGWYELTRQLSYKAEWNNRQYIKVDRFYASSQTCNCCGYVNSGTKDLSVREWICPQCGTVHDRDVNAAKNILNEGLRIL

SEQ ID NO: 41594 - protein, 371 aa, unknown
  TnpB Polypeptide
MFKAYKYRIYPSKEQEELIQKTFGCVRFVYNQCLSYKKDKYKSENVSMSKTDCNNYVNRVLKKEYEWLKEVDKYALTNSVFNMDNAYKKFFTENRGYPKFKNKKNCRKSYKTNNSVNNGSHTVRIEGNKLRVPKVGMLKMAYSRKIIGRISSATISQDPSGKYYASILFETEYEYLPKSDNSIGIDLGIKDLLITSDGEKFNNILTTKRYEDKLAKEQRRLAKKQKGSANYEKQRIKVAKVYEKIRNIRLYNLHQISHKLINENQVIVSENLNIEGMRQNHNLAKSVSDCSWYELTRQLSYKAEWYGREYIKVDRFFASSQICSCCGYQNKGVKDLSVREWICPQCGSKHDRDINAAENILIEGLRLREAS

SEQ ID NO: 41595 - protein, 391 aa, unknown
  TnpB Polypeptide
MIKTIRVMLLPNNKQKTKLFQYANTARFAYNWALGREKENYKAGGNFISDCDLRKEFTQLKKKDEYSWLNNISNNVTKQAIKDACNAYKRFFKGYSKFPKFKSRKCSTPSFYQDNVKIQFTDTHVKIEGFSSSKKKNKQKLNWIRLAEHGRIPTDHKYTNPRIKYDGINWYITIGIECEDSATLPSNEGIGIDLGIKDLAICSDGNKYQNINKTQKVKKLEKRKRKLQRSISRKYEKNRKGGSYCKTSNIIKSEKELLKLNHRLTNIRQNYLHQTTSEIIKREPSFICIEDLNVKGMMKNRHLSKAVQQQCFGEFRRQIEYKSAWNNISVIIADRFFPSSKLCSCCGSIKKDLKLSDRIYMCKCGNIIDRDYQAALNLKRYGENVMKQSVA

SEQ ID NO: 41596 - protein, 384 aa, unknown
  TnpB Polypeptide
MRFAYKYRLYPNRAQVHFLENQLHEACDLYNAALQERRDAWKVCRKSINYYDQANQLKPMRAEGLIGLANFSCCQDVLRRLDKTFQAFFARVRRGERPGFPRFRSFRRYDSITFPSYGNGCRLLDDGKLRIQGVGLIKVKLYRPVEGEIKTVTIKRDVNHWYVCFSVERDTVALPESNKEIGLDVGLDSFVALSNGREIDNPRHLKRGLAHLRRAQRRLSRRMRGSRRWHKAAALVAKAYRKIRNQRAAFHHHLSRCLVDRYGFIAVEDLNIQGLSRGILAGPVHDAGWNSFFTKLWYKAASAGRELVKVDPRGTSQVCICGAAVPKTLAERWHECPVCGLSAPRNVVSAQVILQRARVGRSWHNVEDVVSCVPREAVAFKATE

SEQ ID NO: 41597 - protein, 403 aa, unknown
  TnpB Polypeptide
MLTHNLAHTIRLYPTESQETFFRKACGCARVAYNYGLTEYQKIRAEGGKPSILEIQKKFNQEKKTLYPWMYETNKDANQRPFTNLQDAFSRFFKCQNRYPKFKKKGIRDSFYISNDRFGVEGKKFWIPKLGWVKGSEKLRFHGKIMSAVIRRKANYWFVVISVETDKTFTTCDNQAVVGVDLGIKTLATLSDGKVAEAVSPLRARLKQLKRLQRWASRKVKGSSNRHKANQKVAKVHYEVACLRKDVLDKMTTYLCENYQVICIEDLNVKGMLKNHCLSLAISDVGWGEFRRQLTYKSLLHGNTIIVADKWFPSSKKCSGCGHVKETLLLSEREYVCDHCGLVIGRDLNAAINLRNYALEKLGVACPELTPVDTGALAYSSSIGVSETIVDEAGISRCSEMST

SEQ ID NO: 41598 - protein, 572 aa, unknown
  TnpB Polypeptide
LTETLATKTFTYRTRLYGLTAVDLAQLDAYAGLYGQVERKLFAAAAAGQDVPKLKSSTIDRYGITARQFNAIAAGLKGKMSSITQRRDGLLKEAEQRIKKAEAVIKRLAKKPKAKKGHPAETAAEKRLRLHQLHQKRRRLATLVARHARMKDDAQASRIRLAFGSNRLFSAQFDLEANALADHAAWREQWRDARSSQFMVIGSKDETAGCQGCVATVHDDDGLSLRLRLPDCLVEQDKYLTIDGVRFAYGHAQVLAALGSSKRFARTTSTGKTSRSLTGTAITYRFVRDAKGWSVLASVAVDAAKRVSAPLKSASTLGAIGVDINADHLAVAQVDRHGNLVEALRIDTIVYGKTGHQRTAVYGDAVKRIVELAARAGKPIVLERLDFSKKKAELEDVDRRHARLLSAMAYRQASEMIQSAAHRRGVEVVEVNPAYTSVIGAVNHARRFGISVHMGAALAIARRAMGLSERPSQRIGLVPVRNGGHVTIALPARNRAVHVWSHWAGVRRALRASLAGYYRSAQAKATAPPLTPFGRPACASGFDGATPSRESLATTARPACPQDLFSPWDGQI

SEQ ID NO: 41599 - protein, 345 aa, unknown
  TnpB Polypeptide
MVEDSATRTVPIKLDVDGSAADLLHQTTDYLGDAANYVVDAAWEPDWKITSKQTLHDLTYYDVRDDSPLPANLVQAARNRAAEAVKGVVERWKQGEKASKPHFTSRFASYDARTVTVNDDHCTLATIEGRVTAEFVLPDEQRDTPHSAYLFNDDYDLKGATLHYDEVEDCFYLHVRTKPTVENDDAEQGDAEHVSVLGVDLGITNIATTSTGRFWSGAELNHWHREYEKRRSDLQQTGTRWAHENVQRVGRKQTGRFEQMLHTISNELVEEASKRLYAYRVRATQRHPRTLTLREGGSQVAFHRLYEYVTYKAESEGLVVRQINPAYTSQRCSGVDSPTRTPSAQ

SEQ ID NO: 41600 - protein, 285 aa, Okeania sp.
MFVLEYKLRGKKHQYSAIDEAIRTVQFVRNKCLRYWEDNQGVGQQDIYKYTTQLRSEYSFVKDLNSTACQQACERTWTSILKFYNNCKNNIPGKKGYPKYAKRTHSVELKKSGWKLNRDTKRITFTDGKNIGELKLIGSRDLFYFQEWQIQRVRIVRRADGYFVQLLLKLDVRDITSQLEPTKKCVGLDMGLKYLYADSNQNIVEPPKYYRQAQKRLNKLNKRKSKKFNRGKKQSNNYIKARRKYAKGHLKVSRQREEFAKRLALRLIQSNDLIAYVDAKRLAEG

SEQ ID NO: 41601 - protein, 357 aa, Okeania sp.
MKLVERHIIQKNHRFYAEIDRLCFLSKNLYNYANYLVRQSWIFEKTNNSYYDLQKTLSTQSDYQAMPAKVSQQILMILDRNWKSFLAANEVYKQNSSNFKYLPHLPGYKNKVTGRNIVVYTTQAISKKQLKQGIINPSKTGIYLKTLVPTSQIKQVRLVPRLNHYVIEVIYEKCAKQYELEKNRCASIDIGLNNLAKLTFNKAGIKPLLINGRPLKSINQYYNKVKSFLQSKLRENQSSQRLKKLCNKREFKINDYLHKSSRLIINTLINQKIGTLIIGHNEEWKQKINLGKRNISYFVSVRYKKLIEMLSYKAKMVGIGVIITEESYTSKASFIDNDILPVYKKVRKIKSLSQEKE

SEQ ID NO: 41602 - protein, 374 aa, unknown
  TnpB Polypeptide
MMLKSYRYRLKPTKSQVTILERQLELCRFVYNDTLAYRKNAWELEQRTVKRFETQDRLPQLKLEVPELKEVYSLVLQNVALRVELAFKAFFRRVKNGEEPGYPRFKGKGRYDSLSYTQSGFKLDSKVLSLSKIGDIKIKLHRPIEGKIKTCTIRRMPTGKWFACLSVEIEDAPLPPWKDGSVVGIDVGLASFATLSNGEKIANPRFFREEEKELARVQRKLSKAPKGTPERKAALKVVERVHERIANKRIDFANQVGHKLVDRFGVIVFEDLDIMNMLKNHNLAKSISDVAWGMLVKATERKAAYAGSKVVLVDPKYTSQICSRCGLIAKKDLSERVHSCSECGLSMDRDLNAAINILRLGMQSLRKSDRSPAL

SEQ ID NO: 41603 - protein, 522 aa, unknown
  TnpB Polypeptide
MSKRSQTPTFLLELPLQVSSQQAKHLRAHFEAARCLYNALLGEAMKRLRLIRSDPRWQEARQAADKQERNALFSQLRQEYGFSEYALHAFSTGARTSWIADHLDSNTSQKLATRAYQAANRVCLGQAGRVRFKSKGRGLDSVEGKSNKTGIRFVLQSPEDGDAGWLMWQQDRLSALIDWNDPVVKYGLDHRIKYVRLIRRKASSPRAQGADCEGYRYFAQLVLEGVSYQKPKHRTGTASVGLDLGPSTIAIVPQKGEARLLSFCSELKTGKQKQRRLQRKLDRQRRANNPQNYDQKGRVKKGRLRWKDSQGYKATRRRLATQERKLAAHRKSLHGRLVHEIVACGATITTEKLSYKAWQKQNGKSVGAHAPSMFIDMLKRTVARTGGILHEVSTHSTKLSQYCHGCHSYVKKKLSERWHQCPCGVGPVQRDLYSAFLAAHLDPTTLVPSIAQETWESAETRLREAIEDVQQRANAGQVLPQSFGIPRAGARLPRSLVSDHQELLCPHGRGEAVAREQEPSVF

SEQ ID NO: 41604 - protein, 414 aa, unknown
  TnpB Polypeptide
MLKAIKIRLYPTKTQSGYINRLCGSYRKVYNMCLEKKINAYNTDKISLGLTELGHYFHNELTKTEEFSYLNEHNTKVLKQAILNLTDAYKRFFVNNTGFPKYKSKHDNQSCRFPLEGISKYNVYSDNRVTLGKPLKKVKFECSERDKNYLTNHKDKIKSATLSRTKSDKYFLSILIENIIEPMVEPINDIIGIDVGIKDFMVCSDGQVFNNLKLRKNNEKCLVKLQRQLSKKVVGSHNRYKAKVKLARKYEELNNIKINYIHNITTQLVRENQTIVIEDLNVKCMLKNHCLAKSIQDLSINETFRQLKYKCEWYGRDLVVVDRWFPSSKLCSKCGYKYKNLSLKERLWVCPDCGTHHSRDFNAAQNIVNEGKRLIGIRYPEFTLVEYPLMDEHSEMNLRSNDTIKQEESNLTRL

SEQ ID NO: 41605 - protein, 396 aa, unknown
  TnpB Polypeptide
MSRYRVYPAPEQEAAMLRHCSDARYVWNLAVEQHAWWRPGRKSAPGYLEQSRQLTVARAASPWLARGSQTVQQQALRDFAQAMANFFDGTHDRPTWRKAGQHEGFRVTGTRGRGWDFHRLSRKWAEVRIPKVGWVRFRLSRPLPDDVKSYRVTRDRAGRWHVAFAVIPAPGPAPGTGAVVGIDRGVKVTAALSTGEMLAVPRLGGREAARLLRLERKLARAKRGSNRRGKVKTQIARVKAREADRRQDWIEQTSTGIARRFDVIRVEDLKVKNMTRSAKGTTQQPGRNVAQKAGLNREIARSGWGALVKRLEDKAPGRVQKMPPAYTSQRCSACGHVARENRESQAVFLCTACGYAANADVNAACNIAAGHVVNARGGDRVAGPVNREPQRTLLGV

SEQ ID NO: 41606 - protein, 367 aa, unknown
  TnpB Polypeptide
VLKAYKYRVYPNKAQEELLAKTFGCCRFVYNQTLAYRKEKYEREKKSVSRTDCNNYCNRELKAQHEWLKEVDKFALTNAIYHMDSAYQKFFKEHTGYPKFKSKHDGHKSYTTNFTNGNISIDFDAGKIKLPKLKQVRAKLHRKFAGQIKSATLSQVPIGKYYVSVLVETDHTPLPKTERKTGLDLGIKDLCITSDGRKYENPKILEKQERKLVKLQRQLAHKRKGSSNYCKVKKKMALCHEKTANARKDYLHKLSHEMVSENQVIVSENLQIKNMVKNHHMAKSISDVSWYELTRQLEYKAEWNKRKYVKINTFYASSQLCSVCGYQNTKTKSLSVREWTCPVCGAEHDRDINAAKNILAEGLRQIA

SEQ ID NO: 41607 - protein, 391 aa, unknown
  TnpB Polypeptide
LKFRIYPNQYQWKKIHNTLDVCRWVYNKMVSQTQNGFVTRNDLNYFLTELKEQEPWLYSYHSKMLQMVSTQIDGAQKSLIQLRKNGYDAKSLKFAKYSKYRTFIYNQSGFKIQDGFLHLSKIGKIKIIQHREIPDNAKIKQVIVTKSKSGKWFACLTIDTSESIMDIPKISFKKAVGIDVGIKNFAYDSNGNQTPNPHNLKKMLKPLKRIQRKVSRQKKGSNNRLKSILKMQKIHEKIANRRKDFQHKLSTQYAKNNDVIFVEKLEKLNMVKNHKLAQSIMDASWGTFIQKLEYKCKLFVEVPAKNTTIDCSRCGNKVPKSLAVRIHRCNLCGLVLDRDHNASINILNKGLNMSAKVGYKIPQELREVTLVEMPRHQRSKKRPSTYLAVVH

SEQ ID NO: 41608 - protein, 547 aa, unknown
  TnpB Polypeptide
MIIDSKYTKSFISDMLSDSKYKELHDFAILLNNHKNTVSKEVCSNLPFYMEMNMFDFLKYMRNKYKGVVNSNFDKQLYQDVFVSYENKFTSIQKNIIFEKVSFKGFEFYKRDTKNNKNGDFKKVIIKKEKTNLSSALTYLARYGNENTVEYITNQLKKNDLVIDKIKYYENLLKFINKFGFDRLFSLSLQRRNRIIEKYSEHPIEFTKLTFRGRSRLSKDDIISYNTNFTSKINAFINISWLGRGNKLTIPVKYSKHYHGLMSEYKKPTPDVEYLITFTDRGKIKVNISKDGKRFIPENKVNYCGIDVNVKHNLFSLSDNSNFDYDRNLLSKLTSELSVIDNLKKNKNYVVGKKKQRKVDSIRNKVQKSNEQVCSNVCKYLNLIGLDHIVMEDLDNSFGKSFVNDKNSGLNFNRITKELNLSSLKQMMEHIARNYDISVSTVHASYTSKMCPICGCIEDENRKNQETFECIECSHKDNADHNASTNIRNRVSTTVLRTNLLKQNKLGNGTYEPKVLKRDKVKEVLLSFRQNLARDKDVVRVNTFDYA

SEQ ID NO: 41609 - protein, 402 aa, Proteus sp.
MKRLQAFKFQLRPNGQQEREMRRFAGACRFVFNRALARQNENYEAGNKYIPYTKMASWLIEWKSDTETQWLKEAPSQPLQQSLKDLERAYKNFFQKRTAFPRFKKRGKNDAFRYPQGVKLDQSNSRISLPKLGWMRYRNSREVVGEVRNVTVSQSCGKWYVSIQTEHEATEPQPESTSIVGLDAGVTKLATLSDGTVYPPVSSFKVNQRKLARLQRKLSRKIKFSANWQKQKRKIQRLHSHIANIRKDYLHKVTSEISKNHAMIVIEDLKVSNMSKSAKGTTERPGRNVKAKSGLNRAILEQGWYEMRRQLEYKQLWRGGQVLAIPPAYTSQKCACCGHTAKENRQSQSQFECLECGYTANADINGARNILAAGHAVLACGGRVQSDRPSKQEPAEVIQTSV

SEQ ID NO: 41610 - protein, 331 aa, Proteus sp.
RKTPSQPLQQSLKDLERAYKNFFQKRTAFPRFKKRGKNDAFRYPQGVKLDQSNSRISLPKLGWMRYRNSREVVGEVRNVTVSQSCGKWYVSIQTEYEATEPQPESTSIVGLDAGVTKLATLSDGTVYPPVSSFKVNQRKLARLQRKLSRKIKFSANWQKQKRKIQRLHSHIANIRKDYLHKVTSEISKNHAMIVIEDLKVSNMSKSAKGTTERHGRNVKAKSGLNRSILEQGWYEMRRQLEYKQLWRGGQVLAIPPAYTSQKCACCGHTAKENRQSQSKFECLECGYTANADINAARNILAAGHAVLACGGRVQSDRPSKQEPAEVIQTSV

SEQ ID NO: 41611 - protein, 418 aa, Ruminococcaceae sp.
MRSTAAICLDALNYCIDVFLQEWAYIALFPSAPKEGVMSQRRAGDLLIHGTKDKAAKYPVFDDRFPYMPAYTRRAVVAKALGIVSSYQSNHSNWEQEPANERGSEPVPGRPSRYELTFYQQERDESCLDKGVIRLKLYDGRQWGWHPFRIAPSDAKYIAHMKTTRKMLSPVIDKVRGRYRIRFSFEEQKNLVSGKNPLGYRILAADLGINAPASWCVMTADGTVHAKGVIHLGCDEDRLSHLINRKRMYQQAGKKSRSIYRMVTEANRQLSIHTCRALMDIAVLYNVDCIVFEHLGRMKAKGGRYRERIHLWRANDVQGRVELQAHRMGMRVSRVCAWGTSKLAFDGSGTVSRRKDNYSVCTFRNGKQYNCDLSACQNIGARYFLRLQSKTKGCPDLPPVPQRTYALLLSVVDAMKAA

SEQ ID NO: 41612 - protein, 384 aa, unknown
  TnpB Polypeptide
MRHVTRYRIYPSQKVEGRLFTGFARCAFVRNWCLENRVYVDSCLPKLKAEYPELREVHSKVLQNVVQQIVHNLRALRKLKEKGRKVGKLRKKWVHSMIYEQTGFRLTGNRLWLSKIGEMRIELSRPVPGRIKQIVVKHTPAHKWFVAIISETPETPVPTTGTRAVGIDLNLENFSTDTEGTVFPHPHNVRKAAKRLRRAQRKLARAVDGSRNRRKQRVRVARIHEQVENRRNDFLHKWSRYYVDRYDLIALEHLKIKPMVESLDAKLRGRSRSILDAAWYKAREFIRYKAANAGKYVHLIDPAYTTQDCFLCGHREKKDLWQRTHACPICGYTVPRDLNAAQNILKRASVGWGTPESTLVETGTATPPSPAGQVPINEARISRL

SEQ ID NO: 41613 - protein, 349 aa, unknown
  TnpB Polypeptide
MVIVYRYRVKSFNGLLNAQARAVNFVWNYCNDTQKHALKWGKKWPSGFDLNMLTTGSGKLLGLHSGTVNAVCEQYAKSRSQKRRPFLRWRGKRALGWVPLKGRDLKREGDDFRFAGNTFRVFNSRVLPEGKIKDGTNFSRDARGNWFLNIALEVADVAQRPIHNGIGIDLGLRSFAVLSTGESIDRPRHFRVLEEALVRAQRAHQRRQAAHIHARIANARNDFLHKLSTRLVRDYTLIAVGNVSAAKLAKTTMAKSVHDASWSTFRNMLRYKAITHGAWFEEVDESFTTQTCSSCGARPDSRPRGIAGLGIRQWVCSSCGDSHDRDVNAAKNILARSGHRAPVEGILVL

SEQ ID NO: 41614 - protein, 349 aa, unknown; identical to SEQ ID NO: 41613
  TnpB Polypeptide

SEQ ID NO: 41615 - protein, 202 aa, unknown
  TnpB Polypeptide
MRPPIPGPKAHKALLDRLRRLSRSLSRKMKGSANRRKAKSKLAKLHARIAAIRSDAMHKLTTDLTRRFHTIGIEDLNVRGMMANRHLARSIADMSFFEFRRQLDYKAAMRGGLVKVADRFYASSKTCSACGHKLEILPLSVREWTCPACGVVHDRDVNAAINLKDMAVSSTVSACGEEGSDPTRKRRVKPASAKQEVSFVPV

SEQ ID NO: 41616 - protein, 202 aa, unknown; identical to SEQ ID NO: 41615
  TnpB Polypeptide

SEQ ID NO: 41617 - protein, 387 aa, unknown
  TnpB Polypeptide
MRKTFMYKLYRSKRNKRLHQQINIGGIIHNHCIALHRRYYRIYKKHLATHHLKAYITRLKKLPKYHWWSRLGSQAIQDVIERIDKGYQRFFQHLKDRQAHTTTHKVGPPTFRKVCNAKSFTLKQAGWKLLGGNRLRIGSTIYKFAQSRDIQGTIKTVTIKCDRLGDLYVYFSCRVVPQPIDRAMTGKSAGFEFGLTTYLTGSDGTEYHAPQPFKQALRRIAHANRELSHKCTGSHNRSRAQQHLARVHKRVGHLRQAFHWDLASALCTAYDHITLETLHLQGMKALWGRKVADLGFGTFVQTLHHVASKTGTVIHHIDPWFPSTKLCSVCGHVNHHITLRDRVWTCERCRTTHHRDHNAATNIYREGASSRGGIHASLSPGSTGGFG

SEQ ID NO: 41618 - protein, 398 aa, unknown
  TnpB Polypeptide
MIRSSKLSIKFSNKYKIKNINLFIDEYQSVVKQFVKILWDEKEVPLLLPKEITSKLSSWLSARAIQCAGKQASGIVRGAKRKQKKRLWKINDFIKKGMFKKSRILQKIYNKTLVSMPDIDNVCPELDERFVKQDFQNQTSFDGWITLSSLGKKLSICIPVKKTKHFNQIQGQKLKGIRLSRQWIAFNFDIPESEKRTEGSILGIDIGKKTVISCSNGVRSKEDVHGWTLDKIIDKLSRKKKGSKSFKRTQIHRTNHVNWTINQFNFNGVKQINIERIRYLRKGVRTSRKLFHWTYTEIFDKLKFKSEELGVQVLETNPTYTSQRCSVCGWVRKDNRKGKIFKCTTCGHTQDADLNASLNLSFILPSIPREIRLKQKNRTGFYWNVSCQEPIVSGAQKA

SEQ ID NO: 41619 - protein, 174 aa, Azotobacter sp.
VATCSDGPRLENGRFYRDLEPALAVAQRAGNKARVRAIHARIANRRKDALHKFSRQLVSRYGEILVGDVSPTKLAKTRMAKSVLDAGWGQLKTMLEYKCAHAGIVFKVVDERYTTQTCSNCGALPDSRPKGITGFGMREWTCSVCGVTHDRDVNAARNILAAGHGRPAVGIPAL

SEQ ID NO: 41620 - protein, 199 aa, Azotobacter sp.
VKVPKPTRDTSFPRFLKRAEANLRRKQKALSRCRKGSSNRAKASLKLARAHERVANARDDFQHKLSRRLIDDNQAVIVETLQVKNMLKNGKLAKHIADAAWHSLLTRLEYKAKAQGRHLARIDQWFASSKTCHACGYNAESMPLNVRAWQCADCGTYHDRDVNAALNIKRQGILKLKAEGLFVSAHRGLRKSGVSPVAA

SEQ ID NO: 41621 - protein, 413 aa, Azotobacter sp.
MSVYPDSHWHAATPGLQIRTDADRRTAAPDAPLRRLVPVRIQPGAGVAAGQSGGRWQVHRLCGDGQTAHRLAQQRGNELAERSARSPPATRPQRPRKSLQKLLREACRLSALQAQGPARQLPLSRPQVDQARPGQRPDLPAQAGLAALPQQPASAGRVAQRHGQPEWRQVVRRHPDAARGGNSRVAGWRRRYRPSGIARFATLSDGTFYAPLNSFKRHEAALRKAQQAMSRKTKFSSNWKQAKARVQRIHARIGNARRDYLHKTSTAISQNHALVFVEDLQVRNMSRSAAVTTETLDKQVRAKSGLNRAILDQSWFEFRRQLDHKLAWNGGHLVAVPPRNTSRTCPACGHVSAENRRTQERFACVECGFEENADVVGAINVLRAGHARLACEVSGAVRPPAAGTRRGESALSG

SEQ ID NO: 41622 - protein, 194 aa, Azotobacter sp.
VQPSLGQEAVGIDLGLKDVATCSDGIRLESGRFYRDLEPKLAIAQRAGKKARTRTIHAKIANRRQDALHKFSRQLVNQYGEIHVGDVSPTKLVKTRMAKSVLDAGWGQLKTMLDYKCAHAGIVFKVVDERYTTQACSNCGALPDSRPKGITGLGMREWTCSECGGTHDRDVNAARNILAAGHGRPVVGIPVLSA

SEQ ID NO: 41623 - protein, 353 aa, Azotobacter sp.
MKHTKTLKVRVRDKHAPLLRQMARSVNLVWNYLNELSSRAIRERGLFLSAYDMDRYTKGSSKEQGLHSQTLQEVSREYVTRRKQFGKARLNWRRSGGTRRSLGWIPFKSGAAQWKSGQICHNGHCFKVWDSHGLGRYRFRSGSFSEDARGRWYFNVVVEVDARPSLGQGALGIDLGLKDVATCSDGTRLENGRFYRDLEPALAAAQRAGNKARVRAIHARIANRRRDALHKFSRQLVSRYGEILVGDVSSTKLVKTRMAKSVLDAGWGQLKTMLEYKCGHAGIVFKVVDERYTTQACSNCGALPDSRPKGIAGLGMREWTCSVCGVTHDRDVNAARNILAAGHGRPAVGIPVL

SEQ ID NO: 41624 - protein, 353 aa, Azotobacter sp.
MKQTKTLQVRVRDKHAPLLRQMARSVNFVWNYLNELSQRSIRERGVFLSAYDMHPYTKGAGKDLGLHSHTLQCVAAEYVTRRRQFKKVRLNWRKSGGARRSLGWIPVNTGAASWKNGQVYHNGHYFKVWDSYGLGRYRFRSGSFSEDARGRWYFNVAVEIEAELSPGQGAVGIDLGLKDVATCSDGMKLENGRFYRDLEAKLAIAQRAGKKVRTRAIHAKIANRRKDALHKFSRQLVNRYGEIHVGDVSSTKLVKTRMAKSVLDAGWGQLKTMLEYKCAHAGIVFKVVDERYTTQTCSSCGALPDSRPKGIAGLGMREWTCSECGVAHDRDVNAARNILAAGHGRPAVGIPAL

SEQ ID NO: 41625 - protein, 305 aa, Azotobacter sp.
LPHQAGPGAAVPEAGRRNPATGSPRLAQRAGALSLGWVRMREALRFSGKILSATISRVADRWFASITVDTQDLTHLPNAENQGAVGVDLGVSALATLSTGEVITGPKAHAALLKRLRRLSRSLSRKQKGSANSKKARARLARLHARIANIRQDALHQLTTGLTRRFPVIGIEDLNVAGMMKNRRLARSIADMGFFEFRRQLDYKSEMRGGEVVVADRWFASSKTCSCCGQVRESLPLAVRTWVCPDCQTRHDRDGNAAINLKHYAVSSTVSACGGEGAGPGGNARVKPAPSKQEVSKKLPMGSFG

SEQ ID NO: 41626 - protein, 271 aa, Azotobacter sp.
LQQCLRHQQAAFKNFFEGRAKYPVFKKKRHRQSAEFTSSAFRYRDGKLFLAKCDAPLDIRWSRPLPGEPSTVTISKDSAGRYFVSCLCEFEAETLPVVPKTLGIDLGLKDLFVTSEGERFGNPRHTAKYAARLALAQRRLSKKQLGSKNRAKARRKVARIHAKISDCRADGLHKLSRRLINENQVVCAETLAVKNMIRHPKLSKAIVDAGWGEFVRQLEYKGEWAVGRSSRSTAGTPARNAVPAAGISLSACRWMFAAGVARNAEPSMTAT

SEQ ID NO: 41627 - protein, 398 aa, Streptosporangium sp.
VGALVRRSFKFLLRPTARQAAALTACLEDHRALYNAALEHRRTAYAKVKVSVRYGEQSADLKHIRADDAGGQGRWSFSSQQATLRRLDKAFRAFFDRLKAGRTPGFPRFKGKRWFDTVEWPKDGDGCRWDSQPEHPTATFVRLQGVGHVRVHQHRAVRGTVKTISVKREGRRWFVVLSCDDVPAEPLPTTGAAAGIDLGVASLVTTSDGEHLDNPRHLAASADRLAAAQRDLARKKRGSRRRRKAAARVAALHGKVRRQRLDGAHKAALRLVRDYDVIAHEDLRIANMTRSASGTIEAPGRNVAQKSGLNRSILDAGWGVFLTILSHKAESAGRELVAVNPAHTSRTCARCGHVAKENRVSQAEFHCQRCAHVAHADVNAAINILRAGLALRDVAQAA

SEQ ID NO: 41628 - protein, 562 aa, unknown
  TnpB Polypeptide
VGGISWSRATRPLSAPAGRGGARARRPGAFPTGDPAATINMDVANVLHANSDMCNGQRQKGCKWNCDGRKFQFNKVFMGGGGMECVRRAVAVELERPPPELYAVEEPYRRIVEEVAAYVAERGRLERERYNELYRRFRKQYPLPSQLTQQAINQGVETGKSFLELKRNGRVHKPRPEVGRVSIRFAKDSWSYRKTAASTAPVKIAVSLPGGRKEVWIKPHRRLWLYWWKVLCREAELVSTLVLKRRRGKWYAVFIFDVIPKREPPAEVVAFDVNENWVAVARVSLLATVDRVATWNRQYINPAVYSIKTDFGRLAKRYETVRNAKLEELKQKYPFAGRDEEERRQNVADTREFRKFTRRLRERRRKEGRIRQVARQMTRSPALIITEELGKNPQEEMIGVEKKKVRKRELRHRVKQTPFRKLIRAVEDKAREGGSVVFYVSSFRNSKVCPIHLAKLEDGGDWHVLRCLHGHAVDRDVAAVLNMLWKTTPTGWVKGVWWDVKETRKRLKKGIVPKEAVKRTNPIIPRPVVHAVWASPIGAEGQLPVARDAGPGRPHDPRPRRR

SEQ ID NO: 41629 - protein, 490 aa, unknown
  TnpB Polypeptide
MKSFLPTKTFMFRLLRRSTVVDRWCHETAVLFNRVVEFYFNVMEQHQEILDLKAKEALTSLEALTHRTRHNQTPAIPLDSVLDKIPAVFRRAAINVAVGTAQSFHSNLKAWKAKKAKAESKGKRFHEKPPVPPRQWNRSPVFYAGQWKGFTGSEVLLKLWTGASWCWVKFRLRGREVPIGWEIQSPSLVKTGRSWNLHAPVICEKFAKPEKISEQIKDPDLKICSVDLNINDALAVCVVLKPDGTEVATKFIRGGRFLQHRRKRILGIIATKRVKTGILQEGVQDNARRFKKLRDIDVNEAHQVSHRIVEFCVTHGAKILVFEHLGNFRPQKGRYSARGNEKRTYWLRGKIFQYSKYKAWEQGIVTSRVNPANTSRLCCKCGFEVYRYQYHPDLEHPYQAGAPNFLCQDPWCGAKGNADRGAAVNVGKKLFLRYEQKPTSKDLGVSRSQEAEKRGPRNRRGTYREVPSALRSSGCGYVTVTGGNANARAS

SEQ ID NO: 41630 - protein, 294 aa, unknown
  TnpB Polypeptide
MKARYRYRIYPTPSQKVSLAKLFGCTRAVWNDALAYCIEQYRAGNKKPKNGELQKTFVTQAKKTFDRHWLKEVSNIPLQQSLNDLEQAYQNFFKSCKGERKGEPVKPLRFKKRKHKQSARFRKGRFQVNERTVYLAKIGKLKIVWSRPLPCEPSSVTVIKDSAGRYFLSFIVEVEHEPLKVNDQSVGVDLGISTFATLSTGEKIDTPKPLKRRINRLRKLDKQLSNKSKGSNRYERARKRRAKLHAKLADTRTDFLHKLSTRLISENQTIVLEDLNVSGMVRNRRLSRAISDLG

SEQ ID NO: 41631 - protein, 531 aa, Moorea sp.
MQIMAQSNVSERQAEQGFSIQKAGSVKVENSQDSQLPSVIAGSAAANNLTTSPDLSHICTLCSRKRKSSLTSVQDSTTKDLVLKPYWSDLCAAINSHLLLPVETDSPDFGLNFLSTWSVSTVENSWFSTTLKVVEKQNSQQIFSPSFTSSLVEYTNFENTEQKSKKIRVFLNSEQRAIVRHWFGVSRYVFNKTVKILENGEIKANWKAIKTDILNDLPDWCKAVPYQIKSIAIKDACTAVREAKKKYKKTRQINRVRFRSRKNPVQSCYIPKSAVSVKGIYHTKLGALTFAETLPDNICDCRLTSTNGNYYLVVPYKTAHIKTENQGRVVALDPGVRTFLTFFSQTSVGKIGHGDFSGIQRLCQHLDNLISKISKAKGKQKYRMRKAARRMVIRIQSLVNELHHKAARFLVDNFDVILLPTFETSQMSKKRNRKLRSKTVRNMLSFGHYRFKEFLKQKASETGKIVVDVCEAYTSKTVSWTGEIVNIGGSKTIKSKIDGQVMDRDINGARGIFLRALVDTPWLKNQLALAG

SEQ ID NO: 41632 - protein, 516 aa, unknown
  TnpB Polypeptide
MKKPFLVGEEMREIVLTTGLVKGKRIVVYSRLENVFKGANQEEACMKRSKTSTFLLEVPLVVNAQQAKHLRAHLETARCFYNAVLGQARTRLRRMQADPAWNAARAIPRSQKATRKAAFAEQRKRYGFSEYALHEYAKRARWTWLAEHLDSTMAQTLATRAFQAVQKVCVGKARLVRFKSRGRGLDSVEGKRNDTGMRFVLQSPEEGSQGFLIWGEDHIPAHLDWDDPVVAHGLKQRIKYVRLVRRKASSPRAEGADSSGCRYCVQLVLEGKAFLKPKNRPGQDTIGLDLGPSTLAVFPRQAEVQLLQLAEEVRLDARKQRRLQRQLDRQRRANNPDNYDEKGRIKRQGKQRLRWHDSQEYRETRRQLATEARRLAAHRKTLHDRLVNDLIRVGNTITLEHLSYRGWQKCFGKSVGLRAPGMLIEHLRRTVAKTGGILREVSPFQTKLSQYCHGCKTYHKKPLSQRWHQCECGVGPVQRDLYSAFLTAYLEAGETVPSITQSDWAGAEHVSTSQGR

SEQ ID NO: 41633 - protein, 352 aa, unknown
  TnpB Polypeptide
MIVRTLKLKLTKAQEAKLSQWLWHLTGVYNWAIKKIERNAANKIYFSQKDFQNLLSGHSRRMDVPSHISQGTLSQAYTAWQRCFKKLAKKPRLKGKRNKLNSIPFFDPVKPPTGNRITLLGLGSVKYHKQPIPEAKIKCGRIVKRASGWYLCLWLDCNNVFPVKQTEAAIGIDPGFDTLLTLSDGTKIENPRELHKGATRMAQAQRACNKKLTARLQERQANRRNDRNHKISRYLVENYATIYYSNDNFKAMAHLHGKSTTEAALGDLLKCKLPYKSRIGGRKLEPVCSRNTTLTCGNCWSLTGPTGLAGLKVRHWACTACGAVHDRDLNSAKVVLSVGLGTSHERGIRYAT

SEQ ID NO: 41634 - protein, 170 aa, Parageobacillus sp.
MHRRKYEKKLARWQRILSRRQKGSSNWNRARLKVARIHEKIVNARRDFLHKLSTKLICENQVICLEDLSVKNMVKNHHLAKSITDASWSEFAAMLEYKAEWFGRTIVKVDQTFPSSQLCSHCGYRNKDVKNLNLRQWTCPQYQSHHDRDVNAARNILQEGIRLFTVGPAG

SEQ ID NO: 41635 - protein, 428 aa, unknown
  TnpB Polypeptide
MVVQAYRFALDPSPAQQRALVSHAGRARFAWNWGLARCQERYAADGKWHSGAELHKLWNAAKKADQGLAWWGENSKCAYQESFRDLDRALREFTRSKNGQRRGKRLGFPRYKKRGRCRDSFRFTGRIRCDRATVTLPRLGTIRTHESTRKLARRLEDGSARILSATVSRTAQRWHVSFTVEVERDMPGRHARPGSVIGIDLGVKTLLTGADDEGHLISVAGPKPLGSALRKLRRASRAHSRKQPGSANRRRSAARLARIHARVASVRADALHKASTSLARRYETVVAEDLNVAGMTRNRRLARAVYDQGFGQARRMLAYKTAWNGGTLILADRWYASSKTCSGCGAVKAKLPLAERTYQCERCGLILDRDVNAARNLRQLAASGAERITACGGTIRPGRAGHVLVKQEPGTADAGKTGTVPNQCGTAA

SEQ ID NO: 41636 - protein, 387 aa, unknown
  TnpB Polypeptide
VKISKTYKQKLKLTRSQEATIDSWLHTCRAIYNLALDTKIYAYKSAHQSLSNFDLQKQLTELKAEEEFKWIKEVPSQSLQSVIERMDFAYQSFFRGGGFPKFKRRDNYNSITFKSIKANGLDRIVLPKLGSVKFFWSREILGDLKRATITKEINGYYISILTSQEINIKPIEFYNENQVIGIDVGVNYFVVSSDGEFVDNPRFMQNNRRKMRILQRGLARQVKKSNKWYKTKDKIAKLHLKTKSQRKDFLHKTANSFIKHYDFISAEKLQVKNMTKSTKGTMENPGKNVKQKSGLNRSLLDVGFGMFFDLLKYKSVWNGKIFIQISPQYTSQKCSVCGHIDKENRKTQSKFLCVKCGHQQNADYNAAENIKREGISRFRQREAVACA

SEQ ID NO: 41637 - protein, 434 aa, unknown
  TnpB Polypeptide
VNVSQNEWKYLQKTLRIVKIIVSLQNIRLFNNRMKLIHKSYKFRISPDNEQKILLSKHFGATRFVFNRYLNSRKETYLEEKKSLNYYDNANDLTKLKKEEDFVWLKEINSQSLQSSLRNLDTAYNKFFRKQTQFPRFKSKYDKQSFTIPQSVYIEEGKLSIPKFKKGIDINIHREIEGKLLFATISKSTTGNYYVSITCEVEYTPFEKTNSKIGIDTGIKDLAILSDGKVYENIKTLKTNLKKLKYEQRQLSKKTKGSNSRLKQKSKLARVHEKVTNIRKDYLHKVSTEIVKNHDVICIEDLAVKNMMKNHKLAQAFSDVSLGTFYTMLEYKANWNDKVVVKIDRFFPSSKTCNVCNYINQDLTLKDREWTCPNCNTTHDRDFNASINIKKQGLKILSCGSGIDSQDKQKRSKALPLGESMTSEAHPIAFGVGG

SEQ ID NO: 41638 - protein, 319 aa, unknown
  TnpB Polypeptide
MQIRWNFKLKPGSRQRQKMSSWMVTLRKHRISMLVEVSDTLPEMKPLIEAKSVVGIDVGVNKLVALSDNSFVENIRVTTNTRTSRRLKMRQRAASRKLKGSNNKGKAYKRLAKMHHQLTQKRDGYNWQAASKIVKTADVIAPEDLNIKNMVKRAKPKHDGNGGYKRNGASQKTGLNKVILDCGWGDLFAKIAWLALKAGKPVVKVPAKHSSQECPKCGHIDKKNRDGEKFICTNCQHTEHADTKASRTIAARVGLVFPKKIKKTLPRDSGKVTPIRHQSVRVEGRNHAYGVIGTQLSLFDIADYQSSDKRVSRKYGRKS

SEQ ID NO: 41639 - protein, 415 aa, unknown
  TnpB Polypeptide
MIIRQGFSFKLKPDGAQDRKMSRFAGCTRWVYNQGLAWNEERRAADPAFELSYSKLCSELLVWKEQNPWLKETHSQVLQQSLKDLSGAFQKFFKGLSAFPKMHKKFVTTDTFRFPQGFKIDQGRRQIYLPSIGWVKYKRSRFIQGKAKNVTVSRQADGWHVSIQTEYEMEPPVHAGDSVGIDMGCVRFCTLSDGTFFEPYGALKKALKKLAWMQRRLARMQKFGKNWRKQKAAIARLHQHIANVRRDFIEKVSLEICKNHAEIFREDLKIKNMTASAKGTVEGPGSRVAQKSGLNRSIFDQGWGIFFTKLDWKALRLGGHVHTVPPQNTSRTCPICGCVSRDNRKTQELFKCICCGHQGNADVVAAINIKERGRSSLACGVPEKNAQAQVNPGRSKRPTPNQQQESTEVISGASC

SEQ ID NO: 41640 - protein, 325 aa, Oscillatoria sp.
MQGDLPQWVSETPCHIRQNAVFDAHLAFDASRDAKFRSCRDISQAIKFNNGNFSQGTWYPRLTKGLSFVAAEPTPTSCAQGTQLIFSKGRWFAVFPEPVRDSPTKADGIIALDPGVRTFLTGFDGRKFLEFGSGDIGRITRLCQHLDNLASRISKEPNKKRRRSMRRAAHRMRGKIRDLVDETHKQIAHYLTRNYRLIFLPTFETSNMVAKAKRKIKSKTARAMLTWAHYRFKSVLKHQAELTGTIVVDVTEEFTSKTCTRCGHVHARLGGSKVFHCPSCGLTLPRDWNGAFGIFLKALRDTASVTFIGDSAIVALSGNAWNNVA

SEQ ID NO: 41641 - protein, 426 aa, unknown
  TnpB Polypeptide
MNLVKNKQISDTRKATKLRRKDLDCKVYSCKIDKSHLSKKSAEFLRMIFTEAKWFINDIIARDAIFTSDYKKKNPLVLKDGKTPEERKIIHLSSQIRQELAAQLKQDVFTLSRVKRKGIRIGKLKFKREIYSLPLNQNGITFKIIDTRRIRIQGNRAAIRIQGLNQIPKEAETANAILIHRASNYYVNFTCFLPKTPREKTGKAIGLDFGVETMITTSDGEPFNISIPESPRLRKLQRGRFTRKVKGSKNWIRATNKIAVEYSKTTNQKKDLKNQLVYKLVKEYDVIVCQDENLKGWQKGWFGKQVHRSCMKGIISDLKHKSETFILVDKWFPSTQLCEVCGNRQEVKLSERVYRCPVCGNTKDRDTHSAINILNEGLKALRVMGSPEHAKSPVELLTSTKTALWSFGKPMTMKQEVVSPRGSGSS

SEQ ID NO: 41642 - protein, 407 aa, unknown
  TnpB Polypeptide
MECFTRKLKIDRSHLNKRQEEAIARLFLECKWLANSCIANERFDTDYLKELGGKVQVKTPEGIEEREFLVLGGQLSQSVIKGLKDNLRALSKLKANGRKVGRLRYRKQVTMVNFPQYGNSHKINRGKNRVKLAKIPGWMRVRGLDQLPENAEFANCKLLDKPDGLFIVITCYVDKQAQDFTPGTSIGVDMGVKTHLTFSNGTKINALVEESERAKGLRRKISRQKPGSNNRAKTMARLEKVLAKDANKREDIANKIVHELLKNETVYYQDEQIKDWFKKQGHIKPGKRLQGSILGRVKAKLEMSPRAVMLDRYLATTATCICGHKTKHEPDKRTFICKSCGYSDDRDIHAAKNMVRLGQSQNAPATEHSSTLADKHLMPVAPMDYTPIGATGNVWMIQEAPTSSVLG

SEQ ID NO: 41643 - protein, 446 aa, unknown
  TnpB Polypeptide
MRTNLSDEARLAKNARIREAGKATRARRAKMDCFTRKIKIDRSHLNNNQEEAIARLFLECKWLANSCIANGRFDNDYLKELGGKVQVKTPDGMEEREFLVLGGQLAQSVVDGLRANLKALSKLKSKGRKVGRLRYRKQVTMVNFPQYGNSHKINREKNRVKLANIPGWMRVRGLDQLPAEAEFANCKLLDRPDGLFIVITCYVDKQPEDFAPGTSIGVDMGVKTHLTFSNGVKIDALVEESERAKGLRRKISRQKPGSNNRAKTMARLEKVLAKDANKREDIANKIVHELLKNETVYYQDEPIHDWFKKQGRVRAGKRLQGSILGRVKAKLERNPRAVMLDKYLATTATCICGCKTKHEPNKRTFVCEACGYQDDRDIHAAKNMVRLGQSINVPAVEHSSTLADKHVRPVAPMDFSSVGKTGGVWMKQEVPTSSALGQFTTNPDGR

SEQ ID NO: 41644 - protein, 390 aa, unknown
  TnpB Polypeptide
LETVKTAVQNYRPEPRLLDLMEQFRQMVNLCIVIGLEKGRTSLKSLSTASYHRLKVCDTPSKYRLCAISRAAGILKNYRNLSKKHTVRTPYCHRAGLTICYDLKIKDNELIMPGDFHIPLNNYTLSVLRQPDIRIRSVTLTGSRIGVSFSKKIRLMDPKGMLGIDRNLNNVTAVDSLGNTLVHDLSKVTMIKSSSRRAVAKFKRDDNRIGRKIADKYGRIQRNRTQWLLHNASKKLVDHSRINSLGIAQENIKGIRRLYRKGNGQGNYYRGRLNSWSFSEFGRQVSYKASWDGLPVFDVNPKGTSSKCSVCGDCMVFSKESRTLHCPSCSNHVDRDVNAARNILSAGLRFSPLGLSSEAVKGNPTLMVIPGVDDSQSSLPSEAHLEQPKT

SEQ ID NO: 41645 - protein, 410 aa, Cyanobacteria sp.
MSQVLTVSCKLEVSPHQVEKLDAVLRAFANCCEYVNKNTDPKLTNQIAVQSLIYKEARDYSGMSAQMTIHAIRRVCANRKTAKQKNRPVKGFAPTSATYDARTFTFREKAKTVSLTMLKGREKFPLHIGNYQRHLLTGKNPKSAVLVKRKDGAYYLQIQLEQQLPIPEQTDKVLGVDLGRTDIAVTSEGEKFSGKQITQVRDKYTRVRTWLQRKASKGTRSSRRRCRQLLQRLSGRERRFQAQVNHTVSYRLIQHAKKTNQIMALEDLTGIRERSNQQPRSKTDRRRSNSWGLYQLRQFVTYKAIKFGVNLVKVDPRYTSQTCHKCLHIHPVKGESYRSGKRFKCGHCGWVGDADENGAKNISALGLSINQPGGSYLSCVLWNGEPVQLTITGYRATEKSGFNEVSLSSL

SEQ ID NO: 41646 - protein, 422 aa, Moorea sp.
MLLTYCYRIKPHAEQIATMERWLELLRRHWNYALGQRLDWLNRSRCSVDRCNLVSEPIGEIPHPVNYYTQQAALKETKKLFPEYKLIYAETQQVNLQRLNKAWERWRKPDKSGLRGGRPRFKKQGQLRSFVFPRVNNTKAGAHLKYGVLKLSRIGSMPVVMHRPIPDGFTLKQCTIIKKADGWYCCISMQNDTIPEFLPIDSVKSAVGIDVGLEKFLTTSDGEAVPIPQYYRKAIDKLAQAQRVMARRVRGSKNWQKAKQKVALLHLYLTRCRKEFHYQVAHWLCSKYDLIAHEDLNIKGLARTKLAKSIHDAAWGSFLEILQAVAVKRGLNVQKVNPRGTSIECFNCGSRVEKSLSERVHHCSSCGVKIDRDWNSGINILNRALMAVGLPLNGCGKSVQDIEEQQVSFVNLRSLHHSVSLM

SEQ ID NO: 41647 - protein, 413 aa, unknown
  TnpB Polypeptide
MKRLQAYKFLIEPNGDQQRAMRRIAGSCRYVWNKAQALQIENHKAGEKYINHFAMCKWLTVWKKEPDTLWLKDTPSQLFQVVLKDLVRAYKNFFDKRADFPSFKKKTGGSSFCFPQGCELDAGNSRIKVPKLGWIRYRNSRAVEGIIKNITVSCVAGKWYASIQTERDVPQPVPTATTAIGIDMGIARFATQSNGSFIAPLNSFKKHQQRLARYQRRMSRKVKFSNNWKKGKTKVQKVHTCIANARKDFLHKTTTMISQNHALVCIEDLQVRNMSKSSKGNSEQHGKRVSQKSGLNRAILDQSWGEFRRQLEYKMAWNGGILLAVPAHHTSQTCPCCGHVAKENRLKQAEFLCVDCGYGENADVVGAINVLERGQRLLACGEDGSGRGRKTPAKPASMKQEPTEATRHEVSHA

SEQ ID NO: 41648 - protein, 434 aa, Xenorhabdus sp.
VTNTKCICIRKTQYLLRRISVSFLIDQNIIESMKRQQAFKFRLRPNGQQERDMRRFAGACRFVFNRALARQNENHEAGNKYISYTKMTSWLIEWKGDTETQWLKESPSQPLQQSLKDLERAYKNFFHKRASFPRFKKRGQNDAFRYPQGVKLDQENHRIFLPKLGWLRYRNSRQVVGEVKNVTVSQSCGKWYISIQTEYETAEPHRESVSMVGLDVGVAKLATLSDGTIYLPVNSFKTSQNKLSKLQRQLSRKVKFSANWQKQKRKIQRLHSHIANIRRDYLHKVTTTISKNHAMIVIEDLKVANMSKSAKGTAEQQGRHVRQKSGLNCSIRDQGWYEMRRQLEYKQRWYGGQVLAVPPAYTSQKCACCGHTAKENRLSQSQFKCQECGYSANADINGARNILAAGHAVLACGGTMQSGRPLKQEPTEMIQAPV

SEQ ID NO: 41649 - protein, 450 aa, Natrialbaceae sp.
MQEAELTHSLSFGLDITEGEPANLREASLEARRIRNEVNRLDQQGWDWDDIETPITERANQVKNTTQQLIDKALQEIETYHEHKDDDRLDWGRPRTYIDEPYPVRMNHDEGYALTLNENGEVEFRISYKPYNYVRGTLQGSPDHLERVKTALTSDDWRVGTAELVYKHDEWRLHVTTTHETHTVASPETADTIVGIDINEDCIALAALTRNDGVIDSTVIEYPDIKRVRHEFFTKRKRMQEAGQSAMDAVVQTEERDFVHDQLHKVSRDVVEWLSQFDTPVVVFEDLKDMREDIDYGTTMNRRLHSLPFDKLRTFISYKAAWNGIPSQTVDPEYTSQRCPCTDCLHKVRANRRKKRFKCTDCSFQDHADRKAAVCVVQEWLWDRDENVPSLNTLPKVKKVRRTVSGPGGGADPHGPVFDSGVHRRGTATQASVEGQVRGESKSVASAVQE

SEQ ID NO: 41650 - protein, 247 aa, Microcystis sp.
MLGKAWSVSHSSAYRYRWFISFKMEVEQQTTNKTYDVVGCDLGIKSLATLSTGETFEGSKSYRKYEKQLARLQYLNRHKVKGSNNWNKAQRQIAKLHFKIANIRKDTLHKLTTYLAKNHGQIVIEDLNVSGMMANHKLAKAVQDMGFYEFRRQLDYKTQLYGSELIIADRWFPSSKTCSNCGYKKESLSLTERVFECEQCHVVCGRDLNASLNLASLAVSSTVSACRVDSADTTTVKQEVNVKFAHE

SEQ ID NO: 41651 - protein, 197 aa, unknown
  TnpB Polypeptide
MIFEISKQLTSNFGLKTFLTLSDKTEVESPLYHLKNLSKQKRLNRNLSKKKKGSQGRRRAKVQLAKLHIKTANQRRDYFHKLSNQLANNYDNIFIEDLNMKAMQMMWGRKISDLAFSEFINILEYKAKVTKIDRFFPSSKTCSNCGAVKKDLDLKTRVFKCDTCDSILDRDLNASINIKRVGASTLAGEVIRATSVA

SEQ ID NO: 41652 - protein, 389 aa, unknown
  TnpB Polypeptide
MSGRVVRRAYRYRFYPTPEQADLLNRTFGCVRYVYNRALAERSRAWTQDQKRVTFAGTCRMLTEWKAEPETAWLYEVPNVALQQGLQHLQNAYVNFWAKRAKYPTFKSKHKSRASATFTSVGFRYRDGRIRLAKMDAPLDIRWSRPLPDGAEPSTVTVSRDAAGRWHISILVKETIEPLSPAGTAVGIDAGITSLVTLSTGEKIANPRHERRDRARLAKAQRYLSRKQKGSANREKAKVKVARVYARITDRRRDFLHKLSTRIIRENQTVVIEDLSVRNMVRNHSLARAISDASWSEFRRQLEYKADWYGRTVIPIDRFYPSSKTCSACGVIAATMPLNVREWACANCGTLHDRDVNAAKVILAAGLAVAACGDGVRPARAEALEGDHQ

SEQ ID NO: 41653 - protein, 387 aa, Petrotoga sp.
MLKTYKFRIYPTDEQIEKFNKHFGHTRFVYNLFLEFATNVYKNTKTYTNYNMWAKVLVTLKKSEKYKWLNDVNSQSLQQSLKDLETGYKRFFKKLSRHPKFKKKSHKQSFRVPQHIQLYEKEDNDKYGIIFVPKFKEGIKARVHRKIDPNAKIKNCTFIKTTTNKYYVSILFETDETIPERDIDYENSIGMDMGLKDIVVLSDGTKVEAPKVLRKYEKKLKHVQKKLSNKVQGSKNREKDRLKVAKIHEKIKNAREDFLHKLTKEISENQANVFFVETLNIQGMLKNHKLAKSISDVSWYQFKTFLKYKAERLGKKVIEIGMFEPSSKTCSVCGYKNKDLELSDRKWTCPECGTKHDRDINAAVNIRQFGIQKYISKQSKELQLVPA

SEQ ID NO: 41654 - protein, 358 aa, Deinococcus sp.
MNHNLDQYVVCLDRHSFPALRALVTGGQLQRVLASVPGWPRAAVYQPLVRVTVHGDAHLRLGRTELSAHLHTLPSAAYEALLRRSGEYWQPAGLAELRTLFSTPGVDASIFRTALKATLARPLVQDHTPHLAAADHGCHADWRPAGTLLFEQGGTWYLVLAFELRSLVPWAQERRVFGIDLNDNPSLCIVDAARTVQMIGGPHTLLETLRREHVAKVTGAQLSPDEIRLVGTLGYATGREPLEAALRHLLGEAQAVGVEQLDLRGMQARFVARSRERATLDCLMAWLPQALYRAGVKLYRVPAANTTRACHRHPTQIGTVRGRMFHCPRCGEAQHRDVNAALNVLTRTLHVRHLEASR

SEQ ID NO: 41655 - protein, 383 aa, Actinoplanes sp.
VKLVVQVKLLPTPEQAAALEATLRACNAAASDVAVMARVSGVYRNYDLRKGAYQGIKADYGLGAQAAQHVIKKVADAYAALKANLKAGNYGKPGSKRRRRVESDPIGFRWDAAQPYDARMLSWQHDARTVSIWTTAGRVKNVAFTGSPDQLKAVGILPVGESDLVHRDGMWFRYATVEVVEPDLIDPQGWLGVDLGIVQIATTSDGKTYAGKRLNRYRRRQVRLRARLQAKATKSAKRLLARRNKKEARNAANINHVVSKSIVAEAARTSRGIAVEELTGIRARVRLRKPQRAALHSWSFAQLGGFLSYKARRAGVPLVQVDPRHTSQTCSKCGYRDKRNRPDQATFNCRSCGVVASADVNAAVNIAQRGADGWGAANHPHAA

SEQ ID NO: 41656 - protein, 451 aa, unknown
  TnpB Polypeptide
MRVLEAKLLNGTAQQYQALDEAIRTAQFVRNKCLRHWMDHQGVNRATLYSLCKDLAREFPFAQKLNSQARQASAERAWSAISNFYRRCKEKAARKGYPKFQKHCRSVEYKLSGWKLSPDGMSITFTDGFQAGTFALYCNGEARRDILTLKINRVRVIRRADGYYAQFCLDVERREQVEYTGQAVGLDMGLMHFYTDSDGNKVECPKFLRRAERRLKREQRRLSRKLRTPSRLRERRGAKPQSKNYHKQRQRLGKVHLKIQRQRRDWVIKLARCVVASHDVVAYEDLQVRNLVRNHHLAKSIHDASWSLFTGWLDYYGKVFNKVVVAVPPQYTSQDCSQCGHRVKKTLSTRTHRCPQCGAVFALASRSEIDRDENASINILRRGLELLGEEWNNGTFGQKGTALKGGTPGETSTAAVEGQPDTVSAVAEPGTRIPCLYAGEHVKSPKRLTEP

SEQ ID NO: 41657 - protein, 363 aa, Paenibacillus sp.
MHKAFKFRLYPTPKQQTLINKTIGCVRFVFNHFLSRRKDAYEIEQKTVGYAACSAELTELKREKEWLSEVDSTALQRSLRALDDGYQAFFRKQNEYPKFKSKRDANQSYTAVNNGAIRVEGNRLRLPKLGCTRFAKSQEIVGRILSATVRRSPSGKYFVSLVCEADVQPLPASPNAVGIDLGLKTYMTLSDGQKVDNPKYLREYEKRLAGAQRVLSRRQKGGKNREKARIRVARLQEKIANMRNDFLHKQSTRLIHENQVICLEDMRVKNMVKNHHLAKSISDASWSKFRTMLDYKASWYGRRLSVVGIAFPSSQRCSCCGERNPGVKDLAVREWTCPECGELHDRDVNAARNILKEGVRLLA

SEQ ID NO: 41658 - protein, 367 aa, unknown
  TnpB Polypeptide
VLKELKGDPDYEWLRKFPSQCIDSLLNDLNEAFKKFFKKQGGRPTRRTFLKNNSAKLKTIGKKKPDGSNYINVLYRKDTVRIPKLGLVKYKKHKKFYGKPTVSTIMREGNEYYICVTTRQTFKAVEHCGTAIGVDLGLAFPSATSDGEILPKNTMLDTIDSRYRKLQKKFSRQKNKQSIRRKRTKAQLADLKRKQTRCRKAYIHKATTELTKRYSYIAIEDLKVQNMTKSAKGDAEEHGKNVKAKSGLNRVVLNVAPYEMRSQLVYKAGWYGSHIEDVHTCPECGAIDKKNRKSQSVFECVECGHTNNADINAARNILIKSGMSETALGLRKTPSKNHQVLATSESIVSCFQPLSDCNSNALSSGYG

SEQ ID NO: 41659 - protein, 401 aa, unknown
  TnpB Polypeptide
LKVVRTEQLYLPHTSTLSQLCHNSKNLYNEANYIVRQEMFRAGKWIRYNSLASILKDSDCFKSLNAQTSQQTLKVLDRSWNSFFKAIKEWKIHPEKFLGRPKIPNYKPKDGETILIFTNQQVSIRDGYLTFPKRADLKVKTRLADDTDISEVRIIPKGVGYVCEIVYVKNVETLKLDRNRVATIDFGLTNIVTIANNVGEQPIIVKGGVLKSINQFYNKRRAELQSIYAEQEIYIGNKMKVLTTKRNAKIKDQMHKISRIAIEYCIAHNIGTIVIGHNENWKQNADMGKKNNQNFVSIPFYILTNQIQYKGEEIGNQVILQEESHTSKCSFLDSETIGHHETYVGKRISRGLFRSANGTIMNSDVNGSLNIGRKAIPKAFAKAVADGIEGVVLHPKRVDTF

SEQ ID NO: 41660 - protein, 394 aa, unknown
  TnpB Polypeptide
MKAYKTELAPNNVQRTLLLKSAGVARFAYNWGLAKRQDQFEQTGKSSTCLALRRELNSIKRTDFPWMMEVSKCCPQEALRDLETAYQRFFKGVSGHPTFKSKKNGAGSFTFSYNIQVDANRIQIPRIGKVRLKERNYLPTDQHILSATVSEHAGRWFVSVLVREEIKVPKNNGSIVGVDLGINHLATVSDGSVFDNPKALRRNERKLARLQRSLSRKKKGSRNRNKARQKVAKFHNRIASIRNDAIHKITTQLAKTKSVVVIEDLNVSGMMKNHKLAKSLADASFGEFRRQLQYKAKWYGSRVVVADKWFPSTKKCSICGNVKEMELSDRTYVCSICGNTIDRDLNASKNLEAVAVSSTETLNACGELTTTEATVMQVGSMNQEPNTIQDVLNG

SEQ ID NO: 41661 - protein, 501 aa, unknown
  TnpB Polypeptide
MRREKQPAEAETDDGEELAQLPPETLRRRVQATPAILLAQEAAAQVRNDANALLKEAFAARRKLPTKIDLKKTLKGTANAVALGRAKQVQYAVDDACAMHASYRSNFFDWVKDHASRQGKPRPPRFYRQGQRARVRFDYQDFTVLRNRLYLPATLGLPAIPLLDRQGEPLMEPGDRLVEVRLEPCRSRQYVDVNFVIRRKPKPEDTTTLAGTLFIDLGVARLVTCLDDKHLNAFFVSGGVAKAILQRGAKWHARLRSESKLGIRHGKRRAGQLAARSAHQMDDLMKKVARLVVQYADQHKLASVVVGRNVAWKQNAEMGKKQNQLFTFIPHAKLIAALRTKCQRAGIVFIETEESYTSKTDHLAFEAMGPKPSGYRWLGSRSPRGCFRSSVGISLQADVNGCIGLGVKVGGKVWLQHLLERLGPSPGTMLVPRNVHVNGVGSESSPAAGIRHLRLLSPRTWINTQVALVKAGLIPDLQRGHSASPRLQVIPGAVAPLQASS

SEQ ID NO: 41662 - protein, 412 aa, Dictyobacter sp.
MRLVERHLVRATDPRFAVIDAAAFASKNLYNQANYQIRQAYITHGRYLPSADVFHLVKGRDCYKALPAKVANSILILLHKNWVSFFEALASYNADPSRFTGRPRLPKYKDKEKGRNILLYDRQALGKRAFKKTGKLLPSGLPIEIETCVPEWWHIAQVRIVPRSNEYMIEVVYEQPEEQADVDRKLVAAIDVGVNVLAALTSNKPGLAPRLVSGKPIKSINQYYNKQRATHQSHVSHEKRFTSRRLDCITTKRNRRVDSYLHTASRRIIDLLVEEGIGVLVIGKNPLWKQEVNMGSKNNQTFVQLPHARFIEQLTYKAKLVGIQVIIQEESYTSKASFLDADPLPTYQADRSETVVFSGRRIARSWYRASDGTTIHADINGSLNILRKSNSDLLQLGRGVEGAAVRPRRLAV

SEQ ID NO: 41663 - protein, 391 aa, unknown
  TnpB Polypeptide
MANKAIKYRLYPTTEQIIMFAKTFGCCRKVYNLMLADKIESYKSTGRFASVTPAKYKKEYPYLKEIDSLALANKQLDLQEAFRNYFSKSRKKKNGFPKFKSAKHSRKSYNTNCQYPKPSNNLKQPTIRLEKNRINLPKVGMVKINIHRMPKSDWILKSVTVSEESNGKYYASVLFEYEHEVTYIIPKENICTDNVIGLDYASDGLYVDDNGNIGTNHKYYRENHKKLAKAQKRLSHMQGSKKKETKSKNFLKQLKKVNKIHRHIANQRLDNLHKISTEIANQYDVVCVEDLNMKSMSNKGFGNGKATLDNGYGMFLNMLEYKFVDKGKYFIKVDKWFASSQICNKCGTIHPEMKNLSKRIMKCMCGLVMKRDHNSAINIKMEGLRMLKSAL

SEQ ID NO: 41664 - protein, 530 aa, unknown
  TnpB Polypeptide
MGQMAKTINSEAKVAKQRQNGKKIPTYHNAIKFKITDVKLIGYLNDIHEIFLNEYELINQQNIQPSCFTKEELSHEFRGHFTKKLAELINKDYLSWDLNNKAKYFRMFSLHLRQDFKSLDYKQKITQILEKYDFNIQNAKIKKKIQDELAKLNLYPTKQELMNICRCHSNANKRSHSQRSDEPSNANPKVIPLDFTLGQDKQTIVQPNEKEPVFYINFNGNWIWLNFTDKINKLPYFKNKIDRDNFVRFTKPKFVFNHEQNCWFIILTIESKVVFNESDKSTVTPQVTVAGVDIGQVKPYSAVLMDMTLNKQNVVESAKLVSRELVCSRETKRINEKLGEVKYHLSNIYRKLDIYAGIIKNNKNPEFTQQILKKQEVLINEKRCLRRKRKELQKRKSYLATRDLIRQLNFFNVKKVNIERLNWVENTGGSWDFSQQQDILEQKAIEFGIKVTKIFAANTSKENPFTKKRLLGKPNPKTRMVQFFGKKYQIDRDILGAINVALRNKIDNKYNKIVLNFNENKKILRGLMDF

SEQ ID NO: 41665 - protein, 407 aa, unknown
  TnpB Polypeptide
MTDYLIEKHIIKSTHRFFKELDNLCFLSKNLYNATLYAVRQQYFKNKSYLDYATVNKAFTHSKQADYIVLPAKVSKHTQKLVDKAYRSFFALKKHKNIDISKSAKIPKYLDKNGRQVVHYEKGALSLVKQGFVKLSKTNIIFKTKLPKQAINFVRVVPCGNHIALEVGYKVDYLTQQVKANRIASIDIGLNNLATITSTVDKPFILNGKPLKAINQYANKEVAKEQNKLDTKVKTSTKRKDNLWLKRKNKISNYLHKASRIIVNYLVSNKIDTLIIGKNNGWKQNINIGKKNNQNFVQIAFDNFIEKLQYKCRLVGVDVVLQEESYTSKCSFLDDEEICKHEKYLGKRIKRGIFRASNGKTINADVNGSANILKKYLQAKATWNDIIKSDLVEMCSTSAIQKITPHW

SEQ ID NO: 41666 - protein, 390 aa, Moraxella sp.
MTIIRGHIIRLDPTNKQATHFSKACGVARLAYNWALAEWKKQYEQDKNYRDDCQAKGITIDENRLNKPSQGKLRKQLNAIKREKYLFMLEVTKCSPQLAIMQLGDAFKRFFKGESKYPQFRKKGVNDRFSLSNDQFKLKTINNKPYIQIPNLGLVRMRENLRHQGKILSAKVFKQGEKWFVSVAVELGEINKPLNKTGEQVGIDLGISDLAVLSDGTKAQAPKPLKTKLKQLKRLSKQLSRKQRGSKNREKAKTKLSRLHYKISCIRKDFTHKLTTQLVKSYDVICIENLNVKGMVKNRHLSRAISYLGFYEFKRQLIYKANQWGKTIKELDRFYPSSKTCSNCGFIMAKENLTLAVRHWICPSCHANHDRDINASINILNQADKVLTLS

SEQ ID NO: 41667 - protein, 346 aa, unknown
  TnpB Polypeptide
MDNVCIIMTSQPHSPPLNVKRERRGYKKCQVFPCSNRYATLDKGFTNFFEHRAEYPTYHKKHRRQSATYAATAFVWNGSTLTLAKQKEPLDIVWSRLLPEDAKPRSVTISKDKAGRYFVSLLVEEDIQTLPMIDKSVGIDVGLKSFLVTSDGEVVDNPKYYARNEKKLAKLQRAHAKKKKGSKNREKARKQVARLHARIADTRRDFQHQVSTRLIRENQTICLETLAVKNMLKNHCLAKAVSDVGWSEFIRQLEYKAAWYGRTIVKIDRWYPSSKTCHCCGWVKEDLTLEDRMFVCDDCGNVTDRDYNAACNIRRVGHTQIACGGAVRRERRKSRHAGSVEAGSPS

SEQ ID NO: 41668 - protein, 515 aa, Lentzea sp.
MTQPMTGVRHREAFASTRGTRCDISANTTAATVSELDRWLNARITPPFPGTCCLPRTLRRTNSTTIGHNTSIASENQKPRPRRGIFHVQAASSSGVTQPPCGTHGNHSTTLRAVRTAYKCRAYPTPEQAAILNRTFGCVRLVWNKTLDERNLRYRTTGTRTSYRETDAELTLWKQTQELAFLSEVSCVPLQQTLRHQHTAFQRFFDGHARYPRFKSRAGRQRAHYTRSAFRMRAGALTLAKINTPLRFVWSFNDVDVAALSPTMVVIGREPDGRWYVTFAADAEPPAPAEPTHHAIGVDLGLTEYLVTSDGERITNPRHLARKARNLARYQRRMARCQSGSNNRSRAKSKVARSHRKVHNARLDFLHRTTTRLVRAADLIVIEDLNIAGMVRNRSLARAISDASWGEFRRQLQYKCSRAGRTLVVIDRWYPSSKTCSSCGHLLAELKLSARHWSCPACRTRHDRDLNAAKNILAAGRAVARGDSVDACGADVRRQGPSLPQSALKQETLAVRRSS

SEQ ID NO: 41669 - protein, 377 aa, Streptomyces sp.
MTRCASARTPTSRGSRTRRSGTCPSRSSPRPRRPRSGPGSAKSPPSSCSSPFGTWTLRTFNFFASLNGTRNGPKFAEPRFKSKQDNRQSVRFTANARWSITTGGDLRLPKIGDVRVKWSRSLPSTPSAVTVIKDAGGRYFCSFVVESEPETLVPVAREVGIDLGLGHFAVLSDGTKIDSPRFLRRAEKRLKRAQQTLSRKAKGSKNREKARLRVARAHARVADARRDFHHQLSTRLIRESQAVAVEDLAVKGLARTNLAKSVHDVGWSAFVAMLEYKAAKFGRSFHRIGRFEPTSQVCSACGVKDDPKPLHVRIWACGACGAVLDRDINAAVNVAKAAGLAVTARGAQVRPVPVPAQRVEAGTHRDGQPTVVGIPAL

SEQ ID NO: 41670 - protein, 477 aa, unknown
  TnpB Polypeptide
VGVLVYQAFRFELCPNNLARSALSSHAGAARFAFNWGLARVSAHMMAYESCRVLALRQGAGAVEAKHWARAVVGPLACTLPALRREWNRAKHEAAPWWASNSKEAYSSGLDALARALKGFFASRSGERKARPVGFPHFKKKGSRRRFKVTTGSFGVVDGRHVRLPRVGVLRTNEPTAKLVRRLGEGTARVLSATVSEHAGRWYVSFGCEVQRPETSLPAGPAVGVDLGVKRLAVLSDGEVVANPTYLSRYARRMARLQRQCSRRRGPANGTVPSGRWRRSKAKLARAHVKVANARSDGLHKLTTRLAKAHHTVVVEDLAVAGMTKSAKGSGNWRGKAGLNRAVLDASPAQLRRQLSYKCTWYGSKLVVADRWYPSSKTCSGCGLVKTKLALSERTFCCEHCGLVVDRDANAAANLAGLVKATAGTASGAGTSRGTASANAQGEEKFMPPGRCSSLNCEDSAGQPGQTATASAQAGAA

SEQ ID NO: 41671 - protein, 196 aa, Escherichia sp.
MQVATCAGSRKHCPVRKRERKQAQSQNTTCSRSRTGSQCPCRFQHKLSRAIVDENQAVIVETLKTANMMKNHHLARAIGDAGWSGFITKLEYKATEKGVHLVKLDQWFASSKTCHCCGHKMSEMPLHKRIWQCPECGVEHDRDINAALNIKRKGILELQAAGLVVSAHGGQRKSVTQTVCGLRSGKPRPTGRGAVT

SEQ ID NO: 41672 - protein, 426 aa, unknown
  TnpB Polypeptide
MKEDHPMHLKAYKYRLYPNKQQEEYLSKVFGCVRFIWNRMLDEKMNATGHIPQVTPAQYKEEYPWLYEVDSLALANTQLHLEKAFRNHFRDPKRFKKPSFKKKRNEQSFTTNHVNGNIKIDFDNSTVKIPKLNIPIKVKFHRKFEGTVKSVTIRKKPSGRYYVSILVEEKIEPLKPVYSACGIDVGIKDFATITQGNGVTKKRIHKPNPEYLEKSKMMLTKLQRQLDKKVHPRRKGDKTKKSKNYIKYAKRVAKLHEHVSNQRLDFLHKLSSTVIHENQVIVVEDLNVEGMLKNRHLAKTISSVSWSTFINMLQYKADWYDREFIKEDRFFASTQKCSKCGYKNPLLKDLSIREWICPVCGTHHDRDENSSDNGYEVALIRLKQLVGQELPEPTPVERDNMDDRMATYLKSEPSLKQEATTSTSGR

SEQ ID NO: 41673 - protein, 367 aa, Clostridiales sp.
MERKRGYKYRAYPNKEQREFFSKNFGSCRYVYNHYLAKRKATWEEWHDTMSFSETCKDLSNFLKKEKDWLKEADSSALQQSLRHLDNAYQNFFKKRSGYPKFKKKRSVQSYRTMNNNNSIRIEGDHIKLPKAGRVKIVNTRSFEGRITGATVTRTASGRYYISLQVEEEYEILPNKGGVLGIDAGLTDLCTDSNSNKIMNPKTLTKHEKRIRRLQRSLSRKAEGSKNREKARKRLAREHEKVADIRNDFQHKMTHRLANDNQVVCIEDLNVKGMMRNHRLAKSISDASWSEFFRKLEYKMEDHGGILIRVPKTYPSSQLCSCCGSQNSKVKDLSIRAWKCPECGAVHDRDVNAAVNILAKGLEMLAS

SEQ ID NO: 41674 - protein, 250 aa, Lactobacillus sp.
  misc_feature (24)..(24): Xaa can be any naturally occurring amino acid
  misc_feature (119)..(119): Xaa can be any naturally occurring amino acid
  misc_feature (154)..(154): Xaa can be any naturally occurring amino acid
MARLERFTVSVNSRKQYQASILVXSENQTFKKTKKSVGIDLGLKSLTITSDGQKEDILKVDDRLNKQLRIWERKKSRRYENAKKAMAFDEHDKVLFPRTDLKQFPRYQQAVRTVAKLKXHIAERRRDNLHKLTTRLVKDYDTIVVENLSVKNMXKNHHLSASIANASWGTLISQLKYKCAWYGKKLIIIDPKNTSRICHECKQKNYEFDSLSQSEWLAAREWDCPNCHAHLDRDVNAAKNILAKGLETLA

SEQ ID NO: 41675 - protein, 436 aa, unknown
  TnpB Polypeptide
MKLSGDLKSLENSIAIYREALRFVIPVVDTHWNELKDFEYANQRMVYVEQLIHSTNRNEALYDFDMEFPKFPSYLRRAVINRALGIVSSYRSNLENWEQNRKGQAPKLSLTHFEYPAYYKGNLFRNFNPIHQTIELKVFKNNDWVYEVYQLKTSDCTYYQTYLTGKKQNVPIIQRKGRRFYATFSYEEETSLIPEESIHKICAVDLGLGTDATCSIMDEDGTVYARKFISFRAEHDRLHTQLGRIKRNQKRGSRYNKTLWRKVAGISQDIADKTVKAILEFGNEHEVDAYVLEYLDFKGKNAVKHAHFWRYKRIYKVLSQKAYQHGLRVARVNARNTSRLAFDGSGWSKRGREIDPCTPYSLMQFTTGKTYNADLNASYNIGARYFIRRLFKTVSATQRLVLEAKVPQATKRSTCTLSHLINLRSELAVLTARTQA

SEQ ID NO: 41676 - protein, 415 aa, unknown
  TnpB Polypeptide
MTDTTLINRAAVIRLYPNREQAAALRRWQGGLRFVWNNTWAWCKEQRETAGKWPNKAAIQNRMVGLKKQQGTEWIADIPAHAILTLADDMARAMKNWFEKRAKMPKFRGKFQRAFSVYAVNQATKFIEQRVKLPKLGDVRFKAGDLPEGRLLSSRIYRDADKWFMSSVFECQPFAESVGEVERVGIDMGIKTLATVFDGEKIVTVENPKALDKHLARLRRYQRRVSRRVKGSNRREDAKRRVARLHQKIANIRKDAQHKATSAIVKMADTIVVESLNVKGMMKAKLQSKAIADAGMGEFLRQLKYKAAWHNRTVIEADRFFPSSQICFACGEIHKEMAVKRLDVLRCDCGNVMQRDENASRNLFAYREGLGNAGGKTQKTCMEIGDQEQAAMPVPVPVSEVRISKRITHHDVYVV

SEQ ID NO: 41677 - protein, 385 aa, unknown
  TnpB Polypeptide
VKRRQAFKFQLRPSGQQECEMRRFAGACRFVFNRALALQNENHEAGNKYIPYGKMASWLVEWKNATETQWLKDAPSQPLQQSLKDLERAYKNFFQNRAAFPRFKKRGQNDAFRYPQGVKLDQENSRIFLPKLGWMRYRNSRQVTGVVKNVTVSQSCGKWYISIQTENEVSTPVHPSASMVGLDAGVAKLATLSDGTVFGPVNSFQKNQKTLARLQRQLSRKVKFSNNWQKQKCKIQRLHSRIANIRRDYLHKVTTTVSKNHAMIVIEDLKVSNMSKSAAGTVSQPGRNVRAKSGLNRTILDQGWYEMRRQLEYKQLWSGGQVLAVPPAYTSQRCACCGHTAKENRLSQSQFRCQVCGYTANADVNGARNILAVGHAVLACGEMVQ

SEQ ID NO: 41678 - protein, 377 aa, Paraburkholderia sp.
MDIKRAYRFRFYPTPGQAVILARTFGCARFAYNHMLRQRTDAWYGRQERMGYHETSAALTALKKTEEHAWLNEVSSVPVQQALRHLQTAFANFFARRAKYPTFRRKDGPQSAEYTTSAFRWDGAALKLAKMDEPLAIRWSRTIPRGAKVTTVTVSKDTAGRYHVSMLCDEVVSARPVAAGKIGVDLGLTHFAILSTDEKIAAPNVFRKNEEKLAKLSRRLAKKQKGSANRRKAKLKVARMHARTADARRDFLHKLSTRLINENQVIAIESLSVRNMQKNRCLAKSISDASWSEFTRQLEYKAQWYGRTLIGIDKWYPSSKRCSDCGHTVAKMSLKVRAWTCPECGSMHDRDVNAARNVLAAGLAVSAHGEAVSPVSL

SEQ ID NO: 41679 - protein, 398 aa, Paraburkholderia sp.
MPKRQPDPRTTTRVLRVRIKDRHASELLDKAFWVNQVWNYSNELSYKVWERERRFISGYEIDRYTSGASKAGVPLHSQTIQAISAEFVTRRVQARKVRLRWRVSSGPRRSLGWVPFKASALRYRNGQIFVSGLDRPLSLWDSYGLSSYELGAGCFSEDARGRWYLNVTVRIRKAAPEQGRSAIGIDLGLKDFAKTSDGEPIEAQCFYRKYEAALGVAQRARQKKRVAAIHARIKNSRKDFLHKASTALVRKHGAIFVGNVNASALARTGMAKSVLDAGWSAFRTMLQYKCDDAGVWFEEVDERYSTQTCSCCGSRTGPSGPEGLAVREWTCTVCDAAHDRDTNAARNILRGGLERMEAQFAAAVGQAVANEVPPGARVGRDPLAEGILALSATAAAAD

SEQ ID NO: 41680 - protein, 133 aa, Azotobacter sp.
LHKLSRRLINENQVVCAETLAVKNMIRNPKLSKAIADAGWGEFVRQLEYKGEWAGRQIVQIDRWYPSSKRCACCGHILERLPLDVRRWSCPECGSEHDRDVSAAINVKAAGLAVLALRENVSGMGQMPVSSAR

SEQ ID NO: 41681 - protein, 376 aa, Bacilli sp.
MYKSYQFRLYPNNQQIVQIQKTFGCTRLVYNYYLEKRKKDNLTCFDVIKDLPNLYSEYPFLKEVDSCSLRCSLFDLDDAFKRYFKHQNNYPKFKGKYSSKRCYRTNYITSTYKGKRYENIRVDLKREVIILPKLKEVKIRGYRNLESLPGRIINTTISECSSGKYYVNVLVEVSHIVPKIIPKRIVGIDLGIKDVVITSDGEKIKNERIIEKYEKRIKRKQRELARREKGSSNYYKTKKRIAILFQKLKNARKYFIHQITKKLVLENDIIVSETLKVKEMLEEKRFSKFLSDASLSKICSILKQKASYYGKRYIQIDSYYPSSQKCSRCGYKNEKVKNLSVRNWVCPECGSYHDRDINASQNILFAGIKKYMKELI

SEQ ID NO: 41682 - protein, 359 aa, Planococcus sp.
MSQIITVKVKLLPTKEQQRILSQMSRDYISVINQLVNEMVVERRKTKKTSKHVISNLPSTVKSQAIQDAKSIFVMKVMKSKYSIIPFLKKPLCVWNNQNYSFDFTHIYLPLMIDGKAKKVPVRALLVDKNNRNFELLNHKLGTLRINQKSGKWIAQIAVTIQTMEKTGTKIMGIDLGLKIPAVAITDDNNVRFFGNGRMNKFVKRKFQTKRKKLSQKKKLNAVRYLRDKEQRWMKDQDHKVSRAIVNFAKQQKVSVIRLEKLANIRQTARTSRKNAKNLHTWSFYRLSQFIEYKANLEGIKVEYVNPAHTSQLCPACAEKNKAKGRRYLCKCGFEKHRDLVGAMNIRYAPVVDGKSQSA

SEQ ID NO: 41683 - protein, 226 aa, unknown
  TnpB Polypeptide
MEIGKINNVTIEKTATGKYFAVLNIDFEPKQHINSGGVIGIDVGIKDFYSDSNGNKVSNNKFLKKSMRKLVREQRKLSRKQKDSHNRQKQRLKVSLVHEKITNQRNDFLQKQSTMLVRENQTICIEDLKVKNMIKNHKLARSIADVSWSKFFNMLEYKAQWYGSKIVKVPTLFPSSQTCSCCGYQNKEVKNLAVRKWECPVCHTKHDRDMNASINILNRGLAMLSA

SEQ ID NO: 41684 - protein, 409 aa, unknown
  TnpB Polypeptide
MRPVTRSYRIRAYPNGAQRRLLERWFGASRWLWNTTLAIRSEAYRVWGLNLTGNDLSRWLTQWKRTAGHEWLAAVPATCLTQCLRDQDAAFRNFFARGAKYPKFKRRSAAASLRFQGAGASWARGVMSLPKLGSLKLAEPLPKVERPGTVTLSRDAAGHFHVSLCAQVETSLLPITHRVVGVDVGLTHLATLSTGEKIPNPKRYHARLKYLRQQQRCLARRQKGSRRREKQRLRVARAHARVRQQRQYALHALTTRLVREFDLIFIEDLNVKGMARGLHARAIHDVAFGEVRRQLTYKCSWYGKILETVDRWYPSSKRCSECRYTLDELRLDEREWTCPKCETYHDRDINAARNLLAEGLRRLAGCDNRDLRVDARDACPEEDLLVQVLAEEARSGQRNRACLEQARFG

SEQ ID NO: 41685 - protein, 370 aa, unknown
  TnpB Polypeptide
VVNEVIEKAYKFRAYPNVKQKELMDKTFGCSRYVFNFFLDRKIKIYEELNETLNYSACSKELTSLKQEFLWLKEVDKFSLQNSLRDLDTAYKNFFSKKSDFPKFKSKKFSKKSYRTSFTNNNIRFENSHIVLPKLGSVKIRDKQVPEGRLLNATISKESDGRYYISLCYTDTCVLEYKPTNKEVGIDLGIKDFCVTSDLEIIKNHKHLNKSLKKLAKLQRELSRKQIGSNNRNKARLKVARLHSKIKNQRKDFLNKLSTYFIKNYDVICIEDLDIKNMLKDKDLSRHIGDVSWSEFVRQLTYKSKWYSKKIVKIDKYYPSSQICSNCNYKNKDVKSLEVRAWECSSCKITHDRDINASKNILKEGLRTLV

SEQ ID NO: 41686 - protein, 272 aa, unknown
  TnpB Polypeptide
  misc_feature (166)..(166): Xaa can be any naturally occurring amino acid
  misc_feature (168)..(168): Xaa can be any naturally occurring amino acid
MTLSSQVVKIEKGRNSFDLWPVLSSVGKETKLYIPLKKHRQFLRWEKIGKPASSVVIHRAYVQISFETETGGKKEEGKIVGIDAGINHLMTTSEREFLGNDIKPLISKIKRKRQGSGAYKRAKKELSYYIHKTVKDYFINNNVRLAVVENLKELKQNTKEKNKTKXFXKTLGNRNYRELLRIIQMRCEENRVFFRSVSPYNTSRRCPSCTHTQRENRRGEEFECPGCGYSEQADFVGSLNILTRFLTGRYGAGFKTFFIYFYIFLYNFIYFG

SEQ ID NO: 41687 - protein, 240 aa, Anaerolineae sp.
VRERFNLAAQATVRIIAKVANPYTPDRKRRRTFKPTGAMVDDKRIQYLTGRASWRGSSDCRRADLIYRAIAFYLHQVGQIETSNSYDPAGWLDVHLGSVTTAIPSGGDEYSGQHLEHQRPWYAERRATRPSVGTKRAKRRVKHLSCRPSRYQADTNYRISKALVETAQRTSDRRGQRSQPHTGPYNPMRTFISHKTQRAGVCVQRIAPFVVTVTSLTVLRVTTLSIHAPGWLPRQTPAQR

SEQ ID NO: 41688 - protein, 493 aa, unknown
  TnpB Polypeptide
MRSGVFEGKYKINDYYNAAIYLAASGSISSQKELKKYYSTTITADLKTRDEKIQMIQEALDKKKAVKNSIRIYRKDGRWVTPYPRCQLKVKGLTIVLFNKTIVKLDEYERSVEADIRKLKTRLALVTEARRRKEKKLENIKNLPPERIVFGGKKLYSEKDTVGIKKSAEDNKTSQKALKEWKQEFFEKRHQSMALPGRHTSKYGNFLCKYDGKDLSVTCIDGTTTVFHDFKLPRYNEAFQNNFTCKPEDRQSVCYNFTVKRDRKNRQYIIVSVTMKLQAYENSYYGNGAISMDINYDHFALAEIDETGKLLDQKLIRFDLVKKSTGQITNILGAAVKEVFNWCAEKDKRLIVEDIDLTIKLASRKYRNRKGNHHMTLFAYQRIASGIENQSLRREIAFCKIDPAYTSQMGKFLFMRRYGMSIHQAAAYTIGLVGMGLYDKLAPDLRMLNLLKTKKVLYQNFRRKRTKRSGRELQKYFQVFKSTSSTERFRMKC

SEQ ID NO: 41689 - protein, 545 aa, unknown
  TnpB Polypeptide
MDYTVTIYSDRMYVQDLNIITIKQIETAILQFTKEVHSAYNRAFLYSFDSNQFVKKYGDKDSLYKLTQQHSRFNCYYINSVNQLAKGKIDSQKELYKMYKKDKETALKAVNKKIKEETERLEHYQKLLKNYDDFRHHKINKIKFGKLKHLAYKNEMFTVRDLKTFEVTNYKPFQFEYEYLRPKIKSIKNKISKLTYRKNNIETKLKNLETQKHMVFGGKRNLKNLTTDELLNKKYHSIQVSGRYDSKYGNWLVHTTPLDKDMFAINFELPNREIAHFKVHFPYRGKELKKALESNMNQTVNTPISYGIIRKKDALNRIYYQIEVNFNIGSTLPRINTFIGDGCVGCDFNNGHLDWSEIDKHGNLKDCGTIYYQLNGTSKENELSLRNALNKLGTIVSNKKKVLVVENIDLKATKRKSTYQNKKLNKITHTIPYARYLEMVDYLGYKFEFLVIKVHPAYTSQIGKLKYQDKMKLSSHISASYVIARRGMKYSHNEHIPKEYKHFIQDIKEKHYWSKFNKIYKELEKQKKKKVTKKHKTKQQTVNNK

SEQ ID NO: 41690 - protein, 294 aa, Hydrogenibacillus sp.
VINQALRDVAAHRDVRTFRVLWPSFNNQNLRLKKVGDFWTAAFPTQAGRVRVPLSVTAKQEAILSRLGRDVKQGAAKLYEKRGRWFLALSVTLPVEEKTAGTESGKIAGIDMGLRYLAVVNAGGETLFFPGDQAAYVRRRYHALRRRMGKAKALKAIRQMKDKEARWMKDQDHKISRAIVDWCLARGVSTIRMEKLEGIRRRKTRKRDFGRSLHSWSFYRLQQFIAYKARLVGIRVEWVNPKDTSRTCPRCGYRASENRSGIRFRCRKCGYEAHVDVVGAWNVSLAISGLAEAA

SEQ ID NO: 41691 - protein, 374 aa, Syntrophomonadaceae sp.
MRKAYKYRLYPNHEQAVLINKTFGCVRFIYNKMLAHRKDIYEKYKDDKEALKRQKYTTPADYKKDFVWLKEVDSLALANAQLNLNAAYKNFFRDKSVGFPKFKSKRRSRKSYTTNNQKGTIRLIDGKTIRLPKLKDVRIKLHRQLPLNSTIKSATISQTPTGKYYISILVEYEADQKQITPKQEAVIGLDYSSTSLYVDSQGSSADYPRYYRKAEAKLKKEQRKLSKRMKDGKNREKQRQKVARLHEKVVNQRKDFLHKQSRQITNAYDAVAIEDLNMRSMAQGLNLGKSVNDNGYGILKTFLAYKLAEQGKQLVVIDKWYPSSKLCRFCKTTNKDLRLSDRIWTCNHCGAMLDRDKNAAINIKEEGCRILGIA

SEQ ID NO: 41692 - protein, 353 aa, Alcanivorax sp.
MKQTKTLKVRVKDKHATQLNRMARSVNFVWNYLNELSSRSIRERGVFLSAYDMDRYTKGASKDLNLHSQTLQEVSREYATRRQQFKKQRLAWRKSRGTRRSLGWVPFKTGAAKWKNGQVFYNGSYFKVWDSYGLSQHRFRSGSFNEDTRGRWYFNVVVEVEVQPSTGQGAVGIDLGLKDVATCSDGEKLENGQFYRDLEARLATAQRARNKRRVKAIHAKIKNRRKDVLHKFSRRLVDQHGEIYVGDVSPLKLAKTRMAKSVLDAGWGQLKTMLEYKCDHAGIVFQEVREAYTSRTCSSCGSLSGPQGVSGLRVRDWECVECGALHDRDVNAARNILSLAAGHRRPEVEISAL

SEQ ID NO: 41693 - protein, 447 aa, unknown
  TnpB Polypeptide
VLKTLKRTIKLESDHLNGWKYRVLREVEEYQSLIVNEMIDVILSEGLQTTRKKLHERFYNHYKEKYPFLPSRVIEGAYIIASRIVKSFRERKKKGLTRKDKPEYRRVMITIPNTINWRFNRVFISVLTHKGWVEIPLRVTKQFIQYLHEGWSASQELKLRLVGKKILVWLTFEKEVEVETKEGNYISIDVNENNVTLAIFEGFKLKELRRYETGLGRIVVNYSLRRKKITKGNSTKDELVKKKLSRLREKERKIDVLRKSVKRITDLARSLNGKVIVGKFSLRAKENMEGDKNARLRHRIHQWSVIKFTELLKAQPIDVEELSEAYTSSINPFDGEKLKKRRQVVEKIVKVFNPYLMTGTAHEGGEIKIFKVNVRYLESGKAMLERDSIAPLNLAKKVDGRVVVFLSTSPNELRVTVYDPLRGVPVAELKARKSYATGKHYVRESFR

SEQ ID NO: 41694 - protein, 105 aa, Microcystis sp.
LVENLAVKDMVKNPKLSQAISDVSWGEITRQLAYKCRWYGRNYIEIDRWFPSSTRCSNCGYIAEEMPLNIREWDCPDCGTHHDRDINASKNILAAGLAVSVCRAT

SEQ ID NO: 41695 - protein, 408 aa, Streptomyces sp.
MQLRYNFRVYPSAGQRGALSKAFGCARVVFNDGLRARQEAHAAGLPYIKDADLQKQVVTAAKRTEGREWLGEVSSVVLVQSLRDLHTAYRNFFNSVSGKRKGPKVAPPRFKSKHDNRQAIRLTVNGFSLRSDGRLYIAKVGDLYVRWSRQLPAAPTSVTVTKDASNRYWASFVVDTERDVLPELDTEVGIDLGLTYFAVLSDGRKIESSKFLRRAEKKLGRMQRSLSRKEKGSKNRAKARAKVARQHAKVGDRRRDWHHKESTRVIRENQAVYVEDLLVSGLGRTRLAKSVHDAGWAQFLTMLEYKAALYGRTFAKVGRAFPSSQVCSVCGLRDGPKPLHIREWTCGKCATIHNRDHNASRNVLLEGRRIVAAGRAETPNACGAPVRRAYMPARRGEAGTHRAPRRGQ

SEQ ID NO: 41696 - protein, 409 aa, unknown
  TnpB Polypeptide
MKKDRRKDNPMLKTHKIALNPNNVQATQFAQHCGYARVAYNHALADFKAGLNTGQWRNPSELCRRFNAIKHEQYDWCSDMSQNVSKNAIYTNLKDAIGRWQSGQNRFPKFKKRSHGQSYQADSGRGTITVVGQRIKLPKISWVRMFQPLRFFGTICKVVISKQGHRWFASILVDTLVDDTTPEIRGLPTIGVDVGIKHLAVTSEGVYYENPKALKRYERKLKRLQRQFSRKVKGSRNWYKLKAKIAKSHYRISCIRQDTHHKATTTIVNGAQRIGIESLNVSAMLKNHRLAQALSDASLSSFLEMLKTKAECINVEIVEADTFYPSSKMCSRCGLVNSDLSLSDRTYHCNVCGHTQDRDLNAAINLRTLAVGHTERLNACGDTVRPCQLGQASLKQEDSTEQPLLVSLS

SEQ ID NO: 41697 - protein, 369 aa, Cupriavidus sp.
MYYAKMETVKTLKLRIKDKHAKAMLAMARDVNAIWNFCNETQYRSLKRYCNRPKVWLSGFDLQTLTNGFSKCEGVSIGSATQQQVCEEFATRLKQFKRQRLNWRVSDRKSPKYSLGWVPFKARALTYKNGQVRFNGISIGLWDSYGLSKYELKAGSFNEDSRGRWYLNVAVKIQVEEKRMPDGATTIGIDLGLKTLATYSDGTSFNPKKFYRESEAAFGIAQRARKKKRVKAIHARIANQRKDAIHKETSALVRKHAAIFVGNVNAKALARTSMAKSVLDAAWTSFRTQLRYKAIRQAVVFAEVNEAFSTQTCSCCGVIPPSSPKGRAGLGIRQWMCSSCGSVHDRDTNAACNIARLGHQALEVGISGV

SEQ ID NO: 41698 - protein, 524 aa, Bacillus sp.
MAKKQSPTFVLTQELKEHPLLFSVIEKELEICRVMYNAVLGNYLKLEKQMKREKQFKRLMRQYKGVQKKLEKDTKNKQLTEEKRVLQQAFKSLRDQYELNEYASHHWVKPIRKHFGNQVNSAVAQKVASRAWEAFEKKLFGQAKRVFFVRKGDFSSFEGKTNTTGWRFVDGFIVYKNIYTRLKTKKKDTYANEILRNIQQKTEFSYSAFNKGKTTLVKDTYRVKYVRIVKKTIRGKRRYFANLVIAGYPPFKERKIGKGNVGLDIGTSTVAVSSLKKVALFNLAEPVKHLAREICLLQRKMDRSKRSTNPAHFLENGTIKKGKKTWTFSKRYQRLKAKLTELHRKQSDIRKWSHRTLANSLLEIGDTFYCETMNFKAFQKRKKETEISEKTGKFKRKKRFGKTLGHRAPSMFLSILEEKVKCYNGCFRKVNTYTFKASQYCHIRNEYIKKPLSQRWHIAGEEIKVQRDLYSAFLLMNSDDAGQQANRERCNITFEQFKTQHDQFIKTILSQKKLILNSGIVVST

SEQ ID NO: 41699 - protein, 424 aa, unknown
  TnpB Polypeptide
VGVRAYKYRAYCSKTTARVLKTQLEVACKLYNTLLHLEQEEYKKNKHSMSRNELRQLALDLRKLNPEFQALHSQVAQQVAERFYQARQRFFEGLANKPRKKKPHKYLSLVYPQKGWKLSDIREVGKSKSKKKKARLYLSKIGFFTVVVHRDFPLEQVCQVCIKLNPSGRIYVVFLVEVEEAANEQKCAGEPKKAVGVDLGITRVATLSDGRFLENPKPLERSLERIRLLQRSLSRKKFLSKNWFKIKKKLAKEHEYVKDFRRDLFFKLGALLVKEYDLLVLEDLDVEGLIEKGETRKRRLRLYDSAFSELRRILEWEFSKLGKAVLAVPAYNSSRECFWCGGINQDLTLGDRVFRCPHCGFTLDRDLNACLVLLKRAGWVPPGVPVELRPIPPLPTLGLAGRGRQGGAMMREAPPSAEGGVAHL

SEQ ID NO: 41700 - protein, 505 aa, unknown
  TnpB Polypeptide
MSKATKTIRQRLANREHLAEWCATTHTLFNVIAEFYFSVIQAHERVLALSNQDALTALERLTHATHENPDPVMPLAEIAQQVPAMFRRAAINAAIGSARSFYTSLAKWRTHKVKAEVKHKLFTERPPVPPRTWNKAVPLYSGMSKGRKPSSLMLRLWNGQTWIWVKCKVNGRDLPDGWEAGSPTLVHRNNAWWVHTPLEKRFASPGRVKDQLMRADLRICAVDLNLDDHIAVCSILSADGTPLVTRFIGNGGQVNGRRKTLLGRIARNRRATGVITEGEQDNRVLWTNIHILNEQVSHRVSRRIIDFAQAHGATLLVFEHLGNLRPTKGRYSHRANQKRAHWMKGKIFQYARYKAWEAGIVTCRVSPRGTSRECARCHSPVIRYVAGQPEEGYTPGASLIFCTNPVCRQRDHADRNASIVIGQRLLARSQSTRSQEKPLARSSRKNRFAKAKGGALSQDAQSKARPSTARAGHGESAESGTAQGYSPGMAGGSRDIPRQLPLFPE

SEQ ID NO: 41701 - protein, 272 aa, unknown
  TnpB Polypeptide
MVLPLEPLGYSVVGIYISMHLMSCQRIRVVRRADGYYAQFCIDVERTEEYIPTGKVIGIDVGLNHFYTDSDGDTVPNPRHLRKSEKALKRAQKRVSRKKKGSSNRKKAINKLGRRHLKVSRQRKDFAIKTALCVVKSSDFIAYEDLQVKNMVKNHKLAKSISDAAWSQFAQWLEYFGKVYGKTVVAVAPQYTSQDCSTCGNSVKKTLSTRTHICSCGTVLDRDHNAALNILAKGLKARAGINLNTVGHTEINAWGQTDLYSLVVTSTGKPTD

SEQ ID NO: 41702 - protein, 332 aa, unknown
  TnpB Polypeptide
MAVSVIKQDDGTFRFSGRSFRPTEEKMQALAPFGMLLHNWGLVLMLLPDPVQTQALDQQIGNARFIRNRYLADRQDYYARTGESLTVACYKSNYMPRLKEEYPFLRLSDKFALEAALEHVDAAYKKFFREHTGFPRFASRYNPAGNRYTTKFTNGNIAVETGEDGLSYVKLPKIGKIRFVLPNGKTVHDIVPEGTSVLSASVKRAGQTHTVSLQLEAVVKKTAELTEVSVRDIVAADMGIARFATFGNVEEREAVENLRWIRLHAKRLRRLQKALSTKRYDKKSHTGSKNWEKARRRVAAEQRKCANLSGKTSSISFPERLRMCAPYLSVRI

SEQ ID NO: 41703 - protein, 468 aa, unknown
  TnpB Polypeptide
MASGFTAETRVHRTASIRLRVTRRQANRCYGLLRSGGDVWAWLIDTNRRRRHQGSPPVVGYQALCKELTGQGSFGELSAVGARSILRRYSSAWFQAAKRRRRGEDAGFPRRKRALVPVAFHHGTFELAGQRVRLPVAKGHAELWVRLARPLPYPAEQVRAVTLLAEGGLLWLSVTAAVPCAQHDLDQDRVAGVDLGIIHPYAVVTEDAGMLVSGRAIRAESWLHLQDRQARQVAVSRRAPKPGQRGSRRWRRYRLKERRNEARHRRRVRQAHHQAAREVVAFAVQQRVGLLVVGDLRGITSRDVGRVQNWRLRQWRRTHLTQALFDKARLAGIQVRLVDERGTSSTCVACRCRVPKSGTRRFRCPYCKYKAHRDLVGAANIAAKVGGGVSSAALPAHVEHRRVGIVPARRDRRRHLHDRRRRESCLASGHLRAHSGTCRCRSPHATFPASGEDQAALPIRGIRFLKGH

SEQ ID NO: 41704 - protein, 380 aa, unknown
  TnpB Polypeptide
LLHSDVAQQTIKSVEEAYKSYFALLRMYRQGKLKDCPRPPHYLDKDGRFKLAYPASHLTMRNGYVTFGLSRKFKKIHNLTGKELTFKIPPHILQYQIKEVTILPIHNGKTYKIEFAYEVPAEPVPLEPKNYLAIDLGVNNFATMVDTTGTAAIIDGKYIKSINRLYNKLNAKLQSIKDKQGLTCEYTHRQSRLTIRRNNQIDEALNRIVLYIVKYAQERGIGTIILPRWPDIKQGINHGRKNNQTFVQIPYAKFRQKLASKCELVGIVFDDTYDERYTSQVDALVCDSLTKKPPYGKSRRIKRGLYQSASGTLINADVNGALNHLRKVAGDSVIQQIISSGRVNRPVRIRLGYEQPSCTLYWRDQSIDCLSRPPALAGGS

SEQ ID NO: 41705 - protein, 359 aa, unknown
  TnpB Polypeptide
MITYQYRLYPNKSQKSLLWIHANKLNYLYNYFLNQKIEEYKNNNKSISKVEQQKELVILKQNDETLKQIHSQVLQQVTDRLDKTYKSFFKRGFGFPNFRSCKNFFGICYPQSGFSIDKDTIHTKAYGNIKFTKHRECIGNIKRICISEKNDKWFLNITTDYRKEEVLSEKSIGIDVGIANIVATSEGQIIKNCSHQKYFDKKINELKSRRDKTCKKNSRRFKFLSSTIRKLYGVKDLKINDFLHKVSKYLSSQYDTIFCEDLNLKDMSESEITGLNRELRNSQLGKFLSYLEYKTNHLVKVNPINTSKMCCKCGKIHEMKLSNRTMICECGYVEDRDINAAKNIYCLGQAIIASQLCIA

SEQ ID NO: 41706 - protein, 436 aa, Thermofilum sp.
MEEGKRVSTSGSGAAGRSPGANDSRVTRTVVVKSAKLPRRVFRVFVEVEGMYRNMVEQLVLFAVRENIKSFIRLKALKYSELRRLYPHLPSHYAYTACQDAAARVKSFLRLKKKSLTNREYPEVRRVSIWLDDQLWRLDSLTAIEVATHRGWIAVELEPHKHFWKYINSGWRLASEARIKLDKRNRQLITYLTFTKDVGEFEPKGFISVALLFETSVKKLVLGYYYCRKSVQEKYYELYGARSRIKRKVLRKLKERKKKNDLRWKLANIIVRAAEERKCAIVLEKLGKKAADSMIARIGDKQLRHRIHQASFGGVQRAVEEKARERGVPILYVNPRNTSKLCPAHGAKIVYSNGSRVGKCTVGGETWHRDAAACTNLLLRALRGDGSNAPSPAGLAVDGSPVPLGSTAAHDPTPIAREAWARWKRALAARNFLKAV

SEQ ID NO: 41707 - protein, 402 aa, unknown
  TnpB Polypeptide
MALLAHKTALQPNKAQKKVLNQHCDFARNAYNAAHSDFRDGLDNGEFRSVYDLKKLFNARKREVFPEIDGNLSMNAGKNAIHNFHDAVKRWQSGQNNFPKRKKHNSRSSFQMDNGVDSVKVTEDGKHVILPIIGKVRLAEKPRWTGKVRRAVISRTAHRWQISMLFEVDEPEPPDTSRLPAEGCDVGISQLATLSDGTTFENPRALRVQERKLKRLNRSLSRKTYRSGGWWKAKELLARLHLRIRHIRMDAHHQATHRILQGISALGIESLSVKGLMKNCKLSKALADASLGGFLVKLKYKAVRRGIRIVEADRFWPSTKRCSSCGYVKKNVSLSERDYHCGVCGFQADRDVNAAMNLKQLASSTDESLNAVGASVTPTAVGWTRGRRKVKPNQTLIDFATA

SEQ ID NO: 41708 - protein, 208 aa, Salmonella sp.
NRLYLPKPGWMRYRNSREVTGEVKNVTPSQPCGKWYVNLRTEYEVADPVHNTGTMVGLDTGVTKLATLSDGTVYQPVNRFKQASASWQKQKRKIRRPHSHMANIRRNHLHKVTSVISKNHAMIVIEDLKVSNMSKSAKGTAEPPGRNVRAKSGLKRSILGQDWYEMRRQPEYKQHWRGGQVLAIPSGIHQPAVCLLWSYSERKPPVTK

SEQ ID NO: 41709 - protein, 383 aa, unknown
  TnpB Polypeptide
MQSQLVKQFCGCARYVYNRTLSLERSLYKKDNKHSFKYAEAANRLPEWKKKNPFLKECHSQVLQQSLKDLDQAYINFFRKRANFPKYKKKFRHDSIRFPQGVELDEAKQQIRLPKIGWVGYRKSRDIMGAIKNVTVSRRGEKWDVSIQTEYEVSLPAANPSEIGIDMGVKRFVTMSNGDFVEPLNPFKQEREKLAKLQRKLARQKKGSRNSRKTKRKIARLHRYIADSRRDFLHKTSTKIAKNHSIVYVEDLKVSNMSASAGGTKESSGKNVRQKSGLNRSILDQGWYSFFQMLSYKLERGGGKLIKVDPKNTSRTCPRCGLVSAENRKSQATFACIGCGYRSNADEVGAINVLRAGRAQLACAMSGAVWPLSAGTRRDPLQH

SEQ ID NO: 41710 - protein, 369 aa, unknown
  TnpB Polypeptide
MNKAIKYRIYPNEKQIEMFIKTFGCCRKVYNLMLADKINYYEKYGTMLKTTPAQYKKKYPFLKEVDSLALANVQLNLEKAYKNFFTNKKIGFPKFKSSKYSKKSYTTNNQKSTIALSDKAIKLPKIGYVKAKLHRNPKSNWKLKSATITLDNDGKFYVSVLFEYDITITPAVITEATTVGLDYKSDGLYCDSNGNIPMGEHKYYRQNQIKLAKEQHKLKNKIKGSNNYNKQKKRIAKIHKHISNQRKDYLHKLSTAITKQYNCICVENLDMKALSNKGFGNGKATLDNGYGMFINMLQYKLTDIGGSLIKVDKFFPSSQLCSACGYQNSDVKKLTVRKWDCPCCNTHHDRDVNAAINIKKEGLRLLNVA

SEQ ID NO: 41711 - protein, 405 aa, Rugamonas sp.
MQRLQAYQYELMPDGGQQRDMRRFAGSCRFVYNKALAVQIENYQAGNKFIGYVAMAKHLTEWRNGLDTPWLKNAPCHPLQHALKDLDKAYKNFFAKRADFPRFKRKGTGDAFRYPDPKQIKLDQANSRLFLPKLGWLRYRNSREVLGELRNATVSRSGGKWFVSIQTRRELEHPLPTATAAIGIDVGIARFATLSDASFIAPLNSFKKHQQRLARYQRRMSRKVKFSSNWKKAKARVQRIHIGIANARKDFLHKTTTTISKIHALVCIEDLQVRNMSKSSRGDCEQPGRMVKQKSGLNRAILDQGWGEFRRQLGYKLAWNGGVLLAVPSHNTSRTCPRCGHISKDNRRTRAKFLCVECGYENHADVVGAINVLERGYRLLACGEPAQSGRPVKQEPTEATKQTTA

SEQ ID NO: 41712 - protein, 404 aa, unknown
  TnpB Polypeptide
MTGICSIIKEIEARKSYQLRRASNRYIKLILIMASQIISYKFRISKPSKTVQERLEQTLRLCKDLYNASLQERRDAYQINRIALNYHTQRAQLPDIKTTNHEYKEIYSQVLQDVLKRVEKSFDGFFRRIKAKQKAGFPRFQGANRYDSFTYPQSGFSLTDNRLTLSKIGKVKIKLSRNVVGKVKTCTIKREIDKWFVIFTVETETEPLPKTGESVGIDAGVCQFLTLSDGTTVENNRLYQSAQKSLRVAQRAVARKKKGSNNRKKAVLKLRKIHQKIKNCRADYQHKVSTWLIKNYDVICIEKLNLAGMVKSNLGKSLNDVAIGMFYNMLEYKAVSAGKELIKVPAHFTSQTCHACGHCEKANRKTQADFECVKCFHKNNADINAALNILRLGINRLDATHNIS

SEQ ID NO: 41713 - protein, 390 aa, unknown
  TnpB Polypeptide
MTSRKVAQRIPFMPSKTQAALLEQCFGARRFAYNQQVEAFNSYDKGTNPRPVYPSIADMKSENEWLRDSPVPSHALSSAIMDFRKAQSSYFRQAQCGKNRPRFASKNDSVQSFRNGKPMRHMEGNRYPLSKKLGSVRIRRRDRFRYPLESLSSWTVKRENGVYYLVLLFDVDVQPKPPVDGHVGIDVGVKDFLTLSTGEKINYPDRLHQLEEKVRWEQRKLSRRVKGSSNYRKQKKAVAKAYAKVRHYRENFQHQMSHKLIEDNQFIGMETLAVQNMTRKAKKKLDANGKYVRNGQSAKRAMNRSILRNGWSGFVDKLSYKAQWYGRTLVQVDRFYPSSRLCHDCGHKYSGLRLSEREWVRGSCGVLHDRDVNAALNILDEALRLNQVRE

SEQ ID NO: 41714 - protein, 485 aa, unknown
  TnpB Polypeptide
VRDISAYATYVVRNDEALSDELARVDVAQPAVAGRRAGVTMPDFLVSGKSGRSRKEMLVQHRVVTEFRSWQERDKAANGESSKYVSQGWKRTANGSAPSYGEDYVNLGAVNKQYAAIENNPFADGEIVLKMVIQGEWHRLIFDFDNDRFTEGKVTLPVIKVDDGQPVFIFTVVTDNPVVQFSGDYTIGVDVGINNYATVVVRDVKTGRIVYETTLSQRVHSLWNSVRASERQVRALKKKSDRLLSRRQARMAALDEAQLHREAASRKKRELAILAAQEIACLSHLWGNAVVAVEDLGWVANTMQNGRWNRGELVRWLTHYVTQNGDWVASVNPARTSQLCYKCGAKVTHPTHEVSVCAEHGVMDRDVNAAANIAARAVPRVAKARTTRAKNRKIRPQTPLKTPVYRNSLQYPGRDRTKNAPTPKRKNHRLVSREVILPVCPARAQTYSLEARVLADGGTHCATGTSRAALKQGNVAYKCRLCCLI

SEQ ID NO: 41715 - protein, 384 aa, unknown
  TnpB Polypeptide
MLQAYKYRMYPSRGQVPLLMQHIHACRFVYNHSLEQKIRAYEQDGQKLSCFDLNNRLPALKEEHPWLKEVNSQSLQIANKNLDNAFTRFFREKKGFPLFKSKKNPVQSFQVPQHYAVNFGRHQIKLPKIGEIRTIFHRMFSGKMKSATVSVTSTGTWFVSILVDDGNPAPAPAPFSSKTTLGIDVGLTDFATLSTGEKVGNPRNLRKSLGRLKCLQRRLSRKKKGSKNRQKAIRKLARCHEKVANQRNDFLHNLSFRVVSENQAIAVESLNVSGMQKNHNLALSIGDASWSTFFTMLEYKCRKYGKTLLAIGRFDPSSKICHQCGHLKRDLTLSDREWVCPDCGTHHDRDINAAINIKKFALQEQNLVGVAGAERAIEPVDLPQ

SEQ ID NO: 41716 - protein, 443 aa, unknown
  TnpB Polypeptide
LLLELFTNFIGRFFEKLSPLLKNFRHPLFGPKSPPFGTEYGFSKQVRPEVMGVGIKRSANTSQPQAGVQYNTIKVRLYPNVEQEELFQKTFGCCRYIWNQMLTDHEEFYYATDKHFIPTPAKYKNEAPFLKEVDNQALIQEHNRLSQAFRNFFRNPAAFGYPRFKRKKNDRDSFSACNHIMGNSATIYITQNAVRMTKAGLVRATFPRRPRSGWKLTRITVERTKTGKYYGYLLFACPVRKPEPVEPTAERTIGLKYDLAHFYVTDDGVTADPPRWLKQSKETAAAIQKKLCRLQPGSKNYQELVQKYRLLHEHIANQRRDFLHKESRRIANAWDAVCIRGDDLKAAAREVSGSAVPDGGFGLFRELLRYKLERQGKQLLEVDRFIPTTKVCSVCGAVNETLSPKARRWVCPVCGTEHRRGQNAAVNIKAQGLAQCREHTNAS

SEQ ID NO: 41717 - protein, 183 aa, unknown
  TnpB Polypeptide
MRAFVSVVTEMDFVNDGPRRPGEVGIDLGVARTVTLSDGTVFQLDVESIKKHEKQIAVLQRQLCRNKEARQKLAKLGKANPFDKREPSRMRRRLKAKILNHHRRIRNIRRDFMFKTAHTIAQNYGWVAMEDLKPTLERMATGSKEPVKPKRGPGRPKGSKNKKTLERETRERAQADAADSRAP

SEQ ID NO: 41718 - protein, 396 aa, Okeania sp.
MRVVDRHIIRRTHKYWRVCDELAFKSKNLYNLANYYCRQQFFTTGSSLDLTKLYHLTKNSDAYRALPTKVSKQIIKCLTTSWRGYFQAIKEWSKHPQRFLGKPKIPKYKDKTKGRNVVIYSKESVYKAPLKEGICHLSMSEIKIPVVVESVVEVRIVPATGCYVIEVVYEKTEQQRIESTYIAGIDLGIDRLVALATNKPGVKPLLVNGKPLKSVNQLYNKRKAKYQSVLKGQKKTSRKIEALTYHRNRFVSNYLHNTSKLVVEYLTTNNIATVVIGKNDNWKQGANMGKKNNQNFTQIPHFKLVKQITYKCVLAGIKVIETEESYTSKTSALDLELPCKHELYVGKRVKRGLFRSATGKAINADVNGSIQIIRKKFPEAFSAEGIVSCAESASVG

SEQ ID NO: 41719 - protein, 324 aa, Okeania sp.
MDNYTLPDKNGKTSGRPKFKGKHYYNSFSYPQLSNSHLVKNANGRFCINLPKIGLVPFVYNRLIPGGFKVKTGTVIREADGWYISFTIEDKTVPLRSVEIQPTSDNSKGIDLGLLHYAVTSDGEFIEVPKFFRFSEHRLSKLQVRLAKKPKHSHPWKILKGKIAKLHQLIARQRLDWQFKLAYHLFSDCQVIFLEDLQIASLVRRCKAKLGDNGQFLPNGQSAKSGLNKSLQDAATYQFLEILEYVAWKLGNRIIKVDSKGTSQHCWECLSKVPKSLSERWHSCPKCGQELDRDYNSPTPLAPLPGGDGGGLDYYQHRRRTSLL

SEQ ID NO: 41720 - protein, 359 aa, Okeania sp.
LNDLNQAYQNFFKSTQGKRKGKPVKPPKFKSRKSKQTARFTKGGFKVGQHKIYLAKIGKLKIVWSRELPAPPSSVTVIKDSAHRYFLSFVVEIQPEILPKTDNSVGIDLGIKTFATFSDGTKVDAPKPLKKRIKKLRKLSKSLSHKTKGFKRYEKARVRVAKFHAKLKDTRTDFLHKLSTEIIRENQTVVLEDLFAKHSEGNVSGMIKNRKLSRAISDLGWRQFRTSLEGKAEKYGRDFRVIDRWEPTTSKCSCCGFKGGKLDLQVREWKCLNCGSKHDRDENAAINILVAGGHSETKNGRRGKRQTSVKVAAANVSGALRQQNVNPPRSYSSVGIPAPLGRGGCQQPAISLIWLCLFY

SEQ ID NO: 41721 - protein, 355 aa, Okeania sp.
MQSIKTKLKVNNYQKTILAKHAGVARHAYNWGLTTCITEYELTKKRPSAVTLHKRLVAEVKSQNPWYYEVSKCAPQQALRDLDRAFKNFLTIPKRGFPKFKKKGKKDSFYLEGSIKIIQGNYIKLPRIGIVKTYEILPSVPVKNVRISKRAGDWYISFKYDYQPNPTTKERDIIGVDVGINALATCSDGSRFANVKAYKQAKKRLARYQRRVNKKDPGSKNRRKGVKKLAKAHKKVADIRADALHKLTTWLAKNHSTIVIEDLNVSGMLKNHKLASAIADCGFYEFKRQLTYKCEWYGSKLVIADRFYPSSQICSHCGYQQKMPLSARTYECGNCGFHVDRDFNAAVNLENYVHQ

SEQ ID NO: 41722 - protein, 423 aa, Okeania sp.
MPGNYILNLKKVLASMTWKRSTKRTIITKFYISLAAQQILRTVAESFRSYYGLIIAYNEGKISHRPKIPNYRKKGGMATVSYPIHALKLKDNQIRVPLGNTCKRWFGVDSFLIPMPSIRAFSTLKELRILPRNRCFYWEFVYEKEIVVKPQLNRENVLGIDHGVNNWLTCVSNVGTSLIVDGKHPPLSPPGRGTKGVGWYNKQVSTIKENKPTGFWSNKLAAITEKRNCQMRDGMNKAARIVINHCLKNSIGTIVFGWNKGQKNQIKLGKKSNSEFVPIPTARLKQRIAQLCIEYGIIFIETEESNTCIASFLDGDCLPNYGEKPNDWKPSGKRIKRCSAVLGVPPMSDCIKKRGLYRSSNNWLINADCNGAANIIAKVSRKLSLDLRRLCRGTAEIVPKEYIFGQLRRNGATRIYRCCVVST

SEQ ID NO: 41723 - protein, 394 aa, Synechococcus sp.
MLIVEYKVKAKPQQFAAIDEAIRTGQFVQNKALRYWMDNRGASKYDLSKLCKQLAKEFPFANELNSMARQAHAERAWAAISRFYDNCKKGIKPVGFPKFKKFARSVEYKTSGWKLTAAKRIQFTDKKGIGLLKLVGTWDLARYPVELIKRVRLVRRADGCYCQFCIAVDRSESLEATGTTLGLDVGLESFYTDSNGHKEQNPRFYRKSQAKRRSLQRRLARTKQGSNNRKRAINKLARFDLKVSRQRKDHAVKLARCVVRSNDLIAYEDLRIKNMLKNHCLAKSISDAGWYQFRLWLERYGKVFGRITVAVPPAYTSQQCSSCGEIVKKSLSTRTHACLCGCRLDRDKNAAVNVLSAAIRTTGHVGTTLLDRVNASGEMTATQPRLGFAEQVAS

SEQ ID NO: 41724 - protein, 368 aa, Paenibacillus sp.
LKPKGRDGGNELLKAYKYRIYPTHEQTQYLARVFGCVRFIYNKMLADKIEHYKHTEKMLANTPAQYKKEFLWLKEVDSLALANAQLHLEKAYKNFFRDKKIGFPKFKSKKTNHHSFTTNNQNGTVFVAEGLLKIPKLKTRIRIKLHRQFVGLIKSCTLSRTPTGKYYASLLVETEVAQLPKNNNKIGVDLGLKEFAITSQGETISNPKHLRKSEKRLAKLQRDLARKKKGSNNRHKARLKVAKLYEKISNQRKDFLHKTSSTMISENQVIVMEDLRVKNMMQNHKLAKAISEVSWSMFRKMLEYKAARYGRELVIAPKNDASSQLCSCCGYKNEEVKNLALREWTCPSCNSHHDRDVNAAQNLLKLAM

SEQ ID NO: 41725 - protein, 601 aa, Rhodococcus sp.
MADAGFTALRQFSFTTRPYLAVDDATGEPIGLDDLDVRVGWMLDLISGAEAHLLSRLWHPATFDVLAAGCDSQGRKLPMHGHVAAARLGWTPTYPDAVYVPSRVSRVVTAQAVGTLRTLAYRDTAITALSARFDPATGRIAAPTPAAEYVPSGYAKGVVRQLTAHSARTAGAAQERLRITDVQAPPQTSAMARLSAADRQLAHITVTDAVMTLTVKLPTTPAPEGRAQWRRVRVSAAIPPHLHRRPISEWHVPTLVLDHRGLLLRCAATDAVPAVDVTSGTTAVGVDWSPSTLGAAAVATQTPGGVVSDYQGFTYDDRGLGIKLARLQTEGQLLHRKAARLTQLAATAPPEVRAQLDAKIAVLDAHRTAIGVKRGKINREIAFHFGRQVTDYAAAAGATVIAVEDLTTLETRGHGRLNNNRAAQSARRQAVDALTHTAAGVGVTVVTVPARGSSALCPGCDEPLARPGGYHRAWCPRCRVGGNRDHVAGVNLAKRALLGKNNVTRRRGQMPAIRVAEHAPVRQCRDKKSPTPSRPRHRRVRRSAPAATPPVGVNQIKIVPAPQASVWDTVEPATPHGVTGSREVHTSPTPATSVVGRMRSM

SEQ ID NO: 41726 - protein, 380 aa, Virgibacillus sp.
VKTMLVNKAYKFRIYPTKEQEILIAKTIGCSRFVFNRFLGQWNDTYKETGKGLTYNSCSSELTKLKSELVWLKEVDSIALQSSLKNLADSHTRFFKKQNKAPRFKSKKNNVQSYTTKETNNNIAIVDNSIKLPKLGLVRFAKSREVHGRILNATVRRNPSGKYFVSILAETEVQPLEKTESSIGIDLGITDFAILSDGRRINNNKFTIKIEKKLKREQRKLSRRALNAKNNGINLFNAKNYQKQKRKVARLHERVMNQRNDFLNKLSTEIIKNHDIVCIEDLNTKGMLRNHKLAKSISDVSWSAFVSKLEYKANWYGKTIVKINRWFPSSQVCSNCGHQDGKKSLEIRDWTCSVCHKHHDRDINASKNILAEGLRTLVLA

SEQ ID NO: 41727 - protein, 393 aa, Virgibacillus sp.
MGTYILIREVGAVHKAYKFRIFPNHQQEILIAKTLGCSRFVFNHFLEEWNTTYEKTGTGLTYSLCSKALTVLKKESIWLKEVDSISLQSALKNLADAYDRFFRKQNDRPRFKSKNNPVQSYVTRHTNGNIAIVGNHVKLPKLGLVRFAKSREVEGRILNATVRRNPSGKYFVSILVETNVSELPKTGFAVGIDVGLKEFAVLSDGTRHENPRHVRKLEKKLAKAQRILSRRRKGALRRKCKLAEAHNYQKQRRKVARLHEQIMNKRNDYLHKLSTEIVKNHDIIGIEDLQVKDMLQNRQLSKVISEASWSTFRTMLEYKAEWYGKQVVVVSKTFPSSQLCSNCGHQHKDVKNLALRKWDCPSCQTHHDRDLNAAQNLKDEALRLLTAGTVEIA

SEQ ID NO: 41728 - protein, 368 aa, unknown
  TnpB Polypeptide
MNYVTLVLPFNIGGDTAKRLLSTAWLFKAAVHRVLGVAKQSPALPGTDIGWKSAFRSIAYSVIPNRRYADGAVTLVRSIYESCRQLGVDFRSVELSSWLMFQQSEKEYPARNITLKHGYEVHVTTISYSKESHRDVIKPSIPKSYSALLSRIIEERQEYSGRVVVKGYGVRGNTLWVRGEVQITIPADFYCKHMAKYREPKGSLIGGVDVNVDRVNLAIIDEKGSLRDYKTFWFTEATVRRYPRKRARSVIGMRVHELLKYAYHHGVSTIALESPEVLGRLKLLWARRGDRKHEDYNYRKSVFRSSVIEMIALKAPLYGMKVEYVDPRGTTNSTEHDRLMKVCGLDRHTASAYMIALRGLAHQVKQMK

SEQ ID NO: 41729 - protein, 435 aa, unknown
  TnpB Polypeptide
  misc_feature (149)..(155): Xaa can be any naturally occurring amino acid
LTEHQIHQHGARQSRNSDDRLVAPARHLYLSGTIVCTNDRPPVPARRRQRHLVHRDGDGGYRPVRRSRRDLLLPGRRWSARRPRHAGLGRRTRRGDRRPEEPRRRQALPRVDGGQSSGRGDDRRGDHRREPAPRTHADAHRTARRLACXXXXXXXAGQLRLQHHRTSWTLHVTVEYPVEEPDYDATDDDVTPVGFDIGEAHLLAGCACERGTPTDPLLINGGRARHLRKEMFTTLRRLRERDAAEWRVDERFDHYQNALTDIVEKASRQAIEYARQFEKPVIVLEDLAYIRESLDYGEWMNRRLHAWAFARLQQRIEDKARESGLPVRYVRPEYTSQTCHECGHVGHRNGDEFRCQNDECWVTEYHADINAAVNIADRHDPWGESLPLKPAGDDISRDGSACDSATTHRETSEKPSQMTLSAFHGSEPTASNSET

SEQ ID NO: 41730 - protein, 525 aa, unknown
  TnpB Polypeptide
MFISLQFKLELKKEDKGKLIQLMRKQSSAIRVAYNMLRELEKEKTRNLHAQIYQRLRQLFPELPTKYIDSAIYKAKQYPTDKSVVFGGKRLFEKLCKNHLSGKTKENLKKQWKEQRQGTLISIGSGAKEDKGNRLLRFEDREGRLHLRITIGNREFIYAKVLRKPSNGKDKWITFMAMLLESWQTQNYFAYTVELKLRDGEVYGNVSFEIPTPEVKYTKKNGVIAIDTNASPIHLAIAEVSKTRELLSYQTISLHHLLGLSKNAKDHQEWILANKIVDLAIEKGKAIAVENLKKLRKGTRGDGKANLRKILHNWNAKKLLQKIKRIARLKGVEVIEVNPAYTSVIGMLKYAPQLSIDKDIAGAYVIGRMALGFKEDIPENYEKLLKDRTYLEFALKRYEEREKELVELIEKESNEYKRNALKSELKIVENEKKLLTNLVQSLQSEPSGCEGANGRNPEQGRGDKASSVVWQVLKVALLFPILGRVLPRDLSPLKPVLVEGVWDRVRCSNGLVPLSAGGTVPIRDF

SEQ ID NO: 41731 - protein, 316 aa, Klebsiella sp.
MLILKAYKFRLEPTEEQSQRLRQLCGCARSVWNHGLEETTRILESGGKLPSAFELNRMLTVWKKTPELAYLQEAYTDNLQQKLKDLHGAWKRCFDKKLAAKKPVWKRKNDGRDSIRFVNFEKYCRLENRRVKLPSGLGWIKFRQSQDVNGKIKNATISQSAGKWYVSFQVEIETDKPKHESTSMVGLDAGVTKLATLSDGTVYQPVNSFKASQRKLAVLQRQLSRKVKFSANWQKQKQKIQRQHLHIANLRRDYLHKITTTISNNHAMIVIEDLKVSNMSKSAKGTAERHGRNVRAKSGLNRSILDQGWYEMRPSA

SEQ ID NO: 41732 - protein, 201 aa, unknown
  TnpB Polypeptide
MPLYTFVRYDKKNNIYINERRQCSYSKKMDSLTRKRNAKIDDYMHKASAFIVNYCIENLIGNIVIGKNENWKNEISIGAKNNQNFVSIPFNKIINMITYKAESFNINVNIIEESYTSKSSFLDLDDIPTFKEGEKYKFSGKRISRGLYKTKNIIINADVNGSYNILRKFDNTLFKKEDIKSLLTIPKIINLSGYINKKKLA

SEQ ID NO: 41733 - protein, 636 aa, unknown
  TnpB Polypeptide
MMANNKLSDVQKKDNYNKWLQKQKTFSNLSIDHLKYISSLLWFPFEKPTKVKSNSWFNIESIINPFFDPYTNFIYDQFNIAKNKILNEILNHFKCDSNKILEIIEKEKIIDDYQKQNNIKVKPNKKHKSKNVLFDPLKIPCKHIILCTYNNILYGRECGNICDQNTNKCKDHTNKNDNKCNKMASNLCTHIITQKSGGKNGKIVVDRKGMFCNDFTFKSSNPKYCPEHNKSHKTEDLENKVTEQRAFKIRFYPNKNQVNKLEEFFGSYRKTYNLCIENDVVKNMTKKEVKKKYVTDCENHKYLKNIPEDIRTFAVSEYFTNYNNANDKYIKDKEREQWKANNYLNYTPKNSVLPKMKYLEKNESQSINVDKGAIKIVKKKIIIYPKIFGKNKLLIKKRQKKDKKFNKLKGNINHDIKIIKTNTDKYYICFVADNEIVKKKEKGLTIAVDVNIRNLVTSYSEKESSEYGANIYDSLRPMIEKRKNMKKEKNKKGEEMVNEKIKNKINDLHYKVIAKLTNVENKLIIIPILNVRNMLEKDETHKTTKKMATIESHSLFIKRLKEKGKLNGTTIKIINENMTTQTCGNCFNKYIFKGETYECKNCGMKIGRDINSARNIFIKDLGKMKEYVNYLININK

SEQ ID NO: 41734 - protein, 406 aa, Acidimicrobiaceae sp.
MRRAYKFRLRPTAKQHVALGQCLDAHRTLYNAGLQERRDAYELVVRRSPHYFSKALRPKGPVNYGRQSAQLREIRELVADQDTWSFSSQQATLRQLNRAFESFFRRVRSGETPGYPRFKPAHRFDSVLWPKDGDGAKWVSETGRVYLQGIGHVKVTRHRQVEGRVKTIQVKREGRHWYLILSCDDVAQKPLEHTGAVVGIDVGIAHFLVTSDGDFVDNPRHASVGGRLADAQQVLVRKQRGSNNRCAAREVVANRHRKIANQRKDFHHQVARQLVEEFDLLVVEALTVKNMTKRAKVKSDPENPGQFLANGGSAKTGLNRSINDAGWAQFRSILEAKAEEAGRTVVSVNPRHTSQTCHECGHVDAGNRVNQAEFLCRKCGHETHADINAARNILGAGLALLVAQAA

SEQ ID NO: 41735 - protein, 261 aa, Haloarcula sp.
VYDKRCATFHDEYVSLATVEGRIEVEYLLPAADRDTPHSRYLDSDDYQVTGAELHHRDGQWFLHFRTNAEVESDTPKQATTGHRTVLGVDLGVNQLAVTSTGTFWSGHEFDHWRREYEERRGSLQQCGTWAAHENIQSVGGKETGRFKLMLHRIANGIIKEAAENGCTIIAFEELSGIRDRLPEASWGHKWAFERLYEYVKYKSELHGIDVAVVDPENTSRRCSHCGFTHPDNRDSEAFVCLKCGYENHADYNAAKNVGLR

SEQ ID NO: 41736 - protein, 443 aa, Beggiatoa sp.
MIVTRVLKSKNLNRGKYEQLEEQAKRLGHVRSEVWHRYGSINGVSVKSDRTIRNQWLKEKRPFEVSANAWKETLRDAFGDIKANRESAKEKVRKVVYKQVSDEKKRLELYKKLKSDNWTSDEYLRRLMRKHWKHGRNHTVNQIVVRSDNYTTFQLGGCAWIKIPGLQRGKRIAIPLNTTVEPTGTLRLVLKDGEVEVHYTIEVAETQNCGKATIGIDKGYTEVFVDSDGGHYGKGLGKLLTKHSDKLKRKYQARNKIRAIANKKTHKKQNIIENNLGRKKLNRQNEKAQSQIKDTIYQATHKLVDKASTIAAEDLTSPIKTRKFGKNVIRRLSAWTKGVIATALDTISRRRGSSVILVNSAGTMQMDSRHGILLGKRRGDSFHGFDGVVLQADENAAQNVLARLHDQEIDRWTPWQKVKSILLERTERLRLGLLNQDSSCNSE

SEQ ID NO: 41737 - protein, 468 aa, Streptomyces sp.
VVEAAGREKPIRVTGAEAKRVKREALGVPDRIRHQQRVAVPMQRRTPEADTRQRVYRYRCYPTAAQAEQLVKTFGACRWTYNEGLALRDKAWREHRVALGFAESCRALTGWRNAEGTRWLQEVSSTVLQQALRHLDAAFGRFFKGSGRQPKIKRKGRSRDSATYVRTGFRWVEDPERPGTGLIALAKQSGPLRIRWSRPLPAGERPVKLTVSRDRAGRFFVSVLVEERIEPLPPVFLQDAGAPKAVGLDLGLAALVTLDDGEKVDHPRLLKKYGARLAGLQRNLHRKDRGSRNRDKARQEIARLYALIADVRRDALDQLTTRLVRENQVLVVEDLAVASLVRSPRGKGRRRKAGLNRAILDASWGTLLRQLQYKCAWYGRTLVVVGRFFPSTRRCSGCGATGPKLDLSVRGWSCDGCGAVHDRDVNAARNLRDEGMRLYELVAAALPPGRAMPSLIRASEMPDVVLAV

SEQ ID NO: 41738 - protein, 408 aa, unknown
  TnpB Polypeptide
VKVEVYRAYRTELSPEGRQRSLMIQACGAARFAYNWGLRRKTEVMDRSKLSIERIKVPTAIDLHKALNALKATQFPWMYEVSKCAPQEALWDLDAAFTNFFEGRARFPAFKSRKHGLGAFTLTEAITVRPGRIRLPRLGWVRLKENGYLPSKVHINSATVSERAGRWFVSINVVVKQEKPEPVSGPVVGVDRGLKSLAVVSDGIVVENPKALHRHERKLKRLQRAVSRKVIGSSNRHDAVRALARLHLKISNVRKDALHKATTKLARTKSVIVVEDLGVRGMMANRGLAKSIADAGWSEFVRQLVYKTAWYGSRLVVADRFFPSTKMCSQCGNIRKAMLLSERTYSCERCGMLMDRDCNAAINLSQWPGVARTLETPVEAGVQPATTSAQPVGEAGTTNLLKGARDRG

SEQ ID NO: 41739 - protein, 367 aa, unknown
  TnpB Polypeptide
MEYSYKFRIYPNTEQQTLIQKTFGCSRFVYNHFLAQRIAEYKATGKAPTRFQQDKALTVLKQEIDWLREPDKCALQNSLKDLDTAYKNFFRSVKGGGKVGFPKFKSKRDRHKSYKTNSNIVVFDKHVRLPKLGLVKCHVSKEIEGRILSATISQNPSGKYFVALCCTDVEIDPLPSTGAVIGLDMGLKSFAVTSDGTEYPNHKFLTKSDRKLARLQRQLSRKSKGSKRREKARVKVARLQEHISNQRGDMLHKLSTSLVRDYDLISIEDLAPKNMVKNHKLARSISDASWGEFRRQLEYKAQWYGKVVVRVNKFYPSSQLCSVCGAQWPGTKDLSVREWNCPVCGQHHDRDINAAKNILNEGLRLLA

SEQ ID NO: 41740 - protein, 388 aa, unknown
  TnpB Polypeptide
MLRGKQVKLYPSQTQLAMIKQHADVARWVYNHCVAKNKERYEQNGVSVGKYQLSKEVTDLRRESEEHSWLQRTHSQVLQQAVHCYDKAMKNFFRNIKMGKVPGYPKFKSKYNSSHSFTFPQYVRLNDNHTHIKLPKIGWVRIRGGQQITTDMTIKSATVIYNTSGLVTVSVLVDDKNHASANVGTATVGLDVGVRKLVADSNGSMVQPLDYSDLTNKIAKYNRKLANAVKGSNNRSKIKNSLNKAYRDLANRRKDYCHKVANMYTGYRIVYVEDLNIQDMTANTTGTVDRPNYSSKQKTNLNQAITRQAWGQLFSILEYKLLERKSMLVKVNPMFTSQTCSVCGHVDKKSRHGEEFCCTSCGYTEDADTNAAKNIQSRGMGTVSLVPA

SEQ ID NO: 41741 - protein, 410 aa, unknown
  TnpB Polypeptide
MPRASRPSSFFPESTRVLRLRLKDKHAPALRVMANEVNFVWNYANELAVKVFERERRFLSGFDFNAYTQGASKEGLGIGSAVFQEVCEEYAKKRRAAKKVKLAWRVSNPESPRRSLGWIPFKTRSLTYKAGQVSFQGLKLSLWDSYGLADYELGAGSISEDSRGRWYLNVCVKVRQAPRIRVPLSSGALGIDLGLKSLMADSNGGEVDAPRFYRGLEPALAVAQRANKKDRVRAIHQKIGNRRKDFLHKHSTALVQEHCAIFVGDVNASGLARTRMAKSVLDAGWSTFRTMLRYKCDDAGVWFKEVAESFSTQECSACGARTGPKGLEGLGGRAWTCSACGTARQRDTNSATVIRDRGLAWLEEEFSAADSRPQEPAAVVNKATVHWHLARAVVAVGRDRPAVGIPLHAQ

SEQ ID NO: 41742 - protein, 358 aa, unknown
  TnpB Polypeptide
VLRLRLKDKHADALRAMARDVNLVWNYCNELSAKVFQRERRFIGGFELQKYLNGASKEGLGVGSAVFQEVADEYARRRRQFKKVKLRWRVSRGARRSLGWIPFKTRSLSYKAGQVSFQGLKLSLWDSYGLADYELGSGSVSEDARGRWYLNVCVKVKKPERAPVADLKVDAVGIDLGLKELLATSEGELVEAQRFYRDLEPALAVAQRARRARRVKAIHAKIANRRKDFLHKLSTGLVRQHQAIFVGDVNARALARTTMAKSVLDAGWSTFRTMLQYKCDDAGVWFSEIDEKFSTQECGACGARTGPRGPRGAGRARVDLFVLRHAAPARRQQRHHHPQPRPGVAGERVFHPGGGESR

SEQ ID NO: 41743 - protein, 505 aa, unknown
  TnpB Polypeptide
VGLSIRFIKPCLAGDLVPGLVPFSSLDEPVGRLPTLFANPGTPSSRKKEDGGKRTVRLRLLPNGAQERRLRRIADATAKLWNELNYARLVQFRETGRVDFRDTKHEFYHRYKGVLGVNAGQVVNLNNNAWKSYFELLKLYRQGRLPKFYRKPSPPGFWKDKVLGKRELRILVRNDRYYIKPINNGEGYLVLKDWGLKIKYAGRIKWSGKQGTLVIKLEGNRWFAYVPITVGEKPAKSNPKGYVRGIHEKIQIENPKGGNKAFIDIGLNNLFAVVFNHGDTAILIKGSTIKAEYYYWKREIKIYQSIRDWLRNHGFESWRKYHAFYLHAVYKQHERLRHYYRTAIRFLAKTLWQMGIDEVFIGYPYMVSQNDGNEYNTNVWWYAKIIKWLGEVLEEYGIKLNVVNEYGTSKQCSICNMEHENGRVKRGLYVCETTGIKINADINAARNIAKKAGYEAPIPRKILSYIVTTNGAKPITPKEGATPETPKIKPAQKGRKGSLNINNNN

SEQ ID NO: 41744 - protein, 374 aa, unknown
  TnpB Polypeptide
MSTRKYTIRLFPTPIQTALLRQYLFARRRVWNWGLATIQQWHKAKEKLDWNRLSRESVSLHKTEGMQTLNSHTVRAALRDLRTAMNAFFKRVKQGKVKAGFPRRKRPEDSNQGFLIPEHCRLKGRRLIAAKMRLKLARDLPATGKIGAAVRIKRVANRWYASFTVKKDLPTPPPVAPINLVGLDTGFRKYAVISDERVIANPRWTCQYARKLAHWQRKLARQKKGSNRRKQTVARIAKIHAGIANRRKHFSHFISKQVAEKYDAVCIESHSLKAQQQGRFAKSLTDVGHGHFRQCLEYKLHDRGKQLLKADPYFPSSKTCHLCGFKNTTLGFEENGRAQVAERSTTAILMPAKHWNMKASDKLQPTCCRPPEIP

SEQ ID NO: 41745 - protein, 490 aa, unknown
  TnpB Polypeptide
LAGLASGVRDISSYATYVVRNDEVLGDELASVTAAQPTTAGRRAGVTMPDFLVSGKSGRSRKEFLVQHRVVTEFRSYRERVKAANGESSKYVSRGWKRTVSAAAPSYGEDYVNLGAVDRQYAAIENNPFSDGEIILRLVIQGSWYRLVFDFDNNRFTGGKVTLPVIKVQGGQPVFIFTVVTDNPVVQLSGDYTIGVDVGINNYATVVVREVETGRIVYETTLSQRVHSLWNSVRASQQQVRDLKAKAVTLLLDRQARMSALDEAQLHREAASRKKRELAILAAQEIADLSHMWGNAVVSVEDLSWVANTMQRGRWNRGALVQWLTHYVSQNGGWVVAVNPANTSQLCHKCGARVSHPTHEVSVCAEHGVMDRDVNAAVNIAARAVPKVEKARKTRAKNRQLQPQRTFKTPVARNSLRYPGRDRTKSEPTPRRKKNRRLVSREVILPVCPARAQAQRLVARVLADQGARVALGTNTAALKQCCITCKCMLL

SEQ ID NO: 41746 - protein, 357 aa, Nonomuraea sp.
RAAYAKAGVSVRYGDQSAELKHARADDPDGQARRSFASQQATLRRLDKAFVAFFKRVGEGRAPGFPRFKGRGRFDTVEWPKDGDGCRWDSRSGHSTATYVRLQGVGHVRVHQHRPVRGQVKTISVKREGSRWFVVLSCDDVPAEPLPATGAVAGIDMGVASLVTTSDGGRVANSRHLAATAGRLADAQRDLARRKRGSQRRRKAVARAAALHAKVRRQRLDGAHKAALALVRTYDVIVHEDPRITNMTRSASGTIEQPGRNVAAESGLNRSILDAGWGVFLTILAHKAESAGRTLIAVNPDGTSRTCARCGHCAKENRVTQADSACTACGHAAHADVNAAVNILGAGLALRQAAEAA

SEQ ID NO: 41747 - protein, 552 aa, unknown
  TnpB Polypeptide
MENNPDTCPWYDDTIKKINKKIWYPTKIVDNDSFIYNFDSKVINFNSSKPKNINDKLKIKVPIINDIDADTKQCKLNYYEKTLKLIKKYKKDSSEYYNDSAKYIELHPEYNQKTELNKFKAKKSKATEKYIKQLKLVGKVIHAYKLKLQLNGKQKATIGKWMKESEKVYNYCVDQYNTNANFPKNFMGAKLVVFKNLYGNNKKPIPYDILTYEVKDFFSNLQSAYSNLENGNIQFFKMSYKNTKKSQTITIRKDCISNNGIYFSVLGKVNNFSNKIDNNDIICDCKLSYDKVSDNYYFYIPNYIDCIDGSKKRKHICAIDPGEKIPFAFYSTEDYGFIGDDIRKDILKFEAKIRKFQRLLKSREKKDKTNKKKIKKGKIIKRINLLHRRIKGLVNELHKKAALFFCKNYNIILIPKFETQKMICDKVAAKKQVFKNITEIKENNKGNLDELKKGLKLYKRKRRLNSRVKFVLQQLSHYKFKQHLFSKAKEYGCLCIEVTEEFTSQLCAKCGKLDKTYVNRVKKCKHCKQEINRDVNGSRNILLKYISSFISN

SEQ ID NO: 41748 - protein, 387 aa, Actinobacteria sp.
MLVCVKIVVQVRLLPDAAQAPALESALRAVNEAANLVSAVAFDRHVFREYALRKQVYGSLKDRGLGAQAAQQVIKKTCNAYKTLRATIQAGNLGAPGSKRRVKAESKPIAFRPDAAQPYDDRCLSWQLDTRTVSIWTTSGRLRGVRFACSADALRTLALYRHGESDLVSRDGRWFLMATCDVPEAGQYEPDGFLGIDLGIANIATTSDGEIMSGRMVNRYRRRQLSLRRKLQAKGTKSAKRLLKKRARKEARFARDINHCIAKKIVTEAERTSRGIALEDLTGIRDRVRLRKPQRVTLSSWAFAQLGSFIAYKALRAGVPAVYVDPAWTSRTCADCGHADKRNRVSQARFTCRGCGVVAHADRNASRNIAARGQVAWDAGRESRAPA

SEQ ID NO: 41749 - protein, 426 aa, Anabaena sp.
VFGCQQELIKCDKETKAIIEYLCYESNSLYNCAVYYARQMWLKTGKIVSGFDLTAEMKNNKHFHAGYASAMQQTCLNVGEAFKSFKKLLSKSKKGELAQKPKTPYYRKSGGLFTVTYPKRWLKLKDQFIRFPLGNQVKAWFGISEFFLPMPTNLDWADIKEIRLLPRNKCFYAEFVYQQSVEPIKLDQSTVLGIDHGLNNWLTCVSNVGTSFIVDGLHLKSLNQWYNKSVAKIKENKPHAFWSNRLAAITEKRNRQMRDAVNKAARIVINHCLDNHIGSVVFGWNKEQKNGADLGKNNNQKFVQIPTAKLKSRIEKLCEQYGIDFIETEESYTSKTSFLDNDVLPTIGAKPEGWKSSGVRPNRGLFKTGTGININADCNGAANIIRKVAMMAKFDLAGISRGCLSQPKKVLLWTLQKSPRLQTGEA

SEQ ID NO: 41750 - protein, 311 aa, unknown
  TnpB Polypeptide
LNFVCWRNKDKAGNAIFQKTGRKSGVVVITGMNPTRWRKPGERLHWRVVIHVRVSQPIRPYTSVHVDWTHKSLTFTNMPLPLPRTGDGKVGIDRGCVHTLASSDGIFMDMPKPSKAELKRLKYLQRRMARQDRVNEARGGRTAKFASKRRGKTLSEFNALQGRIVRRRNDWIEKTTTKLARENFLVAMEDLDVKAMTKRPKPKPDPNRSGHYLPNGAKAKARLNRSILGNNWSRLMKRLNDKMNANGGKLVIVPAAYTSRTCHKCGHVAKENRESQAVFHCVECGHKANADVNAAMNILSRALAKTGGGTA

SEQ ID NO: 41751 - protein, 466 aa, unknown
  TnpB Polypeptide
MASFHRNIPLYKRLTPIMSGRNIINMNNEKSTHIRTQQILIRKPHEAFRGASVCTQIVRRIKNATSYLMQHHPDGKDQRLSHRDADKWLKRNNSELYTKLPAAIAQRSTQIVGQEWTSYFAALRAYKKSPHDFKAKPRKPGYAYKAATVHIGRNGFKFVDGTLHFANGVLPPIKTHFRFSQTWNALVGDTVALEVRIVPKGNCFIIEIIYNESKVVEVGRFCRLLDTSRRAGIDLGINNLIALATDQPGVRPVLINGKALKSINALYNKRVAKLRSQGKYAHIRAMTNKRNRRIKDLLHRASSKVASYCLENNIGTLVIGYNKHWKQEVNIGRVNNQKFVGIPHAILMSQIQYKCHGLGITTVIQEESYTSKASALDNDFLPVHGEKPRNAVPIFSGKRIRRGLYKSKHGIINADINGALNILRKATGEALGLTCKGFVFNPIMMDLLPSKSVVIRRENTAHQIAA

SEQ ID NO: 41752 - protein, 332 aa, unknown
  TnpB Polypeptide
MTYDKRAATYDRYEATFSTVNGTVTCRYELPAEVEGTPYGEYILDRRWSFSTSKLVFDGERFWLHAVMHRQFGDNPVYAPQTDDSSSDTHRVLGVDLNGDGATAVSSTGQFYGNADALNSYRSEQEQLRGELQQTGTRSAHLRFQQRRGTEWRYSDQYAHHVANSIKQEALRVRATHVAFENLTRIRKRISNLPKFQQWLFKKVRKYTEYKLERYGVTVDTTNLDYTSQACSRTDCDCVDEDNRGGKQFACLECGYTIQSDYNAAKNVGFRYLNTELSSPAGHTCSSGQATSQLALMSGTLSPTGDCAEHDWVSTDKPYPQQVSDSSFARAQ

SEQ ID NO: 41753 - protein, 424 aa, unknown
  TnpB Polypeptide
VKLENAVQSLRSNEKSSLTYEQLSRSIPLSVLHSPTSQSFREIPLIRTLRFKLMRSKKNRKLHCEIEQFSRVYNHFITVIERYYRLFKKHPSASRLKMLLPKLKRTRRLSWLKTMPSQALQDVVERIDRAYKRFFEERKKGRRCGKPHFKQPENYKSFTLKQAGWELVGEHSLRIGDFVFKFHKSREIPSDKVKTVTVKRDRLGDIYVFFVVKSTEFVPKRCATGQSVGIDFGFDQFLTLSDGTSVDAPMFFKQDLRHIKQLSRSMSRKVHDSKSWNATRLDLNRAYRAIQHKRDDWHWRLAHELCQKYDLICFETLNFKFFQRKHGKKVQDFGFVNFVKKLTYLAKRYGTQIVFVDCFFPSSQLCNACGYQNPELKDLKIREWVCPVCGEFHERDFNAAKNIHDEGGRALAGLTEFKNFEIIS

SEQ ID NO: 41754 - protein, 503 aa, unknown
  TnpB Polypeptide
MECVRRAVAVEIESPPPELYAVEEPYRRIMEEVTAYVAERGRLEREKYSEIYRRFRELYPLPAQLIQQAINQGVETGKSFLEAKRNGRVHKPRPEVGRVSMRFAKDSWSYKKAISSVAPVRLALSLPGGRRKVWIKPHRRFWLYWWKVLRKEADLASTLILKRRRNKWYAVFVFDVVPKREPPAEAVAFDVNENSVAVARVTLLSTVDAVAQWNRQYVDPAVYFIKTDFGRLAKRYEAVRNAKLEGLKRKYPYAGRDDEEKVQNVTDTREFRKFARRLRERRRKEARVRQIVREVTKSPALIITEELGKNPQEEMIGVVERAKKGAKKKVEKRELRHRIKQTPFKRLVRAVEDKAAEGGSAVVYVSSYRNSKVCPIHFAKLEDGGDWHVLRCPHGHPVDRDAAAVLNMLWKTTPTGWVKGVWWDVKETRKRLKKGIVPREVVKKANPIIPRPIIHAVWASLNRLKASPQWPAVLARAAPMTPAQGADEDGARAPPRPRVTPAL

SEQ ID NO: 41755 - protein, 413 aa, unknown
  TnpB Polypeptide
MRLIYKFYIQHTEQLDNLFRISNNLYNQALYHFRQRLDADGVWLWYNDMDKLMKQALNLEGQCNYKLLKSQCSQQILRVLDKSIKAYCKSIKDWKVHKDKYKAMPQMPHYRKRGGMFNLYYTNQSCTVKDGVLRLAKDLSVRIPQWEKYGGSIKSFCQVRLIPGKRDIKVEIIYDKEIRKVDVDKTKYAAIDLGLDNLATMVTAEGCSIWSGKYLKSYNSHFNKTLSRLQSIKDMQGMKRTTRRINRMYDKRDRYIEDAFHKVSRQIVDTLVRKKIGTLVVGYNAGWKQNAGMGKRNNQKFVQMPFARLAGYLRYKCEMIGIEFVEHEESYTSKCDALALETIGKHEEYLGRRVKRGLFRSSTGKVINADQNGALNILRKVVGDSEFTRIVDSGHSLCPVRHRSPFFRSAGSM

SEQ ID NO: 41756 - protein, 424 aa, unknown
  TnpB Polypeptide
VAAGHQPAAGPAWTAAGRRLSGAGPRTRRTRPTGELSTVGARSVLGRYSDAWFQAAKRRRRGEPAGFPRRKRRLVPIRCYHGTFLFRQGRVRLPVAKGHPVLWVRLARPIPYPVEQVRAVTLLADGGRLWLAVTAAVPIQPQHLDPGRVAGVDLGIIHPYAVVADEAALLVSGRAIRAESYLHLRDQQARHARAARRAPKPGQRGSRRWRRHRLHVRREEARHRRRVHQAQHEAAKQVIAFAVRQGVDTLLVGDPKHITSQNVGRVQNLRLRQWRRTHLVHALPDKAERAGMIVRMVDERGSSSTCPVCRRKVPKPKGRRFSCPHCQFQGHRDLVGAANIAATHGGGPTSTALPVLVEHRRAGIVPARRDRRRHQHDRRQRRSCLASGHPAEHQRSAGCRSPRASTYPAHGEDQATRPNRAPGC

SEQ ID NO: 41757 - protein, 415 aa, unknown
  TnpB Polypeptide
MSPYSAMKPNILGGVQLRYNYRLYPSSGQRDALARAFGCARVVFNDGLRARQEAHAAGQPYITDAELSARLTASKATAERVWLGEVSAVVLQQSLADLNTAYRNFFASITGKRKGQKVEPPHFKSRKDHRQAVRFTANARFRVLTSGKLRLPRIGDVSVRWSRDLPSEPSSVTVIRDSAGRYFASFVIEIGSAALPDTGPVIGIDLGLTHFAVLSDGRKIASPQFLRRAEKKLKRAQRSLSRKEKGSRNRDKARVKVARAHAQVADARREFHHQLSTTLIRDNQAVAVEDLAVKGLARTRMAKSVHDAGWSASVAMLDYKSRLYGREFHRIDRFIPTSQTCSACGIKDGPKPLHVRAWQCQQCGTWLDRDINAAVNVAKAAGLAATACGAQVRPGLAPAQRGEAGTHPTSHQEAA

SEQ ID NO: 41758 - protein, 402 aa, unknown
  TnpB Polypeptide
VLRGFRYRFYPTAEQEALLRRTIGCTRLVYNRALHEHSEAWTTGKKSIGYAAQSRTLTAWKKMPELSFLNEVSSVPLQQALRHLQTAYANFFGKRAKYPSFKRKSRGGSAEFSRSAFRYEDGALTLAKMTASIDIRWSRPLPEGVQPSTVTVSLDASGRWHISLLCEDASIKPLPKLKTAVGIDLGLTSLVTLSTGKKIANPKHDARELARKRILSRRLAHKVKGSKNRDKARQKLARLHARVADRRRDHLHKLSTQLVRENQAIVVEDLNVRGMVKLRSLSRVISDAGWSELVRQLEYKSEWRGRTFVKVDRFFPSSKTCHCCGHVVETLPLSVRVWTCPVCKAEHDRDVNAARNILAAGLAVTRKSEVCGSDVSQRVLRNAVQSELKQKNSRAISGIPSL

SEQ ID NO: 41759 - protein, 402 aa, unknown; identical to SEQ ID NO: 41758
  TnpB Polypeptide

SEQ ID NO: 41760 - protein, 405 aa, unknown
  TnpB Polypeptide
LDKTFGSCRFIYNKMLEERKNIYQELKDDKDAFNAHKYKTERQYKEDHSFLKEVDSKALQSEWRYLISAYDKFFRNLKKGIKKGFPKFKSKRAKQSYTIYNINFNCKIDFDNKKLKLPKIKTWIKYRDDRVFSEDIKHITVSKTKSGKYFVSILIEIESNVIPKQIVEEDKIMGFDMSASKFLIAKELKLSSPRFYRKEESKLKRLHRETSRKEKGSSNRNRAIINLARLYEKIENRKRDWIHKITRLLSKHFDCVILEDLNIKGMQRFNSGLSKSVTLDFSWNQFVTILKYKMEQKGKHLILVGRYFPSSKLCSECGYIKEELELNERESVCPKCQVYHDRDVNASVNLRNEGIRSLKENNITIINSHDTAVGTTVDAFGENVRLLDREIQEQFSMNYESTTFK

SEQ ID NO: 41761 - protein, 419 aa, unknown
  TnpB Polypeptide
MFIQKENQFEFFPTNNSIKGIKFQFSVKEGNLNLLLKRYSEAVNLFIEKIFLERTTSLSKLNKVRKEVYIKTKLTGYASILAMRSALAIYRSWKKNKRKEIPKVKSKFIQLQPNYNCKLFNNELRITFEKRKFIWLELRIGKYQRTFLNLIEQKKLKLGQITVGKNFVVLSVKKEYIPYEHQGILALDVNEKSICGMIFKKNKLKPIEWNLTKIYELNQKYFGYRRSLQIKYPNRFVLWKKIPNNKNYKNRVKWRLDNVTKQIVEFAEKEKLLVVMENLKNIKERINKRKLKLNKYNNREQMMRTKSLPLLGRLNRTNFRRVQFMIDYKGKWNNIPIKYVNPKNTSRACSRCGYVNGSLKEKRILECKNCGLKIDRDLNASINIGMALCGSESRLPKIEDLKDQISEVNFKNIELTEPT

SEQ ID NO: 41762 - protein, 397 aa, Neobacillus sp.
MQLDGKVSSFNEKRKLDIHELRSKTSYLQKVINKKTTQKEKLHQQLQKTPQTHRLFSNRLKKYRNLKFYLHQKKRRLRNLLQKLEKLHVDVTNKKIRICFGSKQLFHKQFHVEENAYKDHEDWRKVWREARSSQFLVIGSKDETYGNQSAIYDMKNTLRLRVANQFTDKYGEYIEFPEVIFPYGQEWLDKAKDSNMGLTRSGRLQKYYTSITYRFIKQEKGWYVNATVERETPKVGTSNLNGLIGIDINAGFFAICEIDRFGNPIKSWRIDIPMYSRRKKQIMASISDAIKEILEYAVLVQKDVMIEKLNFSKKKTQLREKGPAYARMLSGFAYSTFQQLIAAKAKKVGVRVKQVNPAYTSQIGQMKFMARYGLSSHAAAAQFFCVDGLAKEINGII

SEQ ID NO: 41763 - protein, 397 aa, Clostridium sp.
MTSTNIEKNTIAKGFKYRIYPNKTQINQIELSFNAKRYVWNYFLNINKHRLKHHKSVLNFAKMSRLLTLLKKKNIWLKQCEKSVLQNTLKNQYETFLKFFKKECGFPKFKSYKSNYQSIKINYTNNNIEVLEKEIKYTSTGKYKKQNCKIKLPKLKQVKIAYSRQYQGRIVSSTLSRDTDGKYYISLCCVDVPQENKEKTGLVVGIDLGIKEFATTSDNKVISNPKYYRRYEDKLIKAQRKLSKRKKGSNNRNKQRLKVNKYHKKIYNCRIDFLQKLTTDFINNYDIICMEDLNTSGILQNHKLAKSIADASFFEFNRELEYKTKWYGKIYQQIDRFYPSSQLCSDCGNQSQQTKDLGVRAYICEKCGLVIDRDYNASINILNEGLRIINNKKVVSM

SEQ ID NO: 41764 - protein, 386 aa, Fusobacterium sp.
MYKALKIELKLTNEQKIQINKTIGVERFIYNEYIKYNQEQYKLGNKFVSANDFSKYINNIYLPNNPDKKWIKDVSSKSVKQAIIYGERAFKNFFKGLSAFPIFKKKGKNELGAYFVKNNKTDFEFHRHKIKIPTLKFVRVKEYGYIPKNANIKSGTITKIADKYFLSLIIKVKDIVKTENTSVKGLGIDLGIKDTAICSDGKVFKNINKTIKIKKLKKKLKREQRKMSRSYEYSKSKKIKLKELKNFNKKKLKVQKIFYRLDCIRDDYNNKIVNEITRAKLKYITIEDLKVSNMIKNKYLSKAIQEQNFYSIRTKLINKCKERNIELMLVDTFYPSSKTCSCCGSVKKDLKLNDRNYKCCNCGLEIDRDYNASINLEKAKVYKIIA

SEQ ID NO: 41765 - protein, 310 aa, unknown
  TnpB Polypeptide
LPAPRERAATRANWALSEWDRQYQAGEKPTVFKLKKQFNEIRRELFPWTWEVTKNASDQPFLDLGKAFTAFFEKKARRPRFKSKKRSKPSFYLANDQFELGDHRIWIPKLGWVNMAENLRFTGRVTGARITKTADWWFVSIQVEMPDTLPGKMPAAVGIDVGLCRLATLSTGEGYENQAFLKTALKKLRQTNKRLHRRTPESKNREKARRQVARLHYRVTCMRDDVLHKLTTRLANCYGIIGIEDLNLKGLLKNRHLSRSFSDAALGKLIDMLTSKIEQRGGQVIKVGRFFPGSQDLSCMRMEVGRDAGV

SEQ ID NO: 41766 - protein, 367 aa, Fusobacterium sp.
MEKAYKFRFYPTKTQIKKLNSTFGCVRYVYNHFLDLKQKLYSTEKKSMSYNICSKELTVLKKEKEWLKDVDKFSLQNSLKDLDVAYKNFFSGKGYPKFKSKKDNRKSYRTNYTNNNIEFLDKWIKVPKLGRLKIRDKMTPQGRIISATITQVPSGKYYISLCCADVEVEKLESTNRNVGIDLGIKDFAITSDETIIENPKYLQKSLNKLAILQRKLSRKSKGISNRNKARIKVARLFEKIANQREDFLQKLSTMLIKEYDIICMEDLQVKNMVRNHKLARNIVDVSWSEFNRILSYKAKWYGRTIVRVDKFFASSQICNCCGYRNEEVKDLSIREWTCPKCNTVHNRDINAAKNILKEGLRILGISA

SEQ ID NO: 41767 - protein, 532 aa, Desulfurobacterium sp.
MFSNRVLSIRISGKDRKEKVRKLLFDLAHFKNFWIILIRKYKELYGYYPTDQSILYGLIADREYSSKKEEKLTKFKEVRENILKDEELTKLLLALKEQKKKVDNNYLLQQVIRSVVKSFNDYRKAYREYQRNPKKFKGTPKPPKPKKLKFLMNFSVELNVNTFERLEDSVLIRLRINNKEFLKVKLPKEFHHEVKSIRLKLFGTDVYADVVYKVETLELRTTGEYTAGIDLGLNNLIALVSTNSNLKSIIVSGKEIKAFNQWFNKEKAKLQSEIDTIRNKLLKVEEDEKAQNLKRLLTEKFIILKELSAYRKRRIGNDFHKISRKVVDILKATDHKKLYIGKGAAESKDGINIGKKNNQHFVSIPFRKLIELIKYKAEELGIEVEEIGEAFTSKTSPFADIFEVRKIGKKYLKAKEKEDKTLLRKILNQLKSLRKAVRRFRGLLKDKVSGAFFNADLVGAYNIVRVGESSLRLIENQRVLITKLCNPIKFRLIEFLYKVSPESLLRGIGSSSSLRAGLSLFDYQLCNNLTTF

SEQ ID NO: 41768 - protein, 458 aa, unknown
  TnpB Polypeptide
MNIVRKIKMEIISPSRSEEILKKYNINRKEKMMISTGQSIREIEQSLLDMNEILPRACNMTMVDFHKIIHSNLSDDEKCALIKNRGIIGKKPGEKVNNDPNDIRVHLKDNLNLLASEYGSINNVPSSIYVRGYTDMTNGIIEKSGKIKREILRYDRVLPEFKKGMPMGLSSQQIRIYPNEDGEFYFVIWGVLFKTILRKDKQKNRDILYGIINNNDYKLSDSTLSVFKNGKNTEIYFNMTVKIPESKELYDRGIICGLDLGMKTLVTYAICDKATGNVITDEHSKKEIIGKIGDGSTIIEFRNKYKIEGERIRKKCEMMGVNSHGRNAKMEEYYKYIHNKERNAAKNIYHTVSRKVIKLCKENNAGVIQMENLEGYGKKECIAASLWGYYELQKMIEYKAKKEGIEVKYVNPKNTSKTCSECHGVNESLTLKDREWVCPHCGKHHDRDVNAAINIARM

SEQ ID NO: 41769 - protein, 441 aa, unknown
  TnpB Polypeptide
MYKTTKIQQTKQHHEVDLSILRAMCFHSARLYNVGLYTVRQHYFNTNTYLPYNSNYHECKNNENFKLLLSDCGQQILRLVDRDFQSFFRLLILKKSNKYSEKVRLPRYKKEHTVMACPIQGRSCRIQKDGKVAIGLTKEFREKYNISERRILFTIPKNIRHIQQFQEIRIIPIHNGKEFSVEFIYNDTTVKPQVQGDGYMSIDLGVSNFAACTIFSNGDARQFLIDGRRLTNINHYYNKKVSNLKSEYSKNKSIIDTTTPRMMRLMNGRNNRITDYFNRICHLLVNACLSYGVSTIVIGYNKNQKQEINLGKVNNQNTVSIPYHKFRQKIETLCTEYGIKCISQEESYTSKASAIDGDIIPVYGENIDNIIFSGKRIHRGLYRSSEELYLNADINGSINILRKYFKERNEKWPYHNSVRALVNVPCQRVSPFAQAPSFRWV

SEQ ID NO: 41770 - protein, 440 aa, unknown
  TnpB Polypeptide
MILSYNFIFHKHENVKLFHHLKDQMFWSARLYNQVLQIHNEMYWNCSVSYNYEMMEKLVKQLVVNNYFYKLKSGVAQQVIKAFYHDLNSYLQSVKEYQINPKKFNGVPRPPHYKKRYNDCVYTYACIVLRDGKIYPKEDLGIEIPQDQYKKFECFYTRDQNKKVFVHKNIKTVQFKFLSKDKIQVFITYKTDELNSELDKNNAIGIDLGFRDLMSVVSKDKSFIYSGAPITGLNRECNIIFDKLKSFKDSHKRIFRCNSNKLKELYLKRSFKINTYLHQCAKHLVNYCVSHKVGTIVVGYNEGWKESISRKNLTIKCKSVAHTLNRRFNEIPFYKLIRILKYLCQRIGIKLVTLHESFTSKCSALHLEKICKHETYQGVRDGGQFKSDLGFLNADINGAINILRRYLKDNDFIKNLISSKHIFNPKILKVAEICCKQQYC

SEQ ID NO: 41771 - protein, 307 aa, Methanoregulaceae sp.
MLRAYRFRLYPTEAQKVLLGQHFGCCRFVYNRALSLKHETYRRDRTNLSQAAISAMLPGWKKEYPFLADVNAQSLQQTIKHLFDAYSQHFKHLADLPTYRSKHSPRQSFTVPQAYAFDVNRGTVKLPKIEAVKAVFHRQIVGVSRTLTVSRNSVGRYYISVLAKDDAELPCVSAPIRDQTVGIDLGLKQYATLSTGEIVDNPRYLKTSLQRLKVLQRRLSRKQRDRRTGTKPRSPWQNATGPLPINGATSCTSSLLDWYAKTKPSQWSRSVSPTWSKITRWPRPSRTPRGGCSSPFWNISADGPGKH

SEQ ID NO: 41772 - protein, 399 aa, Methanoregulaceae sp.
MIDTIVSSYAASVPIPIVSDRGAESAARTALRLLPVRVQPGALAQARDVSSGQNESLPGRDQRDAARLEERVPIPRGRQCAVAPADDQAPLRCLFSALQAPRGSPDVQVEAFAPPVVHSAPSIRIRCESRDSEAAKDRGGQSRIPPSDRGSVAHVDRVTELSGSILHQCPGEGRRGTTVCLGTDPGPDGGDRPRAETVCHPLDGRDCRQPPVPQDLAPATQSAATTALPETKGSQNRNKAKIAVAKCHRTIADQRSDFLHQLSSRLVRENQAIAVESLCVANMVKNHTLAQAIEDAAWGMFVSFLEYKCRWAGKTLIKIGRFDPSTKTCSVCGHRHGSLTLADRVWTCPDCGTHHDRDLNAAINIRDFALAGQDLPVEPVDSLTPVSRMKQEAPSFTVG

SEQ ID NO: 41773 - protein, 514 aa, Nitriliruptoraceae sp.
MGHDLSKGQAADGGHVTRAVEVTLDPSPSQERWLRSYVGSMRVAYNWALEQVADNLHVRRDERARGVPEGELTPALSWSRASLTAAWREVRDEVHPWHRDVSVHAFRTGLDNAALALKNFSESRTGKRRGAKVGFPRFKNRHCRQAVTFVEFADGVDHRHWINPDTRTHVRLMLPRRAGEGTWERHHTRPRSQQAAGRDRRSEVAWLHTHQPDVVREVWRLCESGRAKVQALTIKHEGGRWKGRVPPAPARRLDPAAQPGRARKASRRHGRCRRRPEAPGHVGPAGAGADRRARPRSKPARARPTPGPAAAARPGHRSLREGLEEPGKLLRRRAKLYGKIVATRNLYLHELSRRLAGGFDVICIEDLNVAGMARRKGLRNGRSVAEASMGELTRQLDYKTTDRSARLVRVGRFYPSSQTCSQCGTRTKLALWQRVYDCDHCGLTLDRDVNAARNIRAEGQRLLREQQLDVASIRGETQNGEPRLGETEPVPQAPGGHGSSEAATDPAATPEVAA

SEQ ID NO: 41774 - protein, 393 aa, Streptomyces sp.
MRLRYNYRVYPDPAQRRALGRAFGCARVVFNDGLRAREEAHSAGLPYIKDADLQKQVITAAKCTEGRAWLSEVSSVVLVQSLRDLRIAYRNFFASLTGGRRGPKVAPPRFKTRKDRRQSIRLTANGFRLRDNGRLYVAKVGDLRVRWSRPLPGTPTSVTITMDAAGRYAASFVVEADPQILPETDTETGIDLGLTHFAVLADGTKFSTPRFLRRAEKKLKRMHKIIRDNQAVFVETLSAGALGRTRLAKSVYDAGWAAFVGMLEYKAVRHGRTFAKVDRAFPSSQICSACGFRDGPKPLHVRTWTCRACGAVHDRDDNAAKNVLAEGRRIVAAGRAETLNTSQSAGKTRVKAPAQRSEAGSPRKGQPTRAGIPTLQAGSASIRGTVLSRGLRG

SEQ ID NO: 41775 - protein, 351 aa, Burkholderia sp.
MIRVYRYRVKSLNGLLNQQARAVNYVWNFCNDTQKHALKWGKKWPSAFDLEKLTAGSSKELGIHSGTIGQICDRYFKSRYQSRRPYLRYRGGKSLGWIPVKGRDFKREGDAFRFAGNTFRVFNSRPLPEGKIKDGTNFSRDRRGNWFLNICIEVADSPRREILNGIGIDLGLKDFATLSTGEKIDNPRYFRRLEESLAKAQRAKKKRQAANIHARIASSRADFLHKLSHRIVREFDYIAVGNVNAAGLAKTSMAKSIYDASWSSFRAMLAHKAVRHGAQYEEVDERFTSQICSSCGAMPPERPKGIADLGIRHWVCSECDASHDRDVNAALNILARSGHRPPAEGISIVAD

SEQ ID NO: 41776 - protein, 405 aa, Sporolactobacillus sp.
MQQGLTLKLKIKPNDTEANQLRVMQLAYTKACDYVSSYHFEHHFTLSRRQLHDALYRRLRRDFQLKSQLAESVLITVLARYKTVQTLMARKPYRYKDSYTGKWYQVRRDLAWLRQPVRFKRLQVDLVWNRDWRFLKNGQISLNTLDKPIKVDGALHYFDRYMHQGWKLGTAKLLQIGRKWYLHIGATKELPDFNRSQMRHVVGLDRGLRFLTTAYDELDQTSFANGKAILRKRRKFKQLRQELQAKGTKSAKRRLKRIGQRENRWMADVNHQITKTLAETYGTGAVFALEDLAGVRFATERMAKDHRYEAVSWSFFDFEQKLAYKTTLRGGTVVKVSADYTSQRCPKCGSINKTNRDHERHHYRCAVCGYQSNDDRIGAMNIQQLGTLWASGETHPKFERLTAVE

SEQ ID NO: 41777 - protein, 235 aa, Lysinibacillus sp.
LEKQKRRLLRKLDRSRRSTNPNNFKKDGTIKHGVKLHWTYSKNYQKTKEQVKELYRKKASYIKEKHGALANKILSLGDEVYIETMHFKGLAKRAKETKTTIQGKIQSKKRFGKSIGNHAPAMLVEIINQKLGYTKQTIQKVNTITFRASQYNHVTDRYEKKKLHQRWSQIGSHLVQRDLYSAFLLMNSDPNLQQTNQDLCNKTFTTFLELHNQHIEDLKQVKKTFPLSMGIQQIK

SEQ ID NO: 41778 - protein, 302 aa, Lysinibacillus sp.
VIRGKHTFYVQLVMDGIPPAKRIPSTGAFRHSYQKQKRVGIDIGPSTVAIVSEETVFIQQLAPEVPLLEKQKRRLLRKLDRSRRSTNPNNFKKDGTIKHGVKLRWTYSKNYQKTKEQVKELYRKKASYIKEKHGALANKILSLGDEVYIETMHFKGLAKRTKEIKTTIQGKIQSKKRFGKSIGNHAPAMLVEIIHQKLGYTKQTIQKVNTITFRASQYNHVTDRYEKKKLHQRWSQIGSHLVQRDLYSAFLLMNSDPNLQQPNQDLCNKTFTTFLELHNQHIEDLKQVKKTFPLSMGIQQIK

SEQ ID NO: 41779 - protein, 402 aa, Helicobacter sp.
MYNKTNQTATALSKKKNGKVMLITYKQKLYKNDKNRRIDTLLRHYGVFYNHCIALHKRYYRLFKKYLKLNDLQKHTTKLKKTHRYAFLKTLGSQTLQDLTERIDKAFKKFFKKQAKLPRFKKVANYKSFTFKSQLDKKTGLNKGVGFEIKDNVVSFNGYSYKFIKTYALIGKVKTLTIKRDNMGDYFLCLVCELENNPNKQTACDKSVGFDFGLRTFLTGSDNTKIESPLFFSKYLPLIKRLSKNLSKKVKGSNNFKKAKKKLAQLHQKIKYLRTDFFYKLALKLSRKYQSIFIEDLNMKAMQKLWGRKVSDIAFSEFVKILENKAHVVKIDRFYPSSKTCSNCLFVDENFNKDIKKLGKTDKEREYHCKYCGLELDRDLNAAINIHRVGASILGVEFVRPT

SEQ ID NO: 41780 - protein, 372 aa, unknown
  TnpB Polypeptide
MKTYKYPLYDQSNSIRIGNLLDDMWQVHVYFHEWQRQRHKDGLPYVNYEGMCDHLKHLKETTHPHWNALPSQATQQELKRIHKAYDRFFKKLGGRPHIKPRRKFKSITHPSSAGWSLYNNRMTLTFRKWNPQTRKWQFDKVAYTFHKHRQWHGTITEVTIKRATCGRYWVCITTSYKDFRPLPTTGKSVGADFGMKDAYLTLSTGEKIQHPQPLKTNLKKLRSLNKALSRKQKGSNGWWHCVRQIARLYRKISNQRKDFHWQLASELCKKFDTIFLETLNLDGMKRLWGRKVSDLAFYKFVEILKYKCQKHKREFQQIGRWTATTKPCSDCGFHNENLTLDDREWICPECGSHHDRDINAALNILRAGIAVT

SEQ ID NO: 41781 - protein, 363 aa, unknown
  TnpB Polypeptide
MTLRTQKIELNPNNKQSTSMSKHCGYRRVAFNFALSSFKVGLDADEWRTEQEIRKEFNAVKYDKFDWCKELSQNASKNAIRDLGDAVTRWRKGQNRFPVYKNRSGKCSYQADNGEGTVEVHKKRINLPKIGWVRMREELRYSGEITKVIVSKHNDTWFVSVTVRRLDSDNYKHQPTLFDDRQPIGIDVGINTLATCSNGDIYDNPRPLKRFERKLARANRRLSRRQKGSQNWYKAKKLLSGVHDRIANIRSDAHHQATVRIVRKASAIGIETLNISGMLKNRKIAKALSDAALGGFLTKLKYKADRRGIPITQADRFFASSKTCSNCGDKKADLDLSERTYHCSECGFECDRDVNAAYNLCPA

SEQ ID NO: 41782 - protein, 503 aa, unknown
  TnpB Polypeptide
MLRRAIAVELETPREVSRLLYSVEAAYLSIVREVVEYAVVNSVTSVNQLHGLFYSRYRSEYPGLHAHLIIQAIKQASEIAKSFMERRREDLVNKPYPEIKAVSIRFTEMAWGYEQFVKSIAPVRLSLSLLGERREVWLRPHKRFWRYWWLVLNRKASLAGTLIVKRKLNKWYAIFTFKIETEERTPQAIVSFDINENTVAVGKIDLTSTVGMVTNWNRQYIMPQLYMIRTDFGRLARRYERVRNAIIEKLKPGFASLNGKYVNITNTREYRKRVKRLREGVRKLGRVRQVASELTKTSALIVTEELGNNPQESMIEDVGRNELRHRIKQTPFKKLESAVEDKALERGSRLVRVSSYRNSRVCPIHFVRLERTDDWHTLKCPLGHLVDRDYASVMNMDWKLTPESWIKAFWWNMKSLNKNMNWRKYEGKSNPLIPYEIVQYVHAVLKTLKASEESPAMLARGKPMNPAREADEGWARETRAGRAGSVMSSKRPPQTHTHGGTLS

SEQ ID NO: 41783 - protein, 406 aa, Pusillimonas sp.
MQRLQAYKYELRPDGQQERQMRRFAGSCRFVFNKALALQKERYEHGEKKLGYASLCKLLTGWRNCAETAWLADAPVHPLQQALKNLERAYANFFAKRADFPRFKKKGLSDSFRYPDPKQIKLDQANSRMFLPKLGWLRYRNSREVLGTVKSITVSQSCGKWFASIQTECEIEQPIPQGGAVGIDMGIARFATLSDGTFYAPINSFKRHESALRKAQQSLSRKTKFSNNWKKAKARVQRIHSRIGNARRDYLHKCSTTISQNHAMVCIEDLQVRNMSKSAAGTVDASGKNVRAKSGLNKSILDQGWFEFRRQLEYKLAWNGGWLVAVPPQNTSRTCPACGHVSADNRTSQAKFACVECGFEENADVVGAINVLRAGHARFACEVSGEVMPPAAGPHRSDSGAAQCRA

SEQ ID NO: 41784 - protein, 688 aa, unknown
  TnpB Polypeptide
MTDLNDTSNKYVKAVKNTMENIYNDDMTKLSKIKIEDAIKRVSKIDFHTYNFLSFYFMHLDNNNLDFPYIDDDFIRNIMVTVTKRSDNRGTGCRKDSTKEQIVIFKKFYDNHYKSLLIDNDIPLYDNLTQILLYEAADIVKNIENNIKQHYIQHVRKLVDAYFDVKQKINEIKYDKTLSHKKKNAQMKEIRDTYNPIKNDILNPLPFNKMTPTSKKEFHEWITNIKPKITPNKKSYLKDSMAYDVMAHPQDYLKAMFGINKELSDINKTIDKENNQNKDNQRPLETLFRVLPLRTSIIPRHITIDSFALVMLLVRDRKQDYLKHITEKSDEIWSLMFDLKNPIFKKKGYAFHHMIKTDGVSCSIIFVKLDPKGNPYNLRTMFKKNLQEDSNGIPYIENAEITNQMKNKTLVGIDPNHGNLISCKSKSKETDHKITATDAKENTIVYEHKESKDFRYTRAQRNVETRSKKYNKIREKIKSETKITTAMKASKPTKIKTVEEIETELSQFNSKDANKVAFRSYLKGKIITNRLLYKHYGQPLYRKLKMNVYINTQKSESKMIRNFKHMFGPPERVLIVFGDYDKTETMRGCEPHISKRMKRLFMINGYELYHINEYNTSKLCNKCGHENEQFMYHKKKLLWGLLRCTNEMCKTIHNRDHNSSRNMIKITESIFAGKGRPKEYTRIINKLP

SEQ ID NO: 41785 - protein, 374 aa, unknown
  TnpB Polypeptide
MRRTFKYRLYPTKQQEAVLDRWLWLCRRLYNAALEQRTVAWKGSRVSVSRFAQKRELVDLKAGFPEFREIGAHVLADVVYRVDRSFAHFFRSYQAGGGFPKFQGRDRYNSLTFPDGNSWKLAGSRLMLAKCGPVRMALDRPIAGTIKTVTVKRTRAGRWFVCFSCDGVPAKEYPETVEAVGIDLGLSTLVTTNDGEKLGETRFLKRSLKRLRRGQRHLSRQRRGSNRRHKTVQRLARLHERTADQRRDMHHKVSTALVRRYGLIAHEDISPAFMLANPRTARAASDAGWAQLLRFLQWKAAEAGRTLVAVDPYNTSQACSGCGALVPKKLSERTHRCPHCGLVLERDWNAARNILKRAQAGPSDANRTEGAVVR

SEQ ID NO: 41786 - protein, 333 aa, Escherichia sp.
MKRAYKYRFYPTTEQAELLAQTFGCVRFVYNSILRWRTDAYYERKEKIGYLQANARLTALKKEPEYIWLNDVSCVPLQQSLRHQQAAFANFFAGRAAYPAFKSKRHKQVAEFTASAFKHRDGELYIAKSKSPLDVRWSRELPSAPSTVTGFKTDNPRHTAKYAKRLTLLQRRLSRKQKGSRNRIKARLKVARLHAKIADCRMDNLHKLSRKLINENQVVCVESLKVKNMIRNPKLSKAIADAGWSELVRQLQYKGKWAGRSVVAIDQYLPSSKCCSCCGFTMQKMPLNVRKWHCPECGADHDRDINAARNIKAAGLAVLAHGEPVNPESQHAA

SEQ ID NO: 41787 - protein, 406 aa, Deinococcus sp.
MGVIVLEYKLVAAAEQRRGMDEAIRTAQFVRNACLRYWMDGEKVGKNDIYKHTTKLRSEFEWAKKLNSTAVQAAGERAWASISRFYDNHKKGAATNICGRKPVGYPKFKKNVRSVEYKQSGWKLDASTKRLTLTDGFKIGVMKLLGKWDLMLYRQEDIKRLRIVKRADGYYAQFLVDVERQFDLKPSGKTIGLDVGLKSFYTDSEGHEEPNPRFYRKAEQSLKKLQRQVSRKVKGSNNRKKAVARLGRKHLKVQRQRKDHAVKLARCVVMSNDVVAFEDLKVRNMIRNRKLSKSIQDASWREFRLWMEYFAKIMGKIAIPVNPAYTSQICSGCGQTVKKELKTRTHVCGCGTVLDRDHNAAINILSTGLRMVGHTKTAGKTQETLVEMEEDQPKLASIAEARIPRL

SEQ ID NO: 41788 - protein, 400 aa, Rhizobiales sp.
MLLRKANTYRLYPTPEQAQQMAQIAGSCRFVYNLALEQRRDWYRPGRRFNFASQCREVTMLRAEVDWLKAAPVHTLQQALKDLDRAYQNWFAGRAAAPTPRKKGLHDTFRCPDPVSIKVERTGTSSGRIKLPKLGWVPLRGWYAIPGDICNATVSRRAGQWHVAVQWQREVAEPEPTILPTVGIDRGVTVFAALSDGTMIAPSNHGKKALRALAKAQRSLARKKKGSNNRRKQRARVAKIHLRVANARSDTLHKLTTTIAQNHGTVVLEKLRVCNMVRSARGSVAKPGRKVKQKSGLNRSILDQGWGMFSGFLAWKLAERGGVLAYVPAPNSSRECFACGLVDERNRIGARFLCVGCGHAEHADMNAAQVIKGRWDTALKPVEGTCSKRPVEAGSLRMAA

SEQ ID NO: 41789 - protein, 495 aa, Streptomyces sp.
VHQEVYVIAFAVEPLQLCLDVLAHLAHDFFAACQHLVVEDSAPAPARHSCDHPTPLSYRSRGRVLVMQLRYNYRAYPDAYQRRALAKAFGCARVVWNDCLRDRKEAHAAGLPYVKSAELSRLRITQAKRTEERAWLADVSAVVLQQSLRDLDTAYKNFFDSVKGKRQGRNVGPPRHKSKKDTRQSIRLNTNAFSLQGDGTVYVAKAGNLKVTWSRRLPAAPTSLTVTKDSCGRYFLSFVVDTELGFLPEAETETGIDLGLSAFAVLSDGRKIDSPRFLRRAEKKLKRLHRELSRKQKGSKNRAKARIKVARQHARVADRRRDFHHKASTQIIRDNQAVYVEDLAVSALGRTRLAKSVHDAGWSAFVRMLEYKAALHGRTFAKVGRAFPSSQVCSACGFRDGPKPLHVREWACGQCGTVHDRDHNAARNILLEGRRIVAAGRAEMPNACGAPVRRAHVPAQRGEAGSSRKARTTQAGIPGLQGREHVKSRLTPQRS

SEQ ID NO: 41790 - protein, 354 aa, unknown
  TnpB Polypeptide
MCSYEAIKVRLDPTPRQERLMASHAGAARFAYNAGLAHVKEVLDSGESADWSHYGLLRWWNANKDTLAVNPDTGVVWWSQNSKESYNMGLYGLARGLSNWSKSRKGQRKGRRVGFPRFKSKNTVAKFAYSTGFTAPKASDPYGLKLPRIGRVHCMENVYKRISGARLVRITVSRRAGRWYASLTVEREPAVTTVPKGGAVGVDLGVKNLATLSDGTVVPNPRALGARLRALRKAQQALSRKVMGSARREKAKGRVARLRARVADVRADAINKATTMIARSYNTVCIEDLNVAGMVKNHHLARSLSDAALGEFRRQLEYKTARSGTVLRVVDRWYPSSKTCSNCGVVKAKLSLAE

SEQ ID NO: 41791 - protein, 382 aa, unknown
  TnpB Polypeptide
MIAYKYKLYTSKQTKHLDAMLREAAWVWNHALALQKRYYKMYHGYIDTVRLQQKWVKWYGKSSRLHSQTVQEILQRLDKSYTRFFKHIQLRPPKFKKADWFTSFVFKQGGYSLNGNVLTINKTKKRYKFSLSRPYEGVGRIKGVTVKRSPLGEYYIVLSIEAEGKPIGKTHNGASVGIDFGLKTYMTLSNGKRIQSPRFLKQGMNAKKKADRRMSRCEEGSNHRKLARRAKNRVEERIANQRDNWQWEEAHKLCRKYDIICIEDLQLTGMTKLWGRKMQDLAHGKMVAKLEYLAPRYGVTVKKIDRYFPSSKLCDCGHIHNSLSLHDREWTCPVCGQHHDRDLHAANNILRQGIASLGSPCKTRKPAVATVRGRKHPRIPRL

SEQ ID NO: 41792 - protein, 332 aa, Escherichia sp.
MLRATKVRIYPTTKQAEYLNAQFGAVRFAYNKALHIKKHAYQRHGVNLNPRKDLKPLLSVAKKSRKYAWLKEFDSMALQQAVINLDVAFSNFFNPKLKARFPTFKRKHGKQSSYHCVGIKVLENAIKIPKLAPIEARIHRVMTGKVTSITITRSATGKYYASILCEDGIPTPAKPAYLEEEKITGVDMGLEHYAIRSDRAKIANPRHLINASRNLRRKQKALFRKQKGSANRKKARIRLAAIHERVANARADFQHKLSRTIVDENQAVIVETLKTANMMKNHNLARAIGDAGWHSFITKLEYKAAEKGVHLVKLDQWFASSKTCHCCGYKMP

SEQ ID NO: 41793 - protein, 350 aa, unknown
  TnpB Polypeptide
MLLSKKTSIKVSREYANLIGHMCYAASKLWNVCNYERQHYKETGMEQYPDWYYQKKAHKEDLWYKQLPSQTAQEVCRLLDKAWKSFYALKRSGGIETPRPPRFKQESIPITYMQMGIVHERDTDRVRLSLPKALKKYMEETYQIHENFLYLENKIFRGMDQIKQLRIYPPEKGNCKIIVVYEVPDQEELPQNGHELSIDLGLHNLMTCYDSGNGKTFILGRKYLALERYFHKEIARVQAQWYGQQSGKGVKHPVTSKHIRKLYKRKHDSVTDYLHKVTRYLAEYCREQGITCVIAGDIRNIRREKDLGHRTNQKLHSLPYNRIYIMLEYKLKRYGIRFIKQPANKKSRLN

SEQ ID NO: 41794 - protein, 239 aa, unknown
  TnpB Polypeptide
KTLKKYMEETYQIHENFLYLENKIFRGMDQIKQLRIYPPEKGSCKIIVVYEVPDQEELPQNGHELSIDLGLHNLMTCYDSGNGKTFILGRKYLELERYFHKEIARVQAQWYGQQSGKGVKHPVTSKHIRKLYKRKQDSVTDYLHKITRYLAEYCREQEITCVVTGDIRNIRREKDLGHRTNQKLHSLPYNRIYIMLEYKLKRYGIRFVGRKLYQPVQSAVTGSREKICGTVQPERERII

SEQ ID NO: 41795 - protein, 216 aa, Pseudomonas sp.
MTKRAYKYRFYPTPEQAELLAKTFGCVRLVYNTLLRWRTDAFHKEQQKIGYSAASAYLTALKKQPELAFLNEVSCVPLQQSLRHQQSAFKNFFEGRARYPTFKKKRNHQSAEFTASAFKYRDGELFLAKSSEPLNIRWSRALPSAPSTVTVSRDAAGRYFVSCLCEFEPQALPVTPNMIGIDMGLKDLFVPSEASRLPMLAIPLNMPPGWHWRSAV

SEQ ID NO: 41796 - protein, 414 aa, unknown
  TnpB Polypeptide
MEVRRTVPVKLVVPDERRDDLHESAQQFLHCANRAAVFCWSGDSYTECVTANTTAREALYDELREETDLTANLVQEAIRRAVQATKGCVERWKQGKRVSQPEFTSWSMLYDKRSATFYRNKVSLSTVNGRVECDFELPADSPTPYEQYVLSEDYEFRASTLQYDKATDEFYFHITTWKYDSEESEVSEDTEHQTVLGIDLGVNSLAVASTGTFWQGDDYDHWCREFEKRRGKMQQRGTQAAHNALLCLGKREEAWRKQYIHTVANEIVSEAVEHDCDVIAFEDLTDIRERLPQAKWHHVWALRRLFEYTEYKAPEQGISVKQVEPNHTSQRCSRMDCGFTHEDNRHDEHFCCQKCGYEVNADYNAAKNIGLRYARKRQHKLRSSPTSGSGDAPVDVRINGGTLNGKSHQHIAGD

SEQ ID NO: 41797 - protein, 208 aa, unknown
  TnpB Polypeptide
MISPVGVDLGFKKLMAASNGFEIRGGQFNARIRNYRALEATLRKRGTSSAKRRLKRLSERERRWKRTSLHQSSRALIDSLVDGEYIVLERLHGRNVRTESKRKHLPLERNRSSVMARLHEMITCKCIESGISVVLVPPDYTSQRCPRCGTIDKNNRRSQALFRCIHCGYQHNADYVASINLRELALGGWAAISQPHAAPISERGCKPN

SEQ ID NO: 41798 - protein, 326 aa, Metallosphaera sp.
LKSKGNKVTLSFKYRAYPTPEIERKLINTMEIEAKVYNRLLDYITERRKQGMKVTQLDTQKLLKDMDGKHEVYSKTLQMMNNVLWYNINTLAKLKSNGKKVGKLRHKKTFKMVWYNQSGFKLRGDNLHLSRIGEIKVLLHRPVQGEVKGVIVKRSKANKWYAILQVEQEKQPLERTGRAVGIDLGVEKFVTTSDGDVIENPKLLDRMEKRIKLLQRRLSRKRKGSRNREKARVKLAKAHERLENTLNDYIHKITTWLVKDHDVIVVEKLNTQGMVQDSFGRLRKRILYSKFSTFLHHLSYKAELVGGWSRWTQHIRHRHVPSVGTG

SEQ ID NO: 41799 - protein, 429 aa, unknown
  TnpB Polypeptide
MFVFLCYNELSKFLKLVVKQMVQKSTKQRNEELAKDGKQLRHYGLKLRMEPNEKQKNQIHQTIGNARFTYNFYLSEKIEVYQLTGEPLRYGEFKKAFNQLKDHPYFEWLKISDKYALETAMEQVDDAFDRFFKGQNGFPNFKSKHKSKQSYSTKETNGNIKLNVEKQTVQLPKLGQVKVRLSKQHRKMFQKDGLKGHIKSATISYHSSGQYYVSLKMEEIIHLEEPMDIVKIPANEFIGLDLGLLHFYMDSNGKKVKNPKYLKDSLCKLAKLQRQLKNKIIGSHNYKKLQKKISKLHLTVANQRKDFLHKESRKLVDENQVIVLEDLNVKGMIRNKKLSRSISDVGWGMFKTFITYKASWANKTVILVDRFFPSSKLCNGCHTKNTMLSLSEREWICPSCGMKHDRDQNASRNIKEEGMRIAGVLPVSA

SEQ ID NO: 41800 - protein, 413 aa, unknown
  TnpB Polypeptide
MMRSQKLRLKLTKEQEDKAWWYSKVSRNYWNLLVDIDKRNNKGEFDEILSRNGNKTYHSNFYDREIYHLSQSDYSNLAKIVVSKNLEEDYEAWSWYYQPNQSFIYNSLARELVKIRRQNKGQLKFRSIDKIQPSFNVTCCISSDKKRPSRIYLKDNGKLQIPTIGEVEFGSTRKGFDLSCKKQVANISFDGKYWYLSYTEDIDVQVTDLPDYTDGVGIDLGIKTLATVSDGTVVPNIKTFRRVRILNKRLKRLQRKVSRKYLINKCNKHNKTKNIIKLEREIKLIHRSLRNIRINHIRKFVSELVKKQPQYIAIEDLNVKGMMKNKYLAKDIANCSFYTIREHLIRKATERHIAVRLVDRFYPSSKTCSNCGSYKKDLTLNNRVYHCDNCQEKIDRDFNASINIARTDRYVLA

SEQ ID NO: 41801 - protein, 391 aa, unknown
  TnpB Polypeptide
MLRTYRYRLYPSRSQETNLWRVLDACRGLHNMALAERKHAYRLEGRSVSKADLYELAKRYRQTFPYADQMFSQTAQSVIEQVDLAFQAFFRRVKAGETPGYPRFKGRGWYNSFLFKQFGLGARLDGRRLKLYGIGRVRVRWHRPLEGTVKTVRIQHKAGQWYACFACEIPEPEPLPPNGQAVGIDVGISALITTSDGAKVAHPAFYRAGQRRLRVLQRKLARARRGSRNRQKALRAVQRQQARVAAQRADFLHKLSADLVRQHDKIALEDLRVRNMARNRHLSKSILDSGWATFRQYLTYKAESAGRKVAFVDPAYTSRCCSECGVVFQDFDLSTRWVTCACGMSLDRDHNAALNILRRAGWDTPVPENVAPLFAASRGEQGQASVRSPRL

SEQ ID NO: 41802 - protein, 372 aa, unknown
  TnpB Polypeptide
MVKKAYKYRFYPTDEQAELLAKTFGCVRFVYNQILRVRTDAYYQAQESISYTGASAQLTQLKKSEEAAWLNEVSSVPLQQCLRNQQAAFSNFFAGRAKSPVFKKKTHKQSATFTSAAFRYKDEQITIAKSKQPLNIKWSRGLPSTPSSITISKDFAGRYFVSCLCEFEPTLLPTNNKSIGIDVGITDITITSDGNKSGNPRYTKKYATKLAFAQRKLSKKKLGSKNRLKAKVKVARIHAKISDGRADFLHKKSTQYVNENQVICVETLRIKNMVKNPKLAKHIADASWGELIRQIEYKALWYGRTLVKIDQWFPSSKRCACCGTIADKLPLEVRHWICPECHTELDRDINAAKNIRAEGLSVLAFGENVSLV

SEQ ID NO: 41803 - protein, 386 aa, unknown
  TnpB Polypeptide
MIQTLSTRTVCCKLSLDAAAVTAIRATAEAFNAAATYCASVAWSERITNKNKLHHIVYGPTRVNYGLGAQLACCARDKAAEAVRAARANGHDTCPTFRPDSSIRYDARTYRLMSLDRVSLNTLTGRVMGQIVLGEFQRRHLYDTSWKIGGAELVQRDGTFYLHITQTKLNPTPDEPTGLLGVDLGIVNLAADSEGETYSGATVQRVRERRFQHRQRLQTVNTRRARWRLRQQARREARFQRDVNHCISKKLVAKARTARKALAVEDLTKIRERVTVRRAQRRARHSWAFRQLRSFLSYKAAQAGVLVVAVDPRDTSRTCAVCGHCEKANRVDQAHFRCLLCGHTAAADTNAAVNIASRAVRQTAYCAAPTPVGGASTSPPALAVGI

SEQ ID NO: 41804 - protein, 313 aa, unknown
  TnpB Polypeptide
MNPTRWVKPGEKAHWRIAIHVRVSQSIRPYTSVRVDWTHKSLAFTNMPLPLPRTGNGEVGLDRGCVHTLASSDGIFMDMPKPSKAELKRLKHLQRRMARQDRTNEAKGGRAAKFASKRRQRTLSEFNTLQGRIVRRRNDWIEKTTTRLARENILVALEDLDVKAMTRRPEPRMDENGHYLHNGAKAKAGLDRSILSNCWGRISKRLQDKMGANGGRLVLVPAAYTSQACHKCGHVAKENRDSQAVFHCVECGYEANADVNAAMNILGRALSETGGDTASDVEDPQWRSDEASTPSTPIGSPFGVRLAKGIPRL

SEQ ID NO: 41805 - protein, 393 aa, unknown
  TnpB Polypeptide
MPRYRIHPASAQEAVLREHCAHARYVWNLAVEQHSWWRPGHSSAPGYLEQCRQLTAARAEFAWLRAGSQMVQQQALRDFAQAMANFFGGTHRKPTWRKADRDEGFRIVALKPEHVRRLNRKTGQVWVPKAGWVRFRWSRAVPAARSYRVTRDRAGRWHIAFAAFPPPIPAPSTGAVVGIDRGVVASAALSTGELLRVPRLSLGRQRRLLRLKRRLFRARRGSARRAKVKLALARLRAREADAQKDWTEKTSTDLARRFDLIRIEDLRVAAMTRSARGTRTEPGRNVRAKAGLNREILASGWGLLARRLQDKAPSRVEKISPAFTSQRCSACGHVDGKSRESQAGFQCTACGFACHADVNAARNIAAGHAVTARGRPGLPGRVNREPQLALLLA

SEQ ID NO: 41806 - protein, 580 aa, unknown
  TnpB Polypeptide
MGLRTITLKLHKPGKGKREILDGAIARYNEAFRFLLGKACENPEELRGESGVKNSKYATFVLSKRIGKDTLAELNKFDVQPFKDSLKIDFGMTLAGYLKMRQARPETGFPAPDAPRPVYFCRYDVRRCYSLLYNKDKDRFYAKLYLTNRRNARELTEGAGESGRLVYIGGEGGGGEKAEDRKRRETFIIVPLSFGRWQEKILKEAVGNPECLRTARLYKKKDEYYLAVSIDTGDAERIGTVNYMGVSRGLKNKLNYTIVDKKGRPLTSGAISPGGGTAISEDNGPSISLGDESGALNKMHDRHSIKGRHKAKTRSRIPADLIHAAANRIAEIAAAHKAAVIVQNLTEKGDGLTRIMNAAGADGPLCGPIYRIKDYNRLVSILEYKLPGKGLPKPVKVSSVDIYTTCCECGRNSKSNEVMNNMFLCTTCGAAMDIEKLGSFNLAGKLISYSDSPIKIKVARTRQGVMFSNKILGLKCCCDSPENGPETLRRELAGLIAGMGRDGPSGKARRGAGSGGGSSSGTSGAEGEGAGSGHAGETAGMRESSTAGKAADGRVRSAREAMIRKLASAKDMMSMIEYIT

SEQ ID NO: 41807 - protein, 386 aa, unknown
  TnpB Polypeptide
MISYKYKLYRTDSTKHLHSMLCEASFVWNHALALQKRYYRLYGKFITLGEMKHHFVKRIKRTYLHSQSAQEVLERLDLAYTRFFKHLAKRPPKFKKAADFASFCYKQGGFTLQGNVFHVNSFKKDYKFSLSRPYEGKVKQVRVKHSHLNEWYIYVITDASPKSYAKTHDGASVGIDFGLKTYMTFSNGEKLSHPQFLKKDLRRLRKASQRHSRCLSGSSHKEQTRLALCRLHESISDKRSDFQWKIAHDLCKRYDHIFIEDLNLSGMSRLWGRKMNDLAHANFIRILCEVASKYGCTVHKIDKWFPSSKLCDCGYKNDSLSLNDRTWVCPHCGQIHDRDVHAAEMILRRGIYELTSDSKTIEPLGFEAVTVSQESHTLWGWEYVKK

SEQ ID NO: 41808 - protein, 395 aa, unknown
  TnpB Polypeptide
MLKFKVVRKIIKSIKVRLRPNNKQLTRLFQYAGTSRFAYNWALAREQENYSQGNKFLSDNELRKEFTQLKKHPDYSWLNTISNNVTKQAIKDACGAYKRFFKGQCEYPKFKSRKHSTPAFYQDNLKVKFTNTHVKVEGFSKRRNKQKLNWIKLCEKGRVPSNCKYLNPRFTYDGLYWYVSVSIEMAETTNAPQTEGIGIDLGLKDLAICSNGNTYRNINKTHKVKKLARRKRRLQRSVSRKYKINKKGERYCKTSNIIKREKELLRIIKRLTNVRHNYLHQTTSEIVKRKPSFICIEDLNVSGMVKNRHLAKAVQEQGFYEFRRQIEYKSNWNGIPVVIADRFFPSSKLCSSCGTIKKDLKLSDRIYKCECGNTIDRDYQASINLKTYGERVLNL

SEQ ID NO: 41809 - protein, 389 aa, unknown
  TnpB Polypeptide
MAVRKVAQRIPFTPSKTQAALLEQCFGARRFAYNQQVEAFNAYDKETNLHPAYPSTTDMKAANEWLRDSPIPSSALSNAIMDFRKSQSAYFRKGEYGKNRPRFASKSDAVQSFRNSFPMRRMEGNRYPLSKKLGSVRIRRRDRIRYPIESLSSWTVKRENGVYYLVLLFDVDVQPKPPVSGEVGIDVGVKDFLTLSTGERVNYPDRLRQLEEKVRCEQRKLSRRMKGSSNYRKQKATVAKAYAKLRHYREDFQHQVSRRLIEDNQFIGMETLAVQNMTRRAKKKLDENGKPTRNGQSAKRVMNRSILQNGWSDLVDKLAYKAQWYGRTFVQVDRFYPSSRLCHNCGHKYDELRLSEREWVCESCGASHDRDVNAALNILDEALRLSQAW

SEQ ID NO: 41810 - protein, 172 aa, unknown
  TnpB Polypeptide
MAIFTETLTRQKKRLQRKLSKKCIANKHEKTKNTVKLEKELLKLNHRLTNIRQNYAHQVTTEIIKRKPSFIGLEDLNVSGMMKNRHLARAVQEQSFYTFKEILSYKAKSNNIRIVEVPRFYPSSKTCSVCGTVKSDLKLSDRVFICPECGNKMDRDLNASINLKNYGLLTLK

SEQ ID NO: 41811 - protein, 382 aa, unknown
  TnpB Polypeptide
MILKTFKYRLYPSRVQAHLLEQTIETCRRWYNACLEERKLAWENEQKSVGKFEQLAKVKDYRRENVFAAQLHSHILQVVVRDLDKAFQSFFRRVKNGETPGYPRFKGRNRFDSFGLKEYGNGFKLDGRRLRLTGIGRVRVRWHRPVEGKIKTIRICRQAGKWYACFACEVEEQPLSPTGREIGLDVGIYHLLVTSEGEIIDNPRWYRNEQRKLRVIQRRVARRKLGGANRRKAVLALRSSHEHIANQRKDYLNKVANYLISNYDRIALEDLHIQGMVQNHHLSKSILDASWSYLKQRLIDKAEEAGRLVVLVNPAYTSKTCCSCGSIFADLSLADRWLDCACGLSMDRDVNAAINILHRAGHARWGESTANGLRLPQEAPRL

SEQ ID NO: 41812 - protein, 419 aa, unknown
  TnpB Polypeptide
MKGKPMYLARKVRLYPNKTMLAILDMLCDYRRFCWNQALDVWMSLYQQRQEQLPNDLRLKVKQSLADKSILFTEDEKELLRQYPAPTHYTVRDILTKNKHDWQYQLSSRVLRLAVADLAKAWQYFFDNKENKTLCVGKPTFSQKKNQKQGFKTDRSQIKNGKLVLDKPRQYKGDWSGISFKGYTLPDGNIKYCSVKKVNDKYYASLVLDIPIEPLEKTGRNTAIDANVNHFDYTDGQYAINPKRLDRIYTQIAFYQKRLARKRQVNGKKALSSKSYTVMRAKLQMLYEKATAIQLDLLHKFTTRLYRTYDTIVIEDLDVKSMQMSKKAKNLHRSLFGKFRFQMEYKAIKFNKKLIIADRYYASTQRCSQCGYVKIGDDKIMLHGNIKHRTSHNEYECYECGYKGDRDYNAVLNLLALIK

SEQ ID NO: 41813 - protein, 824 aa, Hokovirus sp.
MNFRKTLQKCKEKLQNNIINQNDSIWMPLDVRVCDNYHFKTDSFNLIVKYDSEHLEHNNTFHFNNYEHLQAKIVNVFFDKVQKSIIKTWMKLYKYTYDTVIQIFSHVYNLCNIYYKINFYDARKILTNFISYNCKNNYKFNYFYKLNKHTIRKFYFYRNNKLCNKEIKILKKQFTKIKFNNIYNSDNYINLFKILKEYRSEYVKYVKFYSANPIHFLNKLHFTDFYNKLQDEYKQLFINLKCPIEEIILQEKNINIPIFKYDDYNPYMKKYTDFIKNRDNINNYEEHNKIYRLYVNYENKLINKQKRLLEIRSKLIYTKLSVIVKLIDNVINTFYKHIYKIIEEKLPQQVNNFVDQVKLYKTNEQFRNKKNAILQKYGYKTTINYKNTINEMRKSSVGKKIIINEKKLLYKDIIKTNHVSIFEPKYTNSLRNNTNVSRHTIDLAVEKACANYKTCLTNLKNRNIDNFNLREIKLRKMIIDIEPNEFSKEGIRKNILGTTTGFYNGILFDFTTINKATILKYNEKLNKYTLHVPYINKNLSEDEKKEKIKILEKKLKMTKKQKKRNKRRRKEKIKKRNNKNKKKETIKNIKKEIKRIKKNNMEKTGEGTISLDPGVRKYLTGYSSEKKKNIEIRENIKIKKNCYKIYETTKKYGLSSGKKKKVKKKEKKEKKEKKVKREIKVISEKEKEKVKRKLENRSKKVYRQMTDFHNKVIKYLTENYASILIGDMSLKGILNKKTSKLKKKTKYLCTRLRIGMLRTKLKKKCEEKNLKYKLVNEAYTSKTCTKCGTINENLKSKETFNCNECKIIIDRDLNGARNIHLASL

SEQ ID NO: 41814 - protein, 725 aa, Hokovirus sp.
MKKKKKKKNDFLDSQINNDNKIEYNLKTKKVIKNITNKNKLLNKLKNVKQKNVINESNIIINESDIIINESDIINESDIINNNTKKIRKKRSTNKKFDNSDISEKKLTKKEIIELEKIEQEKNNINNHIPPWESDDIKIYRNILHFPNSNIPEIINPINCNLFDSYVNKQSNNDFNNFLINNNYNFKELNNKDIEIQKINVERNEHINNIFNKYTKINENLTDAKNQDIKDIQEKYKKYKQNKKIIEGKNKINEIENDYVKKHSDNENIKNKTIKNANKLYDDKIKCVRGSIKSYKYRIIFSEEQKKIVLNWINICDNFYNFCVLRHKEQKVKGYINKNDPKSYNLDKDPHSIKTKVFEDYFNVYLKNNYKKFNHIKFKPLNVKNISDYHKDYQIDDILENKPLPYDMITDVLSEFSRNLKSNYTKVKQDPNFRFNMGPKDHYRTYKTIFVPKKSIGLNGLFFNYLGKIKKYNKNLIKVINENKINHDCKLSYDSLLDKFYLHVPQYVEHKKRTENKEKYVAIDPGEKVFSSFYAENSYGHLGINMREKILSLKNKIERIERILSKNKNKKNKKIRCKKKLRKKKHKLEEKIKNMVKEVHNKISLYLCKNYENIILPSFETSKMLRGKLNKKVKTVLQRQSHYKFKEHIKAKSEEYGSQIYIVTEEYTSQSCGICGKLSKNYKNRIKKCSFCKTKIDRDINGSRNILIKNMFNILCGAPRPQASY

SEQ ID NO: 41815 - protein, 412 aa, unknown
  TnpB Polypeptide
MIVSRYYKYRLYPNASQRADLTKMFGAVRFVANRTIEGVLAKIDDDGYRFDYYSEANSLIVLKASFPFLKDAESTSLQQCLKHVGLAVKRYFMHLGGKPNYVSKKNRQSMTICAVGKNIRIADEKHLRLPKIGNVRFVYHRPLPFKSKITSMCVSEEVDGRFFASIRVEFEIDAKNKPLDSRNAVGLDYKSDGLYISSDGVLASMPHYFRKAQWNLKQKQKRLSRTKPGSKNHEKARIKAARVASRVADRRKDFLDKASHELAERYDVVSVEDIDMRSMKKSLRLGKATSDNGYGAFRRMLEYKLSDRRKAFVKVGRFFASSQTCHVCGYKDSITKNLNIREWDCPICGSHNDRDLNAALNIRDEGLRILRNNTEGRSGIEACGETPNGKEATLCREVPSKQEAPTSNSSRN

SEQ ID NO: 41816 - protein, 412 aa, unknown; identical to SEQ ID NO: 41815
  TnpB Polypeptide

SEQ ID NO: 41817 - protein, 417 aa, unknown
  TnpB Polypeptide
MRLYSNKGQTALIERFFGCVRFVHNEFVDESSKLLLEKKKIKSEFDMNYELAEMKEANPWLADCDSTSLTAESKNVTEAYRRYFSKQGGKPRFSSKKLPIQSYASQCVNDNIRIIDERHIRLPKLGVVSVRHGWSLSSFGRIKSATIRRNSVGQYYVSLLCEVSASCLPKTNLNVGIDIGLKDFAVLSDGRKIDHPNFSDGIEEKFLRWQRAFSRRLLRAKASDKTAGVVFDQANHKNLVEAKRMIAKYDLLIANRRKDFEQKLSTDIIRSYDVIAIEDLKTAKMLKNHHLAKSIADASWSEFGAMLEYKCNLYGKTLERVNPALTSQVCSSCGAPNGRLGLSTFEWLGVREWDCPVCGTHHDRDVNAAKNILALGLKQREGAATALGNIAYASEASSNDALSDGRSHKPTDSSVGS

SEQ ID NO: 41818 - protein, 417 aa, unknown; identical to SEQ ID NO: 41817
  TnpB Polypeptide

SEQ ID NO: 41819 - protein, 439 aa, unknown
  TnpB Polypeptide
MEIDDAKRLAKNKAIADRGRETRIRRHAMECKTFELKIRANKLNLRQKEELSMLFVDAKRYYNDIIAFMKSNDVSDYDWKNTIVSVKTKDGSFEKKEIKYLSASERQAVIAQIKSSLKALATSKRHGAKVGKLRFLSEVNQITLRQPSINYAVDFDRKRVRVQGVHGDIRVGGLSQLVGIDSMEMAFAKLVRTPLGYFLKVTVYFPKAKLKSETNGKCIGIDFGCATSFTTSEGDKIDVSVRESDRLKRLSRKANRISKSARSEHKKHLYFLIAREYAKMDNRKKDIACKLAHRFAQYDQCVIQDEMLQAWHKGGHGKAVQHSCMGSIKARLMANPNIVVLDRSCPTTKLCRECGEIHHEMTQRDRVFKCDCGVSEDRDVHAAENMLWFADHKIGVIKIGVERTKFKRGDLEPLLSDAFASQKQVPETNHEASCSSDKR

SEQ ID NO: 41820 - protein, 439 aa, unknown; identical to SEQ ID NO: 41819
  TnpB Polypeptide

SEQ ID NO: 41821 - protein, 412 aa, unknown
  TnpB Polypeptide
MKISRYYKYRLYPNASQRVALAKMFGNIRFVVNRSLEAVLAKIDDDGYHFNYNEEANDLTDLKADFPFLKDAESTSLQQSLKHVGLAVKRYFMHLGEKPNYVSKKHRQSMTICVIKNNIRIVDDRHIRLPKLENVRFVYHRPLPSGSRVTSVCVSKEVDGRFFVSMHVEFNRDISNRPLNFDNAVGLDYKSDGLYVSSDGVLASMPHYFRKAQWNLKQKQKRLSRTRLGSKNHEKARVKAARVASRVADCRKDFLNKASHELVERYDIVSVEDIDMRSMKRSLKLRKATSDNGYGAFRKMLEYKLNDRGKAFVKVGRFFASSQICHACGHKDPITKDLNVREWDCLVCGNHNDRDLNAALNIRDEGLRILRSNTEGHSEIEACGETLASKEVILCCEVPSKQEAPTSNSIRN

SEQ ID NO: 41822 - protein, 412 aa, unknown; identical to SEQ ID NO: 41821
  TnpB Polypeptide

SEQ ID NO: 41823 - protein, 417 aa, unknown
  TnpB Polypeptide
MRLYPNKGQAALIERFFGCARFVHNRFVDENAKLLSAGKRIESEFDMDYELVATKEENPWLSECDSTSLTAEAKNVTEAYRKYLSKQGGKPRFSSKKSSAQSYASQCVNGSIRIVDERHIRLPKLGVVSVRHGWSSDSFGRIKSASIRRNSAGQYYVSLLCEVDGCCLPKTGVDVGIDVGLKDFAVLSDGRKIDHPDFSDGIEEKLLRWQRAFSRRLLGAKASDKAAGVVFDQANHKNLVEAKRMIAKYDLLIANRRKDFEQKLSTEIVHSYDVIAIENLKTTKMLKNHRLARSIADASWSEFGMMLKYKCDLYGKTLERVNPVLTSQVCSSCGASNSRLGLSTFEWLGVREWDCPVCGVHHDRDVNAAKNILALGLKQRKGAATAPGNTAYASGASPSDALSDGRSHKPTDSSVGS

SEQ ID NO: 41824 - protein, 417 aa, unknown; identical to SEQ ID NO: 41823
  TnpB Polypeptide

SEQ ID NO: 41825 - protein, 184 aa, Nostoc sp.
MWQFLDADLPLFRVRLVRLTKASKHHSKKLKGSSNRERAFENLVRAHEDIANRRSDWFWKLAHDLTDRFDVLCFETLNLNGMKRLWGRKISDLALRDFLDILEWQALKKAKQVVYIDQWYPSSKTCSCCGHVLETLDLSVREWRCPSCQSVNGRDDNASKNIQTVGASMVRLGDVRRSKTAVAV

SEQ ID NO: 41826 - protein, 408 aa, Rhizobiales sp.
LTLLAHKIALDPNNKQRTYFAKAAGTARFAYNWALAEWQKQYDAWKADNSLDRPSQMALRRQLNQIKRDEYPWMAEVTKNAPQMAIIQLGDAFKNFWAKRARYPTFRRKGVDDRFTLTNDQFILNGSRIRIPNLGWVRMREPLRFEGKIQSATISRKADRWFISFNVKLDNLSHLPKAENQGETGVDVGTSTHATLSTGEKVEGPKPHKKKLNRLRKLSRSLSRKVKGSKNSKKAKVKLAKLHMRIANIRNDATHKLTTDVTRRFHTIGMETLNVKGMMKNRRRARATADVALYETRRQMTYKADMRGGIVVAADQWFASSKLCHCCGWKYERLTLKEREWTCEGCGAFHDRDENAAINLKDYALKHIAVSSTVTACGGDGSGRRRKTAVKPSPAKQEINGNPENVYT

SEQ ID NO: 41827 - protein, 583 aa, Rhizobiales sp.
LSTSIDRSVRTIVLPVPNKEWSSVASALTREAKNLYNITTFLIRQVVSAYEFDAEKKISRMKPELHANQIDTIDRFNAVIDVVNAKKQSKSEKAKVIPRLEQDMARAPLYTVLDLTVIDTMVRSHIDSDGSSVYRRLPAASAQQVVLSVVDVWKAALAAMVAYAKNPDGFTGRPGFPDFLAKDAHYPLELPYAAITTGFPMPRTLRPLGVVSVEAQKAFYAFDIKAAIATSCEKRGWSDYRPRHVRIVGANKSLKLEVVIGFNQEFPEGSFLHGLFETHAEVLRTHDTIEKREAFLQEHLAASNGLKIAGVDPGMNNVCAVAFSTGNRGMVHDATRLLAKMQKFNAKLDEMLAALTTPRIRELQQKKSSLAEIGGKLSKAERIELRSAQKAIFADPEYRQIVRDKANVKMDFEHKISRDIVETCHRHGIDVIVIGRNKRLKEQSLGAETNRSFHNIAHHRIVSLIRYKAEAYGIAVVTTEESYTSQSSFVDNDPLPTYQEGKKNEVIFSGTRSTKNRNWFVRRNDVVKSERLRKVHADINGAFNIIRKLFKSFRFSGRLTFKYNVRWVSPRIGATGPMSCRMA

SEQ ID NO: 41828 - protein, 370 aa, Rhizobiales sp.
MLLTYRYKLQPTKKQYVELDRICEQQRILYNAALQERVDAWRKAKISITKLNQFKSLTKIRSFDESFAAVPVALSRWSISRVDDAFKGFFSRAKTGKRAGFPRFKPISRWRSFGFAEWDGIRLKNNKLLFKPFTDGVKLKMHRSMPERCSLKSCTITRSSRHWLVAIAIDVPVDTVHTAADKIVGLDAGTEHLLTTSDGRHIENIRPRSQYSKLLQRAQRALARCKRGSRRRVKVRERLIRIQSSVANTRNTYLHQVSAHLTRQFGFIAVEKLQVKNMTRSAKGTAEDPGTNVRQKAGLNSSSCGERVRKKLAQRMHVCSCGTVLQRDHNAALNILYRALDEHGRARPPGDANVGHWLMRCLGNMVVEAA

SEQ ID NO: 41829 - protein, 631 aa, Rhizobiales sp.
MSGHLRLFRVYSSTTPYLEIFFAKLALSPAVSSSSRVAWGYHYRHKALDLVNNVTDNVDIIDVCGVRFDEEAEKDKGGEIPPIFRCDKLPTFMNPGKERVLRELLRSWRRAAISLAAIEWGCFYRDGSFDPLYDPATSHRRAGADVRRGILRQLAGRYELVVEENEKRRLPAMISGLVDPLDELKSTLGAAQVQMVRNQVMGTLDSFMSNRQNDFRSTVFQSTVDESLRHQLLYINKAKAWFDLKRELKIDDQPIPSAARQLARKIMSHLLQQHRRPRMHRIGMIVDQRVALLATSSAASGFDLWLRLSVSGLKGSREAAGQEKADSYLHIPLKSHGYFNAREGARKLSFQIIEDRNDGRISVGVITDIAETLQASRESYVPKVEALSLDFGLSTMFATNHGDLLGLGFLTKLKALDATITGIARHIQRVGGKPRNSKRYCQQVTRVRGFVETEINRVINQLIKTHGPAKLLLERLNFRSPELSRRMNRIVQNCGRSVLKAKLASIEQQYGITSSECVSAYTSQTCSCCGYTDKKNRKDQARFECLWCGKKLHADVNAARNVGSERFRSFGHLRPGFRSTVLNVLVSQHVERWPDLRLGRPRKLGAPSDPRVANPYFKDKPLQGRSLPLAA

SEQ ID NO: 41830 - protein, 442 aa, unknown
  TnpB Polypeptide
VSEVKRTNTFILEDCPALRELADSCARLYNELNFERRQAYIHYRRFEWYPKYLYEKYAPLIGSAIAQQIINKNHEAWKSFLALKKLEAKGKLPEHIKKVSMPRYWKRNGKRELRIIIRKDCYRIDDEYIYLPKGLRLRYKGKLKWKGKQGKLEIVYDDVDEVWRGFMAVEVEKPPTRGGKKPLYIDLGVINLATVWFESLKQPIAFSGRTVLSDWWYWTGKIAEEQSMLARVNRAKTSKKLRKLYRIRQRRFSHAVNAMIKTIVEFAVKLGISKIILGRLGGIRSKSRNNSKANAMINNFWSFSYIIRRFKENAEEYGMEVDEKSEYKTSSKCPLCRSEDIMARGRLFKCLCCGLEANRDAVGVLNIGHLHGGGVNGVVAHPLLLRWNGMRWEPRRAMNNQPMNALEARISRLQPRRVSIGLGYIHGVYKRRIDRWRFLVCG

SEQ ID NO: 41831 - protein, 408 aa, Nostoc sp.
LSSIQKAFKVILIPTHNQEILINKTIGCVRYVYNRFLALKKELYASEGKTLNYNACSQHLTILKKEIEWLKEVDKFALQNSIKNLETAYKNFFADLKKVKGKKGVGFPKFKKKHGCKQSYKTNLTNGNIQIIENRLKLPKLGWVRFHKSQDITGKLVNVTITRTSRGKYIASILCETEIEKYPQVTDNIGLDLGLKSYLTTSNGETVENPKYYRTQKRKLRKAHKKLSRSVKGSSNRVKAKIKLARTYERITNLRDDFLHKLSTRLIKENSIICIEDLRVSNMVKNHKLALSISDASWSKFVTMLEYKALWHDRIVQKVGTFYPSSQTCNCCVFINPLVKDLKLREWTCPICNNYNLRDANASLNILSEGLRILTAAVGAPDAIYACGELVSPGFFQAEIVETGITRL

SEQ ID NO: 41832 - protein, 415 aa, unknown
  TnpB Polypeptide
MQIKRAYRYRFYPTEGQARELARTFGSARFVYNHFLRLRTDAWFNEQKRLGYNDTSSLLTQLKRDPEFAWLSEVSSVPIQQSLRHLQTAFGNFFSRRAKYPTFHSRRDPQSITYVATGFSFDGCNKLTLAKMNEPLNIRWSRTIPKKAKATSVTVSRDSAGRYFISVFCDDEVAELEPSGKQIGIDMGLNHFLITSDGEKVAAPNLYRKFEKKLARLQRRQSRKMEAAKIKAGIPKGKAIPKGVRIPKSKNWLKDQQRINRVHAKIADARRDFQHKLSTRLIRENQTISVETLAVKNMSRSAKGTEDKPGRKVKQKSGLNKSILDASWSEFIRQLEYKAAWYGREIIGIDRWYPSSKRCSSCGFILKDMSLKTRSWLCPECGSHHDRDINAARNILAAGLAVSALGEQVSPGVCS

SEQ ID NO: 41833 - protein, 304 aa, Streptomyces sp.
MKLVVQVKLLPTPEQVSALEATLRACNRAATYASGVAFAKGLKDRNGLQKEVYADLKATFGLSAQPAVRVVKKVVDAYATLQSGLRAGRLGPATSKRYRRAVGTPVAFRLEAAQPFDDRCLSWQYDARTVSIWTVDGRMKGLRFTCSPEQLKTIAEHRKGESDLAQRGGTWFLVATCDIPEPEVYEPVDWIGVDRGIVNLATTSDGANYQGRSLSRYRHWQARKRTELQKRNTRSATRRLARRAQKEKRHATHVNHKISKEIVSVAQRTARGIAVEELGGIRERVRLRRDQRGTLSSWPFHQLG

SEQ ID NO: 41834 - protein, 442 aa, unknown
  TnpB Polypeptide
MKLSMTYRVRTKGFNHIFDETVHLYRQAVSFFMDVCLKEWKHISVIQGQKIRSSFVESLTVKTKQNPAVSYDFSTKFYKFPSYLRRAAIAEALGKVSSYRSNLANWEAAEPEKRGEKPSLPQVGYVYPAMYRSGMFVRTGMYQAALKVFIRNTWDWVLVDLRKSDVDYIEHHCANYKECVPTLQKRGKKWYLDFVFQTAVKLPDVSIKDTRILAVDLGLNSACTCSIMTPEGTVLGREFLSLPREYDSLEHAISHIKHAQRLCARRTPGLWKQAKGINDDIAVKTAQFIVDTAVKYDVDCIVMEHLDLAGKKRGSKKQRLHLWRAKYIQAMVTDKAHGNMIRVARVCAWNTSRLAFDGTGRVQRGKEAKLPNYSLCRFPTGKQYNCDLNASYNIGSRYYIRELLKTLPVTAGQAVTANVPELAHRSKCTLSSLIKLNAALAA

SEQ ID NO: 41835 - protein, 331 aa, Kyrpidia sp.
MLLEVDEHTAAILDGQSRIANWLYNHLLEEANTLREKFRSTQDPEAAKVLYTERGLRDRVPALKKERPFLRTVYSSVLKNAALRLSGAIRKYQKARREKGASSVGWPKFRSWKREWFSLQYDEPWKGYRLEGRKLEVSLGKVLDEGTGKEKQAQVTARLAEPLPDWFEAGMVRQLRIVKEGKLFYAVFTVRRPVPARRSVGRVIAIDPNHKNLGYGVGTDGVATEIQNPWFLKILDRRIDELKSLRDRCKRKSVRVVREDGTEAWLPSRRWRKLNERLDELWRVRREQTKTYLRTVANRLYREYDGVFVGDYTPQGGGISRGMRRAMNNRR

SEQ ID NO: 41836 - protein, 484 aa, Kyrpidia sp.
MGNQGGQILVISFNGTIKPWQVKKMPVLRNIISTKQRIGRFITGSPEMIRRTEEIYRAVLGFYLDVIHDNLDKLPGWDRNSGTRALERLTVRTEPRMNRKTGKPFGGNPDPPYPIDAVWPKFPAYLRRVIIAKAIGMAKSWHSNYQRWLRKKERIQNRNESRVAEGKKPIPFDEHPPKYPAAGHVGITFYKGDFKNLSLETDTIQLKVWDGSDWRFITVEVEPTRHSRKLHLDDSWEMTVPTVYEREGIFHLVTAFEKKSNVMKFTDYYRSKRPKVLAVDLNLGRKNRAVCALVGKDGTVHKVRHIGLTACNTTDVHHLLGLIARNVSGLGIVPKGHRPCKKLWRKVHAANDNYAHHVSKRLVDLAMEWDARVIVFENLKHFRPDRNKHGSARMRQRIGYWLHRRVMKYTTYKAKARGILVALISPKDTSTRCSLCGSLETSRAGNILACRNCGTVHNSHVNAAINIGMAWFIREEKRLQQKTA

SEQ ID NO: 41837 - protein, 351 aa, Kyrpidia sp.
MPVLKNIISTKQRIGRFITGTPEMIRRTEEIYRAVLGFYLDVIHDNLDKLPGWDRNSGTRELEKLTVRTESRMNRKTGSDWRFITVEVEPTRHSRKLHLDDSWEMTVPTVYEREGIFHLVTAFEKKSNVMKFTDYYRSKNPKVLAVDLNLGRKNRAVCALVGKDGTVHKVRHIGLTACNTTDVHHLLGLIARNVSGLGIVSKGHRPCKKLWRKVHAANDNYAHHLSKRLVDLAVEWGARVIVFENLKHFRPDRNKHGSARMRQRVGYWLHRRVMKYTAYKAKARGVLVALVSPKDTSTRCSLCGSLDTLRAGNILACRNCGPVHNSHVNAAINIGMAWFIREEKRLRQKTA

SEQ ID NO: 41838 - protein, 356 aa, Kyrpidia sp.
MIIVHRFHIEPTKEQEQKLFQTLELCRQLYNTALKQREICYRQRGKSPSCTAQKNELPAFKKEFPEYQQVNAQVLQDCLQRLDHAFQRFFAGLAGYPHYKDRNHYRSFTYPQADKQDHFKKIGHIYLPKIGHVKMKAHFEFDPAKVSRINVKYHGGKWYVNLTSEIQESEGVDVVNKVGIDVGLFTFAALSDGTKIDNPKYFRQSEKKLARLQRRLSRKKKGSNNRGKAKAKVTRLHDKIANQRKDFLHKISHGIVQKYDWIAVEDLSVKNMMKNHHFSKSIADAGWGKFISYIEYKAKKFGKVLVKVPPAGTSQTCVCGHPVPKDLGVRIHQCPHCGLTADRDVVSAMVILQRAN

SEQ ID NO: 41839 - protein, 399 aa, Kyrpidia sp.
MKILKSFRFRLEPTTEQSQCVTRYRGCARLVWNKALALQKGRLEAGYPLLSYEELALLLTLWRHSEEYGFLTNAPVHPLQWTLKFLDRAIRAAFDKSNPARFPTFKKKNRDEAGLRFPDPKQIKLDLSTKDADGRCVLPKVFLPKIGWVKFRKSQTIDGTIRNATVTWQAGHWYISFQTEIDVPEPVHPSESAVGIDRGIVHFAALSDGTFVDAPGWFRRHETKLAWEMRKLSRKKRFSRNWQKQKARIQRLHAHIANARRDFLHKTSTAISKTHAMVFVEDLRIQNMSRSAKGTRENPGKNVRAKSGLNKAILDQGWFMFQTFLDYKLHWFGGWLGTVPASYTSQTCPVPECGHVSQANRPRQSTFRCERCGYEGNADTVGAINILRAGLARIACSPV

SEQ ID NO: 41840 - protein, 507 aa, Kyrpidia sp.
MRWAFGRLQEGMSREEIKKRGQVLFGLNSRYVDDARLKAQAVWDSQKELLGIEIGETETKLRRARKKLGQAMRKLEKVRVKGDRVATDKLHLTVQGRQARVQKLASKLAELQAHQEAGTIPKVVFGGRGLWRKVCRGKVSKETWRAARRGRLYARGDETKGGNPNIRVRVRGEGFGLAVALSHLAEAKGTDALGRPRTGKAPRVEGKLWLPEKHRGFVRQGVAMGLPYAAEVVRGLDGRYRVKLTWSLAGMVKADLGNGCLAVDINPDGVALCHVGADGGPRPWPDHLVWMPDGLGKYPGEWQATVHPNGFAYVRIPELAYTRGNRREYLIGVLAKVVVDAAKLLGKPLVMEDLAFGKDRLDTNRRFNRMASQFPYAKVSEALLRRAWKERVAIKAVNPRHTSTIGHWKYERRYGVVIHCSAALTIGRRALGCREKITRELRERIHKLKAQKGRSLPKEGQGMTRSVKALLGRLETKMVVHNSSATWQQERPLGIWLDFKRLALALR

SEQ ID NO: 41841 - protein, 502 aa, Kyrpidia sp.
MLLEVDEHTAAILDGQSRIANWLYNRLLEEANELRRRFRQTQDPEAAKVLYTERGLRDRVPALKQEYPFLRTVYSSVLKNAALRLSGAIRKYQKARREKGASSVGWPKFRSWKREWFSLQYDEPWKGYRLEGRKLEVSLGKVLDEGTGKEKQAQVTARLAEPLPDWFEAGMVRQLRIVKEGKLFYAVFTVRRPVPARRSVGRVIAIDPNHKNLGYGVGTDGVATEIQNPWFLKILDRRIDEVKSLRDRCKRKSVRVVREDGTEAWLPSRRWRKLNERLDELWRVRREQTKAYLRTVANRLYREYDGVFVGDYTPQGGGISRGMRRAMNNQSLIGRFKETLAWVAARSGKVYGEWDEDGSTRTCHVCDYEVPGGIPPEIREWTCPHPGREFVDQWTGTSAEKLGGAWLGPSGRQNSRYDQAGLAVRRSRRQRDAGDRRRAGGGSRRRPPRNQMRDMTVPNPNPAQSEICVGLGERCHDPGVLRALPAPNRGAASGFMEEKGKK

SEQ ID NO: 41842 - protein, 655 aa, Kyrpidia sp.
MARGTRIFYASDIHGSERCFLKFLGAAKFYGARVLILGGDITGKVVVPLIHRGTGYEANFLGRMHRVESAEEIEALEKAIRFNGFYPVRLEPDEYEAISADELRQNELFRELVLASLRRWMELAEERLKGLGVRCFVNPGNDDESFVDEVLGESDYVENMDGGVARIDEEHEMVVVGYSNQTPFDSPREMPEEEAVHGDTQLFCFHCWQCFFRYYPQVRRNAKETGVIGLARPARKKKSSSDAPMQTLTAKAKVVDLSDQDALLLGLLGFVATKLWNVANHHRRSVWDETGKIPDFAQQCRELKANRWYKLLPSQSSQEILSELDDSYRSWFSLRKNADQKANPPGFRKKETLSTVTFKQKAFEMLPGHRIRLRLPKTYARREMVLEYRLPPDTALGKVQQVKLSLDPTSGDWYVHIAHRVPIEYCETGRIMSLDLGIANAVAGLVTDGFSFLVPGGELLAIDRYFQKEKAKCTKSTSNKCTRLNTKWGRQRTHYLHALTKWLVNLAEDHGVSTILVGELNGIRQDKDWGDAGNQKFHAWPFSKITNLLTYKAALAGIRVIQVSEKNTSTICPHCEKRAKTARVQRGLFLHCGQSFNADLVGAYNIVQRYLRETDQVLPDPSGVVGALARPAVNRFVWRKTTPKGREQGTFKQAA

SEQ ID NO: 41843 - protein, 367 aa, Bacillus sp.
LKVDSICRTEQTLTNVNETLILAKRVRLRPTKEQETQLWKSVGTARWAYNWALSKQEESYKNGGKFISDGLLRKELTVLKQNDEFSWLYEVSNNITKQAIKDLCNAYEKFFKGLADKPRFKSKRKSKPSFYNDNVKLIVKGKKVLIEKVGWVVVSECIPDKKYYNPRISNDGKYWYISVGVEKSKPIVELTNVSLGIDVGIKDLAVCSDGTKKKNINKTITVKKAEKRLRRLQRQISRKYEMKKEGTRFVKTINILKIEKKIQLLHRRLTNIRLNHLHQSTSEIVKTKPYRVVMETINIKGMMKNKHLSKAIAKQCIFKFKRQIQYKCEKYGIEFVEANKWYPSSKTCSSCGNKKNDLKLSDRLYKC

SEQ ID NO: 41844 - protein, 379 aa, Sporosarcina sp.
MLRHRAYQFRLYPNKKQEILIVKTIGCSRFVFNHFLNLWNKSYTETGKGLSYQACSAMLPKMKKEEETIWLQEVDNIALQSSLKNLADAFSRFFKKQNKKPQFKSKVNPVQSYTTKNVNNNIELKGKNIQLPKLGLVKFAKSREPKGRILNATIRKYASGKYFVSILCEEEIYELSKTNAAIGIDLGITDFAILSDERRIDNNRFTSKMEKKLKRERQKLSKRALVAKQNGIKLADAKNYQKQKRKVAKLHEKVMNQRTDFLNKLSTEIIKNHDVICIEDLNTKGMLRNKKLAKSISDVSWSNFITKLVYKANWYGRKIIKVDRWFPSSQICSECGVQDGKKPLNIRKWTCSGCETEHDRDINASRNILNEGLRIQIPV

SEQ ID NO: 41845 - protein, 381 aa, Sporosarcina sp.
MLRHKAYQFRLYPNKEQEILIAKTIGCSRFVFNHFLDLWNRSYTETGKGLSYHACSAMLPQMKIAEATCWLKEVDSIALQSSLKNLADAFSRFFKKQNNKPQFKSKMNPVQSYITKNVNNNIELKGKSIQLPKLGLVKFAKSQEPKGRILNATIRKYASGKYFVSILCEEEIYELSKTNTAIGIDLGITDFAILSDGRKIDNNRFTAKMEKKLKREQRKLSRRAFVAKQNGVKLSDAKNYQKQKRKTAKLHEKVTNQRADFLNKLSTEIIKNHDVICIEDLNIKGMLRNKKLGKSISDVSWSSFVTKLVYKADWYGRKIIKVDRWFPSSQICSECGVQDGKKPLNIRQWICSTCGTEHDRDINASRNILNEGLKTLIQVWG

SEQ ID NO: 41846 - protein, 376 aa, unknown
  TnpB Polypeptide
MATTASSSLQKTFKFKLYQSDKNERIHTLIELSAEIYNHCIALHKRYYRFYKKHLTKYTLQKHITKIKARYKQHWFNLPSQSIQQITERIDNAYQRFYDYIKQRKQGLKPATRVSPPNFKKRIKYKSFTLKQVACKIEDGKITINKHQYRYFDSRIIEGKINTITVKRDSLGDIYLSVTTTLATINPRLPMTGNSAGFDFGLKQFLTSSDELIPTSDLAMIRTFLTNAAKLRKAQQKLSRKQKGSNHRKQAKLGVARLHKKIANQREFYHHRIANLLLSTYDIAYFETLNIKAMQKVWGKKISDYGFSEFLKILEAKAAGNDKHIGFIDKWYPSSKTCSACGEINQKLTLRNIHRVGVSTLSLGNVRPHLVEAIPA

SEQ ID NO: 41847 - protein, 421 aa, unknown
  TnpB Polypeptide
MLKVAHGTAWFPEEALNRILTLMKIQSSATRSAYQFMRRTGHVGNEVKKAVKGKYMADLNQRYISDACGVASQVRKVPSVIFGGKQTWRDFQQGKISKDEWQQRRNSLLYSRGDKTKRGNAHIRVEGDRIVVNDPSERGKWLEGKFWMPKKFGFNPVCYSVRLKSHKGKISVTISSEFPTPSIASKSISLGAIGIDCNPDGLAVVETNPQGQLAHHHYEAEQRIRFAQKEKRSNDIRQLAVRVVAIAAAAEKPMVLEQLQFRGGDQKGKKFRRMKHNFLHRQMLDAIKSRAVKMGVGVIEVDPAFTSVLGKLKYQDMYSLNVHTAAALVIARRGMGYLERQCFTDKLRGLGGSRVNLEGRIRGHTLKPKAWSWLRDEFLKPKSSRPHRAAAGTGDTGIGSNLGEIPKDESSTITGRRGHLS

SEQ ID NO: 41848 - protein, 370 aa, unknown
  TnpB Polypeptide
MSDHRLAYVYRLYPTKAQETALTQTLETCCQVYNSLLNWRKHDYEVLGKSPSKVEQQAAFPRWKKEHPELTDVFSQVLQNVAVRVDLAFQAFFRRVKDGETPGFPRVKGHGQYDSITYPQAGFGFEQGRLRLSKIGDVAIRLHRPIDGDIKTCTVRRIRHKWYVCLSCVVGAELLPPSDEEEKTYIGVDVGLKTFAALSNGEFIENPRFFCKDEKALAKAQRKLSKQVRGSRKRRKAKKVVSRVHERIRNRRHDFVHQTARRMVNRFGVIAVERLNVKGMVKNHCLAKSIADASWSMFRAVLTGKAERANRLVVAVPAAYTSMTCSGCGNIARKTLAQRQHDCPMCGLSLDRDTNAALNILSVGQYRDAA

SEQ ID NO: 41849 - protein, 379 aa, Streptosporangium sp.
MRGVAQIVKRAFKFRFYPTPEQADELARTFGCVRLVYNKALQERTRAYRSEGRKVSYVESSAALTEWKRTEELDFLAEVSSVPLQQALRHLQTAFANFFAQRAGYPAFKSRKKSRLSAEYTRSAFRYHDGRLTLAKMDAPLNIVWSRPLPEGADPSTVTVSKDAAGRWSVSILCEDTVRPLDPTSDMVGVDAGITALVTLSRPIPGVTDDDGKVTNPRHERADRRRLARAQRIPARKEKGSANRGRARVKVARVHARITDRRRDVLHKLTTAIVRENQVVVIEDLTVRNLVKNHSLARAISDASWRQMRTMLEYKAQWYGRELLVVDRWFPSSKLCSACGALQRFMPLNVRDWVCACGVVHDRDVNAAKNILAAGLAER

SEQ ID NO: 41850 - protein, 389 aa, Streptosporangium sp.
MIVCSIVKLVVQVKLLPTLEQAAALEVTLRECNQAADLVARTAFTTGITREYDLRKQTYATLKERGLGAQAAQHVIKKVADAYTTLKANLRAGNLGPPTSPRRIRAENKPIAFRPHAAQPYDDRCLSWQLQAGTVSIWTTAGRLRGVAFICSDQQRAMLSAHRRGESDLVLRDGRWFLIATCDLPDVPLAEPDGFLGVDLGIANIATTSEGTRHTGRALNAVRHRNRELRRRLQAKKTKSAKRLLKRRRRKEARFAADTNHVIAKRIVTEAERTGRGIALEDLHGIRERVRLRKPQRVTLHSWSFHQLGSFITYKAARAGVPVVYVDAAYTSQGCSACGHISKKNRPDQAAFRCMSCGFAEHADVNAARNIAARGEAGWAVSHAADDAA

SEQ ID NO: 41851 - protein, 439 aa, Geitlerinema sp.
MLTMNYTYRIYPDAAQQTELLGWLETCRGVYNYALRELKDWMASRKCPVDRCSLEKEYIIPSDEPFPSYHRQQNNLPKAKKRFPHLGKVHSQVLQTTIRRLHDTWDAFRKRGYGFPRFKKFGQFKSFVFPQFKSNPISGHTIKLPKIGNVPINLHRPIPDGFEVKQVRVVSKVRGTQWYVVVTITSDVSLPDVPPHGRAIGIDLGLKRFLTVSDGSYQASPKFFKSMQRKLRLLQRRAARKQKGSKNWEKAQIEVARMHHRIANRRKDFHLKTAHQLCDQAQTLFAEDLNIKGLTRGMLRKDCVDAAFGQFLSLTEWVCWKRGVYFAKVDPNGTSQTCPNCLATVRKGLEVREHYCPECGYRTHRDHAAAEMVLHRGLENVVAQGLWGTETACQVERADAELGSASFESSVGLSGVYDLDKWRGAGIPNREVGKPALYP

SEQ ID NO: 41852 - protein, 283 aa, Natrinema sp.
VLSLSKLADIPIRLHREIPDDAILKQVTLKKEPTGEWFATFGVEVDREPPKKPDRPKNTVGIDVGILKYAHDTDGHAVESIDLSDERDRLECEQRKLSRKERGSNNYEKQRRRVAECHADLKRKRRDFLHKLSNYYAREYDLVAVEDLDAKGLVELGGNSRNRAGAAWGTFLRMLEYKCDREGTHFVAVDPAGTTKECAACGVSTDKPLWVREHSCPSCGFTTDRDWNAAWNILSRGIKQVGAGRSESTPVETALPTGTYSVPAKRVLEAGIPTLKREPSGER

SEQ ID NO: 41853 - protein, 410 aa, Natrinema sp.
MVATTTKTLEATLAPPTANKEQRLERTVATYRRALLDAFESGAETQTAVNDIVTPYTLTSYAKDALKSYVPQLRNTYNTSELEGNHPVRFTNRGFRIDHSDEREHEFCWRVPQAGRGNAFWIPLRINPEQESLWFDLLDESVTVGEFRLQQHRTNWMLHVTVEYEVAEPEISDEPTRVGFDIGESKLLTGCACQNDTPTQPFIYDGGRSRALRKEMHTTLKRLQERDAEQWRVDERFDHYQNALTDIVEKASREAVEYAQQFEDPVIVLEDLSYIRENLDYGKYMNRRLHSWAFARLTERIEDKALEAGIPIEFVNPRYTSQTCHACGHIGRRGSQAEFTCTNPECWVSEYQADINAAANIAGRVDPWGESVSWKSDRDDSPRDGSTLDSATARREPSAKLAQTTLAEWG

SEQ ID NO: 41854 - protein, 150 aa, Natrinema sp.
VNTLAVTSTGTFWTGDEFDHWRREYEKRRGSLQQCGTRWAHENIQSVGRKEEGRFKLMLHRISNELIAEARENGCTVIAFEDLTDIRDRSGASWGHKWAFDCLYEYVEYKAEEHGITVEQVDPENTSRRCSHCGFTHPDNRNGEEFECLK

SEQ ID NO: 41855 - protein, 251 aa, Natrinema sp.
  misc_feature (216)..(216): Xaa can be any naturally occurring amino acid
MEVRRTVRVALDVDSDDAVLLEDTVDTFLWSAQYVVDHAFKGDYVTTSKTTLDDETYDDVREKTDGFNGGLVQAARNKAAEACKSVVARWKNGKKASKPTFTSPHVIYDHRTATFHDNYVSLATTDGRIEAEYVLPGEDSDTPHSEYLFSDEYEITGAELHYQDGDWVLHIHCKKEVESDTSKQATPENGTVLGVDLGVNPLAVTSTGTFWTGDEXTATGYFTSTARRKWSPTRRNRQHLRTEQFSGLTSA

SEQ ID NO: 41856 - protein, 253 aa, Natrinema sp.
  misc_feature (3)..(3): Xaa can be any naturally occurring amino acid
  misc_feature (89)..(89): Xaa can be any naturally occurring amino acid
  misc_feature (253)..(253): Xaa can be any naturally occurring amino acid
MTXDHIAVTSTGAFVGNADYLNHQRREFEKRRASLQQTGTRNAHLTVQRIGDRFGRWSTDYLHQCSKAIVEAARRHECTHIAFENLEQXHQCSKAIVEAARRHECTHIAFENLEQIRERISDEKKFQQWAFNALQTMVEYKAEACGIVVETVNPQYTSQQCSKCGCTLEENRNDQHFECLDCEYTANADYNAAKNVARKLALKLQRGQKSPVGGAFCQYALQSGMMTVNATEVASDTPVSVERESTGKPTPEX

SEQ ID NO: 41857 - protein, 476 aa, Pseudoclavibacter sp.
VKGASPFIGLSDNGDSGSERLYSRDPDELMRWLCGAWRTRFNMHRSRRNRYDKDGNLVPIGGEPDLRTPKQSRLTQSWTAAVPTAVLESPDRLERQDWFAAVKRRETLKQQGKDPGRMPRFRSRKHSPDIFACWYNNGRNARFQRVGRRSGIVFITGQNPGQYTASGKRESFVIRIHVRLSEPVCAYTSVRVNWDRRELVFVNDPQAITRQPTHKAVGIDRGVAVAVATSDGAMLRLPKNDLKRADRLVRMHQRAQARAIKASGKTTKDYYRGQMSKRFRAHARAISRLSAKASRTVADRQQKWSTGLVRDYDAIFIEDLNIAGMTSKTRPVPNPLRPGQYLPNGQARKRGLNRVMRQASLSRLETLIRYKADRAGVLVAQVPAPYTSQRCNACGHIAKDNRESQAVFSCINCGHTANADTNAARNILDAGASAHPEITHGTQQGRTCPGDGGTSDDWNRAIGEGRSPDETRTSAA

SEQ ID NO: 41858 - protein, 451 aa, Pseudoclavibacter sp.
MVAKASSPKHMSDAARLAKNAQIKATAKATRLRRRHMICQVRDLKITASHLSATQREQLARLFLEAKWLRNHIIGAEDFTPGVLKELGDQVPVVLPGGVIEQREFRVLGGQARQSILSGIVANLRTLSSLKKRGRKVGRLKFTRQVSSVDLKQSGSTHRIDRARNRVKIQNISGWMRVRGLRQLPDSSEFANAKLVQRPDGYHLMLTTYTPPAEAVGRQTQSFQPGTEVGIDMGVKTHITLSTGDKIDAMFEETDRLRRLRRKLARQKKGSANRAKTLGLIRVQAQKITRRKDDAANKIVHELLKNERVYIQDESLATWKRRSGRARGGKRLQVSVLGRVKQALVAHERVTVLDKWAATTATCVCGHKTKHDPSQRTFTCAACGYTADRDIHAARNMIRLANMATGITSTEHTGTPAEAQVRPAATMNFTFLDTTGTRPMKQEAATSSASP

SEQ ID NO: 41859 - protein, 369 aa, unknown
  TnpB Polypeptide
MVFRYEPTPQILKLLSDFRDMINFCIAKALEMGSWSIKKLHRACYPELKARYDYHSDYYGRAYRIASQILRTWRKKVRRGQADPSRPPQAKRLFVRLSKHQFKLEKNTLRVSIRPRQYATILLQGGDYQARFLERYARGELRVGEITINERYVYIPFIEEIDITAPSNYVGIDINESNITMTDNESNTVVINTKTTRTAHATYQNIRRRIQALKNPRTRARLLAKYRGRERRKVRDMLHKLSKAIVRLAGDRGIVLENLKGIKRQNRSRKMNRRLNNSWNPRQLQFYITYKALLAGLPVYFVNPARTSKECPRCGGHINSSERACRECGLDRDVAASLNILYRFWCPEAYADEGHRAYMRMRGATGRIG

SEQ ID NO: 41860 - protein, 409 aa, unknown
  TnpB Polypeptide
MHKAYKFRIYPTKSQEELLNKTFGCVRFVWNKHVNSFNSFGIEGPVQQVTSKRLKDTDSFSFLNDVSAAALQQKDMDFIEFKKQYFDKKRKKALGRPSYKKRGQNDSYRLPNQKFVLDQSGSRIRLEKIGRVKVVLDRTIPLGAKYLNVTVSKTRTNEFYVSILVDEVIQTKPTTGRSVGIDLGFIDLLTLSNGLVISNPRWFRDNQFKLARNQKHLSRKVKGSNRYNKQRLKVARLHQKVSRQRTWYHHQISSYLVNNFDTICMENLNIAGMKKLFGKSASDAGLSTLVNQIAYKSKFYGRTFHKVDRFFASSKTCSCCGVKSSFGLDVRTWTCDTCGTEHDRDLNAAINILKRGLEDLYDFTSAELTEVVRRNSNESERGEDVRLKMDLHPSVATSLKRLTDFYEFV

SEQ ID NO: 41861 - protein, 413 aa, unknown
  TnpB Polypeptide
MWSYMALARKSIQQGFRPGVQVLSVMESFRRMTNDCIRIGIGFEEENVDNRTPSMKKLSLLSYGELGKRYEGYSQYRLNAISKAAGILSARRKSITRGFHTRTPYLSRPLLVSCYGFKIEDGNLVIHLNAETLESIPLNSHTKLLLSNPALKVRSFTLTGESLSLCVSKDVRGKEGEPAGTVGVDRNLRNLTVRNWQMVTCYDMTKVVDIGKSTRNIVRSLKRSDVRIRRSLSSKYGKRRSERTRQFLNLVSKKVVEDAKAHKQAIVFEDIIGIRKLYRRGNGQGRSFRARMNSWPFHEIKRQIEYKAAWEGVPVITLTKGETRGTTMDCPRCGERLQVPVQGDVEHHRQLWCEVCERWRDRDFVAVLNISHRGRLRFDRSSKEGEVIEAVKGNAEHEGEPPILRVDASKMCQ

SEQ ID NO: 41862 - protein, 392 aa, unknown
  TnpB Polypeptide
MLITKKIRLKPTTEQEILFRKSAGVSRWAYNFFLGENERIYREYIDNGKVGKKSISEGDVRKYINNILKPTTHSWLKEVGSNVMKQGVKDASLALQRYFKGLSGKPKFKSKHKDRPSFYVNYESLSRKQGGFQGEKIGFVKTSEALPKLNKNEKYSNPRITFDGKYWYLSVGYEVQESTVELTDESLGIDLGVKDLAICSNGKVYKNINKTQRVKKLEKKLKREQRKLSRKIENNIQSYKSNRNPIYKRPLKECQNIQKQNRLIRNIHRKLANIRQNHLHQTTTEIAKTKPSRIVMESLNVSGMMKNKHLSKAIQQQKFYEFKRQIEYKSKLNGIEFIQVDKFYPSSKTCSCCGNIKKDLKLSDRMYKCDVCGLVIDRDYNASINLANYEVI

SEQ ID NO: 41863 - protein, 374 aa, unknown
  TnpB Polypeptide
VKGSDIMAEKAYKYRIYPNKKQQELIQKTFGCTRFVYNYYLDKRIKTYEQDKMTFTYNMCSKDLTQLKKELSWLKEPDKDSLQKSLKDLDMAYQKFFKEHSGYPKFKSKKDRHKSYRTSCTNNNICFENKHIKLPKLGLVKVRDKQIPQGRILNATISQESNGQYYCSLCCTDVEFVQYEKTSQNIGIDLGLVDFAILSDGNKIDNPRFYEKSEKKLAKLQRELSRKTIGSNRWNKARVKVAKLQKHISNQRNDFLHKLTTNIVKNFDVISIEDLDVKSMRETDSNTRNKRVGDVSWSEFRRMLTYKCEWYGKTLSVIDRYFPSSQICHCCGHRDSKKSEDVRIWSCPTCNSELDRDVNAAINILNEGLRLVNN

SEQ ID NO: 41864 - protein, 413 aa, unknown
  TnpB Polypeptide
MNKKSKSNQPKIEKVISTFQYRIKDSNKKLVKSLFAQSGAVNFVWNYCNDIQQQAVKRKRKWLSDIDLKNLTSGSSKELGLHSQTVQAVCEEYNLRRIQFNKPYLKFRTNKQNRSLPWIPFKASAIRVDDKGTFSFMGLKLKTWYSRKLPNNAIIQTGSICCDNTGDWFINITFKLDLKTQEEVDNYKLSLTSKGQNLTGIDPGLNPMMTLSIEQPDGTVVYQEIEPQKYYKKSQEKLAKAQRAKKKKQIKKIHKKIKNQRKDFSNKLVWNLVKDNHTIVNTDITIKNLIQSKLNGHARAWTDCGLGYIRVALKSKAKKHNVKYEEVSERMLISTQTCSHCKALTGPRGRKGLGVSAWTCSKCGGQHKRNENSADNHRLAYKESLGAYPDELKNKANLTLQDVGVSNEESLSL

SEQ ID NO: 41865 - protein, 386 aa, unknown
  TnpB Polypeptide
  misc_feature (289)..(330): Xaa can be any naturally occurring amino acid
MVANRAYKFRIYPNNEQKILFAKTFGCVRMVYNHWLDRKIKQYEENKTNVTYTICAKEIAAMKKTEEYRFLKEIDSIALQQSLRHLDTAFQNFFKQPKTGFPRFKSKKRNKNSYSTVCINGNITISNGYLRLPKIGQIRLKQHRIIPEEYRLKSVTVSQTPSGKYYASILFEYEDQVQEKEMQKFLGLDFSMHELYRDSNGKEPAYPRYYRNAEKKLAREQRKLSKMQKSSNNRNKQRLKVAKLHEKVSNQRKDFLHKQSRQIANAYDCICIEDLDMKAMSRSLKFGKXXXXXXXXXXXXXXXXXXXXXXXXXXXXXXXXXXXXXXXXXXRFFASSQTCSVCGYKNAKTKNLALREWDCPRCGTHHDRDVNAAVNIRNEGMRLVNA

SEQ ID NO: 41866 - protein, 382 aa, unknown
  TnpB Polypeptide
MRKTFLYRLYPTKAQATRLRHMLDECRWVYNALLEQRKVYWEEAEISVSMYAQHQYLPFLKEERPQLSAVHSQVLQNVSQRVDLAFQAFFRRVKAGEHPGYPRFRGVGRYDSFTYPQYGNGAKLNGAQLQLSKVGTVAVVLHRPIEGTPKTVTIKRSSTGKWYVAISCAWEPSALPPHDSAVGIDVGLSTFATLSDGTTIANPRFFRQEEQALAKVSRRHSQLEKGSRARRKHRQAVARVHERVRFRRHNFTHQHSRRIVNRQGTIAVEDLAVNRMVRNHCLSKSISDAAWSGFSELLAWKAACAARRFVRVNPAYTSQTCSSCGNRLPPDKRLGLSERVFDCPCCGLHLDRDLNAALNILALGLQRIGTQSVEAPAFTPGE

SEQ ID NO: 41867 - protein, 444 aa, unknown
  TnpB Polypeptide
VNTGCRYLVTSTSWAYSPNTRFRLGGSPLPVAGATYSSSVRLRYRYRLDPTPAQRQALARAFGCARVVYNDGLRLRQDAYRTGQPFISDTELQHRVLTLAKRTPQRVWLSEVSAVILQQSLADLSRAYGNYFADLKRVKVAKARGKKAKLKVRKPRYKSRNHHQAIRFTANARFRLLPNGRLRLPKIRDLKVRWSRALPSEPSSVTVTLDAAGRYHASFVLEVAEAPLPASDSAVGVDLGLSTFAALSDGRRVENPRWLRQREKALRRSQRNVARKQGGSKNREKARRRAARLHARVADARRDFHQQLSTRLVREHQTVCVETLNVAGLGRSNLAKSIHDAGWGHFTRMLEYKARLYGRRLVKVDQWYPSSQLCSNCGCNDGNKRLRVRTWTCPACGTTHDRDLNAAKNVLAEGLSVAACGPGVRPGASRAVGDEAGTVLAGAA

SEQ ID NO: 41868 - protein, 382 aa, Anabaena sp.
MKSLKFKLYQHKRNRHLKRMINATGVIYNHCIALHKRYYRMWGKHLNCAKLQSHIAKLRKRNQFWQTVGSQAVQDICQRIEKAYQLFFKHNNKGVRPPGFKKVKKYKSFTLKQAGYKFLGGNRVKIGSRVYQFWKSREIEGTVKTLTVKRTPLGELFMVVVVDVRVSVSEREGGKLETKFTTGKIAGFDFGLKTFLACSDGTKIESPQFFKQSLNAIRKASSHHSKKLKSSANRERARKNLVRKYEDISNRRRDWFWKLAHELTDKFDVLCFETLNLKGMQRLWGRKISDACFGEFLEILEWVARKKDKLVVFIDQWYPSSKTCSNCEHTLEKIDLSIREWRCPSCQTVNGRDENAARNIQMVGASSIGLGDVRLATPAIAV

SEQ ID NO: 41869 - protein, 370 aa, unknown
  TnpB Polypeptide
MEQIELTFNHTRFLWNAMLELQNTRHENNKESKFIGKYDLDLILTTLKQEKRWLYDVDHTALQDTNAKLDKSFKRFFKKTGCHPRFKSYKNSKKSYTTKMNMKILDNHHLKIAKMKPIYFRSRKHIPEGKIKTVTVSKSTTGKYYASVVIEREIEPLSETGNNVGLDLGLASLSTQSDGIKIPLPRFDKNLAKKKRNWERKLARRRTRALSVIHEQKKFGRELELKDFANYTRAKYMVAKYAEKERNQRNDYLQKYTTSLVRDYDVIVMEDLKVKNMMKNYKLSRAVANAGWRSMRTMLEYKTKWYGKELIVIDPAYTSQVDFETGEIQKKGLQIRDYTNSNGTLVDRDVNAAKNILKWGLDPKTRITKA

SEQ ID NO: 41870 - protein, 360 aa, unknown
  TnpB Polypeptide
MEIMRKSSGSLEFTTNFKQDILNGIFEEYKWLVNDFIELLWDKIDYLGSFATKEETDSVDTWMTARMKQCAAKQAISIIKSQRKKHKKTMPIFDGDSIELDSRFVDIQEGENSFDIWLKIGSIGNKIKMFIPIKKHKHFNKFNDNDDWEMSKSIRLRRSGYVDFFFKNVVEHKDDGDVVGVDIGINKMLTFSNGVVVGEHIKDRINKLNTKQQKSKTWFRALTELHNYIDQEINKLNLYEIKTIVLEDLTGISHKTKNRVGKTTRRLIGHWNHKYIVDRIKNLCEVNRVEVAFVDPKYTSQTCRQCGHIDKGNRSGEMFKCKKCGFAGNADYLASLNIRDRYTQEFIVPVASGSRRNDFL

SEQ ID NO: 41871 - protein, 421 aa, Acidobacteria sp.
MFFVPLVWLTELPPGLERGVKVILAHRIELDPTEKQKEYFRQACGTARFVWNWALEEWNYRYDLGANTDACEIKRYFNSFKYEAFPWLKNIHRDAHAQPFAALGKAWKAYFNGQVEGRPQFKKKGKCRDCFYVACDKFSSSGKTVRLPVLGQVKLREPLRFTGKIQSATVSREADRWFIAMAVEIPQREVHPPSGEALGIDLGLTTFAVLSNGRKVEAPKPLGRGLERLRRLSRAHSRKRRGSHNRQKAALRLARCHRRIANMRRDFLHKFTTKISKNHAEIFVENLNVKGMVQNRHLSRAIHDVGWSELRRQLEYKSLLNGSVLTVRDPFYASSKTCSECGYVMEVLPLSVREWTCPACQTTHDRDVNAAINLKQNTVGYTGINAWGQEGSGLAGTASETGLVEPGTLPWVNTHFHSQER

SEQ ID NO: 41872 - protein, 325 aa, Methylobacter sp.
MGRGHTKVDTHIVLCHKNGAIINRKGRVTEVVFNGLPIDGKNNRYEKITLRFKTGQVSVAGYATLILHDDGVWRMHYPLKQEKTVNDSELKVGVDKGFTEALYGSDGVIYGAGIGKLITAQSDKLKKKMQARNKLHALYKQTGNENIRKNNLGRIKMDKQTAKVQAQLKSVIRCDVKAIFSKFGTVVCEDLSGRFGGKSKGKNANRKLSAWCKGEIHQALTEIADRTGASLKVVNPAYTSQVDHLTGTLLGERKGDRFIRYTGDVIQADYNAAMNILERDNDKEITRFTPYQTVKKILLKRTACFVEKQSLGVECHPKQTDILYA

SEQ ID NO: 41873 - protein, 295 aa, Bacillus sp.
MNVAFRKKFGSIKIRMPKNLRNKKISYIEIVPKQKGRFFEVHYTYEMHVSQMKKQPTPTSNALSCDLGVDRLVSCVTTTGDAFLIDGKKLKSINQYFNKVIRNLQQKNMENGLSKRVVTNQMAALWHKRERQIYGYISQTVGLLFKKVKAFGIDTIVVGYNAGWKQKSDMGKKNNQKFVQIPFYKLIVAIENTCIKEGIRFVKQKESYTSKASFLDKEPVPVWSNGDKTHYLFSGKRITRGLYQSEAGTCIHADMNGALNTLQKSRIVEWDDTLKVKTPILLKVQKRKAVASRIA

SEQ ID NO: 41874 - protein, 442 aa, Paenibacillus sp.
MANDKNGNYIKGTKKELPEDWVTYGFCYAVFPSKEQQPRLERSFGCERKVYNEYVAGLYEYLESIEYTGGRISYKVPNYTTITNKFDFLDKSNDSFVYNDAKMRFTAAIKKYNEQYAKKPIQFKKSIRYKIKNEGYIPNVRDIKGLPKFHSKKQGKLSYTTNQTNGNISVVKNENDNGYLLRIPKFQDGIAIHLHRELPVGGVVKKATIRREGTKYLVSLSVDFPFKSEKPIEQINPEKVIGLDYSQSELYVDSNGEAAEYPRYHKIIEKRQRRLNKSLARKKNAASLGSEGKIIYSNNYKKTLSEYQDVMKKAKNQRKDFLHKASNQKTNDYDAIVVEDLDLSNLAQCLSLGKKLHDNGFGMYRNMLTYKALKKGKHFIIADKFFPSSKLCSECGGKNKHLKLSDRVFLCPHCGLKKHRDHNAALNLKQYGIGLLGQKLTA

SEQ ID NO: 41875 - protein, 357 aa, Paenibacillus sp.
LLKAYKYRIYPSHEQQQYLAKVFGCVRFIFNRMLADKIEYYKQTGKMLGNTPAPYKKEFEWLKEVDSLALANAQLHLDKAYKNFFRDKNVGFPKFKSKKTNNHSFTTNNQNGTIAIEDGHIKIPKLKTKIRIKLHRQFTGLIKSCTVSKTPSGKYFASVLVETEMAQLPKLDKKIGVDLGLKSFAITSDGDVIDNPKHLRKSERRLAKLQRSLSRKKKGSNNRNKAKVKVANMHEKIANQRKDFLHKASSDMINDNQVIVMEDLRVKNMMQNHKLAKAISEVSWAMFRSMIEYKALWYGRDVIIAPKHYASSQLCSCCGYKNAETKKLGVREWTCPECNSQHDRDINAAQNLLKLAM

SEQ ID NO: 41876 - protein, 396 aa, unknown
  TnpB Polypeptide
MCYNILWKGGQYMLKGIKIRIYPDKEQEKLLLSYCKDYHNMKNFLVAKFKDNLPNVGKRNIIGYKDKDLLSEYESTYNCKTEMPTRCIRGAITDYISGVKRFYQKLSSKPPKFHKYDPNKQSFYIVDCKYSIKNFTIPMPVRMELRAKYKSTISKKIPMDKKYAKKENLTYLKDIRFHYEREKWYVSGCYDVSDVTINQNKEFLGLDWGIKNFMTTSESTLINYPKEIVREYYRIRKLSHYLDKKVKNSNNYKRLKKKFDKAYKRMNGLKKNFIHQETTKLARQYHIVIEDISWNQISKGKKRKFIRRMSVLAPKYMFEEQLEWKCKKFGSHFIKVSPKNTSKTCSVCGQIHDMKLNDRMMICSCGNKMDRDINAAINIKNAGMNKILAESICCTR

SEQ ID NO: 41877 - protein, 432 aa, unknown
  TnpB Polypeptide
VLEAVKIRLDPTPRQERMLASHAGAARFAYNAGLAHVKDMLEKGEAPEWSHYALRRWWNANKDALAVNPATGVVWWSQNSKEAYSMALRDLAQGLSNWAKSRKGQRKGKRVGFPRFRAKTHVIRFAYSTGFTAPTAHDPYGLKLPRIGRVHCMENAHKRVNGARLIRVSVSCRAGCWYASLTVERESTPTSAPKGHTVGVDLGVKNLATLSDGTVIPNPRALNTRLKALRKAQQALSRKTKGSARRRKAQERVARLHARVANVRADAINKATTMIARTYNVVCIEDLNVAGMMKNRRLARSVSDASLGEFRRQLEYKTARTGATLHVIDRWYPSSKTCSACGAVKAKLSLNERTYRCDGCGLVMDRDLNAAINIKVAGSAPETLNARGGDTRRADTTSGNANPNETRTKQPLASGVRLGVGLGNETMRSRTN

SEQ ID NO: 41878 - protein, 517 aa, unknown
  TnpB Polypeptide
LRLSNSTSKSKSGSERTPSFVCEIPLRVAPAQERTLNARLEAARQIYNACLGEALKRARLLKERRAYRKARGLPKGQERTEAFKEVRRSVAFSDAALQRYAVRLRQGAFADTLDAHVAQKLASRAFAAVNEWVLGKRGRPRFKGPRQLDSVEGKSNQAGLRWREDRVEWFGLDLPAVLDPKDPVMAHALESPVKYVRLVRRKLRGRDRFYAQLVCRGQPYLKPQRRIGEGEVGLDIGPSTVAAVGEEAAFLEAFCEEVVRKHRTIRRLQRKLERQRRANNPDNYLPDGRVRPGPKRWAASNRQRQTQGRLAELSRREAAHRKTLHGALANRVLALGRVVKMEKLSYRALQRQYGRSVSLRAPGTFVSILRRKAASAGGRVVEFPTRPTRLSQVCHGCGAVEKKPLSLRVHRCGCGVEMQRDLYSAFLARCVGEDHGLHAGLARARWPGAEPLLRAAWSQATEPANGRVWCPSSFGPSPRSRSRSPAKEGIAQAEVPDVVAAARAEWREPGRGGGGSP

SEQ ID NO: 41879 - protein, 257 aa, Deinococcus sp.
VVWPRKGAGQRANLPPEHRQRADEDAPQGGGEAQDAHHQEGGQRVVRHLREAPTRPLPETGSAVGLDLGTTHFLITSNGEVKDNPRFLQSTLKKLRVAQRSLSRKKRGSKRRRKAKQHVARIHRKVARQRLDFHHKAARSLVNQHDLIAHEDLNVKGMGQGNLARSIHDVGWGQFLNLLSLKAADAGRRVIGVDPRFTSQRCSKCGHTEKANRRSQAVFVCVSCGHEANADHNAALNILGRAAPSGHNGRGQPYAVV

SEQ ID NO: 41880 - protein, 419 aa, Halobacteriaceae sp.
MEVKRTVPVKLDVPDDRRDDLHTTIDQFNDAANYTVENARKDDGYLILNKSKIHDRVYYDLRDRTDLPANLCVRAYSKAVEALKSTVAEWKKGNSRPLPHFSEPSTVYDKRTLTIKDRSATLSTVNGRVAVEYVIGDYQQSYLDDDDYEKRMGTLHYREDEGAFYLHIVLLKEVEQREGDRVMGVDVNLKNVAVTSTGAFSDGGELLWGQNHYFRVRRSLQAKGTRSAKQALARLSGRENRFVLDRLHTISRRLVEEARTHDCSYIAVERLTHIRENMDNGNDRTKRQIHDWAFRELQEMLEWKGAEFGISVEPIPPAFTSQTCSRCGHQSSTNRGSDGWFACNECGQEYDGDYNAAKNIGLKLLTVPEGKRPSGLSHGQLALKSGTVNLSDDSSSAEFRPEGESHGQARSSNASVSKR

SEQ ID NO: 41881 - protein, 478 aa, unknown
  TnpB Polypeptide
MRDRSAVYGTVQHMPEATKNAAAAANKDAPISATGVLLTRHVAYRFALDPTRDQEQTLRAYAGAARYAYNHHIARVLANLNQRQAEASYGVEPGARTPSLSWGKVGFINEFNAFKNGQLPTSETADDGTRGLPWRGEVCADVFECASVDAAAALTNFTSSRAGTRKGKKAGMARFKTRHKTTPSFRLRSKTKPGESAPLRVVGPKTLRLPRIGQIRVHGSTRTVRRMLSAGRLHLRGCAVKFERGRWWVSLQGVAAQFHGARRGTAASDPALTVRRPFGAGIDRGIISLAVVVDTEGTLLHVAKGVKALRHAQVALRRANKTHSRTKEGSKGRQQARERLVRIHARVANLRRHAAHGVTAWCAGNLTRLAVEDLYIAGMVKNHALALAISDAGMGQVGRMLEYKASWYNLKLVPVNRWYPSSKTCSGCGNVKETLSLSRRLYECAVCELSIDRDVNAAINLARWPDRNTAARAAPSSA

SEQ ID NO: 41882 - protein, 367 aa, unknown
  TnpB Polypeptide
MTVLRTITFKLRLTNQDGEALLDTMRAYTKAFSKSAIWGYENQSWNKVDNHNATYKLVRQSIPDLPSSLVQGARDCACESLKAVKCKILPERKSLSAMRYNQRVVTINLMHGVATIASTKGRIKTTFFVPPRYKDYLSWAIKSSTISYDRRNKVFYLHVSLEHHDPEKVAGLVVLGIDRGIVNIAVCSDNRFFNSKKIKNRRAENAYLRKELQSKGTPSAKRKLKRLSGRERRFSTDVNHCISKQIVNSEYTVFALEDLSKIRVQKRRGKKFNLKLNGWPFYQLEEFVRYKAESLGKYALLVDARYTSQKCSNCGHTYKGNREGSTFRCRKCGFELHADLNASRNIAQAGRSCLGRLSCQPAQCIPT

SEQ ID NO: 41883 - protein, 380 aa, unknown
  TnpB Polypeptide
VKLTAKAKLLTTIEQHAALLATLEQCNVACNWISEQAWVTKTWGQFRLHRLVYHETRRRFGLNSSLVVRCIAKVTDAYKLDKRTQRTFKLHGAIAFDHNILRWYAQTQRVSITSVAGRQHISFVCGAYHLRLLQTQQGESDLVLIKGTFYLLAPCNVEEVLEQEVEGVLGIDLGIVNLATDSDGKNYSGEALEKNRRIHAHRRRNLQHKGTKSAKRKLKILSGRQSRFQQDTNHTISKRIVAKAKDTNRAIAAENLTGIRSRTTARKQQRARLANWSFFQLKQYLAYKAKLVGVMLFEVDPRNTSRTCPVCGCIDKANRRTQALFLCTSCGYSDLADVNAARNISWRGQCQLAKRSVTTKLYDQGLGSLCQGQALRFIGE

SEQ ID NO: 41884 - protein, 253 aa, Anaerobranca sp.
VLINGKSQRIKVKMLLADYQKQQLNNKLGSLRISKKSSKWIAQIAVEAAEKQNNNNQNVMGVDLGLKVPAVAVTKNGKTKFFGNGRQNKYIRRKYKGLRQKLGKTKKLKKIKQISNKEQRWMKDQDHKISRQIVNFAVENNVSVIRMEKLTNIRNTARTSRKNEKNLHTWSFYRLAKYIEYKGNLEGIKVKYVNPQYTSQRCPCCGEMNKGRDRKYLCKACRFSTHRDRLGAINIQLLYNIYISNEIIRDNEN

SEQ ID NO: 41885 - protein, 537 aa, unknown
  TnpB Polypeptide
MNKDVLKMPTGKKIDSNFITVECLLAFDKDEDKGRVLTLMRKFSSMVRSAYKRLMEGAERKELKKLLARKYGINTRYSDDAILLAQQTLESCLEREQNPKKLVFGSREIFEQLKKKHLTGKSRETLRQKWEERRYGILCSRGDKSREGNLNLRLVNLNNQWCLRVNLGNGEYVWARVTRSVKRKTDKWIDFISSIEHAEKTGDWFPYTVRLKLRNGKIYAQFSKEEKLPEVSITKDNGVMGIDINAYPFHLALVHTAKDGNLEKYERISLDSLLEGSSEKREYLSWQVAHQVVEIAKRERKAIVVENLEKLPKGKRGDGLPKLRQKLQKWIYKGLLQKIEIVARRNGIQVIKVNPAYTSIIGKLKYAPLYNIDKDKAGAYVIAKRGLGFKERLPKNYRKLLEDKEFLSYSVAKMEDRIAKLRKEIETEKNEYKRNKLRSDLRRLKGELRLLLRSLLDSGESESAAQQTVNRKMERVRGRAQTLQKSWQVLSVAHAFSCLESLRDFSPLKRLLISRDWVGVAKQNGLVPPYLVKGRLC

SEQ ID NO: 41886 - protein, 401 aa, unknown
  TnpB Polypeptide
MKINKAYTFRLYPNDNQKDLLAQHFGACRFVYNYFLRQRIDYYAANKGNAKKGLTYSDTSKMLTTLKNQPEYVWLKAINAQSLQQSLRHLDVAYNNFFNNKTKFPKFKNKHSKQSFLAPQHFSIDVQSKLLYLPKFNSIPIVIHRDIDGVMKSITISKSSSGKYFASILCELDIDVKQKQQGDTIGIDLGIKSFIVTSTGETIDAPKFLRKSELKLKRLQRLLSRKQKGSNRRNKAKIKVACVHDKITNQRKDFLHKLSHKLVSESQAIFVEDLNVKGMLANHKLAKSIADSGWSEFIQQLKYKSNWNGVYFGQVDRFFPSSKRCNNCGWINTSLSLKDREWTCRECNTIIDRDNNAAKNILQFGLLQSTEGHSETKRPGRPRAVRRVVELGSYWALAPVE

SEQ ID NO: 41887 - protein, 313 aa, Staphylococcus sp.
MNNVYLLNNPNKHWIKQSASKAVKQSIMNAHRAYQTFFKNKQGCPKFKKKSGIGSYYLIGTIHIQRHRIQLPKLGWIKLKERGYIPTNNIKSATVIREFDRYYVSVLINCECPLLSKPEQTEGIGIDLGLKEAVFTHSGVKIRSFKTNQTIIKLDKSLKRQQRKLSRKKKGSHNWYKQLLKVQRLYKRIKNIKKDIKRKGILSILRTNPQFITVENLNIKGMMRNKRLANSFQQIGLGYMVEWLKIKCRDYGIELRQVDRFYPSSQICSDCGHIQPMPLNQRTYHCNHCGMIKDRDINASINLKQATDYTVIV

SEQ ID NO: 41888 - protein, 282 aa, Staphylococcus sp.
LSIEKRGWQNMLRAYRTEIDPSFEQRQTINQTIGTCRWIYNKFIETNQNFHKTGQSYMNGFAFSKWMNNVYLPNNPNKHWIKQSASKAVKQSIMNAHRAYQTFFKNKKGYPKFKKKSGIGSYYLIGTIHVQRHRIRLPKLGWIQLKEKGYIPTNNIKSATVIREFDRYYVSVLIDCEPSPLFKPKQTEGIGIDLGLKEAVFTPSGVKIRSFKTNQTIVRLDKSLKRQQRKLSRKKKGSHNWYKQLLKVQRLYRRIKNKKEISNAKAYSLLFAQIRNLLRLKI

SEQ ID NO: 41889 - protein, 369 aa, Staphylococcus sp.
MLRAFRTEINPSFGQRQTINQTIGTCRWMYNKFIETNQNFHKTGHSYMNGFAFSKWMNNVYLPSHPDKHWVKQSASKAVKQSIMNAHRAYQTFFKNKQGYPKFKKKSGIGSYYLIGTIHVQRHRIQLPKLGWVKLKEKGYIPTNNIKSATIVKEYDRYYVSVLVDQPPSPVFKSKQTEGIGIDLGLKEAVFTPSGVKIRSFKTNQMIVKLDKSLKRQQRKLSRKKKGSHNWYKQLLKVQRLYRCIKNIKRNIKRKGILSIVRTNPQFITVENLNIKGMMRNKRLANSFQQIGLGCIVEWLKIKCQDYGIELRQVDRFYPSSQICSDCCHIQPMPLNQRTYHCPHCGMIKDRDINASINLKQATDYTVIV

SEQ ID NO: 41890 - protein, 391 aa, unknown
  TnpB Polypeptide
LVKGSFILHKAFRYRLYVNQSQSDKLDYLLYLARQLYNAALQQRRDAWKYHHKSLNYYDQANQLKEVRNEIPEFAQLNFNVSEDILRRLDKSFKAFFRRDKNGEKPGYPRFKGQDHFDTVTFPYYRHGTKIKNKRLYIQNVGMLKIKMHRVLEGEINTITIKRECGKWYVIFCNTVEIETLPASDKVIGIDVGLESFAVTSDGEYIENPRYLREAEAKLRVAQRSVSRKKKGGSNRRKAITLLVKNHLKIKRQRADFAHKIADDLVKNYGRIAVEDLRIKNMLGNHHLALSISDAGWGQFLGILSYKAEWAGRDFIKVNPNGTSQICSGCGATVPKHLSVRIHHCPNCGLSINRDLNAALNIKRLGLSLWDSTCDSSQCVSQEAGALQLPE

SEQ ID NO: 41891 - protein, 393 aa, unknown
  TnpB Polypeptide
LAKKIRLKPTPKQEILFWKSAGVARWAYNYFLSEQERVWKEYLANGKTGAKSVREGAVRKHINHVLKKTTHTWLSEVGSNVMKQAVKDANTAYQAYFKGISEKPCYKSKHKSKPSFYVNYESLSRKNGGFHGEKIGLVKTSEPLPKLPKGKKYSNPHISFDGKYWYLSVGYEVSEKKRKLTGKSIGIDLGIKELTICSNGKTYQNINHSQKIRRMEKILKREQHKLSRKLKQNRCGYQTVRNKRVPVFLKPLSECRNFQKQKRRIKLRHRKLANIRNNYLHQTTTEIVKTKPSRIVMETLNVKGMMKNKHLAKAIQKQKFYEFKRQICYKCQKYGIEFVEVPTFYPSSKTCSCCGSIKEDLKLCDRIYRCKECGLVIDRDLNASVNLANYESA

SEQ ID NO: 41892 - protein, 195 aa, unknown
  TnpB Polypeptide
MLTYYDLDFILKSTQPYQSLPSQTSQQILKYVIRNWKSYFKGLKEYRRDFRKFKKSPKIPQYKKKNGESVVIFTNQQCQIKEGYLHFPKRINITPIKTRITERLKEVRIIPLGVKYKVELVYEKEGKDLNLDKMHVLSIDLGLSNLITAVNNSGYTPFIIKGGVIKSINQYYNKQLAYYRSIENKKGNFADTKRI

SEQ ID NO: 41893 - protein, 409 aa, unknown
  TnpB Polypeptide
MMQLVEQHILSKNNPSYEVIDQAAFASKNLWNAANYVVRQAFIHEGIYLDNVKVFRQIKSHEAYQALPRKVSNQVLIQLHKAWVAFFEAMAQWREHPEKFLGRPQLPKYKHKTDGRNLLVYEKGAISKRALKRGLLSLSALGELVKTRQNKETIAQARVVPRGTHYVIEVVYERKVEQASVDPSLFAALDLGVNNLAAITSNKPGFVPVLVNGRVLKSINQGYNKHREHLQKKLVKENRFTSHQLERITDKRNRRIKQQLHLASKAIIGLLVAQGIGTLIIGKNAFWKQEVEMGKRNNQAFVQIPHTRFIEMVRYKAALVGITVIITEESYTSKASFFDRDAMPVYDPNDQANHMFSGRRDGRWYRVKGRYPIHADVNGSYNIGRKVFPTAFDGLGIEASAVRPRRLAV

SEQ ID NO: 41894 - protein, 384 aa, unknown
  TnpB Polypeptide
MNRTFRYRLYPTSRQVIVLEAMLRDHCDLYNAALQERRDAFRMRGTSIRYGMQSNQLKDIRNADPLGQGRWSFSSQQQTLRRLDKAFTAFFARIKKGKKPGYPRFRSSRRFDTVTFIDGDGGKWLGNTVRVQGVGCIKVKVHRPVRGTIKQFSVTRQGKHWYVNATCVDVPVQPKPFTNAVVGLDRGVTHLVADSDGRFVNNIRPLQAAQERLTKAQRDLTHKKRESHRRRKAIARLTVLHRKIKDVRKDHLHKVARSYVNTYDVIVVEDLKIRNMTRSASGTADEPGTNVAQKSGLNRSILDASWGVLLELIRQKAEEAVVEVIEVNPCNTSRTCHVCGHVAAGNRNGEAFRCQRCGHSAHADTNAAQNILRLGLSRQAAVAS

SEQ ID NO: 41895 - protein, 392 aa, unknown
  TnpB Polypeptide
MLKAFKYRLLPTKEQARLLNKHIGSARFVFNLALECKQMVYAGSKVNLSCFDLVKQLPDLKKECEWLKEVNSQSLQQTIVNLDVAFTKFFNGQADFPKFKKKSSAKQSFNIPQNVIIENDKLVIPKFKKGIDIVLHRELKGTIRQATISRTPTGKYFVSILCETGEAIKTKAPIKEKTTIGIDLGIKSFLVTSNGQEFNNPKFLRKAQERLKFTQSKYSKHKGKITKHRLAVLHEKVANQRKDFLHKTSAKLIRENQSVAIEALQIKNMVKNHCLAQSISDAGWGMFVSMLEYKAEWYGKNILKIGKFEPSSKTCSCCGSINKELTLQDREWTCKGCGTLLSRDINAAINIKSFALKNHLSVERRLKNQGELSTLVEVMTLEAHPISFTVGG

SEQ ID NO: 41896 - protein, 374 aa, unknown
  TnpB Polypeptide
MNLVLKTKAKISNKNKLLLKQQMEQCRILWNLALEQKINIYRSSKETISVYDQKKQLVDLKKEFPEFAKVYNKYLSAILFNLDKAFINFFRRLKNKEKPGFPRFKGRNKLCSLEAPAMYCKKIDDYHIQIPQKIIIKTKDKIPDNLRTIYITYDVKENIYLSIIYDQPIIESNTGTKIQAFDLGIKNLAIGYDGEGFIRFNAFKQTRYFDKIVDKLRSRRDKCKKYSRKWKLLTKTIRRIYQTVSNRRENYYHHVSKDITSQADVRAIVVGDLSIKQMISKNRRLNREVHNRWSLNSLIQKLRYKSILNSKLFYEINESYTSKTCSRCGSIQEMPLHRRQYRCPECGLSLDRDENSAINIWKRSLAVLQPVLIN

SEQ ID NO: 41897 - protein, 348 aa, Bacterium sp.
LHSQTVQALVDQYFDSLKSFFNQSNENKCPPFRTPKYHSIPFKQSAINIRDGKIRLSFGEVRTPLVFDLPKPPKYRVRTAEICWDKTRRIHYLVLTMKLDDVKATRYQKVVSIDLGEIHPIATTDGKITIIYNGWLIRSIKQYREKLKAKFAKLLSKCKKYSKRWWQLTKSKNKQLRNLNNSIKDAIHKITRYFVNWCKKNRVGVVIIGDLTGIRESIDYGSKVNQKLHQWTFAEITRQLKYKLREFGIAVDEPSEKDTTKTCPSCGKKNSTSNRNYKCTNPLCKFEYHRDGVGCLNILNKYRGDFPFSKQMELLPRSWGPWQPPQVGGVRFHFHLSNPISAEYGVFD

SEQ ID NO: 41898 - protein, 251 aa, unknown
  TnpB Polypeptide
VDSIERREAYQVELLKRDGKYYAHITFKELEAKVIYTGHASMIGIDTNPDGFGLTEVNRKGNYQGHAYLRQHELTFCRGNRRLNLCGELSAQAVSKAEKHQCGIAAEDLKFKDDRDVTSKQARVTHQFIHATLLRMLERRSLRCGVEYVKGPPQFTSKIGLYKYCHQYGLDVHNGAALVIARRSYGLKEAVPKLLFDKLVPVKKQAQFKAKNEWGQWSEISKQVDKLFKKRKEVNTPGLWLERRKLLLGIS

SEQ ID NO: 41899 - protein, 309 aa, unknown
  TnpB Polypeptide
LKPPYKKKRFMPFIWKDTAIRLSPEGVLKLSMGSSQEPILIQTTLPADTKIRQAKLVYEDEKYYLHLAIEVKNEHEEKHSFNVMSVDLGILRPITCFDGSEVISYHGGVLNSLIRYRNKKLADFQRTLSKCKKGSKRYRKLLKAKKRTLKRTKHQITDILHKITSNFLKMCLQKGYGTVVIGDVTNIRERVEGNDNFNQKVHQWCFRKMVDMITYKAQLLGIEVKLASEEYTSQVCPVCGSKNHAVGRNYECKSCGFSYHRDGVGAINIWQRYLGKKSQVVAGLAPVRGVRFKPHLCGHGVSNAPWKAA

SEQ ID NO: 41900 - protein, 410 aa, Salmonella sp.
  misc_feature (312)..(312): Xaa can be any naturally occurring amino acid
MLILKAYKFRLEPTPEQSQRLRQLCGCARFVWNLGLAETKRILDSGEKLPSAFELNRMITVWKKMPEYIFLQDAYTDNLQQKLKDLHTAWKRCFDKKLAAKAPVWKRKNEGRDSIRFVNFEKYCCLENRRVKLPSGLGWVKFRQSQRVNGKIKNATISQLAGQWYISFQVEIETAEPNHTSTTIVGLDAGVAKLATLSDGTVFEPVNSFQKNQKKLARLQRQLSRKVKFSNNWQKQKRKIQCLHSRIANIRRDYLHKVTTTVSKNHAMIVIEDLKVSNMSKSAAGTVSQPGRNVRAKSGLNRSPEGGAVAGXNPPPESRSAKVGEDVKCICSGLSPRLFAMEGSAVLTMVVSSDCIKKPNATIQSCQRVLSGSSVISLLPVCYFYAKNAAADGRKRGTPPAWYRASGAGS

SEQ ID NO: 41901 - protein, 284 aa, Bacillus sp.
LEKAYKAFFKGDARFPKFKSRRHKQSYTTNVVNGNIQLLDGHIKLPKLKQVKIKQHRKIPGESTIKSCTLSMSASGKYYVSILTVCEKKIAGKEVKKIAGLDFAMDGLFVDSEGKKANYPKFYCQMLDKLATEQRKLSRKKKGSSNWKKQRVKVAKLHEKVANQRKHFLHQKSKELVATFDAIAIEDLNMKAMSKALKFGKSVADNAWGMFITFLQYKLADQGKQLIKIDKWFPSTKMCSNCGSVKEVKLSERVYQCVCGLHLDRDHNSALNIKKEGIRLLAMA

SEQ ID NO: 41902 - protein, 405 aa, Anaerolineales sp.
MKILRAYKTELNLNNTQKTACARHAGAARWAYNWGLARKMEAYQNGEKVPTAIDLHRELNAMKKGELSWMYAVSKCAPQEALRNLDQAYAHFFRRVKEKKAGRKIQAGFPKFKSKKNGLGGFRLTGAIHIFENAIQLPRLGRLHLKERSYLPVEGVHMLSATVSERAGRWFVSVQVEMEIPDLKATDKPVVGVDLGILALATISDGTRIENPRALKSDLRKIKRLQRMVSRRQKGSANRKKAIRQLAKAHLRIANVRNNTLHQVTSLLARTKSAVVLEDLNVIGMVKNHALAQAIVDVGFFEFRRQMVYKGQWYGCQVILANPFYPSSKRCSQCGHIQATLDLGTRVYICDHCGLTIDRDLNAAINLEQLATGSSPESYACGESVSPGYQAVLVEAGTEQQSTCV

SEQ ID NO: 41903 - protein, 343 aa, unknown
  TnpB Polypeptide
MQVTRHCAVTYRIDTYNRTGKSCNPTPAQYKDEYPFLREVDSLALCNAQLNVAKAYNNFFRDPKHVGFPKYKAKHRSAWRYTTNNNNRNIRLIEGGRYLKLPKVGVMRARQHKTIPDDWKLKSATVEHLKSGGYTATILFEYETQAPEPVRPVHIVGLDYASHGLYVSSDGEQADYPRFYRQMEPRLMREQRRLSHMVKGSGNWVKQKRRIAKLAAKVRNQRADFLHKTANRLAARYDCVGVEDLDMKDMSQSLALGKSTMDNGYGMFRTMLAYKFERQGKQLVTVDRFYPSSQLCSDCGYRNKDTKNLYIREWTCPDCGVWHDRDVNAATNIMHETRRLVQE

SEQ ID NO: 41904 - protein, 493 aa, unknown
  TnpB Polypeptide
MGLRTIRLKLHNPGAAKRDIINNAFINYNNAYNYLLQRAYEEIDTIEEEYRSPRGTYSSIGLSKWVDRDISAYINKFNIQPFKDSLKLDFGMTLASYFIQKKSKPDMPFPKLRKEPVTMEEGVRPIYFCRYDTKRNFCILFDYENNKFFAKLFLMNTTHSKTRESFNFTRELTCISKNKETARAQKKEPFIIVPLSFGKWQLNMLMQAVERPEILRTGRLIYKDGEYYLSLCIDLPEENKIEPATFLGVSRGIENSVNYSITDSKGQLLKNGSMDCDITGNPSEIRRNMFILANSITDLAVKNKSMVILQNLTGKGDKLTYNEDGKTVKPVLGCKQYNELVRIIDYKLPQRGLPEPAKVSSVDIFHRCSVCGSNTRKNRFSKTRFLCTTCGFSSDLDSLGSLNLATKLLKYQNTPIKLKARRTMEGIYLSNELIGLDLFVPKSGNPLVMLKDKIEEISANLENYCDEKKLSIKDVKSIISKLKYHNFTNIEIV

SEQ ID NO: 41905 - protein, 493 aa, unknown; identical to SEQ ID NO: 41904
  TnpB Polypeptide

SEQ ID NO: 41906 - protein, 346 aa, Halomonas sp.
MQTERAYKYRFYPTPEQEILLARTFGCVRFVWNAVLRYRTDAFYERQEKVGYTDASAFLTQLKKQPDTAFLAEVSSVPLQQCLRHQQTAFKNFFAKRARYPNFKSKKHRQSATFASSAFSYRDGQITLAKCREPLNIRWSRELPSAPSTVTVSKDAAGRYFISCLCKIDTEELPITPNMTGIDLGLKDLFVTSEGQRVNNPRHAARYERKLARAQRQLSRKQKGSNNRAKARLKVARCHAKIADTRLDHLHKLTRQIVNENQVIAAESLQVKNMVKNRHLSKAISNVGWGSWCASLTTKRLGQDASSSRSTAGTPAANAAMDAAMYWKRYRFMYVSGIAQAAAPRA

SEQ ID NO: 41907 - protein, 74 aa, Halomonas sp.
VRQLEYKAAWSGRQLVKVSQWFPSSKLCHGCGHKVEKLPLSQRHWHCQGCGHPIDRDINAARNIQTAGLIHIAP

SEQ ID NO: 41908 - protein, 320 aa, unknown
  TnpB Polypeptide
MRVNISNNVTKQAIKDACTAYKNFFRGLQKFPGFKSKKRSMPKFYQDNVKIRFSNTHVKFEGFSSSRKANKQKMNWVRLAEHGRIPTDAKYMNPRISFDGLNWWISVCVEFPDCRETLNDDGVGIDLGIKDLAICSDGTKYKNINKSQKVKKLEKQKRRLQRSISRSYEKNKKGESYCKTNNVIKKEKLLLKRNHRLTNIRKNYLNQTISEIINRKPRFICIEDLNVSGMMKNRHLSKAVQEQGFFWFRKQLEYRCSDKGIQLIVADRFYPSSKLCSCCGNIKKDLKLSDRVYRCECGNMIDRDFQASINLKTYGEKFAS

SEQ ID NO: 41909 - protein, 362 aa, unknown
  TnpB Polypeptide
VKLTLKIKLLPTDKQSKLLIQTLNEANSACNSISEIAWQEKIFNNFKLHHQCYHGFKASMNLSSQMLVRCIAKVADSYKLDKKAKRSFKPLGSIAYDSRIMTYKPDNVVSLWCIGGRQKIAFVCHNKKYIPYIKGEANLVLKNDKFYLFQTVDVPEDDVKDVEEFIGVDFGLTTIAHTSNNVEFSADGLNKYREYRQKVRSSLQRKGTKGAKRLLKRLSGKERTHSNIVNHTISKKIVQSAKSQNKGIAIEDLKGIRFTSKRRNKKFRTKLGKWNFYDLRKKLEYKALLNGVRLMVVPAPYTSKTCSCCKHIGKRTNKRFECANCGTKIDADFNASINIASLGLSINKPEESNMFCSIVNHF

SEQ ID NO: 41910 - protein, 505 aa, unknown
  TnpB Polypeptide
LTWCSTTRSAGAAGQCGAVGSAFIGVADGSSQPGRHTRVPAVEMGRWLSRPARTVACMTSIPSVRKPAATATVIQAYQFALDPTPRTQGSLASHAGAARFAYNWGLELVTTRLDQRRAGQDVEVPWRLPELRREWNRAKHQVAPWWQENSKETYNSGLDALARALKNWSDSRSGRRKGRPVGFPRRKKKRRARVACRFTTGQIMVLPDRRHVQLPRIGVVKTHESTRKLARRLEQGTARILAATISRRADRWYVSFTVEVERAIPTSNGKASVVGVDVGVRHLAVLSTGQTVANPRALEGSLRKLRRLNRELTRRKPGSKHRNRTRRRLARVHARAANLRRDALHKLTTALATEHGTVVVERLNVAGMVRNRRLARAVADSGLGELRRLLVYKSTWYGCRLVVADRFYPSSKTCSGCGWVKAKLTLAERTFRCETCGLRIDRDLNAARNLAKLVESVAQSGWETPNARGADQRTQLAGQVAMKREAGTGSYPDKTGTVEPQGLTA

SEQ ID NO: 41911 - protein, 382 aa, unknown
  TnpB Polypeptide
MEIVRTVVCKLAPTPEQASDIDATLKAFAGACDFAAGAARRIDSTNKVKVQRDAYKAIRETFGLSANLAIRAIARACAALKVAAKMHSKFEPTSIDYDARIFAFHEWNWTFGLTLLSGRVKIATALGDRQRSLLKGRGPTAAVLVKRRDGGYFLHVQLTDTAPDPIETGGTLGVDLGVKHLAVTDDGETFSGDGVEACRRKYARVRKTCQRAGTKSAKKKLRKVRMRESRYRADVNHVISKRIVGKAKGTACAIGVEDLSGISARTTARKADRSRMKGWAFHQLRDFIAYKALAEGIPVIAVDPRNTSRTCSECGHCEKGNRKSRDEFECRHCGFRLPADWNAAKNIRDRAEVIRLDAVIVDAGGRIPAEINCKPPALAVGL

SEQ ID NO: 41912 - protein, 372 aa, Clostridia sp.
MQTVTLKVKLLPPNRGKLEKMARMLETYRQACSWFLEQAEALDTTSRAHLNRKTYRQACELFDLNRGTLQCAMLKALSARRSYLSRKQRGKKASLPKFNRTVPVMVRQDCYSLHQLPSGTWVIKFPASSGRSQIAVPLAVSVYHIKKLQDLAGGSCRQGSMEIWQDKSGEWYVAISLVYETCLNEPGSVIGVDFGIVKLAVLSNNVFFDGRKIRWRKERWAERRSALQRAGRLSRVKREAGRERRWMRSINHCLSRRIVQIAKAKSAAIALENLLGIRERAKGSKKFNRMMSGWNFRELASFIEYKAALAGVSVIYVDPKETSKTCPRCGNVSRYNRKTHAWFKCVRCGYQSDADRVGALNIAARALDALGA

SEQ ID NO: 41913 - protein, 419 aa, Actinoplanes sp.
VKIKHGYMRRLAPTPEQTAALDDQSHAARAVWNLLHDWSTGHGRCLRPSVKDADNAIRQARKEVPWLAVVPAQAAQAVLKTYRRAWTNFFEGRAGPPEYKSRARSRAVVDIPQGRSLAVKRLNRRWAQLWVPKVGTVRFRWTGPIPGVGREPGRLTGARLVREAIGWHVVFRTEVVRADPAPHPGPMVGIDRGVTVALALSDGNDREHGPWMRPKEQERLLRLERAAARKWRAHMRGAPASKRLSRTYDQIAKLRARAKRRRTDWQHQTTTALANRYGVVVVEDLTIENMVRRPKPKPNPNRPGAFLKNRARVKAGLNRSMLNEAHTATVTMLAYKLAERGGTLIRVPARYTSQTCSQCGHRDPSFRKGIAFSCTSCGWIGHADTNAAINIHAAGRVVYGLLSPAPRGDEASRSNRRAA

SEQ ID NO: 41914 - protein, 430 aa, Escherichia sp.
  misc_feature (156)..(159): Xaa can be any naturally occurring amino acid
VKRLQAFKFQLRPGGQQEREMRRFAGACRFVFNRALARQNENHEAGNKYIPYGKMASWLVEWKNATETQWLKDSPSQPLQQSLKDLERAYKNFFRKRAAFPRFKKRGQNDAFRYPQGVKLDQENSRIFLPKLGWMRYRNSRQVTGVVKNVTVSQSXXXXLGWMRYRNSRQVTGVVKNVTVSQSCGKWYISIQTESEVSTPVHPSASMVGLDAGVAKLATLSDGTVFEPVNSFQKNQKKLARLQRQLSRKVKFSNNWQKQKRKIQRLHSCIANIRRDYLHKVTTTVSKNHAMIVIEDLKVSNMSKSAAGTVSQPGRNVRAKSGLNRSILDQGWYEMRRQLAYKQLWRGGQVLAVPPAYTSQRCAYCGHTAKENRLSQSKFRCQVCGYTANADVNGARNILAAGHAVLACGEMVQSGRPLKQEPTEMIQATA

SEQ ID NO: 41915 - protein, 507 aa, Mycobacterium sp.
MIAAHRHTVMANPGKAAALRALFPECRSAMGHLAARARRELLSGEPLVQWRSMRNDQLWFETCLSARQLKSAQNMVHANVSGWLMRLQDRVRALITGSRLPDHDKTVLYRINARSAWWMPHLELPWLTDEDRLVPVEHRWVAATPDVVWLAVDPRLLTLARRLVKHAQQQVRFPNLTRVNTLTLDGIVAQAATAHTATQQGRVDYWVKVATLVRGKPVQVPLRANPRFAAELDRARDRGGKLCAAIQLHRTGSGVEVSLITDQPDTAPRTSGALVGVDFGFSSALFATSQGQLLGRAMLARLRELDAVLEPLAADLQRRGVALKTDPAYRALQQRIGDFVANEVGRLLNRLADTDIRELAVERLDFRGGGLSRRMNRLCTRTGRRVLKGRLQRLTERHGITVIAVPAPYSSQQCSGCGYVHKTNRKSQTRFVCGFCGKKLHADVNASRTVASRRSRPLPHGTGPRSRGNTRRLLDSDHRHRWNLPAQGAVHGITGARGRSPTKSCVT

SEQ ID NO: 41916 - protein, 409 aa, unknown
  TnpB Polypeptide
MVKDEMLVKGIVFYLDSDLPTEAKVLLGDFRLAVNNAIRAGLQARVTSRNALCKVAYKDFREQHPRMYAQHLVSAFEVAGSVLKNHRRRVRKGIACRIPYVKRLMMKAENQAYKLDRKSGLIDLPIRAGCHVQLKLIVSQYHRKYLDDLTLSLGSLTVLPDRVIVAFRKDAPKPFVPESALSLDTNERSLDGVFVESDVAKAIKAEFPEVAIIQQRHHDRRKRFQKKKANDRRISTNLCRREGAREHHRIDYRLHQVADSVLKFAEERRSAVILEDLKGIRPRKSKELNRRLSMWPRRMLHHIIEYKAQWRGIPVVKVDPRNSSRTCPICGKIQYSRMGAEFKCECGWRLDRHINASINLLQTAISKGMAGGLRFDPGAFQHDVMMILYEPAMAARSEPNGTSGIAGVT

SEQ ID NO: 41917 - protein, 397 aa, unknown
  TnpB Polypeptide
MKLIKAYKYRLKTGPKDEITLVRFTGCSRFVWNRALSFQKELLDSGRRCLSYEPLTLQLPVWKKEFPFLKDVHSQILQQRLKELCRAIDAAFDPADAREFPKFKKKHKSTASFRYPQGFKLNGNCVFLPKIGWMRFYRSRDIEGTPKNCTVSKRGQHWYISVQTEMDVAAPVHTSSSFAGADMGVRNTLTMSDGTTYRAAKSSGEMSLKLAAMQRKLFRMVRGSNNWKKQKLKINRLHVRIADMRKDRLHKVSSVVSKNHAVLVLEDLKVRNMSASAKGTVDKPGKNVKRKSALNRFILDQGWYELRRQIEYKMSWRGGHVIFVHPAGTSRTCSCCGHVSPENRPSQALFYCVKCGHTENADVNAAKIILGAGQALLACGSNGVAKPSEAGTVQKLH

SEQ ID NO: 41918 - protein, 663 aa, unknown
  TnpB Polypeptide
LNCAKRILRYRRKITKLKAKPSSSKLKGLEKIEEYEKRIEYQFREINSIFNLISQPQGKIEFETIDEFKEKRDTIVDAYKENFASQIETFFSNPEASIYDLCFIQNLYEKPIEEMLEEQFSLEIDDILSNPNHYVLKRIFKPSFNSIKIEGLVNYFETKFRYMIRSKLREFIFSPELATAITEKLKEIRSTLSENIKTPQFKELTIQINNYHPYDYNFDFDLNTMEFLILNDRKGQFSEKWKGFFKDIESFSKSVRILSRYELFKEWEIFKDAYPELFDGSIKSFDSKRSTKSIKNFLANIPLREHPKKNYLYYPFALKMIPDEMIPFRLRDGLRKKGKICRNRIFEMKQKGYKPSHPTLTFKNRKLLIHIPFQKTEVQSNPTSSQNKSGVELQVDQGLIHFAVITLRDMSKGKYGTFMPEKQYFIGQEELFDKKFDPKSGKIILQDKFKGKDGELREENCKKTNIKRKLINIRREIRRLQKSKNEYEQRCLELKVDYKRKYKWNRIRRELSKCWNKLNNINSQIVQYTTHYIIAIANHSNAWKINVEDLGWSAYKKKKDAGNYLAFWRVQWFFSQLQSAVETQCKIHGLEFERVRADYSSQECSKCAEMGIVHRGKRKGKTFICTNHPKPFIIDSDLNASRLLAFRSSTCPENIYASQNAVS

SEQ ID NO: 41919 - protein, 342 aa, unknown
  TnpB Polypeptide
MLAERIEIYEKYKGDKEKLKKQKLPTPAKYKSEFEWLKEVDSLALANAQMNLQTAYNNFFRDKNVGFPKFKSKKRDKNTYTTNNVNNNIKIIDNKIKLPKVGFINVKFHRQIPNNQIIKSCTISKTPTGKYYISILVEFEQQIEQKQINFNNVLGLDYSQHELYVDSLDKTANYPKYYYIMLDKLKREQRKLSKMKKGSNNRNKQRLRVAKLHQKVANQRKDFLHKKSKELIDRYDAIIIEDLNMKEMSQKLNLGKSVYDNAWGMFTIFLKYKLEWQGKKLIKIDKWFPSSKKCNECGEINQALQLSDRIWICKECGCIIDRDYNAAKNIRDEGIKILGLIN

SEQ ID NO: 41920 - protein, 517 aa, unknown
  TnpB Polypeptide
VLIKDMVTVQAKLIFEGGEDKQRVLDLMRRWSSCMRYAYKRLLEGYKRNELKRQLQGIFNLNSRYVDDAIMKAKSVLNSCKERRESPKKVIFGGRQLFEKLQKRHINGDQYRKLQLKWQEKRKGNLYSRGDRSKKGNLNTRIEIDGSLTKLRINVGEKEYVYATIQPGWKVKGGTYRDRNQLLQAISTLGEPYSVELKLKNSVVYAYFTVEEIFPKSEITKSNGVIGIDTNAYPKHIAWVETDEQGQLLEYGRIPMPELESGISSKREYYRWQYAHMIVEMAKDNQKAIVIEKLNIKDKGKRGDFSGRKSRRIRHYFGYRLLLEKVKLLAKREGIEVIEVNPAYTSLIGMLKYAPQFMVSKDVAAAYVIARRGLGLRERIPHNYMMFLSRLDVNELEELKEYVRKVVKNTYVRKKQLREIGRVIKFLQSLGSEAERLSVPLDGTSTGSRGENHNLWRVLKVAVVTPLSPDRVLRDMSVLKSLLVSGQVGKTYKGVSSCFLGQGLWLSQKPPAGAGKA

SEQ ID NO: 41921 - protein, 394 aa, Actinomadura sp.
VKRAFKYRFYPSDAQVTELARTFGCVRKVYNLALVARTQAWRERRERVDYNQTSAMLTAWKRTEELAYLNQVSSVPLQQALRHLQVAFTNFFAKRAKYPRLKSKKKSRKSAEYTASGFRFREGALTLAKMSEPLDIVWSRPLPVDARPSTVTVSQDAAGRWFVSLLVEDPDVTSLSCADTAVGIDVGLDYLLTLSTGEKIANPRYERRDRARLARAQRRLSRKARGDGANRAKARHKVAKIHARIVDRRRDHLHKVTTRLVRENQTIVIEDLAVRNLVRNRKLARAVSDAAWATFRGMLEYKAAWYGREVIAVDRFFPSSKLCSTCGALAEAMPLHVRTWTCDCGTTHDRDVNAARNLLAAGRAVSACGAGVRPQRRTPGGRSAGKQEASQRER

SEQ ID NO: 41922 - protein, 345 aa, unknown
  TnpB Polypeptide
MVLESNIPLGIKTVHNLCYDVLRAEFPMLSSQVIVKTQQEVAANLKSIRSNKHFTNTVIKENKSLRLDKRLYSNLTPTSISLPCKKSYRETVSFVLYNEFNKLASQYPMHDPLIFERNGRLFLSVSFEVQEKPYLGETCLGVDLGIRRFVTLSDGRAIVNKKYLARKRKMRYIKRVYQEKKSFRRLVATRRKERNMSKQNVYDVANEILKTDASVIVMEDLSKIKQNTSKHENGQKRTSHNNRIGQIPFYKLKEVLTYKAQLIGKRVETVSPLFTSQKDCRTDKKDGTRVGCRYYCKDGVVLDADWNAAVNIAKKSKHPISFEPPIDGCLNFIGRAQSTVQSQNR

SEQ ID NO: 41923 - protein, 390 aa, Streptomyces sp.
MVRVVKIVVRVKLEPSAYQADALAATLRACNRAANHVSEVAFRTGEKRRNGLQSMVYRQVKEDFDLSAQPAVRVVKKVCDAYATLKANVRAGNLGLKGSKRRNKAEAKPISFREDAAQAFDDRCLSWQAAKRTVSIWTTAGRLKGIRFACSEDAAKMIADHRQGESDLLFRDGAWYLFATCDVSVPAPYEPTDWIGVDLGIVNSATTSDGKVLSGRRLEHYRKRMRTNVAKLQAKRTKSAKRRLKALRRREQRFATDTNHCISKTIVKTAERTSRGIALEDLTGIRERVKAKHDQRYRLHSWAFAQLGAFVEYKAQRAGVPVVRVNPAHTSRQCSACWHTHKQNRVDQATFACRACGMTMHADVNGSRNIRHRAADAWQRGKVNCPTSAP

SEQ ID NO: 41924 - protein, 307 aa, Microbispora sp.
VLQQALADLNTAYRNSFASLTGKRKGPKVAPPRFRSKRDNRQAIRFTKNARFSVTAGGKLRLPKIGDVPVRWSRDLPAEPSSVTVIRDTAGRYFASFVVETAGEPLAKVTPEIGIGLGLTHFAVLSDGRKVDNPRFLRRAERRLRKAQQELSRKEKGSANRHKARAKVAKAHARVADARRDWAHKLSTALIRDNQAVYVEDLAASGLGRTRLAKSVHDAGWPSFVGMLEYKAARYGRHFARIDRWFPSSKLCSQCGALQEKMPLNVRSWECPCGAVHDRDVNAANNILAAGRADRLNACGGTVRPAA

SEQ ID NO: 41925 - protein, 369 aa, Allochromatium sp.
MLIAHKIELRPTPEQATYLNQACGARRHCYNHLLDHFSQPGVTWSKAAAYQHYMTVLRVEFPWYAEVSSRVTRNAIDDLDAAFKGFFRRVKAGSKTPGYPQFKKKDVNDAFALREPAKFDVDGRTLRIEKLPTRIALRQPLRFTGQTKQATIRKTAGRFYVSILVETEDYNPHAPQQPSVGVDFGIKDLATLSTGEVIPANPALKKNLKRLKRRQRTLSRKVKGSRRRAKAKLRVARLHQRIRNQRQAVLHELSDTLTRTYQVITLEDLNVTGMTKNRRLARAVSDAGFGELRRQIEYKAQWRGVTVVIADRWFPSSKTCHACGQLHDMPLSQRTLVCDCGHVMDRDLNAAKNLDQYGRDALRRDLKRT

SEQ ID NO: 41926 - protein, 292 aa, Lyngbya sp.
MILTYVYRIKPSTEQIATIEKWLELLRRHWNYALGERLDWLNRTRCQSDRCSIISEPIGDIPEPVTYYTQQSALKETKRLFPEYKKIYAETQQVNLQRLNKAWERWRKPDATGKRGGRPRFKKQGQLRSFVFPRVNNSKAGAHIKDGVLKLSRIGEIPVVMHRPIPDGFTLKQCTIIKKADGWYACFSVQDDTVPELLPVDEVKSAVGIDVGLEKFLTTSDGEAVPIPQFYRKATDKLATAQRVMSRRVKGSKNWEKAKQKVALLHLHLTRCRKEFHYQVAHWLCSKYDCWS

SEQ ID NO: 41927 - protein, 396 aa, unknown
  TnpB Polypeptide
VVENVNRVKYGFLNKWLKGGNLMILNRAIRMRIYPDDEQRHKINVTLGHCRYIYNKMLERNTVIYNRRKEHLNYYAMQNLLPEMKKYLPWLKEADSQALKHACRQLHTAFDRFFHKTGGYPKFHTKHGKQSYTTTNAKVICVESHRVKLPCLGWIRTPETRIPDGSICYATVSLETDDRYYVSITYKKEVPDITLVVPKPKNVLGLDYKSDGLYTDSNGHTEDIPHFYREAQRKRTKLQRRLSKKHGSRKGEHKSMNFMKQLRKVNRQSTHIANQRRDYLHKLSTEIANRYDAICIEDLDMKTISNKGFGNGKATMDNGYGMFQNMLTYKLAERGKHLVVIDKWYPSSQICHCCGHRQKMPLTIRVYQCQECGMVCDRDLNAAINIKMEGLRLLSA

SEQ ID NO: 41928 - protein, 473 aa, unknown
  TnpB Polypeptide
MEIHTSYSVKIKNRSGSLKDTVSISRDAVQFYIDIMLAEPDLFSSCKELNDCVKVFEIVTIPTKSHPEVKYDFNKRFYKMPCYLRRFVITEAFGKVSSYQSNLKNWEEADPKTRGKKPGHPKAGRCFPVLYKGNMYKNLGESSFTDTYSLKIKAYIRNTWDWITVTLRKSDVDYIKHHCLDRKMQSPTLRQRGRECFLDFPFKEVVKLPETDITNTRILAVDLGINNSCTLCAMDHTGAVLGRHFCKLPREYDRLSHAIGRIKKAQRHGARKTPHLWGAAKGINDNIAVKTASFIMEHAERYKVDTIVFEHLDLGKKVKGSKKQKLALWKARYVQAMVCDRAHRKGMRISRICAWGTSRLAFDGSGRVKRGKESEKTQNNYSLCEFQNGKVYNCDLNAAYNIGARYFIRELTKFYQKSMPATVWQDIGAKVPSCLMRSSCTLSTLISLVAAAGELSAGVAETKPYGGEAVPAA

SEQ ID NO: 41929 - protein, 423 aa, Moorea sp.
MATIINYCYRIYPDSNQEQTMLHWLEISRQVYNYALREIKDWVNSRKCSLDYCSLKREYIIPADKPFPTYYNQQNALPKAKKKFPQLGQAPSQVLQTTIRRLHDAWNYFQQRGFGFPRFKKFGQIKSMLFPQFKTHPITGWQIALPKVGKIPINLHRPIPFGFVVKQVRVLRKADRWFVVLTIESDISIPDPQPHGEAIGIDLGLEKFLTTSDRDFIARPRFLRCLYRQLELLQRKYARTKKGSKNREKARIKVAKFHNHIASVRKDWQFKLANHLCTKEGIGMVFVEDLNLKAMSRGMLRKHTLDAAFGQFLNLLEWVAHKHQVYFARVNPDGTSQTCPQCGTHTGKKKLSERVHKCDVCGYETDRDHAASEVIRLRGLELISTQGLCGRENAYAVGLPGTEFPPSRSEAKPPKRKTRNAKL

SEQ ID NO: 41930 - protein, 470 aa, Coleofasciculaceae sp.
MARSSLSRPVLPPRSRRFVKMTKIIRVSSPALTSTGSVQVQGGLCTIIRERQPNTPVKARNRHRIYPNPLQRRMLARTFGCVRVVFNDVLRLRQESYQTTGTTTSITELQKQLITQAKHTRERWWLAEVSNIALQQSIQDACLAFRNFFQSLKGKRKGQKVGFPRFKRKSNAQAFRLTRGGFSIRDNGKLYLAKIGDIKVRWSRKLPSEPSSVTVIQDAAGRYFVSFVCDVEQIEHEAPNEGVGIDLGIATFATLSMGEKVENPRILQRQLKRLRRLQQSLSRKVKGSKRYQIARRKVARLRARIKDTRTDFLHKLSTKIISENQAIVLEDLNVSGMVRNRRLARAISDVGWRQFRAMLEAKSIRYGRDFHIISRWEPTSQRCSSCGKLGGKQSLDVRVWMCLYCGAEHDRDLNAAVNIKQAAGGHSEALNACVEQRRNARGGLHQSDSSAAADEARTRLEVEQFSLFTC

SEQ ID NO: 41931 - protein, 401 aa, Microcoleus sp.
MLVFESKLEETNEQYERLDEAIRTARFVRNSCIKYWMDNKGTGRYELSAYCAVLAHEFPWANKLNSMARQASAERAWSSIARFYDNCKKGKPGKKGFPRFKKHETHGSVEYKTTGWKLSEDRRSISFSDGFKAGSFKLWGTRDLHFFQLEQIKRVRVVRRADGYYVQFCIDTKRVEKREPTGKTVGLDVGLAHFYTDSDGTSVENPRHLRKSEKALKRLNRRLSRTQKGSKNRAKARNRLSKKHLKVSRQRKDFAVKLAKCVVQSNDLVAYEDLQVRNMVKNKKLSKSISDAAWTAFRNWVEYFGKVLGVVTVAVPPHYTSQNCSSCGKATKKSLSQRTHRCNHCGFVLDRDWNAAQNILELGLRTVGHTGTSNASGDIDLCIGEETPQCKSSRRKRKPKQ

SEQ ID NO: 41932 - protein, 407 aa, Streptomyces sp.
MRLRYAFRLDPSPGQRSALARAFGCARVVYNDAVEAREQARAAGQPFPTAAVLSRTLLTEAKKTRERHWLGKVSAVVLQQALRDAEAAYRDFSASLKGERRGPKLGAPRFKSRKDVRQAIRFTANARWSLAPTGRLSLPKIGEVRVRWSRSLPAVPSSVTVVKDAAGRYFASFVVDTDPAADAARMPDTGRSVGIDLGLTHFAVLSDGTKIDSPRFLRRAEKKLKKAQRELSRKQKGSKNREKARRKVARAHARVADARHEFHHQLSTWLIRENQAVAVEDLAVRSLARTRLAKSVHDAGWSQFVHMLAYKAARYGRTFVKVGRFEPTSQVCSTCGHRDGPKPLAVQEWACTACGAAHDRDHNAAINVKQAAGLAVTACGAPIRPDPGPAQRGEAGSRGIRTGTRAA

SEQ ID NO: 41933 - protein, 395 aa, unknown
  TnpB Polypeptide
MRLVERHIVKDNRFEDICLKSGLLYNYVLFNVRQGIFSGDYINEYEFSTKLCKENQVDFRNLPSVVSQQVVAQVFSVTKSWMKSKKEYEKNPSKFLSRPKLPKYKRGKKQNMVVFTASACRLKSDGYIHFVKNIISPIKTKIGDNKLCQVRIIPQATCYVVEVIYEKKEQDLNLNKDNVLSIDLGLNNICTCISNVGISPFIVNGKVIKSFNQWYNKKKARLMSLIGDKGTSRRINKMTCYRNCWISDKIHKISRYIIDICRSNNIGTIVIGQNRGWKQEINLGKRINQKFVEIPFSDLINKISYKAKLIGINLITHEESYTSKIDHMAFEPLKKQDAYLGKRKRRGLFQSSIGKLINADINGAIGIGRKVFGDSYVSRIIDSGLAFNPIRINIL

SEQ ID NO: 41934 - protein, 407 aa, Halomonas sp.
MFLLVYIGYIVARNTDMLKATKVRIYPTSEQAEFLNRQFGAVRFAYNTGLRIMSHRYKRHGQSLSAKHDIKKLLPIAKRSRKYGWLKEADSVALAQACINLDKAFQRFFDPKQKAGYPRFKSKRGKQSSYHCMSVKAGENWIKIPKLDPIKAKVHRPVEGKLKSITLSRTVTGKHYASLLYETEQATLAPLVNVDAANIVGLDMGLSHLAIDSTGRKTANPRFLKQAQKNLKRKQQALSRKTKGSANRAKARLLVAKAHERVANARNDFQHKLSRQIVDDNQAVIVETLKVKNMMKNAKLAKHIGDASWHALITKLEYKAKEQGKHLVKIDPWFASSKTCHVCQHRLGGMTLSVREWTCTSCGSHHDRDINAALNIKHQGILKLKAEGLSVSAHRGSRKSGMSPVAA

SEQ ID NO: 41935 - protein, 465 aa, Streptomyces sp.
MADSPEKPVRVTGAEAKRIKRDGLGIADRRKHHSRPATPMKRRAKESGTQQRVYRFRFYPTPMQAEQLEQTFGACRWVYNEGLALRSGAWEQHRVSVGFAETCRALTGWRRSDATSWLRDVSSTVLQQALRHLEGAYSRFFKGTATYPKRKKKHRSRDSATYVRTGFRWVEDPERPGTGLVTLAKQPTPLDVRWSRALPGGQVPVKLTVTRDRAGRYFLSVLVEERILPLPAAFLPGGEPKAVGLDLGLAALVTLDDGTKLDHPRLLKKYADELARKQRELHRKKKGSKNREKARKRIARLYVLIGDVRRDMLDQFTTRLVRENQVLVVEDLCIANLMRPTVGKGRRRKARLNQAIRDAAWGELLRQLRYKCEWYGRTLVIVDRFFPSTRRCSACHTKGPRLDVSVREWTCPECGVVHDRDENAAVNLRDEGMRLYWLVAAALPPGRVPPSVIRASELAEVLLAA

SEQ ID NO: 41936 - protein, 324 aa, Streptomyces sp.
LSSQQATLRRLDKSFAAFFRRIKAGDTPGYPRFRGVNWFDTVDFPKDGDGCRWDSTPHDSVTRVRFQGVGHVKVNQHRTVVGKVKTVSVKREGRKWFVVLTSEHNQPEPLPKTGSVVGIDLGIASFLTDSNGVHVPNPHHARKAAAKLEAAQQALFRFPRRKAKDRTRNHQRAVEKVATLHGKVRRQRLDHAHKTALGLVREHDFIAHEDLKIRNMSKAPAPKPDPETPGSFLPNGAAAKAGLNRSIADAGWGVFLAILKAKAESAGREVMAVDPRNTSRTCPECGHTAKENRPIQEKFHCVSCGHQAHADKVGALNVLRAGLV

SEQ ID NO: 41937 - protein, 365 aa, Candidate divison MSBL1 archaeon
MMVEKTIVCRILGLTGRKEGLVVKEYSNAQGYIRGEVEDLYSATKQAMDKYVEKVQNEEYPLFLRNDTFTVEKARDTEEFDYWARIPISGIWGGVWVPIKPHEDITGDMDIRDSKIVWKEYGFELHLSVSFEVSSQDPESILSVDLGERVMATETVFPADNGNPRFHGRGVRGVRRHFAWLRKRLQEKGLGKKVEEMSDKERRKVEDILHKISRKIVDRAGKNNSLIVLGDLKGIGNKDTGKGKRMNRIANSFPYWKFRKMIEYKAREKGLLVVHINERNTSKTCHKCGSENTSRPAQGRFDCKTCGLDNYNADLNGAKNILQRFLAYMVGNGASVNKPITEAYSEKHKIENLEQVLGSSLLTSS

SEQ ID NO: 41938 - protein, 450 aa, Moorea sp.
MQLGYVYKLIPSSQQEATMNRWLDMLLAQYNYLLRDRNESYEQVKSPKLGNYCDLKTHGEACPLSCSVNKSSSIGYPWKKSQKNPRRSAYEVQSSSLPSLKKQRPWYKAINSTVLQQMLRQLDVAFSKFFKGEAKYPRPKRRYRFRSLKYAPGQVKLDGNRIYLPGIGWMRFHNSRPIPDGFTMKSVTVRRQSRGWFVSIQIEDKSVPVPPVKTKHEIRPDRVKGCDLGIRKLLSISDGEIVQNPANSKKSKRQTRRLRLRQRAASRKKKGSNNRKKAFSKVASLHERVTNKRSAYHWETAKNLSNGADALVFEDLNIKGMKSRCKPKPKDLGGYDRNGQSAKKGLNRVISDAAWGELVKKVEVVAAKSGIPVIKINPKHTSQRCPKCHHTSADNRKGEKFVCTECGYHDDADINGAVNIKMRGLKKLGINPTQLPSVRRKVTPMDITAV

SEQ ID NO: 41939 - protein, 470 aa, Clostridium sp.
MAKKKYYNTVQRVEKHIINENHELYKLLNHYAFLSKNLYNYANYQLRQVFILTSKLKEGKEITFEQHEYLNAINAKVDKFNELREVNFQKAKQRAIEQGKELNKKLKLINYFNENNKYLGYNFLEYLVKDGIDYKSLMAQVSQQTLKLLDKNWISFFESIKDWSKHKEKYNGRPKLPNYKKKNGKNILVFTNQNCKQKKGYIQFPKCFNKYELKTNINGNLQQVRILPRNKHYVIEVIYKIEKKEKLNDNGKYISIDVGLDNFATVVNNIGLKPIIINGKGLKSINKYYNKKLSYYKEIAKRMNNLDYTNRMNRLTIKRNNKIIDFIHKASKKIIDYALKNNINTIIVGNNKDWKRKSNMSKVVNQSFVGIPHQEFINKLIYKCENVGLSIIITEESYTSGTSFLDNELPIKENYNKKRRVYRGLFVSNNGIKINADVNGAYQIMRKVFSNVKADEIEGIGLSPIRVNIA

SEQ ID NO: 41940 - protein, 216 aa, Clostridium sp.
IKSCTISKTPSNKYYISILVDTENKQLPKVDKKVGIDVGLKEFAITSNGEFFSNPKWLRKSEKRLRKLQKDLSRKQKGSNNRCKARLKVAKLHEKITNQRKNFLHKLSIKIIRENQSIVIEDLKVKNMLQNHKLAKAISEVSWYEFRTMLEYKAHWYGRELIIAPSNYASSQICSNCGYKNKEVKNLELREWVCPKCGIHHDRDINASKNLLKLAI

SEQ ID NO: 41941 - protein, 402 aa, Methylacidiphilales sp.
MIVFEAKLEGQNEQYRALDEAIRTARFVRNSCLRYWMDNKDIGRYDLNKFCAVLAANTEFSWVSKLNSMARQSSAERAWSAIARFFDNCKKSKPGKKGFPKFKKEQTHGSVEYKTCGWRLDDDRKYITFTDGFKAGTFKLWGTRDLHFYQLKQFKRVRVVRRADGYYCQFCIDQERLESREPTGKTIGIDVGLSHFYTDSNGETIANPRHLKQSEKSLKRLQRRMSRTFFGSKNRIKFRNKLGRKHLKVSRQRKDFAVKTARCVVKSNDLVAYEDLQVRNMVKNHRLAKSISDASWSLFREWVEYFGKVFGVATVAVPPHYTSQNCSNCGQTVKKTLSTRTHVCPKCGHIQDRDWNAARNILEKGLSTVGHTGTNVSGETDQYLGGETPSSKSTRGKRKPRE

SEQ ID NO: 41942 - protein, 313 aa, Paenibacillus sp.
LFSRDSAKQAKNQGLNNKYPYKIKKFFNTKWVDKAFKVVGHTVELSLGVRNGKRQQPIRITVPNLPHAEIKEIELVFDRKLMISMSYDDGNIAKENTGTQTAGVDLGEIHTITATTTSGNSIMVTGRKVRSIHRMRNKKLAEIQRLMSKCQKGSRQWKKYYRAKRYILSKSERQLRDTIHKTTRLFVQWCTENEVKEVVIGQVEGVQRNTKKKRKKTVNQKVSNWSFGKIQRQLRYKLEEYGTSVKTIDESYTSQQCPCCGRRKKISTRNYKCSCGYKEHRDVHGSKGILSKYLYGDIRYLGETQEVKYLRIA

SEQ ID NO: 41943 - protein, 483 aa, unknown
  TnpB Polypeptide
  misc_feature (338)..(338): Xaa can be any naturally occurring amino acid
MDPTVSKKPQPQRDEEQKKRTRKKKSKQTITRAVPHIPLSEANPGKLDALDQLVVVFQALCQQYVTLWCTTDDPPDRYATPVFASQLSERWQRVAMQQAAGIATSWHTNRQAAYDAYLEDGADYAEAAARAEERGISLGSTRTEPVWREWNVPELRVPSIQANANVVVIEPSEDSTFDYWLRISTLDKGKLLRVPVKLAAYHKEALTEKKLNTSTTLCKRDGCWWLTLSFDEEVPLQTEKDAPIVGVDVGIANFLTTSTGKQYGTFHGNLARRHKRDREKRRRKAKLRACLKKKGVRNLPSTSSVTGQRLTRHVRQEINRAVTLMIQDDASARIMYEXLSVASMRFKARSMNAYLSASNLAHIPKQIKWATAKRGMAAHPVKAAYSSQECSRCHSVDRANRANQQTFCCVRCGYQDHADHNAALNLASRWGDQELAACQKKGQIKVLLLRRHEECKQRLGLAVVQPAVQLGLWDDPPTSTDVA

SEQ ID NO: 41944 - protein, 497 aa, unknown
  TnpB Polypeptide
MYNIHIEQVFVNRPWGRRCALDNICSYGVKITGHNWRIFNDTVDLFQKVVSFLIDVCSERYDGWKGLKDNEAQQYIDHLIHSTKSRKAAYPAFDRKFYKIPNVFRRAAIDRAKGIVSSYRSQLSNWENSDRKGRKPRLSRHQNVMPCLFNRDAFKRVDEQLCDIKLLKNNDWVWVRFKLRKSDIKYIKNNLSDLKASAPVLEKRMHNYWIRFTYKRYSYLPEYTVDKFSKTKNRYLQFLDKVCAVDLGVNTDAVCSIVCHDGTVTARSFINAPVEKDRMYHMLDEIKASQRLGNKHHNRLWRFVDNYNTAIAVHAAAEIVQFALINNAKVIVMEHLKMEGKLKGSKKQRLHLWRKREIFNRVTELSHKYGLRMATVNPWNTSRLAFDGSGKVERGINGNYSICRFQNGKVYNCDLSASYNIGARYYIRLLLEQLPATEAAGLKAKVPETLSRTKCTLSTLITLNAELRSLRRSPEFCGLSVEEKSVPSKEEKCHAAA

SEQ ID NO: 41945 - protein, 510 aa, Thermodesulforhabdus sp.
MRNFSACIRYAYNRLLEGWNRKDLKKHLQSVFPLNSRYCDDAILKARETLNACIERKQNPKKLIFGTRHLFEKLKKRHITGKRRKELIKEWKEKRQGTVYSRGDKTKKGNLNIRFVFLEKTLYLRINTGKGRYVYTKVHRNVQKGRAQKDKWVNFVESLAIGESTKKYIPYSVELKKRSGKIYAFVSFNEELPEVSITKESGIIGIDVNASPFHIAYAEVKRDGNLRAYGKINLSNFIGKSKETRELLSWQVAHQIVNLARERKRAIAIENLKKLPKGKKGDGRRKLRRRLQQFIYKGLLQKIEILARREGIEVVKVNPAFTSVIGQLKYSPQYGIDKDVAGAFVIGRRGMGFKEEIPENYLKLLSKKEILEYSLYMLKEKKRELKERLEKENNNWKKNAIKTELRTINIEIKMANKQLKDIQSPESNPATRQQASGGNKPVRGLLDKRQKSWKVLRAVLTFPILGKSFVRDFSPLKTVLVSGDWKRVVRRSVPVPGAGTTAQYANVQFW

SEQ ID NO: 41946 - protein, 377 aa, unknown
  TnpB Polypeptide
MIVSKAYKFRIYPTKEQEILIAKTIGCSRFVFNRFLGRWNDTYKETGKGLSYHSCSAELTHLKKELAWLKEVDSIALQSSLENLANSYSRFFKKQNKAPRFKSKKNQVQSYTTKETNNNIAIVDNKIKLPKLGLVRFAKSRALEGRIIRATIRQNPSGKYFVSILAETDVQPLEKTESSIGIDLGITDFAIFSDGRKIDNNKFISKMEKKLKREQRKLSRRALNAKNKGISIIDAKNYQKQKIKVARLHERIMNQRDDFLNKLSTDIIKNHDIVCIEDLNTKGMLRNHKLAKSISDVSWSAFVSKLEYKAKWYGKTIVKISRWFPSSQICSDCGHQDGKKSLEIRDWMCPVCHEHHNRDINASKNILAEGLRTLGLA

SEQ ID NO: 41947 - protein, 514 aa, unknown
  TnpB Polypeptide
MRAQTPSYVVSTKVLLPESIIKRLEKSFRISNSAYNDALSFGLKHFEVLKQNSEYQELLEVRRLAVEKLTALKKAKKKDKVLSKQVKDYNDALFELQKTYGLTEFELHKYLAHQRRKPGSPYQQFNAGEIQVIVTQAYKTLEKVLFYQIKPHKVRFRSKFDLDVSFRNRVNTTGTRLEPSDRKGFAYRLYIHKASTFVDIPVKAFNKYQQMSLLRSEKIKYVQIIRKTIRGKKVYYLQIVCQGFPPSNVTKGEGVVGIDPGISTVAFASPSEVALVDLVPQNITQKEKLLKQLDRKIERSRRVNNPECYKENGTIKKGARFKRPSNRQMRLQTRRRKAYRSLSEERTKHRGQLVSRLVSQASSIRIEELNVKGLQKRSRDIRINPKTNRPYSKKRFGKAIFRAAPSSFRTALEARASQLGIDVETISPKDVKPSQYNHITQTFEKKSLSTRVYDLSDEYLGVQRDLYSAFLIGHIENGHYQQEQLNQDFPDFYQQMKDFLHQPIETKRLVWYLN

SEQ ID NO: 41948 - protein, 416 aa, unknown
  TnpB Polypeptide
MQLTKKVRLYPNKTMAKILDNLCNYRRYCWNQGLELWYDLYDQRIEMVPASLRQKSQLVIKDKTIMFSKEEQELLDMFPSPSERVVRDLMIRDKDDWQRRLSSQVLPLAIRDLANAWSAFFNNQKSKTKKRKVGKPFFQTKKNTKQGFKTNYARIKNGKLVLDKPQVYKGDWYGISFKGYDLPDGKIKHCVITKVNNKYYASLAVDCPEQSLPKTNQKTAINANVNHFDYTDGSFVVCPKQLDVLYEQIKHYQRVLARKRKVNGKKATQSNQYFKARTKLQRCYKRVTNIQNDLLHKFTTEIYHNYDTVVIEDLDVKTMQMSKKAKNLHRSLFGRFRLYMEYKADKFGKTLILADRYYPSTQRCSNCEHVKTGDDKITLQGNKKHGTKHNEYICYECGFEADRDKNAVLNLLALAK

SEQ ID NO: 41949 - protein, 414 aa, unknown
  TnpB Polypeptide
MAKVLDNLCDYRRYCWNQGLELWNDLYDQRVEMVPTSLRKKSQLAIKDKTIKFSDKEQELLDLFPSPSYYVVQNLMVKDKGDWQYLLSSRVLLWAIKDLANTWSAFFNDKKSKSKSKSKSRSKSKTKKLKVGKPSFRTKKNPRQGFKTDRASIKNGKLFLDKPRAYKGNWYDISFKGYNLPDGKIKHCSITKINNKYYASLVIDCPKQSLPKTSKKTAIDANVNHFDYTDGSFAVCPKQLDVLYGQIKHYQRLLARKRKVNGKKATRSKQYFKVRTKLQKCYQRVTNIQNDLLHKFTTEIYHNYDTVVIEDLDVKAMQMSKKAKNLHRSLFGRFRFYMEYKAEKFGKELIIADRYYPSTQRCSNCGHVKTGDDKITLSGNKKYGTAHNEYICYECGFETDRDKNAVLNLLALAK

SEQ ID NO: 41950 - protein, 399 aa, unknown
  TnpB Polypeptide
MKTVLDSLCDYRRYCWNHGLELWNVLYEQRVEMVPASLRKKSQLAIKDKTIKFSKEEQELLDMFPSPSHYVVQNLMVKDKEDWQYLLSSRVLQRTIRDLANAWSAFFNSQKSKQKVGKPSFRTKKNPKQGFKTDRARIINGKLVLDKPHAYKDDWYGISFKGYDLPDGKIKHCAITKVNNTYYASLTIDCPEQHLTKTGKKTAIDANVNHFDYTDGSFAVCPKQLDTLYAQIKHCQRMLARKRKVNGKKAAQSNQYFEVRTKLQRCYRRAANIQNDLLHKFTTTIYHNYDTVVIEDLNVQAMQMSKKAKNLHRSLFGRFRYQMEYKAIKFNKDLIVADRFYPSTQRCSNCGYVKTGDDKITLSGNAKHGTKHNEYVCYECGFEADRDYNAVLNLLALAK

SEQ ID NO: 41951 - protein, 447 aa, unknown
  TnpB Polypeptide
MTKTTTQDTLALTIKLKILPQSQKQIDTFNQSMIAYRDACNVVSQYIFDNILQAIDSRSLQSLLSYVNLQMTAKINDKRIYEIFRDQFQLPSQLACEVFKTVITNYKTVQTQLKKEKIATDFEYDSDGNIVYYQKGKHKGKPKLVYTYKDLSFLAKPLYYKKPQIALPASRSYSFIDDFSKVSINSLDGRIKLPFKLTAYQKRLLTDKTWKRGNARLVKTGGNWFLHVSFTKPIFEKDISQYSNIIGIDAGLRKIMTIYDVKTKKTHFKNGQFVKKKRQHYAKKRQSLQSKGTKSAKRRLKRLSGRENRWMTNVNHCLSKTLVEKNPDTLIVVEDLTNVTFDTVRNRKKENRYEHHSWAFYQLQQDIAYKAREHGSLLIKINPAYTSQRCPKCGTICKENRDKTNHIYHCNNCHYQSNDDRVAAINIAYLGQLKQNGVKKPSFKTHT

SEQ ID NO: 41952 - protein, 444 aa, unknown
  TnpB Polypeptide
MKGEYMLKHKFTVVSQLHEANNSDIIHYFESARFTYAKAVRQSFHIIKNKSTFNKSYYNTAIQSEFGILKRTANSIISDAQGRLNALKELKQFEKKQLAYKIESLEQLIEKLQQQKITNIKKLQQGKAVNLIKHRNLKRRLVVKKAQLNQLTQKYQNLVYQIDNNKYKLCFGSKRLLQSDYQAFAEQRDSQISFVGCKAEPSCNQMLQLEFNPKNNQFRIKLRKDIGGFKSSDDKYAYGQVYFNHHKNIIKHILRDKNSPLSFKIIKKNNRYYLHCTFEIRVESEEFKTRSTYGTIGLDFNKGFVTLSETNQYGHLVKTQLLPYRFKSGHKTTTDLQKIAKQVITLALETGKDICIENLDFKRTKAKTQRRQNKKYNEMLHSLAYRQFVDSIEQCGYRHLVYTKRVNPAWTSWLAKRNYCPTMKLNIHIGASYVIARRGQGYTK

SEQ ID NO: 41953 - protein, 539 aa, unknown
  TnpB Polypeptide
MVESLKWIATIPTPSLANIGKIDITNDLLAPYSDLMVHFLSDINLRFVRDNEYLSFTKAKPYQTKDDYNKLLESCKKRYARQLEKGLTLKESLDNQLKTIETYAVQTPLSARYVQTCYKQTLETYSSWLTSLEDKVRAILVGSSIVDDHFLATCYRINKLHLWHHSSVELTWHQTKDGELLVPSKTYKANVTLPVSSDILFFMRKLIKRARKCIRFPQLKRVKTLKLDENVAVLEVSKHATHFDYFLKLSTLQKGKPIYLPLKRNPYLDDCLKKGERLPFVQVRLTDKTCTISTIVGYDKAPLRSSTESIGLDFGMVAMFATSDGERHGLSSFTKLKIWDDELLALTKELQQQSIRLSTNARYNQLQRRIKSYFKNEIGRILNKLAKKNVGVFVVEKLDFRAAGLSKRMNRLIGRTYRSFVKAKLARLEEQYGIQIIAVNPAYTSQECSRCHYVSKDNRKTQKDFVCRHCHYSCNADVNAGRVINRRRSLMLEFPVYKKNSTSYTVRCRVQEASKICHKRYCHDNGLMTYEEALAKGSL
